United States Patent Application Publication US 2018/0126003 A1 - sequence listing, part 155

SEQ ID NO: 271929 - DNA, 5877 bp, Artificial Sequence
  derived and/or modified sequence
atgatggccaccagaagaaccggcctgagcgagggcgacggcgacaagctgaaggcctgcgaggtgagcaagaacaaggacggcaaggagcagagcgagaccgtgagcctgagcgaggacgagaccttcagctggcccggccccaagaccgtgaccctgaagagaaccagccagggcttcggcttcaccctgagacacttcatcgtgtacccccccgagagcgccatccagttcagctacaaggacgaggagaacggcaacagaggcggcaagcagagaaacagactggagcccatggacaccatcttcgtgaagcaggtgaaggagggcggccccgccttcgaggccggcctgtgcaccggcgacagaatcatcaaggtgaacggcgagagcgtgatcggcaagacctacagccaggtgatcgccctgatccagaacagcgacaccaccctggagctgagcgtgatgcccaaggacgaggacatcctgcaggtgctgcagttcaccaaggacgtgaccgccctggcctacagccaggacgcctacctgaagggcaacgaggcctacagcggcaacgccagaaacatccccgagcccccccccatctgctacccctggctgcccagcgcccccagcgccatggcccagcccgtggagatcagcccccccgacagcagcctgagcaagcagcagaccagcacccccgtgctgacccagcccggcagagcctacagaatggagatccaggtgccccccagccccaccgacgtggccaagagcaacaccgccgtgtgcgtgtgcaacgagagcgtgagaaccgtgatcgtgcccagcgagaaggtggtggacctgctgagcaacagaaacaaccacaccggccccagccacagaaccgaggaggtgagatacggcgtgagcgagcagaccagcctgaagaccgtgagcagaaccaccagcccccccctgagcatccccaccacccacctgatccaccagcccgccggcagcagaagcctggagcccagcggcatcctgctgaagagcggcaactacagcggccacagcgacggcatcagcagcagcagaagccaggccgtggaggcccccagcgtgagcgtgaaccactacagccccaacagccaccagcacatcgactggaagaactacaagacctacaaggagtacatcgacaacagaagactgcacatcggctgcagaaccatccaggagagactggacagcctgagagccgccagccagagcaccaccgactacaaccaggtggtgcccaacagaaccaccctgcagggcagaagaagaagcaccagccacgacagagtgccccagagcgtgcagatcagacagagaagcgtgagccaggagagactggaggacagcgtgctgatgaagtactgccccagaagcgccagccagggcgccctgaccagccccagcgtgagcttcagcaaccacagaaccagaagctgggactacatcgagggccaggacgagaccctggagaacgtgaacagcggcacccccatccccgacagcaacggcgagaagaagcagacctacaagtggagcggcttcaccgagcaggacgacagaagaggcatctgcgagagacccagacagcaggagatccacaagagcttcagaggcagcaacttcaccgtggcccccagcgtggtgaacagcgacaacagaagaatgagcggcagaggcgtgggcagcgtgagccagttcaagaagatcccccccgacctgaagaccctgcagagcaacagaaacttccagaccacctgcggcatgagcctgcccagaggcatcagccaggacagaagccccctggtgaaggtgagaagcaacagcctgaaggcccccagcacccacgtgaccaagcccagcttcagccagaagagcttcgtgagcatcaaggaccagagacccgtgaaccacctgcaccagaacagcctgctgaaccagcagacctgggtgagaaccgacagcgcccccgaccagcaggtggagaccggcaagagccccagcctgagcggcgccagcgccaagcccgccccccagagcagcgagaacgccggcaccagcgacctggagctgcccgtgagccagagaaaccaggacctgagcctgcaggaggccgagaccgagcagagcgacaccctggacaacaaggaggccgtgatcctgagagagaagccccccagcggcagacagaccccccagcccctgagacaccagagctacatcctggccgtgaacgaccaggagaccggcagcgacaccacctgctggctgcccaacgacgccagaagagaggtgcacatcaagagaatggaggagagaaaggccagcagcaccagcccccccggcgacagcctggccagcatccccttcatcgacgagcccaccagccccagcatcgaccacgacatcgcccacatccccgccagcgccgtgatcagcgccagcaccagccaggtgcccagcatcgccaccgtgcccccctgcctgaccaccagcgcccccctgatcagaagacagctgagccacgaccacgagagcgtgggcccccccagcctggacgcccagcccaacagcaagaccgagagaagcaagagctacgacgagggcctggacgactacagagaggacgccaagctgagcttcaagcacgtgagcagcctgaagggcatcaagatcgccgacagccagaagagcagcgaggacagcggcagcagaaaggacagcagcagcgaggtgttcagcgacgccgccaaggagggctggctgcacttcagacccctggtgaccgacaagggcaagagagtgggcggcagcatcagaccctggaagcagatgtacgtggtgctgagaggccacagcctgtacctgtacaaggacaagagagagcagaccacccccagcgaggaggagcagcccatcagcgtgaacgcctgcctgatcgacatcagctacagcgagaccaagagaaagaacgtgttcagactgaccaccagcgactgcgagtgcctgttccaggccgaggacagagacgacatgctggcctggatcaagaccatccaggagagcagcaacctgaacgaggaggacaccggcgtgaccaacagagacctgatcagcagaagaatcaaggagtacaacaacctgatgagcaaggccgagcagctgcccaagacccccagacagagcctgagcatcagacagaccctgctgggcgccaagagcgagcccaagacccagagcccccacagccccaaggaggagagcgagagaaagctgctgagcaaggacgacaccagcccccccaaggacaagggcacctggagaaagggcatccccagcatcatgagaaagaccttcgagaagaagcccaccgccaccggcaccttcggcgtgagactggacgactgcccccccgcccacaccaacagatacatccccctgatcgtggacatctgctgcaagctggtggaggagagaggcctggagtacaccggcatctacagagtgcccggcaacaacgccgccatcagcagcatgcaggaggagctgaacaagggcatggccgacatcgacatccaggacgacaagtggagagacctgaacgtgatcagcagcctgctgaagagcttcttcagaaagctgcccgagcccctgttcaccaacgacaagtacgccgacttcatcgaggccaacagaaaggaggaccccctggacagactgaagaccctgaagagactgatccacgacctgcccgagcaccactacgagaccctgaagttcctgagcgcccacctgaagaccgtggccgagaacagcgagaagaacaagatggagcccagaaacctggccatcgtgttcggccccaccctggtgagaaccagcgaggacaacatgacccacatggtgacccacatgcccgaccagtacaagatcgtggagaccctgatccagcaccacgactggttcttcaccgaggagggcgccgaggagcccctgaccaccgtgcaggaggagagcaccgtggacagccagcccgtgcccaacatcgaccacctgctgaccaacatcggcagaaccggcgtgagccccggcgacgtgagcgacagcgccaccagcgacagcaccaagagcaagggcagctggggcagcggcaaggaccagtacagcagagagctgctggtgagcagcatcttcgccgccgccagcagaaagagaaagaagcccaaggagaaggcccagcccagcagcagcgaggacgagctggacaacgtgttcttcaagaaggagaacgtggagcagtgccacaacgacaccaaggaggagagcaagaaggagagcgagaccctgggcagaaagcagaagatcatcatcgccaaggagaacagcaccagaaaggaccccagcaccaccaaggacgagaagatcagcctgggcaaggagagcacccccagcgaggagcccagccccccccacaacagcaagcacaacaagagccccaccctgagctgcagattcgccatcctgaaggagagccccagaagcctgctggcccagaagagcagccacctggaggagaccggcagcgacagcggcaccctgctgagcaccagcagccaggccagcctggccagattcagcatgaagaagagcaccagccccgagaccaagcacagcgagttcctggccaacgtgagcaccatcaccagcgactacagcaccaccagcagcgccacctacctgaccagcctggacagcagcagactgagccccgaggtgcagagcgtggccgagagcaagggcgacgaggccgacgacgagagaagcgagctgatcagcgagggcagacccgtggagaccgacagcgagagcgagttccccgtgttccccaccgccctgaccagcgagagactgttcagaggcaagctgcaggaggtgaccaagagcagcagaagaaacagcgagggcagcgagctgagctgcaccgagggcagcctgaccagcagcctggacagcagaagacagctgttcagcagccacaagctgatcgagtgcgacaccctgagcagaaagaagagcgccagattcaagagcgacagcggcagcctgggcgacgccaagaacgagaaggaggcccccagcctgaccaaggtgttcgacgtgatgaagaagggcaagagcaccggcagcctgctgacccccaccagaggcgagagcgagaagcaggagcccacctggaagaccaagatcgccgacagactgaagctgagacccagagcccccgccgacgacatgttcggcgtgggcaaccacaaggtgaacgccgagaccgccaagagaaagagcatcagaagaagacacaccctgggcggccacagagacgccaccgagatcagcgtgctgaacttctggaaggtgcacgagcagagcggcgagagagagagcgagctgagcgccgtgaacagactgaagcccaagtgcagcgcccaggacctgagcatcagcgactggctggccagagagagactgagaaccagcaccagcgacctgagcagaggcgagatcggcgacccccagaccgagaaccccagcaccagagagatcgccaccaccgacacccccctgagcctgcactgcaacaccggcagcagcagcagcaccctggccagcaccaacagacccctgctgagcatccccccccagagccccgaccagatcaacggcgagagcttccagaacgtgagcaagaacgccagcagcgccgccaacgcccagccccacaagctgagcgagacccccggcagcaaggccgagttccacccctgcctgtag

SEQ ID NO: 271930 - DNA, 3396 bp, Artificial Sequence
  derived and/or modified sequence
atgatggccaccagaagaaccggcctgagcgagggcgacggcgacaagctgaaggcctgcgaggtgagcaagaacaaggacggcaaggagcagagcgagaccgtgagcctgagcgaggacgagaccttcagctggcccggccccaagaccgtgaccctgaagagaaccagccagggcttcggcttcaccctgagacacttcatcgtgtacccccccgagagcgccatccagttcagctacaaggacgaggagaacggcaacagaggcggcaagcagagaaacagactggagcccatggacaccatcttcgtgaagcaggtgaaggagggcggccccgccttcgaggccggcctgtgcaccggcgacagaatcatcaaggtgaacggcgagagcgtgatcggcaagacctacagccaggtgatcgccctgatccagaacagcgacaccaccctggagctgagcgtgatgcccaaggacgaggacatcctgcaggtgctgcagttcaccaaggacgtgaccgccctggcctacagccaggacgcctacctgaagggcaacgaggcctacagcggcaacgccagaaacatccccgagcccccccccatctgctacccctggctgcccagcgcccccagcgccatggcccagcccgtggagatcagcccccccgacagcagcctgagcaagcagcagaccagcacccccgtgctgacccagcccggcagagcctacagaatggagatccaggtgccccccagccccaccgacgtggccaagagcaacaccgccgtgtgcgtgtgcaacgagagcgtgagaaccgtgatcgtgcccagcgagaaggtggtggacctgctgagcaacagaaacaaccacaccggccccagccacagaaccgaggaggtgagatacggcgtgagcgagcagaccagcctgaagaccgtgagcagaaccaccagcccccccctgagcatccccaccacccacctgatccaccagcccgccggcagcagaagcctggagcccagcggcatcctgctgaagagcggcaactacagcggccacagcgacggcatcagcagcagcagaagccaggccgtggaggcccccagcgtgagcgtgaaccactacagccccaacagccaccagcacatcgactggaagaactacaagacctacaaggagtacatcgacaacagaagactgcacatcggctgcagaaccatccaggagagactggacagcctgagagccgccagccagagcaccaccgactacaaccaggtggtgcccaacagaaccaccctgcagggcagaagaagaagcaccagccacgacagagtgccccagagcgtgcagatcagacagagaagcgtgagccaggagagactggaggacagcgtgctgatgaagtactgccccagaagcgccagccagggcgccctgaccagccccagcgtgagcttcagcaaccacagaaccagaagctgggactacatcgagggccaggacgagaccctggagaacgtgaacagcggcacccccatccccgacagcaacggcgagaagaagcagacctacaagtggagcggcttcaccgagcaggacgacagaagaggcatctgcgagagacccagacagcaggagatccacaagagcttcagaggcagcaacttcaccgtggcccccagcgtggtgaacagcgacaacagaagaatgagcggcagaggcgtgggcagcgtgagccagttcaagaagatcccccccgacctgaagaccctgcagagcaacagaaacttccagaccacctgcggcatgagcctgcccagaggcatcagccaggacagaagccccctggtgaaggtgagaagcaacagcctgaaggcccccagcacccacgtgaccaagcccagcttcagccagaagagcttcgtgagcatcaaggaccagagacccgtgaaccacctgcaccagaacagcctgctgaaccagcagacctgggtgagaaccgacagcgcccccgaccagcaggtggagaccggcaagagccccagcctgagcggcgccagcgccaagcccgccccccagagcagcgagaacgccggcaccagcgacctggagctgcccgtgagccagagaaaccaggacctgagcctgcaggaggccgagaccgagcagagcgacaccctggacaacaaggaggccgtgatcctgagagagaagccccccagcggcagacagaccccccagcccctgagacaccagagctacatcctggccgtgaacgaccaggagaccggcagcgacaccacctgctggctgcccaacgacgccagaagagaggtgcacatcaagagaatggaggagagaaaggccagcagcaccagcccccccggcgacagcctggccagcatccccttcatcgacgagcccaccagccccagcatcgaccacgacatcgcccacatccccgccagcgccgtgatcagcgccagcaccagccaggtgcccagcatcgccaccgtgcccccctgcctgaccaccagcgcccccctgatcagaagacagctgagccacgaccacgagagcgtgggcccccccagcctggacgcccagcccaacagcaagaccgagagaagcaagagctacgacgagggcctggacgactacagagaggacgccaagctgagcttcaagcacgtgagcagcctgaagggcatcaagatcgccgacagccagaagagcagcgaggacagcggcagcagaaaggacagcagcagcgaggtgttcagcgacgccgccaaggagggctggctgcacttcagacccctggtgaccgacaagggcaagagagtgggcggcagcatcagaccctggaagcagatgtacgtggtgctgagaggccacagcctgtacctgtacaaggacaagagagagcagaccacccccagcgaggaggagcagcccatcagcgtgaacgcctgcctgatcgacatcagctacagcgagaccaagagaaagaacgtgttcagactgaccaccagcgactgcgagtgcctgttccaggccgaggacagagacgacatgctggcctggatcaagaccatccaggagagcagcaacctgaacgaggaggacaccggcgtgaccaacagagacctgatcagcagaagaatcaaggagtacaacaacctgatgagcaaggccgagcagctgcccaagacccccagacagagcctgagcatcagacagaccctgctgggcgccaagagcgagcccaagacccagagcccccacagccccaaggaggagagcgagagaaagctgctgagcaaggacgacaccagcccccccaaggacaagggcacctggagaaagggcatccccagcatcatgtag

SEQ ID NO: 271931 - protein, 1217 aa, Artificial Sequence
  derived and/or modified sequence
MAQPVEISPPDSSLSKQQTSTPVLTQPGRAYRMEIQVPPSPTDVAKSNTAVCVCNESVRTVIVPSEKVVDLLSNRNNHTGPSHRTEEVRYGVSEQTSLKTVSRTTSPPLSIPTTHLIHQPAGSRSLEPSGILLKSGNYSGHSDGISSSRSQAVEAPSVSVNHYSPNSHQHIDWKNYKTYKEYIDNRRLHIGCRTIQERLDSLRAASQSTTDYNQVVPNRTTLQGRRRSTSHDRVPQSVQIRQRSVSQERLEDSVLMKYCPRSASQGALTSPSVSFSNHRTRSWDYIEGQDETLENVNSGTPIPDSNGEKKQTYKWSGFTEQDDRRGICERPRQQEIHKSFRGSNFTVAPSVVNSDNRRMSGRGVGSVSQFKKIPPDLKTLQSNRNFQTTCGMSLPRGISQDRSPLVKVRSNSLKAPSTHVTKPSFSQKSFVSIKDQRPVNHLHQNSLLNQQTWVRTDSAPDQQVETGKSPSLSGASAKPAPQSSENAGTSDLELPVSQRNQDLSLQEAETEQSDTLDNKEAVILREKPPSGRQTPQPLRHQSYILAVNDQETGSDTTCWLPNDARREVHIKRMEERKASSTSPPGDSLASIPFIDEPTSPSIDHDIAHIPASAVISASTSQVPSIATVPPCLTTSAPLIRRQLSHDHESVGPPSLDAQPNSKTERSKSYDEGLDDYREDAKLSFKHVSSLKGIKIADSQKSSEDSGSRKDSSSEVFSDAAKEGWLHFRPLVTDKGKRVGGSIRPWKQMYVVLRGHSLYLYKDKREQTTPSEEEQPISVNACLIDISYSETKRKNVFRLTTSDCECLFQAEDRDDMLAWIKTIQESSNLNEEDTGVTNRDLISRRIKEYNNLMSKAEQLPKTPRQSLSIRQTLLGAKSEPKTQSPHSPKEESERKLLSKDDTSPPKDKGTWRKGIPSIMRKTFEKKPTATGTFGVRLDDCPPAHTNRYIPLIVDICCKLVEERGLEYTGIYRVPGNNAAISSMQEELNKGMADIDIQDDKWRDLNVISSLLKSFFRKLPEPLFTNDKYADFIEANRKEDPLDRLKTLKRLIHDLPEHHYETLKFLSAHLKTVAENSEKNKMEPRNLAIVFGPTLVRTSEDNMTHMVTHMPDQYKIVETLIQHHDWFFTEEGAEEPLTTVQEESTVDSQPVPNIDHLLTNIGRTGVSPGDVSGEVGGVYHTVMSLVDSVMSLMDSWNCRKKEDCCPHCSCLVCRNPRFL

SEQ ID NO: 271932 - protein, 1165 aa, Artificial Sequence
  derived and/or modified sequence
MMATRRTGLSEGDGDKLKACEVSKNKDGKEQSETVSLSEDETFSWPGPKTVTLKRTSQGFGFTLRHFIVYPPESAIQFSYKDEENGNRGGKQRNRLEPMDTIFVKQVKEGGPAFEAGLCTGDRIIKVNGESVIGKTYSQVIALIQNSDTTLELSVMPKDEDILQVAYSQDAYLKGNEAYSGNARNIPEPPPICYPWLPSAPSAMAQPVEISPPDSSLSKQQTSTPVLTQPGRAYRMEIQVPPSPTDVAKSNTAVCVCNESVRTVIVPSEKVVDLLSNRNNHTGPSHRTEEVRYGVSEQTSLKTVSRTTSPPLSIPTTHLIHQPAGSRSLEPSGILLKSGNYSGHSDGISSSRSQAVEAPSVSVNHYSPNSHQHIDWKNYKTYKEYIDNRRLHIGCRTIQERLDSLRAASQSTTDYNQVVPNRTTLQGRRRSTSHDRVPQSVQIRQRSVSQERLEDSVLMKYCPRSASQGALTSPSVSFSNHRTRSWDYIEGQDETLENVNSGTPIPDSNGEKKQTYKWSGFTEQDDRRGICERPRQQEIHKSFRGSNFTVAPSVVNSDNRRMSGRGVGSVSQFKKIPPDLKTLQSNRNFQTTCGMSLPRGISQDRSPLVKVRSNSLKAPSTHVTKPSFSQKSFVSIKDQRPVNHLHQNSLLNQQTWVRTDSAPDQQVETGKSPSLSGASAKPAPQSSENAGTSDLELPVSQRNQDLSLQEAETEQSDTLDNKEAVILREKPPSGRQTPQPLRHQSYILAVNDQETGSDTTCWLPNDARREVHIKRMEERKASSTSPPGDSLASIPFIDEPTSPSIDHDIAHIPASAVISASTSQVPSIATVPPCLTTSAPLIRRQLSHDHESVGPPSLDAQPNSKTERSKSYDEGLDDYREDAKLSFKHVSSLKGIKIADSQKSSEDSGSRKDSSSEVFSDAAKEGWLHFRPLVTDKGKRVGGSIRPWKQMYVVLRGHSLYLYKDKREQTTPSEEEQPISVNACLIDISYSETKRKNVFRLTTSDCECLFQAEDRDDMLAWIKTIQESSNLNEEDTGVTNRDLISRRIKEYNNLMSKAEQLPKTPRQSLSIRQTLLGAKSEPKTQSPHSPKEESERKLLSKDDTSPPKDKGTWRKGIPSIMRKTFEKKPTATGTFGVRLDDCPPAHTNRVGDTSPPDFLKSLIQF

SEQ ID NO: 271933 - protein, 907 aa, Artificial Sequence
  derived and/or modified sequence
MPKDEDILQVAYSQDAYLKGNEAYSGNARNIPEPPPICYPWLPSAPSAMAQPVEISPPDSSLSKQQTSTPVLTQPGRAYRMEIQVPPSPTDVAKSNTAVCVCNESVRTVIVPSEKVVDLLSNRNNHTGPSHRTEEVRYGVSEQTSLKTVSRTTSPPLSIPTTHLIHQPAGSRSLEPSGILLKSGNYSGHSDGISSSRSQAVEAPSVSVNHYSPNSHQHIDWKNYKTYKEYIDNRRLHIGCRTIQERLDSLRAASQSTTDYNQVVPNRTTLQGRRRSTSHDRVPQSVQIRQRSVSQERLEDSVLMKYCPRSASQGALTSPSVSFSNHRTRSWDYIEGQDETLENVNSGTPIPDSNGEKKQTYKWSGFTEQDDRRGICERPRQQEIHKSFRGSNFTVAPSVVNSDNRRMSGRGVGSVSQFKKIPPDLKTLQSNRNFQTTCGMSLPRGISQDRSPLVKVRSNSLKAPSTHVTKPSFSQKSFVSIKDQRPVNHLHQNSLLNQQTWVRTDSAPDQQVETGKSPSLSGASAKPAPQSSENAGTSDLELPVSQRNQDLSLQEAETEQSDTLDNKEAVILREKPPSGRQTPQPLRHQSYILAVNDQETGSDTTCWLPNDARREVHIKRMEERKASSTSPPGDSLASIPFIDEPTSPSIDHDIAHIPASAVISASTSQVPSIATVPPCLTTSAPLIRRQLSHDHESVGPPSLDAQPNSKTERSKSYDEGLDDYREDAKLSFKHVSSLKGIKIADSQKSSEDSGSRKDSSSEVFSDAAKEGWLHFRPLVTDKGKRVGGSIRPWKQMYVVLRGHSLYLYKDKREQTTPSEEEQPISVNACLIDISYSETKRKNVFRLTTSDCECLFQAEDRDDMLAWIKTIQESSNLNEEDTGVTNRDLISRRIKEYNNLMSKAEQLP

SEQ ID NO: 271934 - DNA, 3654 bp, Artificial Sequence
  derived and/or modified sequence
atggctcagccagttgaaatctctccacctgactcatccctgagcaagcagcagacctcgaccccagttctaacccagcccggacgtgcctaccgtatggagatccaggttcctccgtccccgacagacgtggcgaaatccaacactgccgtgtgcgtatgtaatgaatccgtgaggaccgtaatcgtcccttccgagaaggttgtggacctgctgtctaacagaaataatcatactgggccatctcaccggactgaggaggtgcgctacggtgtgtcagaacagacctctctgaagactgtgtccagaacaacatctcccccgctttccattcctacaacccacctgattcaccagcccgccggatccagatctctggagccttccggaatccttctcaagtccggtaattatagcggacattccgacggaatttccagtagtcggtctcaggctgtagaggccccaagtgtttccgtgaaccattacagccccaattcgcatcagcatatcgactggaagaattacaaaacttacaaggagtacatcgataatcgcaggttgcatattgggtgtagaacaattcaggaaagacttgactctctaagggcagcttctcaaagcacgactgactacaatcaggtggtaccaaaccgaacaaccttacagggcaggcgacggtctacctcccatgacagagttccacagtcagttcagattagacagaggtctgtgtcacaggagagactggaggacagtgtgctcatgaaatactgtccccggtccgcatctcaaggcgccctgactagtccgagtgtatctttttcaaatcaccgcacccgtagttgggattatattgagggacaggacgagacactagaaaatgttaactccgggacaccgatcccagacagtaatggcgaaaagaaacagacctacaagtggtccggattcacagaacaagatgaccggaggggtatatgcgagaggccaaggcagcaggagattcataagtccttccgcggctcaaattttacagtggcaccctcggtcgtgaactctgacaacaggagaatgtccggtcggggagtgggttccgtttcccagttcaaaaaaatccctcctgacctgaagactttgcagtctaatcgtaactttcaaactacgtgtgggatgagcttgcctaggggaatctcccaagaccgctcacccctggtgaaagtgcgatctaattctctgaaggcgccatcaacccacgtcacaaagccaagctttagccagaagtccttcgtgtccataaaagatcagaggcctgtcaatcacctccaccaaaactctctcctaaaccaacagacctgggtgagaaccgacagcgccccagatcaacaagtggagacaggaaagtcaccttctctttccggtgccagcgcaaagcccgcaccccaatcttctgaaaatgccggcacaagcgacctggagttgcccgtctctcaacggaaccaggacctctccttacaggaagctgagaccgagcagtcagatactctagacaacaaagaggctgttattctgagagagaagcccccttctggccgccagactccccagcccttgcggcaccagtcttacatccttgcagtgaacgatcaagaaaccggatcagacactacttgctggttgcctaacgatgcacggcgtgaagtacatatcaagcgcatggaggaacggaaagcctcttctacatcaccacccggggatagcctggcaagtatccccttcatcgatgagccaactagcccctcaatagatcatgacattgcccacatccccgctagcgcagtgatcagcgccagcacatcacaggtgccgtctatcgccacagtgccaccttgtctgactacaagcgcccctctcataagaaggcagctgagccacgaccacgaatccgtgggcccaccttcactggatgctcagcccaattccaagacagaacgttcaaaatcttacgatgaggggttggacgactatcgcgaagacgctaaattaagcttcaaacacgtctctagccttaaaggcatcaagatcgccgactcgcagaagtcctctgaagattccggctcacgaaaggactcaagtagcgaagtgttttctgacgcggctaaggaaggatggttgcacttcaggccactcgtgaccgataagggaaagcgcgtgggtggatcgatacgcccctggaaacaaatgtatgtagtcctccggggacacagcctgtacttgtacaaagacaagcgggaacagaccaccccctccgaggaagagcaaccaatttctgttaacgcctgcctcatcgacatatcgtactcagaaaccaaaaggaagaacgtgtttcgtctcactacttctgattgcgagtgtctgttccaggccgaggaccgagatgacatgcttgcctggatcaaaaccatccaggagagctctaatctgaatgaggaggacaccggagtaaccaatcgcgaccttatatctagaaggattaaggaatataataaccttatgagcaaggcggagcagctgccaaagacacctcggcagagcctgagcattcgtcaaactttactcggagccaaatccgaaccgaagacccagagcccacactccccaaaggaggagtctgaacgaaagctgctcagcaaggacgacacctccccaccaaaggataagggaacctggcggaaaggcattccctctataatgaggaaaaccttcgagaaaaagcccaccgccacaggtaccttcggagtgaggttagatgactgccctcctgcacatacaaaccgctacatacccttaatagttgatatttgttgtaagctggtcgaagagcgcgggctagaatacacagggatctaccgcgtgcccggaaataacgccgctatttcttcgatgcaagaggaactgaataagggaatggctgatattgatatccaggatgataagtggcgggacttgaatgtgatcagctccttgttgaaatctttctttagaaagctgcccgaaccgctgttcacaaacgataagtatgcggatttcatcgaagctaaccgaaaagaagaccctcttgaccgactaaagacactgaagcgtctcattcatgacctcccggaacaccattacgaaacgctgaaattcctgtccgcccacctcaagactgtggccgaaaacagcgaaaagaacaagatggagccgcgcaatctcgctatagtgtttggccccacactggtgcgaacatcggaggataacatgacacacatggtcacacacatgcccgatcagtataagattgtggagaccctgattcagcaccacgactggttttttacagaagagggcgctgaggagccgttaactacagtccaggaagaaagtactgtcgatagtcaacctgtaccgaatatagatcatctgcttaccaatataggaagaaccggggtgtctcccggagatgtgagcggggaagtggggggcgtctatcacactgtaatgagtctggtagacagcgttatgtccctgatggattcatggaactgtcgaaaaaaagaggattgctgccctcactgctcatgtctggtctgccgaaatccgaggttcctgtag

SEQ ID NO: 271935 - DNA, 3498 bp, Artificial Sequence
  derived and/or modified sequence
atgatggccacaaggaggacaggactgtctgagggcgatggcgacaaactcaaagcatgcgaggtctccaaaaataaagacggaaaggaacagtccgagacagtctctctcagcgaagatgagactttctcttggcctggccccaaaacggttacccttaagcggacgtcccagggcttcgggttcacgctgcgtcacttcattgtctatcccccagaatctgctatccagttctcctacaaggatgaggaaaatggaaaccggggtggaaaacagcgtaatagactagaacctatggacacaatcttcgtcaagcaggtgaaggagggtgggcctgcgtttgaggccgggttgtgcacgggtgataggatcatcaaggtgaatggagagagtgtaattgggaaaacatattctcaggttatagctctgatacaaaatagtgacacaactctggaattatctgtgatgcctaaggacgaagacattttacaggtcgcatactcccaggacgcctatcttaaggggaatgaagcttacagtggcaacgcaagaaacattccggaacccccccccatctgttacccctggctgccaagcgccccttcggccatggctcagccggtagagatttcccctccggattcgtctctgtcaaagcagcagacgagcactcctgtgttgactcagcctggaagagcctatagaatggagattcaggttccaccaagcccaacagatgtggcaaagagcaataccgccgtgtgcgtgtgcaatgagtcggtgcggacagtgatagtaccctctgagaaagtggtggatctcttgtccaaccgcaacaatcataccggtcccagtcacagaacagaggaggtacgatacggtgtttctgagcagacttctctgaagaccgtgtctcgtactacaagtccacccctgtccattcccacgacccacctgatccatcagcccgccgggagtcggtcactggaaccctctgggatccttctgaagagcgggaactactccggacactctgacggaatctcttcctctagatcccaggccgtcgaagctccttctgtatccgttaaccattatagccccaattctcaccagcacatcgactggaaaaattataagacgtacaaagagtacatcgacaaccgtaggttacacatagggtgcaggacaatccaggaaagactggactccctacgggcggcctctcagtccactacggattataaccaagttgtccctaacagaactacactgcagggtcgcagacgcagtacctcacatgatcgcgtgccacagagtgtacagattaggcagaggagcgtctcacaagagcgcctcgaagacagtgtgctgatgaaatattgccctcgatccgcctcccagggggccctcacatcaccttctgttagtttctcaaatcatcgaacccgctcttgggattacatagagggtcaggacgaaactctcgagaacgttaatagcggcacacccattcccgatagcaacggtgaaaaaaaacagacttacaagtggtcaggattcacggaacaagatgataggaggggcatctgcgagcggccaaggcaacaggaaatccacaagtcctttcggggctctaactttactgtcgctccttcagtggtcaactcagataaccgtcgcatgtctggacggggagtgggctccgtgagtcagtttaagaaaatacccccggatctcaagacgctgcaatcgaatcgcaatttccagacgacttgcggaatgtccctgccgcgtgggatctcccaggacagaagcccccttgtgaaagttagatctaacagcctgaaggctccttccacacacgtcactaagcccagcttcagccagaagagtttcgtgtcaatcaaggatcagaggcctgtcaatcatctgcaccaaaactcgttgctcaaccagcaaacctgggtgcggacagactcagcgccagaccagcaggtcgagacaggtaagtcaccaagcttatcaggagcttcagctaaaccagcccctcagagctctgaaaatgctgggacaagcgatcttgagctccctgtgagccaaagaaatcaggatctctccctccaggaggccgaaacagagcagtcagatactttggacaataaggaggcggtgatcctcagggaaaagcccccatccggccgccagacgccacagccactcagacatcagagttacattctcgcggtgaatgatcaggaaaccgggtctgacactacatgctggctgcctaatgacgcccgaagggaggtccacatcaaaaggatggaagagcgcaaggcgagctctacttctcccccaggcgacagccttgcatcaattcctttcatcgacgagccgaccagtcctagcatcgatcacgacattgcccacatccctgcttccgccgtgatctccgcctcaacgagtcaggttccatctatcgccaccgtgcccccctgtctcacaacatctgcaccactgattcggcgtcagctgtcccacgatcacgagagtgttggccccccatctctggacgctcagcccaactcaaagacagagcgtagcaaatcatacgatgaaggtctggatgactatcgcgaagacgcaaagttgtccttcaagcacgttagttccctgaaaggcataaaaattgccgattcacagaagagctcggaggactctggctcgaggaaggatagcagcagcgaagtctttagcgatgccgctaaggaagggtggctgcattttcggcctctggtgacagataagggaaaaagggtggggggatcgattcgcccctggaaacagatgtatgtcgtattgagaggtcattccctttacctctataaagataagcgtgaacagacaacgccttcagaagaagaacagcccattagtgtgaacgcttgtcttatagacataagttactccgaaaccaaacggaaaaatgtgtttcggctcaccacgagtgactgtgaatgtctgttccaggctgaagatcgcgacgacatgttggcctggatcaagacgatccaggaatcatccaatcttaacgaagaggacacaggagtgaccaatagagacctcatctcacggaggatcaaggaatataataacctgatgtcaaaagctgagcaactacccaaaacaccccggcagagcctgagtatcaggcagaccctgttaggcgcaaaatcggagcctaagacccagagcccacacagccccaaagaggaaagcgagaggaagctcctgagtaaagatgacacctccccccctaaagacaaagggacctggcgcaaaggaatcccatctattatgaggaaaacatttgaaaagaagccaacagcgactgggacatttggtgtgagactggacgattgtcccccagcccacaccaatagggttggggacacctccccacccgactttctaaaatccctgattcagttctag

SEQ ID NO: 271936 - DNA, 2724 bp, Artificial Sequence
  derived and/or modified sequence
atgcccaaagatgaagacattctgcaggtggcatattctcaggatgcgtacttgaaaggtaacgaggcttattccggcaatgctcgcaatatcccagaacccccacccatatgctatccctggctgccctcagcaccttccgccatggcccagcctgtagaaataagcccgcctgacagctctctgtctaagcagcagacctctacgccagtgctaacacaacccggtcgggcttacagaatggaaatacaagtgccgccctcgcctaccgatgtggcgaaatccaacacagccgtatgcgtgtgtaacgaaagcgtgcgtaccgtcatagtgcccagcgaaaaggtggtggatctgttaagcaacagaaacaaccataccggcccaagccatcgcacagaggaggtcagatacggtgtgtcggagcagacttccttgaaaacagtctcaagaacaacatctccaccactgtcaattcctaccacacaccttattcatcagccagcaggttcacggtcccttgaaccttcgggcattctcctgaagtcagggaactacagcggtcattcagacggtatttcctccagccgtagtcaggccgtggaggccccctccgtgtcagtaaaccattattctccaaactcccatcagcacatcgattggaagaactataaaacttataaagaatatattgataacagacgtctccacatcggctgtcgcaccatccaggaaagactggactcactccgagctgcatcacagagcactaccgattacaaccaggtcgtccctaaccggactactcttcaggggcgtagacggtctacatctcacgatagggtgccccaatctgtacagatccgacagcggagcgtgagccaggagcggctggaagattccgtgctaatgaaatattgcccgcggagcgcatcccagggcgctctgacaagcccttctgtatcattttctaaccacagaacacgatcttgggactacattgagggacaagacgaaaccttggagaacgtgaactctggaacacctatccctgactcaaacggcgagaaaaaacaaacctacaagtggtctggattcacagagcaggacgaccggcgaggtatatgcgaaagaccccgccaacaggagatccataaatccttccgcggaagtaactttacagttgcaccctccgttgtgaattctgacaacaggcggatgtccggacgtggagtgggaagtgtgagtcagttcaagaagatacctccagacctcaagactctccagagcaatcggaactttcagacaacgtgcgggatgtccttgcctaggggcattagccaggatcgcagccccttagtcaaagttcggtccaactctctgaaagcgccttccacccacgtcaccaagccctcattctcccagaagagttttgtttctattaaagaccagcgcccagttaatcatctgcatcaaaacagccttcttaatcaacagacctgggtccgcactgactcagcccctgaccagcaggttgagacaggaaagagtccctcattgtccggcgcctccgctaaacctgccccacagagtagcgaaaatgccgggaccagtgatctggaattgcctgtcagtcagagaaaccaggacctgtccctccaggaggccgaaaccgaacagtccgatactttggataacaaggaagccgtcatcctccgggaaaaaccacccagcggccggcagactccacagcccttacgccaccagtcgtatatcctcgcagtcaatgatcaagaaacaggctccgatactacgtgttggctgccaaatgatgcccggcgggaagtgcacattaaacgcatggaggagcgtaaagcaagctcaacatctcctcctggagatagtctcgcgagtattccttttatcgatgagcccacatcaccgagtatcgaccacgatattgctcacatccccgcaagcgcggtgatcagtgctagcaccagccaggtgcccagtatagcaacggtaccgccctgtcttaccacgagcgcacctttgatcaggcggcagctgagccatgaccatgaatccgtcggtccacctagcctggacgcacagcctaactctaagaccgaacggtctaagagctatgatgaggggctggacgattaccgagaggacgccaaactgtcttttaagcatgtctctagccttaagggcatcaaaatagcggactcgcaaaagagctctgaagatagtggctcacgcaaagactccagttctgaggtgtttagcgacgccgctaaggagggctggctgcatttccgccctctcgtaactgacaaaggcaagcgcgtcggcgggtcgatccggccttggaaacagatgtacgtggttttacgaggccatagtctgtatctctataaagataagagagaacagaccacaccctccgaagaggagcagcccatatccgtcaacgcctgtcttatcgacatatcctactctgagactaagaggaaaaatgtcttcaggctgaccacaagtgactgcgaatgcctttttcaggccgaggacagggacgatatgctagcctggattaaaaccattcaggagtcttctaacttaaacgaggaggacaccggcgtgacaaacagagacctgataagccgcaggatcaaggagtataacaacctaatgtccaaggctgagcagctgccgtag

SEQ ID NO: 271937 - DNA, 279 bp, Artificial Sequence
  derived and/or modified sequence
atggacactatctttgtgaagcaggtgaaagagggaggacctgctttcgaggccggactttgcactggagataggattattaaagtcaatggcgagagcgtcataggaaagacctatagccaggtgatcgccctcatccagaattctgacactacattagagctctccgtcatgcctaaggatgaagacatccttcaagtgaacttagaattttccaccttctacaagaatacaatcgccaaattcctgcaactctctgacatggaaatgctttgctag

SEQ ID NO: 271938 - DNA, 3654 bp, Artificial Sequence
  derived and/or modified sequence
atggcccagcctgtggagatcagccccccagacagcagcctgagcaagcagcagaccagcacccctgtgctgacccagcccggccgggcctacaggatggagatccaggtgccccccagccccacagatgtggccaagagcaacacagctgtgtgtgtgtgcaatgaatctgtgaggacagtcatcgtgcccagcgagaaggtggtggacctgctgagcaacagaaacaaccacacaggccccagccacaggacagaggaggtgcgctatggagtgtctgagcagaccagcctgaagacagtgtccaggaccaccagcccccccctgagcatccccaccacccacctgatccaccagcctgctggcagccgcagcctggagcccagcggcatcctgctgaagagcggcaactacagcggccacagtgatggcatcagcagcagccgcagccaggccgtggaggcccccagcgtgtctgtgaaccactacagccccaacagccaccagcacatcgactggaagaactacaagacctacaaggagtacatcgacaacagaaggctgcacatcggctgcaggaccatccaggagcggctggacagcctgcgggccgccagccagagcaccacagactacaaccaggtggtgcccaacagaaccaccctgcagggcagaagaagaagcaccagccatgacagagtgccccagagcgtgcagatccggcagaggtctgtgtcccaggagcggctggaggacagcgtgctgatgaagtactgccccaggtctgccagccagggcgccctgaccagccccagcgtgtccttcagcaaccacaggaccaggtcctgggactacatcgagggccaggatgagaccctggagaatgtgaacagcggcacccccatcccagacagcaatggagagaagaagcagacctacaagtggagcggcttcacagagcaggatgaccggcggggcatctgtgagcggccccggcagcaggagatccacaagagcttccggggcagcaacttcaccgtggcccccagcgtggtgaacagcgacaacagaaggatgagcggccggggcgtgggctctgtgtcccagttcaagaagatccccccagacctgaagaccctgcagagcaacagaaacttccagaccacctgtggcatgagcctgccccggggcatcagccaggacaggagccccctggtgaaggtgcgcagcaacagcctgaaggcccccagcacccacgtgaccaagcccagcttcagccagaagagctttgtgtccatcaaggaccagaggcctgtgaaccacctgcaccagaacagcctgctgaaccagcagacctgggtgaggacagacagcgccccagaccagcaggtggagaccgggaagagccccagcctgagcggggccagcgccaagccagccccccagagcagtgaaaatgccggcaccagtgacctggagctgcctgtgtcccagaggaaccaggacctgagcctgcaggaggccgagacagagcagagcgacaccctggacaacaaggaggccgtcatcctgcgggagaagccacccagcggccggcagaccccccagcccctgcggcaccagagctacatcctggccgtgaatgaccaggagaccggcagtgacaccacctgctggctgcccaatgatgcccggcgggaggtgcacatcaagaggatggaggagaggaaggccagcagcaccagccccccaggggacagcctggccagcatccccttcattgatgagcccaccagccccagcattgaccatgacatcgcccacatcccagccagcgctgtgatcagcgccagcaccagccaggtgcccagcatcgccaccgtgcccccctgcctgaccaccagcgcccccctcatccggcggcagctgagccatgaccatgaatctgtgggcccccccagcctggatgcccagcccaacagcaagacagagaggagcaagagctatgatgagggcctggatgactaccgggaggatgccaagctgtccttcaagcacgtgagcagcctgaagggcatcaagattgctgacagccagaagagcagtgaagattctggcagcaggaaggacagcagcagcgaggtgttcagtgatgctgccaaggagggctggctgcacttccggcccctggtgacagacaagggcaagagggtgggcggcagcatccggccctggaagcagatgtatgtggtgctgcggggccacagcctgtacctgtacaaggacaagcgggagcagaccacccccagcgaggaggagcagcccatctctgtgaatgcctgcctgattgacatctcctacagcgagaccaagaggaagaatgtgttccggctgaccaccagtgactgtgagtgcctcttccaggccgaggacagagatgacatgctggcctggatcaagaccatccaggagagcagcaacctgaatgaagaagatactggagtgaccaacagagacctgatcagccgccgcatcaaggagtacaacaacctgatgagcaaggccgagcagctgcccaagaccccccggcagagcctgagcatccggcagaccctgctgggcgccaagtctgagcccaagacccagagcccccacagccccaaggaggagagcgagaggaagctgctgagcaaggatgacaccagcccccccaaggacaagggcacctggaggaagggcatccccagcatcatgaggaagacctttgagaagaagcccacagccaccggcaccttcggcgtgcggctggatgactgccccccagcccacaccaaccgctacatccccctgattgtggacatctgctgcaagctggtggaggagcggggcctggagtacacaggcatctacagagtgcccggcaacaatgctgccatcagctccatgcaggaggagctgaacaagggcatggctgacatcgacatccaggatgacaagtggagggacctgaatgtcatcagcagcctgctgaagagcttcttcaggaagctgcctgagcccctcttcaccaatgacaagtatgctgacttcatcgaggccaacagaaaagaagaccccctggaccggctgaagaccctgaagaggctcatccatgacctgcctgagcaccactatgagaccctgaagttcctgagcgcccacctgaagacagtggctgaaaattctgagaagaacaagatggagcccaggaacctggccatcgtgtttggccccaccctggtgaggaccagcgaggacaacatgacccacatggtgacccacatgccagaccagtacaagatcgtggagaccctcatccagcaccacgactggttcttcacagaggagggcgctgaggagcccctgaccaccgtgcaggaggagagcacagtggacagccagcctgtgcccaacatcgaccacctgctgaccaacattggaagaactggagtgtccccaggagatgtgtctggagaggtgggcggcgtgtaccacacagtgatgagcctggtggacagcgtgatgagcctgatggacagctggaactgcaggaagaaggaggactgctgcccccactgcagctgcctggtgtgcaggaacccccgcttcctgtag

SEQ ID NO: 271939 - DNA, 3498 bp, Artificial Sequence
  derived and/or modified sequence
atgatggccaccaggagaacaggcctgtctgaaggagatggagacaagctgaaggcctgtgaggtgtccaagaacaaggatggcaaggagcagagcgagaccgtgtccctgtctgaagatgagaccttctcctggccaggccccaagacagtgaccctgaagaggaccagccagggcttcggcttcaccctgcggcacttcatcgtgtacccacctgagagcgccatccagttctcctacaaggatgaggagaatggaaacagaggaggcaagcagaggaaccggctggagcccatggacaccatctttgtgaagcaggtgaaggagggcggccctgcctttgaggccggcctgtgcaccggggaccgcatcatcaaggtgaatggagagagcgtgattggcaagacctacagccaggtgattgccctgatccagaacagcgacaccaccctggagctgtctgtgatgcccaaggatgaggacatcctgcaggtggcctacagccaggatgcctacctgaagggaaatgaggcctacagcggaaatgccaggaacatccctgagcccccacccatctgctacccctggctgcccagcgcccccagcgccatggcccagcctgtggagatcagccccccagacagcagcctgagcaagcagcagaccagcacccctgtgctgacccagcccggccgggcctacaggatggagatccaggtgccccccagccccacagatgtggccaagagcaacacagctgtgtgtgtgtgcaatgaatctgtgaggacagtgattgtgcccagcgagaaggtggtggacctgctgagcaacagaaacaaccacacaggccccagccacaggacagaggaggtgcgctatggagtgtctgagcagaccagcctgaagacagtgtccaggaccaccagcccccccctgagcatccccaccacccacctgatccaccagcctgctggcagccgcagcctggagcccagcggcatcctgctgaagagcggcaactacagcggccacagtgatggcatcagcagcagccgcagccaggccgtggaggcccccagcgtgtctgtgaaccactacagccccaacagccaccagcacatcgactggaagaactacaagacctacaaggagtacatcgacaacagaaggctgcacatcggctgcaggaccatccaggagcggctggacagcctgcgggccgccagccagagcaccacagactacaaccaggtggtgcccaacagaaccaccctgcagggcagaagaagaagcaccagccatgacagagtgccccagagcgtgcagatccggcagaggtctgtgtcccaggagcggctggaggacagcgtgctgatgaagtactgccccaggtctgccagccagggcgccctgaccagccccagcgtgtccttcagcaaccacaggaccaggtcctgggactacatcgagggccaggatgagaccctggagaatgtgaacagcggcacccccatcccagacagcaatggagagaagaagcagacctacaagtggagcggcttcacagagcaggatgacagaagaggcatctgtgagcggccccggcagcaggagatccacaagagcttccggggcagcaacttcaccgtggcccccagcgtggtgaacagcgacaacagaaggatgagcggccggggcgtgggctctgtgtcccagttcaagaagatccccccagacctgaagaccctgcagagcaacagaaacttccagaccacctgtggcatgagcctgccccggggcatcagccaggacaggagccccctggtgaaggtgcgcagcaacagcctgaaggcccccagcacccacgtgaccaagcccagcttcagccagaagagctttgtgtccatcaaggaccagaggcctgtgaaccacctgcaccagaacagcctgctgaaccagcagacctgggtgaggacagattctgccccagaccagcaggtggagaccgggaagagccccagcctgagcggggccagcgccaagccagccccccagagcagtgaaaatgccggcaccagtgacctggagctgcctgtgtcccagaggaaccaggacctgagcctgcaggaggccgagacagagcagagcgacaccctggacaacaaggaggccgtcatcctgcgggagaagcccccatctggccggcagaccccccagcccctgcggcaccagagctacatcctggccgtgaatgaccaggagactggaagtgacaccacctgctggctgcccaatgatgcccggcgggaggtgcacatcaagaggatggaggagaggaaggccagcagcaccagccccccaggggacagcctggccagcatccccttcattgatgagcccaccagccccagcattgaccatgacatcgcccacatcccagccagcgctgtgatcagcgccagcaccagccaggtgcccagcatcgccaccgtgcccccctgcctgaccaccagcgcccccctcatccggcggcagctgagccatgaccacgagagcgtgggcccccccagcctggatgcccagcccaacagcaagacagagaggagcaagagctatgatgagggcctggatgactacagagaagatgccaagctgtccttcaagcacgtgagcagcctgaagggcatcaagattgctgacagccagaagagcagcgaggacagcggcagcaggaaggacagcagcagcgaggtgttcagtgatgctgccaaggagggctggctgcacttccggcccctggtgacagacaagggcaagagggtgggcggcagcatccggccctggaagcagatgtatgtggtgctgcggggccacagcctgtacctgtacaaggacaagcgggagcagaccaccccatctgaggaggagcagcccatctctgtgaatgcctgcctgattgacatctcctacagcgagaccaagaggaagaatgtgttccggctgaccaccagtgactgtgaatgtctcttccaggctgaagatagagatgacatgctggcctggatcaagaccatccaggagagcagcaacctgaatgaggaggacaccggggtgaccaacagagacctgatcagccgccgcatcaaggagtacaacaacctgatgagcaaggccgagcagctgcccaagaccccccggcagagcctgagcatccggcagaccctgctgggcgccaagtctgagcccaagacccagagcccccacagccccaaggaggagagcgagaggaagctgctgagcaaggatgacaccagcccccccaaggacaagggcacctggaggaagggcatccccagcatcatgaggaagacctttgagaagaagcccacagccaccggcacctttggagtgcggctggatgactgccccccagcccacaccaacagagtgggggacaccagccccccagacttcctgaagagcctcatccagttctag

SEQ ID NO: 271940 - DNA, 2724 bp, Artificial Sequence
  derived and/or modified sequence
atgcccaaggatgaggacatcctgcaggtggcctacagccaggatgcctacctgaagggaaatgaggcctacagcggaaatgccaggaacatccctgagcccccacccatctgctacccctggctgcccagcgcccccagcgccatggcccagcctgtggagatcagccccccagacagcagcctgagcaagcagcagaccagcacccctgtgctgacccagcccggccgggcctacaggatggagatccaggtgccccccagccccacagatgtggccaagagcaacacagctgtgtgtgtgtgcaatgaatctgtgaggacagtcatcgtgcccagcgagaaggtggtggacctgctgagcaacagaaacaaccacacaggccccagccacaggacagaggaggtgcgctatggagtgtctgagcagaccagcctgaagacagtgtccaggaccaccagcccccccctgagcatccccaccacccacctgatccaccagcctgctggcagccgcagcctggagcccagcggcatcctgctgaagagcggcaactacagcggccacagtgatggcatcagcagcagccgcagccaggccgtggaggcccccagcgtgtctgtgaaccactacagccccaacagccaccagcacatcgactggaagaactacaagacctacaaggagtacatcgacaacagaaggctgcacatcggctgcaggaccatccaggagcggctggacagcctgcgggccgccagccagagcaccacagactacaaccaggtggtgcccaacagaaccaccctgcagggcagaagaagaagcaccagccatgacagagtgccccagagcgtgcagatccggcagaggtctgtgtcccaggagcggctggaggacagcgtgctgatgaagtactgccccaggtctgccagccagggcgccctgaccagccccagcgtgtccttcagcaaccacaggaccaggtcctgggactacatcgagggccaggatgagaccctggagaatgtgaacagcggcacccccatcccagacagcaatggagagaagaagcagacctacaagtggagcggcttcacagagcaggatgaccggcggggcatctgtgagcggccccggcagcaggagatccacaagagcttccggggcagcaacttcaccgtggcccccagcgtggtgaacagcgacaacagaaggatgagcggccggggcgtgggctctgtgtcccagttcaagaagatccccccagacctgaagaccctgcagagcaacagaaacttccagaccacctgtggcatgagcctgccccggggcatcagccaggacaggagccccctggtgaaggtgcgcagcaacagcctgaaggcccccagcacccacgtgaccaagcccagcttcagccagaagagctttgtgtccatcaaggaccagaggcctgtgaaccacctgcaccagaacagcctgctgaaccagcagacctgggtgaggacagacagcgccccagaccagcaggtggagaccgggaagagccccagcctgagcggggccagcgccaagccagccccccagagcagtgaaaatgccggcaccagtgacctggagctgcctgtgtcccagaggaaccaggacctgagcctgcaggaggccgagacagagcagagcgacaccctggacaacaaggaggccgtcatcctgcgggagaagccacccagcggccggcagaccccccagcccctgcggcaccagagctacatcctggccgtgaatgaccaggagaccggcagtgacaccacctgctggctgcccaatgatgcccggcgggaggtgcacatcaagaggatggaggagaggaaggccagcagcaccagccccccaggggacagcctggccagcatccccttcattgatgagcccaccagccccagcattgaccatgacatcgcccacatcccagccagcgctgtgatcagcgccagcaccagccaggtgcccagcatcgccaccgtgcccccctgcctgaccaccagcgcccccctcatccggcggcagctgagccatgaccatgaatctgtgggcccccccagcctggatgcccagcccaacagcaagacagagaggagcaagagctatgatgagggcctggatgactaccgggaggatgccaagctgtccttcaagcacgtgagcagcctgaagggcatcaagattgctgacagccagaagagcagtgaagattctggcagcaggaaggacagcagcagcgaggtgttcagtgatgctgccaaggagggctggctgcacttccggcccctggtgacagacaagggcaagagggtgggcggcagcatccggccctggaagcagatgtatgtggtgctgcggggccacagcctgtacctgtacaaggacaagcgggagcagaccacccccagcgaggaggagcagcccatctctgtgaatgcctgcctgattgacatctcctacagcgagaccaagaggaagaatgtgttccggctgaccaccagtgactgtgagtgcctcttccaggccgaggacagagatgacatgctggcctggatcaagaccatccaggagagcagcaacctgaatgaagaagatactggagtgaccaacagagacctgatcagccgccgcatcaaggagtacaacaacctgatgagcaaggccgagcagctgccctag

SEQ ID NO: 271941 - DNA, 279 bp, Artificial Sequence
  derived and/or modified sequence
atggacaccatctttgtgaagcaggtgaaggagggcggccctgcctttgaggccggcctgtgcaccggggaccgcatcatcaaggtgaatggagagagcgtgattggcaagacctacagccaggtgattgccctgatccagaacagcgacaccaccctggagctgtctgtgatgcccaaggatgaggacatcctgcaggtgaacctggagttcagcaccttctacaagaacaccatcgccaagttcctgcagctgagtgacatggagatgctgtgctag

SEQ ID NO: 271942 - DNA, 3654 bp, Artificial Sequence
  derived and/or modified sequence
atggcccagcccgtggagatcagcccccccgacagcagcctgagcaaacagcagacctcaactcctgtgctgacacagccaggccgggcctaccggatggagatccaggtgcccccatcgcccaccgacgtcgctaagagcaacacagccgtgtgtgtatgcaacgaatcggttagaacagtgatcgttccctctgagaaggtcgtggatctgctctctaatcgcaacaatcatacaggcccaagccacagaaccgaagaagtgcgctatggcgtctctgagcagacttccctgaaaacagtctcgagaacgaccagcccacctttatctattcccactacccacctcattcaccagccagcggggtctcgttctctggagccgtcaggcatccttctgaagtccggtaactacagcggtcacagcgacggaatctcatcgtcaagaagtcaggccgtcgaagcacctagtgtgtctgtaaaccattattcacccaactcgcatcaacatattgactggaagaactacaagacctacaaagaatacatcgacaatcgacggttgcacattggttgtcgcaccatccaggaaagacttgactcgctgcgcgccgctagtcagtctaccactgactacaatcaagtagtgccaaaccgaacaaccctgcagggcaggagacgtagcacttcacacgatagagtgccacaatcagtgcagattcgccagcggtcagtttcacaagagaggctagaagattctgtgctgatgaaatactgtcctaggagcgcctcgcagggggctctgaccagtccaagcgtgtctttctcgaatcatcggactcgatcatgggattacatcgagggtcaagatgaaacacttgaaaatgtgaactcaggtactccaattccagacagcaatggcgaaaaaaagcaaacttataaatggtctgggtttactgagcaggatgatcggagaggcatctgcgaaagaccacggcagcaggaaattcacaagagttttcgagggagcaactttaccgtcgcaccctctgtcgtaaatagcgacaataggcgaatgtcaggccgtggtgtggggagcgtgagccaattcaagaagattccccctgatttgaaaacgttacagagcaacaggaacttccagactacctgcggcatgagcctgcctcgaggaatttcccaggatagaagcccactggtgaaggtacgctccaactctcttaaagcccccagtactcacgtaacaaaacctagtttcagtcagaagagcttcgtgagcatcaaggaccagcgccccgttaaccacctccaccaaaactctctcctgaatcagcaaacttgggtacgaacggattctgctcctgaccagcaggtcgaaaccgggaaaagcccatctttgagcggcgcctctgcaaaaccagctcctcaaagttctgaaaacgccggcaccagcgacctggagttgcccgtgtctcagcgcaaccaagatctgtccctgcaggaagccgagacagagcagagtgatacgctcgacaataaggaagctgttatcctccgtgagaagccgccttctggccgccaaaccccgcagcccttgcggcaccagtcatatattctggccgtaaacgaccaggaaaccgggagtgataccacttgttggctgcccaacgacgctagaagggaagttcacattaagcgcatggaggagaggaaagcctcgtccaccagcccacctggagactcgctggcatctattccctttatcgacgagcccacatctccctctatcgatcacgatatcgcgcatattcctgctagcgccgtgatctccgcgtccacaagtcaggtaccgagcattgctacggtgccgccatgcttaactactagtgctccccttattagacgccagctgagccatgatcatgagtcagtaggtccaccttcactggacgcccagcccaattccaagaccgagcgatccaaaagttacgacgaaggtctggatgattatagggaggacgctaaactgagctttaagcatgtaagctccttgaagggcattaagatcgcggacagccagaagtccagcgaagacagcggaagcaggaaagatagttctagcgaagtgttcagcgatgcggctaaagaagggtggctgcacttccgccccttagtcactgacaagggtaaacgcgtagggggcagtatccgtccctggaagcagatgtacgtggtgttgcgaggtcattccctctacctctacaaggataagagagagcagactacgccaagtgaggaggagcagccgatctccgtgaacgcttgcctgatagatatttcctatagtgaaacaaaacggaaaaatgtcttcagattaacaacgtcagactgtgaatgcttgtttcaggccgaggacagggacgatatgttggcatggatcaaaacaattcaggagtcttctaacttgaatgaagaagatacgggcgtgacgaatagagacttgatcagtaggcggatcaaggagtataataacttgatgtccaaagccgaacagcttccaaagacaccccgccaaagcttaagtataaggcagaccctgctcggtgcaaagtctgagccaaagacacagtctccacattctcctaaggaggaatctgagcgcaaactcctcagcaaggacgacacaagccctcccaaggataaaggcacatggcgaaagggtattccttctataatgcgcaagactttcgaaaagaaaccgacagccactggaacatttggagtgcgcctggacgattgcccgcccgcacatacgaaccgatacatacctttaatcgtggacatctgctgcaagctggtcgaagagcgaggcctcgagtacactggaatataccgagtcccggggaataatgccgcgattagcagcatgcaggaggagctgaacaagggtatggctgacatagacattcaggatgacaaatggagagacctaaacgtgatctcctcactactaaaatcattctttagaaagttacccgagcctctgttcactaatgacaaatacgccgatttcatcgaggcaaataggaaagaagacccactggatagactcaagaccctgaaaagactgatccacgatctacccgagcatcactatgaaactttgaaatttctgagtgctcacctaaagactgtggctgagaacagcgaaaaaaacaaaatggagccacgtaatctagctatcgtgtttggaccaactctggtgcgaacatccgaagacaacatgactcacatggtcacacacatgcctgatcagtataagatagtggagacgcttattcagcatcacgactggtttttcactgaggaaggggcagaggaaccactcaccactgtgcaggaggagtccacagtggattcccagcctgtgcctaacatagatcacctactcaccaatatagggagaacgggcgtttcacccggcgatgtttctggcgaggtaggtggcgtttaccacacagtcatgagtctcgtcgattctgtgatgtccttaatggatagctggaattgtcgtaagaaagaggactgctgcccccactgtagttgtctcgtctgtcggaatcccagattcctgtag

SEQ ID NO: 271943 - DNA, 3498 bp, Artificial Sequence
  derived and/or modified sequence
atgatggccacccggcggaccggcctgagcgagggcgacggcgacaaactgaaagcctgcgaggtgtccaagaacaaggatggaaaagagcagagtgagaccgtgagtctctctgaagacgagactttttcttggcctgggccaaagacagtgactctgaagcggacatcccagggctttggttttacactgaggcatttcattgtctacccccccgagagtgccatacagttttcctataaagacgaagagaacggaaacaggggcggcaaacagcgaaaccggttagaaccgatggacacaatattcgtcaaacaggtcaaagaggggggtcccgccttcgaggccggtctatgtacaggcgatagaatcatcaaagtgaacggagagtctgtaattgggaagacctactctcaggtgatcgcactcatacaaaattccgatacaactctggaattaagtgtcatgcctaaagatgaggacatcctgcaagtcgcttatagtcaggatgcctatctcaagggaaacgaagcatattcaggaaacgcgcggaacataccagagccgcctccaatctgctatccatggctcccgtctgccccatcggccatggcccagccagtcgagattagtcctcctgattcctccctcagcaagcagcaaacttcaacgcctgttctaactcagccggggcgggcctataggatggaaatccaggtgccaccgtctccgaccgacgtcgccaaaagcaatacagcagtctgtgtttgcaacgaatctgtgaggaccgtcattgtgcccagtgagaaagtggtcgacctactttctaaccggaataatcacactggccccagccaccggaccgaagaggttaggtacggcgtgagtgagcaaacttctcttaaaaccgtgtccaggacaacaagcccgcccctctcaatcccgactactcacctgattcaccagccagcaggatccaggtcccttgaacctagtggaattctgctgaaaagcgggaactatagtggacattctgacggtataagctcctcaaggtcccaggcggtggaggcaccaagtgtgtccgtgaaccattactcacctaacagccatcaacacatcgattggaagaattataagacctacaaggagtacatcgacaaccggagattgcatattgggtgccgcaccatacaggaacgactggattcgttgcgagcagcaagccaatccacaacagactataatcaggtcgtgcccaaccgcaccacacttcaagggcgtcggaggtccacatcacatgatcgtgttccgcaatccgtgcaaatcagacagagaagcgtgagccaggaaagactcgaggactcagttctgatgaagtactgcccacggtccgctagtcaaggcgctcttactagcccaagtgtctcgttctctaatcacaggacccggagctgggactacatcgaaggccaagacgagactcttgagaacgtgaattctggcactcccattcctgacagcaacggagaaaaaaagcagacatacaagtggagtggtttcaccgagcaggatgacagacgcggcatctgtgagcgccctcggcaacaggagatccataaaagttttcgcggatctaacttcaccgtggcgccgtctgtcgtgaactccgacaaccgacgcatgagcgggaggggtgttggatccgtgtcacagttcaagaaaataccacctgacttaaagacactccagtccaaccgaaacttccaaacaacatgcggcatgagtcttcctcgaggcattagccaggatcgttcaccactggtcaaggtgcggtcaaattccttgaaggcacccagcacccacgtgactaagccctctttttctcaaaagtcctttgtgtctatcaaggaccaacgtcctgttaatcatcttcatcaaaactcattgctaaatcagcaaacctgggtgaggacggactccgcgccagaccaacaggtggaaacaggtaagtccccatcactgtccggagcatctgccaagccagccccacagtcctccgaaaatgctggaacaagcgatttagaattacccgtgtcccaacggaaccaggacctatctctgcaggaggccgagactgagcagagcgatacactggataataaagaggccgtgattcttcgtgaaaaacctcctagcggaaggcaaacgccacagccccttcggcatcagagctatattctggctgtgaatgaccaggaaactgggtcagataccacatgctggctgcccaacgatgctcgacgggaggtgcacattaagcgcatggaggagcgcaaagccagcagtacctcaccgccaggcgacagtctggccagcatccctttcatcgatgaaccaacttcgccatcaatcgaccacgatatcgctcacatcccggccagcgccgtgatctcagcctctacaagccaggtcccgagcatcgcaaccgtcccaccttgcctaacaacgtctgcacccctgatccgcaggcagttaagtcatgatcacgaatctgtaggcccacccagcctggacgcgcagcctaatagcaagaccgagagatccaagagttatgacgaagggctggatgattatcgtgaagatgctaagctatctttcaagcacgtatccagcctcaagggtatcaagatcgcagattctcagaaatcctcagaagactctggatcaagaaaagactccagctccgaggttttctcagatgccgcaaaagaggggtggctgcatttcaggccactagtgaccgataagggaaagcgcgtcggtggctccattagaccttggaagcagatgtacgtagtcctgagaggacatagtctttacctttataaggacaagcgcgaacagaccactccgagcgaggaagagcagccaatctcagtgaatgcatgtctaatagatatttcttacagcgaaacgaagcgtaaaaatgtctttaggcttacaacttctgactgtgaatgcctgttccaggccgaggaccgggatgacatgctggcctggatcaagacaattcaagagtctagtaatcttaatgaggaggatactggagtaactaatcgggacctgatcagccgtagaatcaaggagtataacaatctgatgtccaaagctgagcaactccctaaaactcccagacaaagcctgagcatcagacaaaccctacttggcgctaaatctgaaccgaagacacaatctccgcatagtcctaaagaggagagcgaacggaagctactaagtaaagacgacacctcacctccaaaagataaaggcacatggaggaaagggatcccttccattatgaggaagacatttgaaaagaaacctaccgcaacgggtacctttggcgtgaggctcgacgactgtccccctgcccacaccaatagggtcggcgacactagcccacccgattttcttaaaagtctcattcagttctag

SEQ ID NO: 271944 - DNA, 2724 bp, Artificial Sequence
  derived and/or modified sequence
atgcccaaggacgaggacatcctgcaggtggcctacagccaggacgcttacctgaaaggcaatgaggcgtattcgggcaatgcccggaatattcctgaaccccctcctatttgttacccatggctgccatctgccccatctgcaatggcccagcctgtggagatatcaccccctgattcatccttgtccaaacaacagactagtacgcccgttctaacacagcccgggagggcctacaggatggaaattcaggtgcctcctagtcccaccgacgtcgccaagagcaacactgcagtttgtgtttgcaatgagagcgtgcgaactgtgattgttccatctgaaaaggtcgtcgacctgctgagcaatcggaacaatcatacaggcccatcacatagaacagaagaggtgcggtacggggtgagtgaacaaaccagcctgaaaaccgtttctcgcactacatctccccccctgagtatacctaccacccacctcattcatcagcccgcgggctctaggagcctggagccgtctggtattttgctaaaaagcggtaattactcgggccactccgatggaatttcctcctcaaggagtcaagctgtcgaggctccaagtgtgtctgtcaaccactattcccctaatagccaccagcacattgattggaagaactacaaaacctacaaggaatatatcgataatcggagacttcacattggctgtaggacaatccaggagaggctggatagtctgcgggctgcatctcagtccacaactgattacaaccaggtagtgcctaataggacgactcttcagggacggcgccgatccacctcccacgatcgggtgccacaatcagtgcagattagacagcgcagtgttagtcaggaaaggctggaagactctgtcctgatgaaatactgccctcggtcggcgtcacagggcgcccttactagcccttctgtgtcattcagtaatcatcgaaccaggtcttgggactacatcgaaggccaggatgagacgctggagaacgtgaatagcgggactcctatccctgactcaaatggggaaaagaagcagacctacaagtggtctggttttaccgaacaggacgacaggcggggaatctgcgagcgtcctaggcaacaggaaatccataaaagctttcgtgggagcaatttcactgtcgccccatcagtcgtgaacagtgataacaggagaatgtccgggcggggagtcgggtcagtgagccaatttaaaaagatcccacctgatctgaagactctgcagagcaataggaattttcagactacttgcggtatgtctctaccacgggggatttctcaagatcggtcgcctctagtaaaagtcagaagtaattcccttaaggcacccagcacgcacgttacgaaaccaagcttctcccagaagagttttgtcagcatcaaagaccaaaggcccgtgaatcacctacaccaaaactcacttctaaaccagcagacctgggtcagaaccgacagtgcccccgaccagcaggtggaaaccggaaaaagcccctccctgagtggggcttcagcgaagccagcacctcagagctccgaaaatgctggtacctcagatctagagcttcctgtctcccagcgaaatcaggacctgtccctccaggaagctgagaccgaacagagcgacacactggacaacaaggaggctgtcattctgcgcgaaaaaccgccgtcagggcggcagacacctcagccacttcgccatcagtcgtacatcctggccgttaatgatcaggagactggtagtgacacaacctgctggctgcctaacgatgctagaagggaggtgcatattaaacgtatggaagaaagaaaagccagcagtaccagcccacctggagacagcctggcgagtattccgtttattgacgagcctacatcgccatctattgaccacgatatcgcacacatccccgccagtgccgtcatcagtgcatcaacgtctcaggtaccttcgattgccactgtccctccctgtctgacaactagtgcaccactgatccggcggcagctgtcccacgaccatgagtctgtgggcccgcccagcttggatgcccagccaaactctaagacagaaaggagcaaatcctacgacgaagggctggacgactaccgagaggacgcgaagctgagcttcaagcatgtgtcatcactcaaggggatcaaaatcgccgattctcagaaatcttcagaagatagtggtagtaggaaggactcctcctccgaggttttttccgatgcagctaaggaaggttggttgcatttccgaccattggttacagacaagggcaagagggtcggaggctccattcggccctggaaacaaatgtatgtagttctgcgcgggcactctctctatttatacaaagataaacgagagcagacgacacccagcgaggaggagcagcctatctccgttaacgcttgcttgatcgatatatcctactctgagacaaaaagaaagaacgtcttccgccttacaaccagtgattgtgaatgtttgtttcaggccgaagatcgtgatgacatgctcgcttggattaagaccattcaggaatcatcgaatctgaatgaggaggacacaggagtcaccaacagagacctgattagtaggaggatcaaagagtacaataacttaatgagcaaggccgagcagctgccctag

SEQ ID NO: 271945 - DNA, 279 bp, Artificial Sequence
  derived and/or modified sequence
atggacaccatcttcgtgaagcaggtgaaggagggcggccccgcctttgaggccggcctctgtacaggcgatcgcatcatcaaagttaatggcgaatccgtcatcggaaaaacttattcccaagttattgcacttatccagaactccgacaccacacttgagctgtctgtcatgccaaaggatgaggacattctccaggtcaaccttgaatttagtaccttttacaaaaatacaatcgccaaattcctgcaattaagcgatatggaaatgctttgttag

SEQ ID NO: 271946 - DNA, 3654 bp, Artificial Sequence
  derived and/or modified sequence
atggcacagcctgtggaaattagtcccccagattcaagcttgtcaaaacagcagaccagcacaccggtgctgacccaacccggtagggcctaccggatggagatccaagtgccaccttcaccgacggatgttgctaaaagcaataccgccgtgtgcgtgtgcaacgaatccgtgcggaccgtgattgtgcctagcgaaaaggtcgtggatcttctttccaatcggaataatcatacagggccatcgcatagaactgaggaagttaggtacggcgtgagcgagcaaacctcattgaagactgtgtcccggacaacgagcccgccactgtcaattcctaccacacacttgattcaccagcctgcgggaagtagaagcttagagccatccgggattcttctcaagagcggtaactacagtggtcactccgatggaatctcctcttcacgaagtcaggccgttgaggctccgagcgtctccgtaaaccattactccccgaattcacaccagcacattgattggaaaaattacaagacttataaagagtacattgataatcgaagattgcatattggctgtcggacaattcaggaaagactggattcactcagagctgccagccagtctacaacggactataaccaggtcgtaccaaaccgtacgacacttcagggacgacggagaagcactagtcacgaccgagttcctcaatcggtgcaaattaggcagcggagcgtctcacaggagagactcgaagactcagtactaatgaaatattgccctcgctccgcaagccagggggcactgacctctccgtcagtatctttctcaaatcaccggacaagatcatgggactacattgagggccaagacgagaccctggaaaacgtgaattctggaacacccattccggactccaacggagaaaagaaacaaacatacaaatggtctgggttcacggagcaagacgatcgcagagggatctgcgaacgacccaggcagcaggagattcacaaaagcttcaggggaagcaattttacggtggccccaagcgtagtaaactccgacaacaggagaatgtcaggacgcggtgtgggatccgtaagtcagttcaagaagattccacctgacttaaagacactccagtccaacagaaattttcagacaacatgcggtatgtctctgccacgaggcatttcccaggaccgatcgcccctggtgaaagtccgaagtaacagtctgaaagctccctctactcatgtgacaaaaccttctttctcccagaagagtttcgtcagtattaaagaccagcgcccagtgaaccacctgcaccagaactcattgcttaatcagcagacgtgggtgcggacagattccgcaccagaccaacaagtggagactggtaagagtcctagcctgtccggcgcatccgccaagccagccccacaatcatctgaaaatgcaggcacgtcagacctggagctcccagtttcgcagcgaaaccaggacctctccctacaagaggccgagactgagcaatccgacacgctggataacaaggaagcagtgatacttagggagaagccacccagtggaagacaaacccctcagcctctccgccaccagagttatatcctcgcagtaaacgaccaggaaaccggttccgatacaacttgctggctccctaatgatgctcgacgggaggtacatatcaagcgcatggaagaacgaaaggccagcagcacgtctcctccgggagacagcttagcttcgatcccatttattgatgagccgacatctccctctatagaccatgatattgctcatataccagcgtcagccgtgatatctgcctccacctctcaagtgcccagcatcgcaacagtaccaccctgtttgacaacgtccgcccctctgatccgaaggcaactctctcatgaccacgagtctgtcggcccaccatccttggatgcccagccgaattcaaaaaccgagcgtagtaaatcatatgacgagggcctggacgactatagggaagatgcaaagctgtctttcaagcacgtgtcatccttgaaaggcatcaagattgctgacagccaaaaaagctctgaagattcgggcagtcggaaggacagtagctccgaagtcttcagcgacgcagcaaaagaagggtggctgcactttaggcccctggtcaccgataaaggaaagagggtcgggggtagcatacggccttggaagcagatgtatgtggtacttcgtgggcacagcctctacctatataaggataaacgagaacaaacaacaccaagtgaagaagaacaacctatctccgtgaatgcttgtttgatcgacatctcatatagcgagacaaagagaaagaatgtattcaggctgactacctccgattgtgagtgcttgttccaggctgaggatcgcgacgatatgcttgcttggatcaagaccatccaggagtcctccaatttaaatgaagaggatacaggagtgaccaatcgggatttgattagcaggaggattaaagagtataataatttaatgagtaaagcagagcaattacctaaaacgcctagacagtccctgagcatcagacagactctgctgggagcgaagtccgaacctaaaacccagtccccgcactctccaaaagaggagtccgaaagaaagctgctgtccaaagacgatacctctccacccaaggataaaggcacgtggagaaagggcatcccgagcatcatgcggaagacctttgagaaaaagcccacggcaacgggcactttcggcgtgcggcttgacgattgccctccagcccatacgaacaggtacattcccttaatagtggatatatgctgtaaactggtggaggagcgcggtttggaatatacaggtatctaccgagtacccggtaataatgctgccatcagcagtatgcaggaagagcttaataaagggatggctgatatcgatatccaggatgataagtggcgggacctgaatgtcatatcatctctactgaagtcttttttcagaaaactgcccgagcctctttttaccaacgataagtatgccgactttattgaagccaatagaaaggaggacccgcttgacagactaaagacccttaagcgacttattcatgatctaccagaacaccattatgagaccctgaagttcctatctgctcatctgaagaccgttgccgaaaattctgaaaagaacaagatggaacctcggaatctagccatagtgtttggtccgactctggtgcgcaccagtgaggataacatgacgcacatggtaacacatatgccagatcagtacaagattgtcgagacacttatccaacaccatgattggttctttacagaagaaggtgccgaggagccactgaccactgtccaagaggaatccactgtggactcccagcctgtcccgaacatagaccacctcttgactaatatcggaaggactggggtgtctcctggcgacgtaagcggcgaggtcggaggggtctaccatacagtgatgtctttggtagactccgtgatgtcgctgatggattcttggaattgcaggaagaaggaagactgctgccctcactgctcgtgcttggtttgccggaatcctcggttcttgtag

SEQ ID NO: 271947 - DNA, 3498 bp, Artificial Sequence
  derived and/or modified sequence
atgatggccacacgcaggactgggttgagcgaaggtgatggcgacaagctcaaggcatgcgaagtcagcaagaataaagacggcaaagagcagtctgaaaccgtaagtctgtccgaggacgaaacgttttcctggcccggaccgaagaccgtgactctcaaaaggacttctcagggctttggcttcaccttaagacacttcattgtgtatccgcctgaatcagccatccaattttcatataaggacgaggagaatggcaataggggcggaaagcaaaggaaccgtctggagcctatggacacaatcttcgtcaagcaggtaaaagagggtggccctgcgttcgaagcaggcctctgcactggtgatcgcattatcaaagtgaatggggagagtgtcattggaaaaacgtattcccaggtgattgccctgatccaaaactccgacacaactcttgaactgagtgtgatgccaaaggacgaggatatcctgcaagtggcttatagccaggatgcatatcttaagggaaacgaggcttatagcggtaatgctaggaacattccagagcctcccccaatatgttacccatggctgcccagcgccccttccgctatggctcagcctgtggagattagccctcctgacagttcactcagtaaacagcagacctcaacgcctgtgctcactcagcctgggagagcttatagaatggaaatccaggtgcctcctagccctactgatgtggcaaagtcaaacacagcagtgtgtgtttgcaacgaatccgtcagaaccgtcatcgttcccagcgagaaagttgtggacctgcttagtaaccggaataatcataccggtccctcccatagaacagaggaggtgcgatatggagtttctgaacaaacctccctgaaaactgtcagtaggaccacttctcccccattgagcatccctacaacgcacttgattcatcagccggctggcagccgttccctggagccttccggcatcttgctaaagtccggcaattacagcggccattcggatggaatctcatcctcgagatcacaagccgtagaggctcctagtgtgtccgtcaaccactattcacctaattcccaccagcacattgattggaagaattacaaaacatacaaagagtatattgataaccggaggctgcacataggatgccgaacaatccaggaacgccttgactctctccgagcggcttcccagtccaccacggactataatcaggtggtcccaaacaggaccacactgcaggggcgtcgtagaagcacctcgcacgatcgggtcccccaaagcgtgcagatccgtcagcgcagcgtatcacaagagcgactggaggatagcgtccttatgaaatattgtcctaggtccgcctcccaaggcgcactgacctcaccatcggtaagtttcagcaaccaccgcactcgaagctgggattatattgaaggccaggatgagacactggaaaacgtgaattcaggaacccctatccctgacagtaacggtgagaagaagcaaacgtataaatggtcaggcttcactgagcaggatgaccggcgaggcatctgtgaaagacctcggcagcaagagatccataaatctttcagagggagtaattttaccgtggcgccaagcgttgtgaactcggacaaccggcgaatgtccgggaggggcgtcggaagcgtctcccagttcaagaaaatcccccctgatctcaagacattgcagtcgaaccgtaacttccagaccacgtgcggcatgtctctgcccagaggcatcagtcaggatcgttcacctctagttaaagtgcgtagtaactcactgaaagcccctagtacgcacgtgacgaagcctagcttctctcagaaaagttttgtctctatcaaagaccagaggcctgtgaatcatttacatcagaatagccttctgaatcagcagacctgggtccggacagattcagcacctgaccagcaggtggaaaccggcaagagcccctctctttcaggggctagtgccaagccagcaccccagtcctctgagaatgccggaacaagcgacctcgagctacctgtatcccagcggaaccaggatctgagcttgcaggaagctgagacagagcagtctgacactctggacaacaaagaagctgtgattctaagggaaaaacctccctcgggtagacaaacgccccagcccctaagacatcaaagttacatccttgcagtgaacgaccaggagactggaagcgacacaacctgctggctccctaatgacgcaaggcgggaggttcacatcaagcgcatggaagagcgtaaagcgtctagcacgagtccgcctggtgacagcctggccagtatacctttcatagatgagcctacttccccatcaatagaccatgacatcgcccacatacccgctagtgcagttatctctgcatctacatctcaggtgccctcaattgccactgtgccgccttgcctgactacatcagctcctctgattaggcggcagctctcccacgatcacgaatcagtgggtccccctagcctggatgctcagcccaattccaagactgagagatccaaaagctatgacgaaggtctggatgattatagagaggacgctaagctgagctttaagcatgtgtcgtcacttaaagggatcaagatcgccgatagccagaagtccagcgaggactctggtagccgtaaagattcctcttccgaagtcttctctgacgccgctaaggaaggctggctccactttcgtccccttgtgacagacaaggggaagcgtgtgggaggatcaatccggccttggaagcagatgtacgtcgtcctacggggtcactctctgtatttgtataaagataagcgggaacagacaacacccagtgaggaggagcagccaatctcggttaacgcctgtctgatagacatcagttattctgaaactaagagaaaaaatgtgttcaggctcaccacaagtgattgtgagtgtcttttccaggccgaagacagggatgacatgctagcctggattaaaactattcaggagagttccaatctcaacgaggaagatacaggcgtcaccaacagagacctcatttctcggcgaataaaagaatataataacctgatgtctaaggccgaacagctgcctaagacacccaggcagagcctcagcattcgtcagaccctgttaggagctaagagcgagccaaagacacagtccccacacagccctaaggaggagagcgagcgaaaactcttatctaaagacgacacatcgccccctaaagataagggcacatggcgtaaggggatcccatccataatgcggaagacattcgagaagaagcccactgccacagggacttttggagtgcgcctggacgactgcccaccagcacacacaaacagagtgggagatacatccccacccgacttcctcaaatcacttatccagttttag

SEQ ID NO: 271948 - DNA, 2724 bp, Artificial Sequence
  derived and/or modified sequence
atgcccaaggacgaagacatacttcaggtggcttacagccaagacgcataccttaaaggtaacgaggcatactctggcaacgctcgcaatatacctgagccccctcccatttgctacccatggctgccctcagctccttccgctatggcgcagccagtcgaaatatcccctcccgattcttctctctctaaacaacagacctccacacctgtacttacacagcctggacgcgcataccgaatggagatccaggttcctccgtctccgacagacgtagccaagtctaatacagcagtgtgtgtgtgcaatgagtctgtaagaacagtgatcgtgccctctgaaaaggtggtggacctgctctccaatagaaataatcacacgggccctagtcatagaaccgaggaagtgaggtatggtgtgtcggagcagaccagcttgaaaactgtgagtcgcaccacatctcccccactctcgatccctaccactcatcttatccaccagccagcaggcagtcggagcctggagccatccggaatcctcctgaagagcggaaactacagtggtcacagcgatgggatctctagctcacgctcacaggcagtggaggccccttcagtgtccgtgaatcactatagtccaaattctcaccagcacatagattggaaaaattataagacttataaggaatatatcgacaatcggaggctgcatatcggttgccggactatccaggagcgtctggatagtcttagggcagcgagccaaagcacaacagattacaaccaagtggttcccaaccgcactacgctgcaagggaggcggaggtctacctctcatgatcgcgtcccacaatccgttcagattaggcagcgctcagtatcccaagagcgcctggaagactcggtgctaatgaagtactgcccccgttcggcatctcagggggctctaaccagtccctcggtgtcattctctaaccatcggactcgctcttgggactatatcgaggggcaggatgaaactctagagaatgtgaacagcggaacgccgataccggatagtaacggcgagaaaaaacagacctataaatggtccggatttaccgagcaggatgatcgacggggaatctgcgaaaggcctcggcaacaagagatacacaaatcttttcgagggagtaattttacagtagctccaagcgtcgtgaacagcgacaaccggagaatgtctgggaggggggtgggtagcgtcagccagtttaagaaaatccctccagaccttaagaccctgcaaagcaatagaaattttcaaacaacctgcggaatgtcacttccacgtggcatttcacaggatagaagtcccttggtgaaagtgcgatccaatagcctgaaagctccttcaactcatgtgaccaaaccgagcttctcccagaaatccttcgtcagcattaaggatcaacgccctgtcaaccatttgcatcagaattcccttctgaatcagcagacctgggtgagaactgactccgcccctgaccagcaggtcgaaactggcaaaagcccttccttgtctggcgctagtgccaagcccgctccccagtcatccgagaacgctgggaccagcgacctagaattgcccgtaagccaaagaaaccaggacctgtctctccaagaggctgaaactgagcagtcagataccttagataataaagaagcagtgatactccgcgagaaacctccaagtggcagacagacaccgcagccactccggcaccagtcctatatcctggccgtcaacgatcaggaaacggggtctgacacaacttgctggctgccaaatgacgccagacgggaagtacatattaagcgcatggaggagcgaaaagcatctagtacttctccgcctggcgatagtctcgcttccattcccttcattgatgagcccacctcaccctcgatcgatcacgacattgcccatatccccgcatctgcagtcatcagcgcatccacctcccaggtgccttcaattgccactgtgcccccatgcctgacaacttctgcccctctcattcgaaggcagctttcacatgatcacgaatcggtgggaccaccatcgctagacgcacagcccaacagcaaaactgaacgtagtaaaagttacgatgaggggttagacgattaccgtgaggatgctaagctgagcttcaagcacgtgtctagtttgaagggaattaagattgccgattctcagaaaagctctgaagactccggaagccggaaggattcctctagtgaggtgtttagtgacgcagcgaaagaaggctggcttcattttaggcctttggtgaccgataaaggtaaacgagtcggcggtagtatcaggccatggaagcagatgtatgtggtcctcaggggccacagcctctatctgtataaagacaaacgtgaacaaacaactccttctgaggaagagcagccaatctctgtgaacgcatgccttattgatattagctatagcgagactaagagaaaaaatgtgttccggctcactactagtgactgcgaatgtctctttcaagctgaggaccgcgacgatatgctggcgtggatcaaaacaatacaggaaagttccaatctgaatgaggaagacaccggagtcacaaatcgtgatttgatctcgaggcgcatcaaggagtataacaacctcatgagcaaggccgagcagcttccttag

SEQ ID NO: 271949 - DNA, 279 bp, Artificial Sequence
  derived and/or modified sequence
atggacacaatcttcgtcaaacaggttaaagaagggggtcccgcttttgaagccggactgtgcactggggaccgtattatcaaggtgaatggggaaagtgtaattggtaagacgtattctcaggtgatcgccctgattcaaaactccgatacaacgcttgagctgtcagtaatgcctaaggatgaagacatccttcaggtcaatctggaattcagcactttttacaagaataccatcgccaagtttctgcagttaagtgacatggaaatgctgtgctag

SEQ ID NO: 271950 - DNA, 3526 bp, Artificial Sequence
  derived and/or modified sequence
ttgtcccttctttgtcatttgaaatgaaatgatggccacgcgtcggactggtctgtctgagggagatggtgacaagctcaaggcctgcgaggtctcaaaaaataaagatggaaaagaacaaagtgaaactgtatcactgtctgaagatgaaacattctcctggccaggtcccaaaacagttacgttgaaaagaacatctcaaggctttggttttacattaagacattttattgtttatcccccagagtctgcaattcaattttcatataaggatgaagaaaatggaaacagaggaggaaaacaaagaaaccgcttggaaccaatggataccatatttgttaagcaagttaaagaaggaggacctgcttttgaagctggattatgtacaggtgaccgaattataaaagtcaatggagaaagtgttattggcaaaacctattcccaagtaattgctttaattcaaaacagtgatacaacattggaacttagtgttatgccaaaagatgaagacattctccaagtggcatattctcaagatgcctacctgaaaggcaacgaagcttatagcggcaatgcccgcaatatacctgaacctccaccaatctgctatccctggctgccatctgccccatcagccatggcacagccagttgaaatatctcctcctgactcatcattgagcaaacagcaaaccagtacaccagtactgacacaacctggtagggcctatagaatggaaatacaagtgcctccatcaccaacagatgttgcaaaatcaaacacagcagtgtgtgtttgcaatgaaagtgtaaggactgtcattgtgccttctgagaaggttgtagatttgttatccaatagaaacaaccatacaggtccttcacatagaactgaagaagtgaggtatggcgtgagtgagcagacctctttaaaaacagtgtcaagaaccacatcaccaccattatcaattcccaccactcatctaattcatcagcctgcaggctccagatcactggaaccttctggaattttacttaagtctggaaattacagtggacattctgatggaatctcaagcagcagatctcaagctgtggaggctccctctgtatctgttaatcactattcgccaaattcccatcagcacatagactggaaaaactataaaacttacaaagagtatattgataacagacgattgcacataggttgtcggacaatacaagaaagattagatagtttaagagcagcatctcaaagcacgacagattataaccaggtcgtccccaaccgcactactttgcagggacgacgtcgaagcacctctcatgatcgagtgccccagtctgtccagatacggcaacgcagtgtgtcccaagaaagactggaagattctgtgctaatgaagtattgtccaagaagtgcatctcaaggagcactgacgtctccatctgttagttttagtaatcatagaactcgttcatgggattatattgagggacaggatgaaaccttagaaaatgtcaattctggaactccaatacctgattccaatggagagaaaaaacagacttacaagtggagtgggtttactgaacaggatgatagacgaggtatttgtgaaagacctaggcagcaagaaattcataaatcttttcgaggttccaattttactgtggctccaagcgttgttaattctgataacaggcgaatgagtggtagaggagtgggatctgtgtcgcagtttaaaaaaattccaccagatctaaaaacattgcagtcaaacagaaattttcagactacttgtggaatgtcactgcctcggggtatttcacaagacaggtcacctcttgtgaaagtccgaagtaattctctgaaagctccttccacgcatgtcacaaaaccatcatttagccagaaatcatttgtttctatcaaagaccaaagaccagtaaatcacttgcatcagaacagtctgttgaatcagcagacatgggtaaggactgacagtgcccccgatcagcaagtggagactgggaaatccccctctttatctggagcctctgccaagcctgcccctcagtcgagtgaaaacgctggtacttcagatttagaactacctgtcagtcaaaggaatcaagatttaagtttacaagaggctgaaactgagcaatcagatactttagataataaagaagctgtcatcctaagggaaaaacctccatctggacgccagacaccgcagcctttaaggcatcagtcttacatcttggcagtaaatgaccaggagaccgggtcagacactacctgctggctgcccaatgatgcacgtcgagaggtccacataaaaagaatggaggaaagaaaagcctcgagtaccagtccgcctggcgattctttggcttccatcccatttatagatgaaccaactagccctagcattgatcatgatattgcacatatccctgcctctgctgttatatcagcctctacctctcaggtcccctccatagcaacagttcctccttgcctcacaacttcagctccattaattcgccgtcagctctcacatgaccacgaatctgttggccctcctagcctggatgctcagcccaactcaaagacagaaagatcaaaatcatatgatgagggtctggatgattacagagaagatgcaaaattgtcctttaagcacgtatctagtctgaagggaatcaagatcgcagacagccaaaagtcatcagaagactctgggtccagaaaagattcttcctcagaggtcttcagtgatgctgccaaggaagggtggcttcatttccgaccccttgtcaccgataagggcaagcgagttggtggaagtattcggccatggaaacagatgtatgttgtccttcggggtcattcactttacctgtacaaagataaaagagagcagacgactccgtctgaggaagagcagcccatcagtgttaatgcttgcttgatagacatctcttacagtgagaccaagaggaaaaatgtgtttcgactcaccacgtccgactgtgaatgcctgtttcaggctgaagacagagatgatatgctagcttggatcaagacgatccaggagagcagcaacctaaacgaagaggacactggagtcactaacagggatctaattagtcgaagaataaaagaatacaacaatctgatgagcaaagcagaacagttgccaaaaacacctcgccagagtctcagcatcaggcaaactttgcttggtgctaaatcagagccaaagactcaaagcccacactctccgaaggaagagtcggaaaggaaacttctcagtaaagatgataccagtcccccaaaagacaaaggcacatggagaaaaggcattccaagtatcatgagaaagacatttgagaaaaagccaactgctacaggaactttcggcgtccgactagatgactgcccaccagctcatactaatcgggtaggagacaccagcccaccggatttcctcaagtcattaattcagttttga

SEQ ID NO: 271951 - DNA, 3829 bp, Artificial Sequence
  derived and/or modified sequence
cccggccgggcccggcgcccggccagcgtctccgcttcagctcgccgccgcgcttcggccgccgggcccgagcgggcgggaagggatctctctaggagctgacactcgaaccttcacgacccattcggatttttccaggactcaggagtggcactgggaagaaggggaccgctttctgcaattggcctcgacactggctgccaagaagacctgtcgcctttgtttttaagtctccagaaatggaagaagaaggcgaagtcagttgaagtcacgagaaatcagcgaggcatttgaaggcgcttcctgaaaacctttattccctggcacgttgtctgtttcaacagccctgcccctcctcggagcctgcttgtggaattcttccccttcgggtgtgtggtggcattccccgccacgtccaatgtggactccaaaggatttgtcccttctttgtcatttgaaatgaaatgatggccacgcgtcggactggtctgtctgagggagatggtgacaagctcaaggcctgcgaggtctcaaaaaataaagatggaaaagaacaaagtgaaactgtatcactgtctgaagatgaaacattctcctggccaggtcccaaaacagttacgttgaaaagaacatctcaaggctttggttttacattaagacattttattgtttatcccccagagtctgcaattcaattttcatataaggatgaagaaaatggaaacagaggaggaaaacaaagaaaccgcttggaaccaatggataccatatttgttaagcaagttaaagaaggaggacctgcttttgaagctggattatgtacaggtgaccgaattataaaagtcaatggagaaagtgttattggcaaaacctattcccaagtaattgctttaattcaaaacagtgatacaacattggaacttagtgttatgccaaaagatgaagacattctccaagtggcatattctcaagatgcctacctgaaaggcaacgaagcttatagcggcaatgcccgcaatatacctgaacctccaccaatctgctatccctggctgccatctgccccatcagccatggcacagccagttgaaatatctcctcctgactcatcattgagcaaacagcaaaccagtacaccagtactgacacaacctggtagggcctatagaatggaaatacaagtgcctccatcaccaacagatgttgcaaaatcaaacacagcagtgtgtgtttgcaatgaaagtgtaaggactgtcattgtgccttctgagaaggttgtagatttgttatccaatagaaacaaccatacaggtccttcacatagaactgaagaagtgaggtatggcgtgagtgagcagacctctttaaaaacagtgtcaagaaccacatcaccaccattatcaattcccaccactcatctaattcatcagcctgcaggctccagatcactggaaccttctggaattttacttaagtctggaaattacagtggacattctgatggaatctcaagcagcagatctcaagctgtggaggctccctctgtatctgttaatcactattcgccaaattcccatcagcacatagactggaaaaactataaaacttacaaagagtatattgataacagacgattgcacataggttgtcggacaatacaagaaagattagatagtttaagagcagcatctcaaagcacgacagattataaccaggtcgtccccaaccgcactactttgcagggacgacgtcgaagcacctctcatgatcgagtgccccagtctgtccagatacggcaacgcagtgtgtcccaagaaagactggaagattctgtgctaatgaagtattgtccaagaagtgcatctcaaggagcactgacgtctccatctgttagttttagtaatcatagaactcgttcatgggattatattgagggacaggatgaaaccttagaaaatgtcaattctggaactccaatacctgattccaatggagagaaaaaacagacttacaagtggagtgggtttactgaacaggatgatagacgaggtatttgtgaaagacctaggcagcaagaaattcataaatcttttcgaggttccaattttactgtggctccaagcgttgttaattctgataacaggcgaatgagtggtagaggagtgggatctgtgtcgcagtttaaaaaaattccaccagatctaaaaacattgcagtcaaacagaaattttcagactacttgtggaatgtcactgcctcggggtatttcacaagacaggtcacctcttgtgaaagtccgaagtaattctctgaaagctccttccacgcatgtcacaaaaccatcatttagccagaaatcatttgtttctatcaaagaccaaagaccagtaaatcacttgcatcagaacagtctgttgaatcagcagacatgggtaaggactgacagtgcccccgatcagcaagtggagactgggaaatccccctctttatctggagcctctgccaagcctgcccctcagtcgagtgaaaacgctggtacttcagatttagaactacctgtcagtcaaaggaatcaagatttaagtttacaagaggctgaaactgagcaatcagatactttagataataaagaagctgtcatcctaagggaaaaacctccatctggacgccagacaccgcagcctttaaggcatcagtcttacatcttggcagtaaatgaccaggagaccgggtcagacactacctgctggctgcccaatgatgcacgtcgagaggtccacataaaaagaatggaggaaagaaaagcctcgagtaccagtccgcctggcgattctttggcttccatcccatttatagatgaaccaactagccctagcattgatcatgatattgcacatatccctgcctctgctgttatatcagcctctacctctcaggtcccctccatagcaacagttcctccttgcctcacaacttcagctccattaattcgccgtcagctctcacatgaccacgaatctgttggccctcctagcctggatgctcagcccaactcaaagacagaaagatcaaaatcatatgatgagggtctggatgattacagagaagatgcaaaattgtcctttaagcacgtatctagtctgaagggaatcaagatcgcagacagccaaaagtcatcagaagactctgggtccagaaaagattcttcctcagaggtcttcagtgatgctgccaaggaagggtggcttcatttccgaccccttgtcaccgataagggcaagcgagttggtggaagtattcggccatggaaacagatgtatgttgtccttcggggtcattcactttacctgtacaaagataaaagagagcagacgactccgtctgaggaagagcagcccatcagtgttaatgcttgcttgatagacatctcttacagtgagaccaagaggaaaaatgtgtttcgactcaccacgtccgactgtgaatgcctgtttcaggctgaagacagagatgatatgctagcttggatcaagacgatccaggagagcagcaacctaaacgaagaggacactggagtcactaacagggatctaattagtcgaagaataaaagaatacaacaatctgatgagcaaagcagaacagttgccaaaaacacctcgccagagtctcagcatcaggcaaactttgcttggtgctaaatcagagccaaagactcaaagcccacactctccgaaggaagagtcggaaaggaaacttctcagtaaagatgataccagtcccccaaaagacaaaggcacatggagaaaaggcattccaagtatcatgag

SEQ ID NO: 271952 - DNA, 3654 bp, Artificial Sequence
  derived and/or modified sequence
atggcccagcccgtggagatcagcccccccgacagcagcctgagcaagcagcagaccagcacccccgtgctgacccagcccggcagagcctacagaatggagatccaggtgccccccagccccaccgacgtggccaagagcaacaccgccgtgtgcgtgtgcaacgagagcgtgagaaccgtgatcgtgcccagcgagaaggtggtggacctgctgagcaacagaaacaaccacaccggccccagccacagaaccgaggaggtgagatacggcgtgagcgagcagaccagcctgaagaccgtgagcagaaccaccagcccccccctgagcatccccaccacccacctgatccaccagcccgccggcagcagaagcctggagcccagcggcatcctgctgaagagcggcaactacagcggccacagcgacggcatcagcagcagcagaagccaggccgtggaggcccccagcgtgagcgtgaaccactacagccccaacagccaccagcacatcgactggaagaactacaagacctacaaggagtacatcgacaacagaagactgcacatcggctgcagaaccatccaggagagactggacagcctgagagccgccagccagagcaccaccgactacaaccaggtggtgcccaacagaaccaccctgcagggcagaagaagaagcaccagccacgacagagtgccccagagcgtgcagatcagacagagaagcgtgagccaggagagactggaggacagcgtgctgatgaagtactgccccagaagcgccagccagggcgccctgaccagccccagcgtgagcttcagcaaccacagaaccagaagctgggactacatcgagggccaggacgagaccctggagaacgtgaacagcggcacccccatccccgacagcaacggcgagaagaagcagacctacaagtggagcggcttcaccgagcaggacgacagaagaggcatctgcgagagacccagacagcaggagatccacaagagcttcagaggcagcaacttcaccgtggcccccagcgtggtgaacagcgacaacagaagaatgagcggcagaggcgtgggcagcgtgagccagttcaagaagatcccccccgacctgaagaccctgcagagcaacagaaacttccagaccacctgcggcatgagcctgcccagaggcatcagccaggacagaagccccctggtgaaggtgagaagcaacagcctgaaggcccccagcacccacgtgaccaagcccagcttcagccagaagagcttcgtgagcatcaaggaccagagacccgtgaaccacctgcaccagaacagcctgctgaaccagcagacctgggtgagaaccgacagcgcccccgaccagcaggtggagaccggcaagagccccagcctgagcggcgccagcgccaagcccgccccccagagcagcgagaacgccggcaccagcgacctggagctgcccgtgagccagagaaaccaggacctgagcctgcaggaggccgagaccgagcagagcgacaccctggacaacaaggaggccgtgatcctgagagagaagccccccagcggcagacagaccccccagcccctgagacaccagagctacatcctggccgtgaacgaccaggagaccggcagcgacaccacctgctggctgcccaacgacgccagaagagaggtgcacatcaagagaatggaggagagaaaggccagcagcaccagcccccccggcgacagcctggccagcatccccttcatcgacgagcccaccagccccagcatcgaccacgacatcgcccacatccccgccagcgccgtgatcagcgccagcaccagccaggtgcccagcatcgccaccgtgcccccctgcctgaccaccagcgcccccctgatcagaagacagctgagccacgaccacgagagcgtgggcccccccagcctggacgcccagcccaacagcaagaccgagagaagcaagagctacgacgagggcctggacgactacagagaggacgccaagctgagcttcaagcacgtgagcagcctgaagggcatcaagatcgccgacagccagaagagcagcgaggacagcggcagcagaaaggacagcagcagcgaggtgttcagcgacgccgccaaggagggctggctgcacttcagacccctggtgaccgacaagggcaagagagtgggcggcagcatcagaccctggaagcagatgtacgtggtgctgagaggccacagcctgtacctgtacaaggacaagagagagcagaccacccccagcgaggaggagcagcccatcagcgtgaacgcctgcctgatcgacatcagctacagcgagaccaagagaaagaacgtgttcagactgaccaccagcgactgcgagtgcctgttccaggccgaggacagagacgacatgctggcctggatcaagaccatccaggagagcagcaacctgaacgaggaggacaccggcgtgaccaacagagacctgatcagcagaagaatcaaggagtacaacaacctgatgagcaaggccgagcagctgcccaagacccccagacagagcctgagcatcagacagaccctgctgggcgccaagagcgagcccaagacccagagcccccacagccccaaggaggagagcgagagaaagctgctgagcaaggacgacaccagcccccccaaggacaagggcacctggagaaagggcatccccagcatcatgagaaagaccttcgagaagaagcccaccgccaccggcaccttcggcgtgagactggacgactgcccccccgcccacaccaacagatacatccccctgatcgtggacatctgctgcaagctggtggaggagagaggcctggagtacaccggcatctacagagtgcccggcaacaacgccgccatcagcagcatgcaggaggagctgaacaagggcatggccgacatcgacatccaggacgacaagtggagagacctgaacgtgatcagcagcctgctgaagagcttcttcagaaagctgcccgagcccctgttcaccaacgacaagtacgccgacttcatcgaggccaacagaaaggaggaccccctggacagactgaagaccctgaagagactgatccacgacctgcccgagcaccactacgagaccctgaagttcctgagcgcccacctgaagaccgtggccgagaacagcgagaagaacaagatggagcccagaaacctggccatcgtgttcggccccaccctggtgagaaccagcgaggacaacatgacccacatggtgacccacatgcccgaccagtacaagatcgtggagaccctgatccagcaccacgactggttcttcaccgaggagggcgccgaggagcccctgaccaccgtgcaggaggagagcaccgtggacagccagcccgtgcccaacatcgaccacctgctgaccaacatcggcagaaccggcgtgagccccggcgacgtgagcggcgaggtgggcggcgtgtaccacaccgtgatgagcctggtggacagcgtgatgagcctgatggacagctggaactgcagaaagaaggaggactgctgcccccactgcagctgcctggtgtgcagaaaccccagattcctgtag

SEQ ID NO: 271953 - DNA, 3498 bp, Artificial Sequence
  derived and/or modified sequence
atgatggccaccagaagaaccggcctgagcgagggcgacggcgacaagctgaaggcctgcgaggtgagcaagaacaaggacggcaaggagcagagcgagaccgtgagcctgagcgaggacgagaccttcagctggcccggccccaagaccgtgaccctgaagagaaccagccagggcttcggcttcaccctgagacacttcatcgtgtacccccccgagagcgccatccagttcagctacaaggacgaggagaacggcaacagaggcggcaagcagagaaacagactggagcccatggacaccatcttcgtgaagcaggtgaaggagggcggccccgccttcgaggccggcctgtgcaccggcgacagaatcatcaaggtgaacggcgagagcgtgatcggcaagacctacagccaggtgatcgccctgatccagaacagcgacaccaccctggagctgagcgtgatgcccaaggacgaggacatcctgcaggtggcctacagccaggacgcctacctgaagggcaacgaggcctacagcggcaacgccagaaacatccccgagcccccccccatctgctacccctggctgcccagcgcccccagcgccatggcccagcccgtggagatcagcccccccgacagcagcctgagcaagcagcagaccagcacccccgtgctgacccagcccggcagagcctacagaatggagatccaggtgccccccagccccaccgacgtggccaagagcaacaccgccgtgtgcgtgtgcaacgagagcgtgagaaccgtgatcgtgcccagcgagaaggtggtggacctgctgagcaacagaaacaaccacaccggccccagccacagaaccgaggaggtgagatacggcgtgagcgagcagaccagcctgaagaccgtgagcagaaccaccagcccccccctgagcatccccaccacccacctgatccaccagcccgccggcagcagaagcctggagcccagcggcatcctgctgaagagcggcaactacagcggccacagcgacggcatcagcagcagcagaagccaggccgtggaggcccccagcgtgagcgtgaaccactacagccccaacagccaccagcacatcgactggaagaactacaagacctacaaggagtacatcgacaacagaagactgcacatcggctgcagaaccatccaggagagactggacagcctgagagccgccagccagagcaccaccgactacaaccaggtggtgcccaacagaaccaccctgcagggcagaagaagaagcaccagccacgacagagtgccccagagcgtgcagatcagacagagaagcgtgagccaggagagactggaggacagcgtgctgatgaagtactgccccagaagcgccagccagggcgccctgaccagccccagcgtgagcttcagcaaccacagaaccagaagctgggactacatcgagggccaggacgagaccctggagaacgtgaacagcggcacccccatccccgacagcaacggcgagaagaagcagacctacaagtggagcggcttcaccgagcaggacgacagaagaggcatctgcgagagacccagacagcaggagatccacaagagcttcagaggcagcaacttcaccgtggcccccagcgtggtgaacagcgacaacagaagaatgagcggcagaggcgtgggcagcgtgagccagttcaagaagatcccccccgacctgaagaccctgcagagcaacagaaacttccagaccacctgcggcatgagcctgcccagaggcatcagccaggacagaagccccctggtgaaggtgagaagcaacagcctgaaggcccccagcacccacgtgaccaagcccagcttcagccagaagagcttcgtgagcatcaaggaccagagacccgtgaaccacctgcaccagaacagcctgctgaaccagcagacctgggtgagaaccgacagcgcccccgaccagcaggtggagaccggcaagagccccagcctgagcggcgccagcgccaagcccgccccccagagcagcgagaacgccggcaccagcgacctggagctgcccgtgagccagagaaaccaggacctgagcctgcaggaggccgagaccgagcagagcgacaccctggacaacaaggaggccgtgatcctgagagagaagccccccagcggcagacagaccccccagcccctgagacaccagagctacatcctggccgtgaacgaccaggagaccggcagcgacaccacctgctggctgcccaacgacgccagaagagaggtgcacatcaagagaatggaggagagaaaggccagcagcaccagcccccccggcgacagcctggccagcatccccttcatcgacgagcccaccagccccagcatcgaccacgacatcgcccacatccccgccagcgccgtgatcagcgccagcaccagccaggtgcccagcatcgccaccgtgcccccctgcctgaccaccagcgcccccctgatcagaagacagctgagccacgaccacgagagcgtgggcccccccagcctggacgcccagcccaacagcaagaccgagagaagcaagagctacgacgagggcctggacgactacagagaggacgccaagctgagcttcaagcacgtgagcagcctgaagggcatcaagatcgccgacagccagaagagcagcgaggacagcggcagcagaaaggacagcagcagcgaggtgttcagcgacgccgccaaggagggctggctgcacttcagacccctggtgaccgacaagggcaagagagtgggcggcagcatcagaccctggaagcagatgtacgtggtgctgagaggccacagcctgtacctgtacaaggacaagagagagcagaccacccccagcgaggaggagcagcccatcagcgtgaacgcctgcctgatcgacatcagctacagcgagaccaagagaaagaacgtgttcagactgaccaccagcgactgcgagtgcctgttccaggccgaggacagagacgacatgctggcctggatcaagaccatccaggagagcagcaacctgaacgaggaggacaccggcgtgaccaacagagacctgatcagcagaagaatcaaggagtacaacaacctgatgagcaaggccgagcagctgcccaagacccccagacagagcctgagcatcagacagaccctgctgggcgccaagagcgagcccaagacccagagcccccacagccccaaggaggagagcgagagaaagctgctgagcaaggacgacaccagcccccccaaggacaagggcacctggagaaagggcatccccagcatcatgagaaagaccttcgagaagaagcccaccgccaccggcaccttcggcgtgagactggacgactgcccccccgcccacaccaacagagtgggcgacaccagcccccccgacttcctgaagagcctgatccagttctag

SEQ ID NO: 271954 - DNA, 2724 bp, Artificial Sequence
  derived and/or modified sequence
atgcccaaggacgaggacatcctgcaggtggcctacagccaggacgcctacctgaagggcaacgaggcctacagcggcaacgccagaaacatccccgagcccccccccatctgctacccctggctgcccagcgcccccagcgccatggcccagcccgtggagatcagcccccccgacagcagcctgagcaagcagcagaccagcacccccgtgctgacccagcccggcagagcctacagaatggagatccaggtgccccccagccccaccgacgtggccaagagcaacaccgccgtgtgcgtgtgcaacgagagcgtgagaaccgtgatcgtgcccagcgagaaggtggtggacctgctgagcaacagaaacaaccacaccggccccagccacagaaccgaggaggtgagatacggcgtgagcgagcagaccagcctgaagaccgtgagcagaaccaccagcccccccctgagcatccccaccacccacctgatccaccagcccgccggcagcagaagcctggagcccagcggcatcctgctgaagagcggcaactacagcggccacagcgacggcatcagcagcagcagaagccaggccgtggaggcccccagcgtgagcgtgaaccactacagccccaacagccaccagcacatcgactggaagaactacaagacctacaaggagtacatcgacaacagaagactgcacatcggctgcagaaccatccaggagagactggacagcctgagagccgccagccagagcaccaccgactacaaccaggtggtgcccaacagaaccaccctgcagggcagaagaagaagcaccagccacgacagagtgccccagagcgtgcagatcagacagagaagcgtgagccaggagagactggaggacagcgtgctgatgaagtactgccccagaagcgccagccagggcgccctgaccagccccagcgtgagcttcagcaaccacagaaccagaagctgggactacatcgagggccaggacgagaccctggagaacgtgaacagcggcacccccatccccgacagcaacggcgagaagaagcagacctacaagtggagcggcttcaccgagcaggacgacagaagaggcatctgcgagagacccagacagcaggagatccacaagagcttcagaggcagcaacttcaccgtggcccccagcgtggtgaacagcgacaacagaagaatgagcggcagaggcgtgggcagcgtgagccagttcaagaagatcccccccgacctgaagaccctgcagagcaacagaaacttccagaccacctgcggcatgagcctgcccagaggcatcagccaggacagaagccccctggtgaaggtgagaagcaacagcctgaaggcccccagcacccacgtgaccaagcccagcttcagccagaagagcttcgtgagcatcaaggaccagagacccgtgaaccacctgcaccagaacagcctgctgaaccagcagacctgggtgagaaccgacagcgcccccgaccagcaggtggagaccggcaagagccccagcctgagcggcgccagcgccaagcccgccccccagagcagcgagaacgccggcaccagcgacctggagctgcccgtgagccagagaaaccaggacctgagcctgcaggaggccgagaccgagcagagcgacaccctggacaacaaggaggccgtgatcctgagagagaagccccccagcggcagacagaccccccagcccctgagacaccagagctacatcctggccgtgaacgaccaggagaccggcagcgacaccacctgctggctgcccaacgacgccagaagagaggtgcacatcaagagaatggaggagagaaaggccagcagcaccagcccccccggcgacagcctggccagcatccccttcatcgacgagcccaccagccccagcatcgaccacgacatcgcccacatccccgccagcgccgtgatcagcgccagcaccagccaggtgcccagcatcgccaccgtgcccccctgcctgaccaccagcgcccccctgatcagaagacagctgagccacgaccacgagagcgtgggcccccccagcctggacgcccagcccaacagcaagaccgagagaagcaagagctacgacgagggcctggacgactacagagaggacgccaagctgagcttcaagcacgtgagcagcctgaagggcatcaagatcgccgacagccagaagagcagcgaggacagcggcagcagaaaggacagcagcagcgaggtgttcagcgacgccgccaaggagggctggctgcacttcagacccctggtgaccgacaagggcaagagagtgggcggcagcatcagaccctggaagcagatgtacgtggtgctgagaggccacagcctgtacctgtacaaggacaagagagagcagaccacccccagcgaggaggagcagcccatcagcgtgaacgcctgcctgatcgacatcagctacagcgagaccaagagaaagaacgtgttcagactgaccaccagcgactgcgagtgcctgttccaggccgaggacagagacgacatgctggcctggatcaagaccatccaggagagcagcaacctgaacgaggaggacaccggcgtgaccaacagagacctgatcagcagaagaatcaaggagtacaacaacctgatgagcaaggccgagcagctgccctag

SEQ ID NO: 271955 - DNA, 279 bp, Artificial Sequence
  derived and/or modified sequence
atggacaccatcttcgtgaagcaggtgaaggagggcggccccgccttcgaggccggcctgtgcaccggcgacagaatcatcaaggtgaacggcgagagcgtgatcggcaagacctacagccaggtgatcgccctgatccagaacagcgacaccaccctggagctgagcgtgatgcccaaggacgaggacatcctgcaggtgaacctggagttcagcaccttctacaagaacaccatcgccaagttcctgcagctgagcgacatggagatgctgtgctag

SEQ ID NO: 271956 - protein, 187 aa, Artificial Sequence
  derived and/or modified sequence
MLGHPKVCEKLKALMVEWTDEFKNDPQLSLISAMIKNLKEQGVTFPAIGSQAAEQAKASPALVAKDPGTVANKKEEEDLAKAIELSLKEQRQQSTTLSTLYPSTSSLLTNHQHEGRKVRAIYDFEAAEDNELTFKAGEIITVLDDSDPNWWKGETHQGIGLFPSNFVTADLTAEPEMIKTEKKTVQF

SEQ ID NO: 271957 - protein, 118 aa, Artificial Sequence
  derived and/or modified sequence
MRRVNHKDPHVAMQALTLLGACVSNCGKIFHLEVCSRDFASEVSNVLNKGHPKVCEKLKALMVEWTDEFKNDPQLSLISAMIKNLKEQGVTFPAIGSQAAEQAKASPALVAKDPGTVA

SEQ ID NO: 271958 - protein, 429 aa, Artificial Sequence
  derived and/or modified sequence
MVEWTDEFKNDPQLSLISAMIKNLKEQGVTFPAIGSQAAEQAKASPALVAKDPGTVANKKEEEDLAKAIELSLKEQRQQSTTLSTLYPSTSSLLTNHQHEGRKVRAIYDFEAAEDNELTFKAGEIITVLDDSDPNWWKGETHQGIGLFPSNFVTADLTAEPEMIKTEKKTVQFSDDVQVETIEPEPEPAFIDEDKMDQLLQMLQSTDPSDDQPDLPELLHLEAMCHQMGPLIDEKLEDIDRKHSELSELNVKVMEALSLYTKLMNEDPMYSMYAKLQNQPYYMQSSGVSGSQVYAGPPPSGAYLVAGNAQMSHLQSYSLPPEQLSSLSQAVVPPSANPALPSQQTQAAYPNTMVSSVQGNTYPSQAPVYSPPPAATAAAATADVTLYQNAGPNMPQVPNYNLTSSTLPQPGGSQQPPQPQQPYSQKALL

SEQ ID NO: 271959 - DNA, 564 bp, Artificial Sequence
  derived and/or modified sequence
atgctggggcaccccaaggtgtgcgagaagctgaaagccttaatggtcgagtggacagatgaatttaagaatgaccctcagctgtcgctgatcagtgccatgatcaaaaatcttaaagaacaaggtgtgacctttcccgccattgggagccaagccgccgagcaagccaaggcatctcccgccctggtagctaaggaccctggaacagtcgccaataagaaggaggaggaggatctcgcgaaggctatcgaattatccctgaaagaacaaagacagcagtccacaacattaagcactctgtacccttccacctcaagtttactgaccaaccaccagcatgaaggtcgcaaggtgcgagccatttatgattttgaggcggcagaagacaatgaactaactttcaaggccggcgagataatcactgtgctcgatgactccgaccctaactggtggaaaggcgagacgcaccagggtattgggctgtttccttccaattttgtgaccgcggatctgaccgccgagcctgagatgataaaaaccgagaaaaagaccgtgcagttttag

SEQ ID NO: 271960 - DNA, 357 bp, Artificial Sequence
  derived and/or modified sequence
atgcggagggtaaatcacaaagacccccacgtggccatgcaggcgctgactttacttggtgcttgtgtgtcgaactgtggcaagatcttccacctagaggtatgcagtcgggactttgcctcagaagtttccaacgtccttaataagggccatcccaaggtctgcgagaagttgaaggcgctcatggtggaatggactgatgagtttaagaatgatccgcaactctcccttatttccgccatgatcaagaacttgaaggaacagggcgtgacattccctgcaatcggttctcaagcagcagaacaggcaaaggcaagccccgccctggtagctaaagatccgggcaccgtggcctag

SEQ ID NO: 271961 - DNA, 1290 bp, Artificial Sequence
  derived and/or modified sequence
atggtggaatggacagacgagttcaaaaacgatcctcagctgtcactcatttccgcgatgattaagaatttaaaggaacaaggggtgaccttccccgcaataggcagtcaggccgctgagcaggccaaggctagtccagccttggttgccaaggacccgggaaccgtcgcaaataagaaagaagaagaggaccttgctaaggccatcgagctgagtcttaaggaacaaagacagcaatccactactctatcaacactttatccatccactagcagcctcctgaccaaccatcagcacgagggtaggaaagtacgggctatttacgatttcgaggctgctgaagacaacgagctaaccttcaaggctggagaaatcattacagtgctggacgactcagaccctaactggtggaagggcgaaactcatcaggggatcggcctcttccccagcaattttgttacggcggatttgaccgccgagcctgaaatgattaaaactgaaaaaaagaccgtgcagttttcggatgatgtgcaggtcgaaacaatagaacccgagcctgagcctgcgttcatcgatgaggacaaaatggaccaactgttgcaaatgctgcaaagcaccgaccctagcgacgatcagcccgatctccccgaattacttcacctggaagcaatgtgtcaccagatgggacccctgatcgacgagaagctcgaggacattgatcgtaagcattcagagcttagtgagctgaatgttaaggtgatggaggctctgtcactctacacgaagttgatgaatgaggatccaatgtattcaatgtacgctaagttacaaaaccagccttattacatgcaaagctccggggttagtggatcgcaggtgtatgcaggtccaccgccaagcggtgcctatctcgtagcaggaaatgcacagatgtcccatctacagtcctacagcctcccgccagagcagctatcttcacttagccaggctgtggttcccccatccgccaacccggctctgcccagtcagcaaacacaggctgcttaccctaacactatggtgtccagcgttcaaggtaacacatacccatctcaggcaccggtttattctccccctccggcggctaccgccgcggcagccaccgccgacgtgaccctctatcagaacgcaggtccaaatatgcctcaggtcccgaactataacctcacatcaagcacattgccccagccaggcggcagccagcagcccccccaacctcagcagccttacagccagaaggctctgctgtag

SEQ ID NO: 271962 - DNA, 564 bp, Artificial Sequence
  derived and/or modified sequence
atgctgggccaccccaaggtgtgtgagaagctgaaggccctgatggtggagtggacagatgagttcaagaatgacccccagctgagcctcatcagcgccatgatcaagaacctgaaggagcagggcgtgaccttccctgccatcggcagccaggccgctgagcaggccaaggccagccctgccctggtggccaaggaccccggcaccgtggccaacaagaaggaggaggaggacctggccaaggccatcgagctgagcctgaaggagcagaggcagcagagcaccaccctgagcaccctgtaccccagcaccagcagcctgctgaccaaccaccagcacgagggcaggaaggtgcgggccatctatgactttgaggccgctgaggacaatgagctgaccttcaaggccggggagatcatcaccgtgctggatgacagcgaccccaactggtggaagggggagacccaccagggcatcggcctcttccccagcaactttgtgacagctgacctgacagctgagcctgagatgatcaagacagagaagaagacagtgcagttctag

SEQ ID NO: 271963 - DNA, 357 bp, Artificial Sequence
  derived and/or modified sequence
atgagaagagtgaaccacaaggacccccacgtggccatgcaggccctgaccctgctgggcgcctgtgtgagcaactgtgggaagatcttccacctggaggtgtgcagccgggactttgccagcgaggtgtccaatgtgctgaacaagggccaccccaaggtgtgtgagaagctgaaggccctgatggtggagtggacagatgagttcaagaatgacccccagctgagcctcatcagcgccatgatcaagaacctgaaggagcagggcgtgaccttccctgccatcggcagccaggccgctgagcaggccaaggccagccctgccctggtggccaaggaccccggcaccgtggcctag

SEQ ID NO: 271964 - DNA, 1290 bp, Artificial Sequence
  derived and/or modified sequence
atggtggagtggacagatgagttcaagaatgacccccagctgagcctcatcagcgccatgatcaagaacctgaaggagcagggcgtgaccttccctgccatcggcagccaggccgctgagcaggccaaggccagccctgccctggtggccaaggaccccggcaccgtggccaacaagaaggaggaggaggacctggccaaggccatcgagctgagcctgaaggagcagaggcagcagagcaccaccctgagcaccctgtaccccagcaccagcagcctgctgaccaaccaccagcacgagggcaggaaggtgcgggccatctatgactttgaggccgctgaggacaatgagctgaccttcaaggccggggagatcatcaccgtgctggatgacagcgaccccaactggtggaagggggagacccaccagggcatcggcctcttccccagcaactttgtgacagctgacctgacagctgagcctgagatgatcaagacagagaagaagacagtgcagttcagtgatgatgtgcaggtggagaccatcgagcctgagcctgagcccgccttcattgatgaggacaagatggaccagctgctgcagatgctgcagagcacagaccccagtgatgaccagcctgacctgcctgagctgctgcacctggaggccatgtgccaccagatgggccccctgattgatgagaagctggaggacatcgacaggaagcacagcgagctgtctgagctgaatgtgaaggtgatggaggccctgagcctgtacaccaagctgatgaatgaagaccccatgtacagcatgtatgccaagctgcagaaccagccctactacatgcagagcagcggcgtgtctggcagccaggtgtatgccggccccccacccagcggggcctacctggtggccggaaatgcccagatgagccacctgcagagctacagcctgcccccagagcagctgagcagcctgagccaggccgtggtgcccccatctgccaacccagccctgcccagccagcagacccaggccgcctaccccaacaccatggtgtcctctgtgcagggcaacacctaccccagccaggcccctgtgtacagccccccacctgctgccacagctgctgctgccacagcagatgtgaccctgtaccagaatgccggccccaacatgccccaggtgcccaactacaacctgaccagcagcaccctgccccagcccggcggcagccagcagcccccccagccccagcagccctacagccagaaggccctgctgtag

SEQ ID NO: 271965 - DNA, 564 bp, Artificial Sequence
  derived and/or modified sequence
atgctgggccaccccaaggtgtgcgagaagctgaaggccctgatggtggagtggacagatgagttcaagaacgatccgcagctgagtttaatttcagccatgatcaagaaccttaaggagcagggcgtgacattccccgccatcgggagtcaagccgctgagcaagcgaaggccagccctgctctggtggcaaaggatcctgggacagtggcaaataaaaaggaagaggaggaccttgctaaggcgatagagctctccctgaaggaacagcgccagcagtctactaccctgtccactctgtatcccagcaccagtagtttgctgacaaatcaccaacacgagggcagaaaggttcgtgccatttacgatttcgaagctgccgaggacaacgagcttacttttaaagcaggagaaataatcacagtgctggacgactctgacccgaactggtggaaaggggagacccaccagggaatcgggctttttccttctaacttcgtgaccgccgacttgacagctgagcctgaaatgattaaaacagaaaagaagacagtgcagttctag

SEQ ID NO: 271966 - DNA, 357 bp, Artificial Sequence
  derived and/or modified sequence
atgcggcgggtgaaccacaaggacccccacgtggccatgcaggccttgacactactcggggcctgcgttagcaattgcggcaaaatctttcacctagaggtctgctcccgcgacttcgctagcgaagttagtaatgttttaaataagggacaccccaaggtatgcgaaaaactgaaggcactgatggtcgagtggaccgatgaattcaagaacgacccacagctcagtctcattagtgctatgatcaagaatctgaaagaacaaggtgttactttcccagctatcgggagccaggcagctgaacaagccaaggcctctccagcactggtggcaaaagacccagggactgtagcctag

SEQ ID NO: 271967 - DNA, 1290 bp, Artificial Sequence
  derived and/or modified sequence
atggtggagtggaccgacgagttcaagaacgacccccagctgagcctgatcagcgctatgataaagaacttgaaggaacaaggggttacattcccggccatcggttctcaagcagcggagcaggctaaggcatcccccgccctggtcgccaaggaccctgggactgttgctaataaaaaggaggaagaggaccttgcaaaagcaatcgagctgtccctgaaggagcaacgccagcaatctactactctctctacactgtacccttccacctcctctctgctgacgaaccaccagcacgagggaagaaaggtgcgtgcgatttatgacttcgaagctgccgaggataacgaactgacctttaaggccggagagataatcactgtgctggacgactctgaccctaattggtggaaaggggaaacacatcaagggatcggcctgtttccgtcaaacttcgtgacagctgacctgacggctgagccagagatgattaagacagaaaaaaaaacggtccagttctccgatgacgtccaggtggaaactatagagcctgagccagaacccgcttttattgacgaggataaaatggaccaattgcttcaaatgctccaatctacagacccctctgacgaccagcctgacttaccggagcttctgcacctcgaggccatgtgtcatcagatgggacccttgatcgacgagaagctcgaggacatagaccgcaagcacagtgaacttagcgagctcaatgtgaaggtgatggaagccttgagtttgtacaccaaactcatgaatgaggaccctatgtatagtatgtatgcaaagctccagaatcaaccctactatatgcagtctagtggcgtgtccggcagccaggtgtatgctgggccacctcccagtggcgcatacctggtagctggcaacgctcagatgtcacacctccaatcatattctttaccccctgagcagctgtcttcattaagccaggctgtggtcccccccagtgctaatcccgcattaccaagtcagcagacgcaggccgcctacccgaacactatggtgtcaagtgtacaaggtaacacgtatccttctcaggccccagtctacagtccccctccggccgctactgcagctgctgcaacggccgacgtgaccctgtaccagaatgcaggccccaatatgccacaggtacccaattacaacctgacttcgagtacattaccccaacccggaggctcccagcagcccccacaaccacagcagccttatagccaaaaggcgctgctgtag

SEQ ID NO: 271968 - DNA, 564 bp, Artificial Sequence
  derived and/or modified sequence
atgctgggccaccctaaggtttgcgaaaaactcaaggctctgatggtggaatggactgacgaattcaagaatgacccacaactgagcctgattagcgctatgattaaaaatctgaaagagcagggggtgacgttcccggctatcggttcccaggccgcagagcaagccaaagcctcccccgctcttgtggcaaaagaccccggaactgtggcaaacaagaaggaggaggaggacttagctaaagcaatcgaactttcccttaaagagcagagacagcagagcacgaccctctctaccctgtacccgtccacaagttctctcctgacaaaccaccagcatgaaggaagaaaagttagggcgatctatgatttcgaggccgcagaagataatgaacttacattcaaggccggagaaattatcactgtccttgacgactcggatccaaactggtggaagggtgaaactcatcagggcatcggtttatttcctagcaatttcgtgactgccgacttgaccgccgaacccgagatgattaagactgagaagaaaaccgtccaattttag

SEQ ID NO: 271969 - DNA, 357 bp, Artificial Sequence
  derived and/or modified sequence
atgagaagggtgaaccataaggaccctcacgtggctatgcaggcactgactctcttgggtgcctgcgtcagtaactgtggcaaaatcttccacttggaggtctgctcccgggactttgccagtgaggtatctaatgtgttgaacaaggggcacccaaaggtttgcgagaaacttaaagccctgatggtggagtggacagacgagttcaaaaacgacccccagctttccctgatttcagctatgatcaagaatctaaaggaacagggtgtcacattcccggctattggctcccaagccgctgagcaagctaaggcaagcccagctctggtagccaaggatcccggtaccgtggcctag

SEQ ID NO: 271970 - DNA, 1290 bp, Artificial Sequence
  derived and/or modified sequence
atggtcgaatggacggatgagttcaaaaacgacccacagctgagtctaatttccgcaatgatcaagaaccttaaggaacagggcgtgactttccccgcaatcggctctcaggccgcagaacaggcaaaggcctctcccgctctagttgcaaaggacccagggactgtcgccaataagaaggaggaggaggacttggcaaaggcgatcgagctgtctctaaaagaacagcggcagcagtctaccacattaagcactctgtacccgtctacctcctccttattgacaaaccaccagcatgaggggaggaaggtgcgcgctatttacgatttcgaggcagccgaggataatgaattgacattcaaggccggtgaaattattaccgttctcgatgacagcgaccctaattggtggaagggcgagacacatcagggaatcgggctgtttccaagcaactttgtgacagcagatttgacagcggagccagaaatgataaagacggaaaagaaaaccgtacaattctctgacgatgtgcaggtggaaactatagaaccagaacctgagccagcctttattgacgaagacaaaatggaccagctgcttcagatgctgcaaagcaccgaccctagcgacgaccagccggatctgccggaattgctgcacttggaagctatgtgtcatcagatgggaccactgatagatgaaaaactggaggacattgacaggaaacattccgaactgagtgaactgaacgtgaaggtcatggaagcgctctctctgtacacaaaacttatgaacgaagatcctatgtatagtatgtacgctaagctccagaatcagccttactatatgcaatcatctggagtgagtggcagccaggtgtatgccggtcctcctcctagcggtgcttacctagtcgctggcaatgcacaaatgtctcacctgcagagctactctctgcctcccgagcagctgtcttcgctatctcaggcagtggtcccaccctccgcgaacccagccctgccctctcagcagactcaggcagcttatcctaatacaatggtatcttctgtgcaagggaacacatacccttctcaggcccctgtgtattcaccccctccggctgctactgccgcagccgcaacagctgatgtgacattgtaccaaaatgccggacccaacatgccccaggtccccaattataatctgacctcttctactttgccgcaaccaggagggagccaacagccccctcaaccacagcagccatattcccagaaagccctgctctag

SEQ ID NO: 271971 - DNA, 729 bp, Artificial Sequence
  derived and/or modified sequence
ggagctgtcgcggaccctgtagagtcggtctctgttgctctttttgcctgaggagtcttccatcctacgtcgagctctgactcccgtgctgtcgagagggagtccccggggacacctcggcacgcagcggagatgcctctttttgccaccaatcccttcgatcaggatgttgggtcatcctaaagtatgtgaaaaattaaaggctcttatggttgaatggacagatgaatttaagaatgatccacagcttagtctaatatcagcaatgattaagaaccttaaggaacaaggagttacgttcccagctattggctctcaggctgcagaacaagcaaaagcaagcccagctcttgtagccaaggatcctggtactgtggctaacaaaaaagaagaagaagatttagcaaaagccattgagttgtctctcaaggaacaaaggcagcagtcaaccaccctttccactttgtatccaagcacatccagtctcttaactaaccaccaacatgaaggccgaaaagttcgtgctatatatgactttgaagctgctgaagacaatgaacttacttttaaagctggagaaattattacagttcttgatgacagtgatcctaactggtggaaaggtgaaacccatcaaggcatagggttatttccttctaattttgtgactgcagatctcactgctgaaccagaaatgattaaaacagagaagaagacggtacaatttag

SEQ ID NO: 271972 - DNA, 1984 bp, Artificial Sequence
  derived and/or modified sequence
ttccatcctacgtcgagctctgactcccgtgctgtcgagagggagtccccggggacacctcggcacgcagcggagatgcctctttttgccaccaatcccttcgatcaggatgttgagaaagcaaccagcgagatgaatactgctgaggactggggcctcattttggatatctgtgataaagttggtcagtctcgcactggggtcatcctaaagtatgtgaaaaattaaaggctcttatggttgaatggacagatgaatttaagaatgatccacagcttagtctaatatcagcaatgattaagaaccttaaggaacaaggagttacgttcccagctattggctctcaggctgcagaacaagcaaaagcaagcccagctcttgtagccaaggatcctggtactgtggctaacaaaaaagaagaagaagatttagcaaaagccattgagttgtctctcaaggaacaaaggcagcagtcaaccaccctttccactttgtatccaagcacatccagtctcttaactaaccaccaacatgaaggccgaaaagttcgtgctatatatgactttgaagctgctgaagacaatgaacttacttttaaagctggagaaattattacagttcttgatgacagtgatcctaactggtggaaaggtgaaacccatcaaggcatagggttatttccttctaattttgtgactgcagatctcactgctgaaccagaaatgattaaaacagagaagaagacggtacaatttagtgatgatgttcaggtagagacaatagaaccagagccggaaccagcctttattgatgaagataaaatggaccagttgctacagatgctgcaaagtacagaccccagtgatgatcagccagacctaccagagctgcttcatcttgaagcaatgtgtcaccagatgggacctctcattgatgaaaagctggaagatattgatagaaaacattcagaactctcagaacttaatgtgaaagtgatggaggccctttccttatataccaagttaatgaacgaagatccgatgtattccatgtatgcaaagttacagaatcagccatattatatgcagtcatctggtgtttctggttctcaggtgtatgcagggcctcctccaagtggtgcctacctggttgcagggaacgcgcagatgagccacctccagagctacagtcttcccccggagcagctgtcttctctcagccaggcagtggtcccaccatccgcaaacccagcccttcctagtcagcagactcaggccgcttacccaaatacaatggtcagttccgttcaaggaaacacatatcccagccaggcgccagtatatagtcctcctcctgccgctactgctgctgctgcaactgccgatgtcactctgtaccagaatgcaggacctaatatgccccaggtgccaaactataacttaacatcatcaactctgcctcagcccggaggcagccaacagccacctcagccacagcaaccatattctcagaaggctctgctataggacccggtgttcctcttggtggcagatacctgctaaatgccactgacaatgttatgagattcattactatcttaagatgtgtttatcctcagcttataggaatctctccaggtcaacaggttcaaatattcaagaaggtagaactctcctcaatttacactgactttttagaggttcttccccccccgcccctgcagaggaatgaaactacttacaacatttaattcctttcataatatgaaagaattgatacaaggctatttgtctcgtaaacctggtctgcagaaagtcaaacttacaaaaactgttgtgacaaatgttatgtacatatattgatatgtaactgcattagtggccattttgaatcacagtggtgatcgtgtgaatatatttaacactgtgttaaattaatttacgttgctattttattttaatcataaacaactaccatgtttctt

SEQ ID NO: 271973 - DNA, 564 bp, Artificial Sequence
  derived and/or modified sequence
atgctgggccaccccaaggtgtgcgagaagctgaaggccctgatggtggagtggaccgacgagttcaagaacgacccccagctgagcctgatcagcgccatgatcaagaacctgaaggagcagggcgtgaccttccccgccatcggcagccaggccgccgagcaggccaaggccagccccgccctggtggccaaggaccccggcaccgtggccaacaagaaggaggaggaggacctggccaaggccatcgagctgagcctgaaggagcagagacagcagagcaccaccctgagcaccctgtaccccagcaccagcagcctgctgaccaaccaccagcacgagggcagaaaggtgagagccatctacgacttcgaggccgccgaggacaacgagctgaccttcaaggccggcgagatcatcaccgtgctggacgacagcgaccccaactggtggaagggcgagacccaccagggcatcggcctgttccccagcaacttcgtgaccgccgacctgaccgccgagcccgagatgatcaagaccgagaagaagaccgtgcagttctag

SEQ ID NO: 271974 - DNA, 357 bp, Artificial Sequence
  derived and/or modified sequence
atgagaagagtgaaccacaaggacccccacgtggccatgcaggccctgaccctgctgggcgcctgcgtgagcaactgcggcaagatcttccacctggaggtgtgcagcagagacttcgccagcgaggtgagcaacgtgctgaacaagggccaccccaaggtgtgcgagaagctgaaggccctgatggtggagtggaccgacgagttcaagaacgacccccagctgagcctgatcagcgccatgatcaagaacctgaaggagcagggcgtgaccttccccgccatcggcagccaggccgccgagcaggccaaggccagccccgccctggtggccaaggaccccggcaccgtggcctag

SEQ ID NO: 271975 - DNA, 1290 bp, Artificial Sequence
  derived and/or modified sequence
atggtggagtggaccgacgagttcaagaacgacccccagctgagcctgatcagcgccatgatcaagaacctgaaggagcagggcgtgaccttccccgccatcggcagccaggccgccgagcaggccaaggccagccccgccctggtggccaaggaccccggcaccgtggccaacaagaaggaggaggaggacctggccaaggccatcgagctgagcctgaaggagcagagacagcagagcaccaccctgagcaccctgtaccccagcaccagcagcctgctgaccaaccaccagcacgagggcagaaaggtgagagccatctacgacttcgaggccgccgaggacaacgagctgaccttcaaggccggcgagatcatcaccgtgctggacgacagcgaccccaactggtggaagggcgagacccaccagggcatcggcctgttccccagcaacttcgtgaccgccgacctgaccgccgagcccgagatgatcaagaccgagaagaagaccgtgcagttcagcgacgacgtgcaggtggagaccatcgagcccgagcccgagcccgccttcatcgacgaggacaagatggaccagctgctgcagatgctgcagagcaccgaccccagcgacgaccagcccgacctgcccgagctgctgcacctggaggccatgtgccaccagatgggccccctgatcgacgagaagctggaggacatcgacagaaagcacagcgagctgagcgagctgaacgtgaaggtgatggaggccctgagcctgtacaccaagctgatgaacgaggaccccatgtacagcatgtacgccaagctgcagaaccagccctactacatgcagagcagcggcgtgagcggcagccaggtgtacgccggccccccccccagcggcgcctacctggtggccggcaacgcccagatgagccacctgcagagctacagcctgccccccgagcagctgagcagcctgagccaggccgtggtgccccccagcgccaaccccgccctgcccagccagcagacccaggccgcctaccccaacaccatggtgagcagcgtgcagggcaacacctaccccagccaggcccccgtgtacagccccccccccgccgccaccgccgccgccgccaccgccgacgtgaccctgtaccagaacgccggccccaacatgccccaggtgcccaactacaacctgaccagcagcaccctgccccagcccggcggcagccagcagcccccccagccccagcagccctacagccagaaggccctgctgtag

SEQ ID NO: 271976 - protein, 62 aa, Artificial Sequence
  derived and/or modified sequence
  misc_feature (1)..(1): Xaa can be any naturally occurring amino acid
XENPLVYCDGHGCSVAVHQACYGIVQVPTGPWFCRKCESQERAARVVGPMWFVPCIFQRYNL

SEQ ID NO: 271977 - protein, 361 aa, Artificial Sequence
  derived and/or modified sequence
VTTEKTYTSTSNNSISGSLKRLEDTTARFTNANFQEVSAHTSSGKDVSETRGSEGKGKKSSAHSSGQRGRKPGGGRNPGTTVSAASPFPQAGYKRAQTSGIEEETVKEKKRKGNKQSKHGPGRPKGNKNQENVSHLSVSSASPTSSVASAAGSITSSSLQKSPTLLRNGSLQSLSVGSSPVGSEISMQYRHDGACPTTTFSELLNAIHNDRGDSSTLTKQELKFIGIYNSNDVAVSFPNVVSGSGSSTPVSSSHLPQQSSGHLQQVGALSPSAVSSAAPAVATTQANTLSGSSLSQAPSHMYGNRSNSSMAALIAQSENNQTDQDLGDNSRNLVGRGSSPRGSLSPRSPVSSLQIRYDQPG

SEQ ID NO: 271978 - DNA, 3086 bp, Artificial Sequence
  derived and/or modified sequence
agcatggaaaagacttatacaagcactagcaacaactctatatctggatcattgaagcgcttggaagatactactgcacgatttacaaatgcaaatttccaggaagtctctgcacacacctctagtggaaaagatgtttcagagactagagggtcagagggcaaagggaagaaatcttcagctcacagctcaggtcaaaggggaagaaagcctggtggtggaagaaatccaggaacaactgtgtcagcagctagcccttttcctcaagcaggatataagcgggctcaaacttctggcatagaagaagaaactgtaaaggaaaagaaaaggaaaggaaataaacaaagtaagcatgggcctggcagacccaaaggaaacaaaaatcaagagaatgtttctcatctctcagtttcttctgcttcaccaacatcatctgtagcatcagctgcaggaagcataacaagctctagtctgcagaaatctcctacattgctcaggaatggaagtttacagagcctcagtgttggctcatctccagttggttcagaaatttccatgcagtatcggcatgatggagcttgcccaacaactacgttctcagagttgctgaatgcaatacacaacgacagaggtgacagttctacactaacaaagcaagaacttaaattcataggtatttataacagcaatgatgtagcagtatcgtttccaaatgtagtatctggctcgggatctagtactcctgtctccagctctcacttacctcagcagtcttctgggcatttgcaacaagtaggagcgctctctccctcagctgtgtcatctgcagcccctgctgttgctacaactcaggcaaatactctatctggatcttctctcagtcaggcaccatctcatatgtatggcaatagatcaaattcatcaatggcagctcttatagctcagtctgaaaacaatcaaacagatcaagatcttggagacaatagccgcaacctagttggcagaggaagctcaccccgaggaagtctctcgccacgatcccctgtaagcagcttacagattcgctatgatcaaccaggcaacagcagtttggaaaatctgcctccagtagcagccagcatagaacagcttttggagaggcagtggagtgaaggacagcaatttttactagaacagggtactcctagtgacattttaggaatgctgaagtcattacaccaacttcaagttgaaaaccgaagattagaggaacaaattaaaaacttgactgccaaaaaggaacggcttcagttattgaatgcacagctttcagtgccttttccaacaataacagcaaatcctagtccgtctcatcaaatacacacattttcagcacagactgctcctactactgattccttgaacagcagtaagagccctcatataggaaacagctttttacctgataattctcttcctgtattaaatcaggacttaacctccagtggacaaagtaccagcagctcatcagctctttctaccccacctcctgctgggcagagtccggctcaacaaggctcaggagtgagtggagttcagcaggtcaatggcgtgacagtgggggcactagctagtggaatgcagcctgtaacttccaccattcctgccgtgtctgcagtgggtggaataattggagctttgccaggtaaccaactggcaattaatggcattgtaggagctttaaatggggttatgcagactcctgtcacaatgtcccagaaccctacccctctcacccacacaaccgtaccacctaatgcaacacatccaatgccagctacactgactaacagtgcctcaggactaggattactttctgaccagcaacgacaaatacttattcatcaacagcagtttcagcagttgttaaattctcaacagctcacaccagaacaacatcaagcctttttgtatcagttaatgcaacatcaccaccagcagcaccaccaacctgaacttcagcagctgcagatccctggaccaacacaaatacccataaacaaccttcttgcaggtacacaggcacccccacttcacacagctaccaccaacccatttctcaccatccatggagataatgcaagtcagaaagtagcaagacttagtgataaaactgggcctgtagctcaagagaaaagttgacacctgagaaacatctagaaattgcctatcctgctgttctagcacttcatctggctgcctttgcagtccttttactacagctatgaagaaacgcaacaagaaactcaatgcacaacaaaggattaattgctgcaaggacattcttgtaaggctttgattagttttcttgttgctttgttgcactgaaatggaattcccatgcccctaccccttaccccagttttttgaacatggaaagaaaatttaataactttttaaagtgacataatttacatgcaatatgtttatcaactcaagaatttaatatagttggtacacaactagttttgtttataaattggagatgcaaatagcaaaactaaatacttgctccatttacaaactacttgattttattgtacaagttgaaatatgctcttttgtttgggttacagtatgcttgctctaagtcaaattccaaggaactaatttcttctcctggagttgcattgattcagtattacaaatatatagcacatcacctgggacttggcaatctttgttaaaaaaaaatttcctttctaatgggatttggccaattttggtaatgaagttaggatggtaatgtctgcatctgctaaaggtaattttcttttgagaattgctttctttagtgttaagacctactcatattttgaagaaatcttgagttaagtgagttctgaggctgctgggggaaccagatcaattcaaagctaaatacttctttcagaaaggggccactgtggaaagtgctggtggggtttgcccttgatcaagtgcctccattgtgctgcaagggctgtagacagcagggtgggacagtcagtcctccgagcagcaggaatcatcccgtcacctgcagccttcccatgcttccgccttta

SEQ ID NO: 271979 - protein, 835 aa, Artificial Sequence
  derived and/or modified sequence
MTCNKHGCRQAFHVTCAQFAGLLCEEEGNGADNVQYCGYCKYHFSKLKKSKRGSNRSYDQSLSDSSSHSQDKHHEKEKKKYKEKDKHKQKHKKQPEPSPALVPSLTVTTEKTYTSTSNNSISGSLKRLEDTTARFTNANFQEVSAHTSSGKDVSETRGSEGKGKKSSAHSSGQRGRKPGGGRNPGTTVSAASPFPQGSFSGTPGSVKSSSGSSVQSPQDFLSFTDSDLRNDSYSHSQQSSATKDVHKGESGSQEGGVNSFSTLIGLPSTSAVTSQPKSFENSPGDLGNSSLPTAGYKRAQTSGIEEETVKEKKRKGNKQSKHGPGRPKGNKNQENVSHLSVSSASPTSSVASAAGSITSSSLQKSPTLLRNGSLQSLSVGSSPVGSEISMQYRHDGACPTTSIYNSNDVAVSFPNVVSGSGSSTPVSSSHLPQQSSGHLQQVGALSPSAVSSAAPAVATTQANTLSGSSLSQAPSHMYGNRSNSSMAALIAQSENNQTDQDLGDNSRNLVGRGSSPRGSLSPRSPVSSLQIRYDQPGNSSLENLPPVAASIEQLLERQWSEGQQFLLEQGTPSDILGMLKSLHQLQVENRRLEEQIKNLTAKKERLQLLNAQLSVPFPTITANPSPSHQIHTFSAQTAPTTDSLNSSKSPHIGNSFLPDNSLPVLNQDLTSSGQSTSSSSALSTPPPAGQSPAQQGSGVSGVQQVNGVTVGALASGMQPVTSTIPAVSAVGGIIGALPGNQLAINGIVGALNGVMQTPVTMSQNPTPLTHTTVPPNATHPMPATLTNSASGLGLLSDQQRQILIHQQQFQQLLNSQQLTPNMVKEFSAQIIAWRP

SEQ ID NO: 271980 - protein, 180 aa, Artificial Sequence
  derived and/or modified sequence
  misc_feature (1)..(1): Xaa can be any naturally occurring amino acid
XSQPKSFENSPGDLGNSSLPTAGYKRAQTSGIEEETVKEKKRKGNKQSKHGPGRPKGNKNQENVSHLSVSSASPTSSVASAAGSITSSSLQKSPTLLRNGSLQSLSVGSSPVGSEISMQYRHDGACPTTSIYNSNDVAVSFPNVVSGSGSSTPVSSSHLPQQSSGHLQQVGALSPSAVSS

SEQ ID NO: 271981 - DNA, 2508 bp, Artificial Sequence
  derived and/or modified sequence
atgacctgcaacaagcacggctgcagacaggccttccacgtgacctgcgcccagttcgccggcctgctgtgcgaggaggagggcaacggcgccgacaacgtgcagtactgcggctactgcaagtaccacttcagcaagctgaagaagagcaagagaggcagcaacagaagctacgaccagagcctgagcgacagcagcagccacagccaggacaagcaccacgagaaggagaagaagaagtacaaggagaaggacaagcacaagcagaagcacaagaagcagcccgagcccagccccgccctggtgcccagcctgaccgtgaccaccgagaagacctacaccagcaccagcaacaacagcatcagcggcagcctgaagagactggaggacaccaccgccagattcaccaacgccaacttccaggaggtgagcgcccacaccagcagcggcaaggacgtgagcgagaccagaggcagcgagggcaagggcaagaagagcagcgcccacagcagcggccagagaggcagaaagcccggcggcggcagaaaccccggcaccaccgtgagcgccgccagccccttcccccagggcagcttcagcggcacccccggcagcgtgaagagcagcagcggcagcagcgtgcagagcccccaggacttcctgagcttcaccgacagcgacctgagaaacgacagctacagccacagccagcagagcagcgccaccaaggacgtgcacaagggcgagagcggcagccaggagggcggcgtgaacagcttcagcaccctgatcggcctgcccagcaccagcgccgtgaccagccagcccaagagcttcgagaacagccccggcgacctgggcaacagcagcctgcccaccgccggctacaagagagcccagaccagcggcatcgaggaggagaccgtgaaggagaagaagagaaagggcaacaagcagagcaagcacggccccggcagacccaagggcaacaagaaccaggagaacgtgagccacctgagcgtgagcagcgccagccccaccagcagcgtggccagcgccgccggcagcatcaccagcagcagcctgcagaagagccccaccctgctgagaaacggcagcctgcagagcctgagcgtgggcagcagccccgtgggcagcgagatcagcatgcagtacagacacgacggcgcctgccccaccaccagcatctacaacagcaacgacgtggccgtgagcttccccaacgtggtgagcggcagcggcagcagcacccccgtgagcagcagccacctgccccagcagagcagcggccacctgcagcaggtgggcgccctgagccccagcgccgtgagcagcgccgcccccgccgtggccaccacccaggccaacaccctgagcggcagcagcctgagccaggcccccagccacatgtacggcaacagaagcaacagcagcatggccgccctgatcgcccagagcgagaacaaccagaccgaccaggacctgggcgacaacagcagaaacctggtgggcagaggcagcagccccagaggcagcctgagccccagaagccccgtgagcagcctgcagatcagatacgaccagcccggcaacagcagcctggagaacctgccccccgtggccgccagcatcgagcagctgctggagagacagtggagcgagggccagcagttcctgctggagcagggcacccccagcgacatcctgggcatgctgaagagcctgcaccagctgcaggtggagaacagaagactggaggagcagatcaagaacctgaccgccaagaaggagagactgcagctgctgaacgcccagctgagcgtgcccttccccaccatcaccgccaaccccagccccagccaccagatccacaccttcagcgcccagaccgcccccaccaccgacagcctgaacagcagcaagagcccccacatcggcaacagcttcctgcccgacaacagcctgcccgtgctgaaccaggacctgaccagcagcggccagagcaccagcagcagcagcgccctgagcacccccccccccgccggccagagccccgcccagcagggcagcggcgtgagcggcgtgcagcaggtgaacggcgtgaccgtgggcgccctggccagcggcatgcagcccgtgaccagcaccatccccgccgtgagcgccgtgggcggcatcatcggcgccctgcccggcaaccagctggccatcaacggcatcgtgggcgccctgaacggcgtgatgcagacccccgtgaccatgagccagaaccccacccccctgacccacaccaccgtgccccccaacgccacccaccccatgcccgccaccctgaccaacagcgccagcggcctgggcctgctgagcgaccagcagagacagatcctgatccaccagcagcagttccagcagctgctgaacagccagcagctgacccccaacatggtgaaggagttcagcgcccagatcatcgcctggagaccctag

SEQ ID NO: 271982 - DNA, 543 bp, Artificial Sequence
  derived and/or modified sequence
tgaagccagcccaagagcttcgagaacagccccggcgacctgggcaacagcagcctgcccaccgccggctacaagagagcccagaccagcggcatcgaggaggagaccgtgaaggagaagaagagaaagggcaacaagcagagcaagcacggccccggcagacccaagggcaacaagaaccaggagaacgtgagccacctgagcgtgagcagcgccagccccaccagcagcgtggccagcgccgccggcagcatcaccagcagcagcctgcagaagagccccaccctgctgagaaacggcagcctgcagagcctgagcgtgggcagcagccccgtgggcagcgagatcagcatgcagtacagacacgacggcgcctgccccaccaccagcatctacaacagcaacgacgtggccgtgagcttccccaacgtggtgagcggcagcggcagcagcacccccgtgagcagcagccacctgccccagcagagcagcggccacctgcagcaggtgggcgccctgagccccagcgccgtgagcagctag

SEQ ID NO: 271983 - DNA, 2508 bp, Artificial Sequence
  derived and/or modified sequence
atgacatgcaataaacacggctgcagacaggctttccacgtgacgtgtgcgcagtttgccggactgctatgcgaggaagaaggaaacggcgctgataatgtccaatattgcggttattgcaagtatcatttctctaagttgaaaaagagcaagagaggctctaacagatcctatgatcagagtctaagcgactcgagctcacatagccaggacaaacatcatgagaaagagaaaaaaaagtataaagagaaggacaaacacaagcagaagcacaagaaacagcctgaaccctcacctgccctggtcccttccttgactgtcacgaccgagaagacctatactagcacaagtaacaactctatcagcggctcattgaaacggctcgaggacaccaccgcgcgctttacgaacgccaactttcaagaggttagcgctcacacgtcttctggaaaggacgtcagcgaaacacgtgggtcagagggcaaagggaagaaatcaagtgcccactcctcagggcagcgcggccggaagcctgggggggggcggaatccaggtacaacagtgagtgcagctagtccatttccccagggttcttttagtgggactcccggatctgtgaagtcttcctctgggtcatcagtccagtcacctcaagattttctgagtttcaccgacagcgatctaagaaatgacagctatagccatagtcagcaaagtagcgccaccaaggatgttcacaagggcgaatccggtagtcaggagggaggcgtgaattcctttagtactctgatcggtctgccatccactagcgctgtgactagccaaccgaaatctttcgaaaatagccctggagatcttggaaactcatctctgcccaccgccggctataagcgcgcccagacctctggcattgaggaagagacagtcaaggaaaaaaaacggaagggcaataaacagagtaaacatggacccggccgtcccaagggcaataagaaccaagagaacgtttcacacctctccgtttctagtgccagcccaacttcctccgttgccagcgcagctgggtccattacaagctcttcgctccaaaaaagtccaacgcttctgcgaaatggcagcttacagagtctttccgtgggatcttcacctgtgggctccgaaattagcatgcagtaccgccacgatggggcatgtccaacgacctctatttacaactcaaatgacgtggccgtgtcttttccaaatgtggtgagcgggtcaggttctagcacgccagtgagctcttcacacttaccacagcagagcagtggacatctccagcaggtgggagcccttagtccatctgcggtctcctccgccgcgcctgctgtcgctaccacacaggccaacactttaagcgggtcaagtttaagccaggcccccagccacatgtatggtaataggtccaatagttccatggccgctctgatcgcgcaatccgaaaataaccagaccgatcaagacctcggtgacaattcaaggaacttagtcggtcgagggagttccccgcgggggtccctaagcccccgcagcccggtgagcagcttgcagatccgctatgaccagccagggaattcctctctggaaaacctccctcccgttgctgcttctattgaacagctgttagaacggcaatggagcgagggacaacagttcctgctggagcaaggaactcccagcgatattctcggaatgcttaagagcctgcatcaactgcaggtggagaatagaagactggaggagcagatcaaaaacctgacagcaaagaaggagcggttacaacttctaaatgcccaactgtctgttcccttccctaccatcaccgccaatccctctccctcccaccagatccatacgtttagcgcccaaactgcccccacaacagatagcctgaattcctcgaagtccccccacattgggaatagttttctcccagataactccttacccgtgctgaaccaggatctgacctcatccggacaaagcacatccagcagttcagcgctaagcaccccccctccggccggacagtcacctgcacagcagggatcaggggttagcggggttcaacaagttaacggagtgaccgtgggcgccctggccagcggcatgcaaccggttaccagtacgattcccgccgtcagcgccgtcggcgggattatcggcgctctgcctggaaaccagttggccattaacgggatcgtgggcgccttaaacggggttatgcagactcctgtgacaatgtctcagaatccgacccccttgacccatactacagtcccccccaatgccactcatccgatgccagcgactctgactaattcagcatcaggcctcggcctcttgagcgaccagcagcgccaaatcctgatccatcaacaacagttccagcaactgcttaactcacagcagctgaccccaaatatggtgaaagagttttctgctcagatcattgcatggaggccatag

SEQ ID NO: 271984 - DNA, 543 bp, Artificial Sequence
  derived and/or modified sequence
tgatctcagcctaaatcttttgagaatagtcccggagacttaggcaactcttcgctgcccaccgcaggatataagcgcgcccagacctctgggatagaagaagagactgtgaaggagaaaaagcggaaggggaataaacagtcaaaacacggcccagggcgacccaagggcaacaaaaaccaggagaacgtgtcacacctctccgttagttctgcatccccaacctcctctgtagctagcgctgccggcagtataacctcatcctccctgcagaagagccctactttactgagaaacggatcccttcaaagcttgagcgttggaagcagtcccgtcggatccgagatctccatgcaatataggcatgatggagcgtgtcctaccacttctatttacaacagtaacgatgtggctgtgtcttttcctaatgtggtctcaggaagcggtagtagcactccagtgagttcctcccacctgccacagcagtcttcgggccatctgcagcaggtcggcgccctcagccccagcgcggtctcgtcatag

SEQ ID NO: 271985 - DNA, 2508 bp, Artificial Sequence
  derived and/or modified sequence
atgacctgcaacaagcacggctgccggcaggccttccacgtgacctgtgcccagtttgctggcctgctgtgtgaggaggagggcaatggagctgacaacgtgcagtactgcggctactgcaagtaccacttcagcaagctgaagaagagcaagaggggcagcaacagaagctatgaccagagcctgagtgacagcagcagccacagccaggacaagcaccacgagaaggagaagaagaagtacaaggagaaggacaagcacaagcagaagcacaagaagcagcctgagcccagccctgccctggtgcccagcctgactgtgaccacagagaagacctacaccagcaccagcaacaacagcatcagcggcagcctgaagaggctggaggacaccacagcccgcttcaccaatgccaacttccaggaggtgtctgcccacaccagcagcggcaaggatgtgtctgagacccggggcagcgagggcaagggcaagaagagcagcgcccacagcagcggccagaggggcaggaagccaggcggcggcaggaaccctggcaccaccgtgtctgctgccagccccttcccccagggcagcttcagcggcaccccaggctctgtgaagagcagcagcggcagctctgtgcagagcccccaggacttcctgtccttcacagacagcgacctgagaaatgacagctacagccacagccagcagagcagcgccaccaaggatgtgcacaagggggagagcggcagccaggagggcggcgtgaacagcttcagcaccctcatcggcctgcccagcaccagcgctgtgaccagccagcccaagagctttgagaacagccctggggacctgggcaacagcagcctgcccacagctggctacaagagggcccagaccagcggcatcgaggaggagaccgtgaaggagaagaagaggaaaggaaacaagcagagcaagcacggccctggccggcccaagggcaacaagaaccaggagaatgtgagccacctgtctgtgtcctctgccagccccaccagctctgtggccagcgctgctggcagcatcaccagcagcagcctgcagaagagccccaccctgctgagaaatggcagcctgcagagcctgtctgtgggcagcagccctgtgggcagcgagatctccatgcagtacagacatgatggagcctgccccaccaccagcatctacaacagcaatgatgtggccgtgtccttccccaacgtggtgtctggcagcggcagcagcacccctgtgagcagcagccacctgccccagcagagcagcggccacctgcagcaggtgggcgccctgagccccagcgctgtgagcagcgctgccccagctgtggccaccacccaggccaacaccctgagcggcagcagcctgagccaggcccccagccacatgtatggcaacagaagcaacagctccatggccgccctgattgcccagagcgagaacaaccagacagaccaggacctgggggacaacagcaggaacctggtgggccggggcagcagcccccggggcagcctgagccccaggagccctgtgagcagcctgcagatccgctatgaccagcccggcaacagcagcctggagaacctgccccctgtggccgccagcattgagcagctgctggagcggcagtggagcgagggccagcagttcctgctggagcagggcacccccagcgacatcctgggcatgctgaagagcctgcaccagctgcaggtggagaacagaaggctggaggagcagatcaagaacctgacagccaagaaggagcggctgcagctgctgaatgcccagctgtctgtgcccttccccaccatcacagccaaccccagccccagccaccagatccacaccttcagcgcccagacagcccccaccacagacagcctgaacagcagcaagagcccccacatcggcaacagcttcctgcctgacaacagcctgcctgtgctgaaccaggacctgaccagcagcggccagagcaccagcagcagcagcgccctgagcaccccacctcctgctggccagagccctgcccagcagggcagcggcgtgtctggagtgcagcaggtgaatggagtgacagtgggcgccctggccagcggcatgcagcctgtgaccagcaccatcccagctgtgtctgctgtgggcggcatcatcggggccctgcccggcaaccagctggccatcaatggaattgtgggcgccctgaatggagtgatgcagacccctgtgaccatgagccagaaccccacccccctgacccacaccaccgtgcccccaaatgccacccaccccatgcctgccaccctgaccaacagcgccagcggcctgggcctgctgagtgaccagcagaggcagatcctgatccaccagcagcagttccagcagctgctgaacagccagcagctgacccccaacatggtgaaggagttcagcgcccagatcatcgcctggaggccctag

SEQ ID NO: 271986 - DNA, 543 bp, Artificial Sequence
  derived and/or modified sequence
tgaagccagcccaagagctttgagaacagccctggggacctgggcaacagcagcctgcccacagctggctacaagagggcccagaccagcggcatcgaggaggagaccgtgaaggagaagaagaggaaaggaaacaagcagagcaagcacggccctggccggcccaagggcaacaagaaccaggagaatgtgagccacctgtctgtgtcctctgccagccccaccagctctgtggccagcgctgctggcagcatcaccagcagcagcctgcagaagagccccaccctgctgagaaatggcagcctgcagagcctgtctgtgggcagcagccctgtgggcagcgagatctccatgcagtacagacatgatggagcctgccccaccaccagcatctacaacagcaatgatgtggccgtgtccttccccaacgtggtgtctggcagcggcagcagcacccctgtgagcagcagccacctgccccagcagagcagcggccacctgcagcaggtgggcgccctgagccccagcgctgtgagcagctag

SEQ ID NO: 271987 - DNA, 3012 bp, Artificial Sequence
  derived and/or modified sequence
gactcctgtgcggaacgtgagtgactgagcggcaaagcccgaatggtctctagcgaccggcccgtgtcactggaggacgaggtctcccatagtatgaaggagatgattggaggctgttgcgtttgctcagacgagagaggctgggccgagaacccgctggtttattgcgacgggcacggctgcagcgtcgcggtgcatcaagcttgctatggcattgttcaagtacccactggaccgtggttttgcaggaaatgtgaatctcaggagagagcagccagagtgagatgtgaactttgtccccataaggatggagctttaaaaagaacagataatgggggttgggcccatgtggtttgtgccctgtatattccagaggtacaatttgccaatgtttccacaatggaaccaattgttttacagtctgttccgcatgatcgttataataagacttgctacatttgtgatgaacaaggaagagaaagcaaagcagccactggtgcttgcatgacatgtaataaacatggatgtcgacaggctttccatgtaacatgcgctcagtttgccggactgctttgtgaagaagaaggtaatggtgccgataatgtccaatactgtggctactgtaaataccattttagtaagctgaaaaagagcaaacggggatctaataggtcatatgatcaaagtttaagtgattcttcctctcactctcaggataaacatcatgagaaagagaaaaaaaaatataaagagaaggacaaacacaaacagaaacacaagaagcagccagaaccatcacctgcattggttccatccttgactgttactacagaaaaaacttatacaagcactagcaacaactctatatctggatcattgaagcgcttggaagatactactgcacgatttacaaatgcaaatttccaggaagtctctgcacacacctctagtggaaaagatgtttcagagactagagggtcagagggcaaagggaagaaatcttcagctcacagctcaggtcaaaggggaagaaagcctggtggtggaagaaatccaggaacaactgtgtcagcagctagcccttttcctcaaggcagtttttcaggaactccaggcagtgtaaagtcatcttctggaagttcagtgcagtctccccaggatttcctgagctttacagactcagatctgcgtaatgacagttactctcactcccaacagtcatcagcaaccaaagatgtacataaaggagagtctggaagccaggaagggggggtaaatagttttagtaccttaattggcctcccttcaacctcagctgttacttcacagcctaaaagctttgaaaattcacctggagatttgggtaattccagccttcctacagcaggatataagcgggctcaaacttctggcatagaagaagaaactgtaaaggaaaagaaaaggaaaggaaataaacaaagtaagcatgggcctggcagacccaaaggaaacaaaaatcaagagaatgtttctcatctctcagtttcttctgcttcaccaacatcatctgtagcatcagctgcaggaagcataacaagctctagtctgcagaaatctcctacattgctcaggaatggaagtttacagagcctcagtgttggctcatctccagttggttcagaaatttccatgcagtatcggcatgatggagcttgcccaacaactagtatttataacagcaatgatgtagcagtatcgtttccaaatgtagtatctggctcgggatctagtactcctgtctccagctctcacttacctcagcagtcttctgggcatttgcaacaagtaggagcgctctctccctcagctgtgtcatctgcagcccctgctgttgctacaactcaggcaaatactctatctggatcttctctcagtcaggcaccatctcatatgtatggcaatagatcaaattcatcaatggcagctcttatagctcagtctgaaaacaatcaaacagatcaagatcttggagacaatagccgcaacctagttggcagaggaagctcaccccgaggaagtctctcgccacgatcccctgtaagcagcttacagattcgctatgatcaaccaggcaacagcagtttggaaaatctgcctccagtagcagccagcatagaacagcttttggagaggcagtggagtgaaggacagcaatttttactagaacagggtactcctagtgacattttaggaatgctgaagtcattacaccaacttcaagttgaaaaccgaagattagaggaacaaattaaaaacttgactgccaaaaaggaacggcttcagttattgaatgcacagctttcagtgccttttccaacaataacagcaaatcctagtccgtctcatcaaatacacacattttcagcacagactgctcctactactgattccttgaacagcagtaagagccctcatataggaaacagctttttacctgataattctcttcctgtattaaatcaggacttaacctccagtggacaaagtaccagcagctcatcagctctttctaccccacctcctgctgggcagagtccggctcaacaaggctcaggagtgagtggagttcagcaggtcaatggcgtgacagtgggggcactagctagtggaatgcagcctgtaacttccaccattcctgccgtgtctgcagtgggtggaataattggagctttgccaggtaaccaactggcaattaatggcattgtaggagctttaaatggggttatgcagactcctgtcacaatgtcccagaaccctacccctctcacccacacaaccgtaccacctaatgcaacacatccaatgccagctacactgactaacagtgcctcaggactaggattactttctgaccagcaacgacaaatacttattcatcaacagcagtttcagcagttgttaaattctcaacagctcacaccaaacatggttaaggaattttcagcacaaattattgcttggagaccatga

SEQ ID NO: 271988 - DNA, 2508 bp, Artificial Sequence
  derived and/or modified sequence
atgacctgcaacaagcacggctgccggcaggccttccacgtgacctgcgcgcagtttgccgggctgttatgtgaagaagagggtaatggggcagataacgtgcaatactgtggctattgcaagtatcatttttccaagctcaagaagtccaaacgaggtagcaatcgcagttatgaccaatccctgtcggacagtagctcacattcacaagataagcaccacgagaaagaaaaaaagaaatacaaagaaaaagacaaacataaacagaaacacaagaaacagccagaaccttcaccggccttagtgccgtctctcactgtaaccaccgaaaagacttacactagcacgtccaacaacagcattagtggctcccttaagagactcgaggacacaacagctcgatttaccaatgctaacttccaagaagtgtctgcccacactagtagcggcaaagatgtgtctgaaaccagaggaagcgaaggcaagggaaaaaagtcgtcggcgcatagtagcggccaaagggggagaaaaccaggcggtggccgtaatcctggaactacagttagcgccgcctcgcccttccctcaaggatcctttagcggaacccctggctctgtgaagtcttcatccggcagctctgtgcaatcaccacaggactttctatcctttaccgatagtgatcttagaaatgactcctattcccacagccaacaaagtagtgcaaccaaagacgtgcacaaaggggagagtggctcacaggaagggggagtgaatagtttcagcaccctgatcggcctgccttccacgtctgctgtcacttctcagccaaagagcttcgaaaactcccctggagacctcggaaactcaagcttgcccaccgccggctacaaacgggcccagaccagtggtatcgaggaggaaacagtcaaggaaaaaaaacgcaagggcaacaagcagtccaaacacgggccgggaagaccgaagggtaacaaaaaccaggagaacgtgagccatctcagcgtcagctcggcttcacctacttcttccgttgcaagtgcagccgggtccattactagcagctcgctgcagaagtcacctacactgctcaggaatggcagcttacagtcactgtccgtgggctccagcccagtcgggtctgaaatcagtatgcagtatcgtcacgatggggcgtgcccgacaaccagtatctacaattctaatgacgtcgctgtgtcatttccaaacgtggtgagtggttccggctcctcgactcccgtgtcctcctctcacctgccccaacaatcctccggccatctacagcaagtgggggccctctcaccgtctgcagtaagtagcgctgctcccgccgtggccactacacaggcgaatacactgagcgggtcctccctctcccaagcgccaagccacatgtatggcaaccgctccaattcatcaatggcagccctcatcgctcagtccgagaacaatcagacagatcaggacctcggcgacaattccagaaatcttgtaggccggggctcgtctcctcgaggaagtcttagtcctcggtctcccgtatcttccctgcagattaggtatgatcagcccggcaactccagcctggagaatcttccccccgtagcagcctccatcgagcaactgttggaacgacagtggtcggaagggcagcaattccttctggagcagggcaccccaagcgacatcctcgggatgctgaagtctctgcaccagttacaagtggagaacaggcggttggaagaacagataaaaaacctgacggcgaagaaggaaagactccagcttctgaacgcacagctgagcgtgccctttcctactatcacagcgaatccttccccgtcccaccagatccacacattttccgcacagactgcccccacgacggactctctcaactcctcaaagtctccccacatcgggaattcctttctccccgacaattctcttcccgtcctgaatcaggatttaacttcctcgggacagagcacatcttccagctccgctctgtccactcctccacccgctggacagtcaccagcccagcaaggctctggggtctccggcgtgcagcaggttaacggggtcaccgtgggtgcgctcgccagcgggatgcaacccgtgacctctaccattccagccgtgagtgccgtggggggcattatcggcgcattaccggggaatcaattggcgatcaacgggattgtgggcgccctcaacggggtcatgcaaaccccagttactatgtcacaaaatccaacgcccctgacgcatacaaccgtgccgccaaatgccacacacccgatgcccgctacccttactaattctgcctccggtctcggtttactgagtgatcagcaacggcagattttaattcaccaacagcaatttcagcagcttctcaacagtcagcagctgactccaaatatggttaaagagttctctgctcaaattattgcctggaggccatag

SEQ ID NO: 271989 - DNA, 543 bp, Artificial Sequence
  derived and/or modified sequence
tgaagccagcccaagagcttcgagaacagccccggcgacctgggcaattcctctctgccaacagccggatataagagggcacaaacttctggcatagaggaggagaccgttaaagagaagaagaggaagggcaataagcaaagcaagcatgggccaggaagaccaaaagggaacaagaatcaagagaatgtctcacacttatccgtgagttctgcttccccgacgagctcggtagcttccgctgccggcagtatcactagctcgagcctgcagaaaagccccaccttgctcaggaacggcagtcttcagtcactcagcgtgggctcatctcctgtcgggtcagagatctccatgcagtaccgtcacgacggagcctgtcctactacatcaatctataattccaatgacgtggccgtgtcgtttcccaatgtggtgagtggttctggcagctcaactccagtgtccagctctcatctgccacagcagtcatcgggtcacctgcagcaagtgggggcattatcaccaagcgctgtctcatcctag

SEQ ID NO: 271990 - DNA, 538 bp, Artificial Sequence
  derived and/or modified sequence
cttcacagcctaaaagctttgaaaattcacctggagatttgggtaattccagccttcctacagcaggatataagcgggctcaaacttctggcatagaagaagaaactgtaaaggaaaagaaaaggaaaggaaataaacaaagtaagcatgggcctggcagacccaaaggaaacaaaaatcaagagaatgtttctcatctctcagtttcttctgcttcaccaacatcatctgtagcatcagctgcaggaagcataacaagctctagtctgcagaaatctcctacattgctcaggaatggaagtttacagagcctcagtgttggctcatctccagttggttcagaaatttccatgcagtatcggcatgatggagcttgcccaacaactagtatttataacagcaatgatgtagcagtatcgtttccaaatgtagtatctggctcgggatctagtactcctgtctccagctctcacttacctcagcagtcttctgggcatttgcaacaagtaggagcgctctctccctcagctgtgtcatc

SEQ ID NO: 271991 - DNA, 2508 bp, Artificial Sequence
  derived and/or modified sequence
atgacttgtaataagcatgggtgtagacaggcctttcacgtcacatgcgcccagttcgctggcctcctctgcgaagaggaaggtaacggcgcagataacgtgcagtactgcggatactgcaagtatcacttctctaaattgaagaaatccaagcggggtagcaacagatcatatgaccagtcactttcggatagcagttcccattcccaagacaagcatcatgagaaagagaagaagaagtacaaggagaaggataaacataagcagaagcataaaaagcagcctgagccgtccccggcactcgtaccgagcttgacagtgaccactgaaaaaacttatacgtccacaagtaataattccatatctggtagcctgaaacggctagaagatacaacagctaggtttactaacgcgaatttccaggaggtgagcgcacatacttctagtgggaaggatgtgtcagagactaggggcagtgaaggaaaaggaaaaaaatcatctgcgcacagctctggacagcgtgggagaaagccgggtggcggtaggaaccccggaacaactgtgagcgctgctagtcccttcccacagggatctttcagcggcacccccggatcagtaaagagctcttcaggaagttcggtgcagtcaccgcaagatttcctgtcgtttacagacagcgacttgcgaaacgatagctattcacattcccagcagtcttcggcaacaaaggacgtacacaagggagagtctgggtcacaggaggggggagtcaactccttctcaacccttatcggcctgcccagtacctctgccgtgactagtcagcccaagtcattcgagaatagtcccggtgaccttggcaactcttctctccctaccgctgggtacaagcgggcacagacctcagggattgaagaagagaccgtcaaggaaaaaaagaggaaggggaacaaacagagcaaacacggcccagggaggccgaaaggcaacaagaatcaggaaaatgtcagccacttatccgtctcctcagcgagtccaaccagtagtgtggcatcggccgctggcagcataacatcctcttcccttcaaaaatctcctacgctgctccggaacggtagcctgcagtcgctgtctgtggggtccagtccagtcggttccgaaatttctatgcagtatagacacgatggcgcatgcccaacgactagcatctacaattccaatgacgtggccgtctcgttccccaacgtcgtatcaggcagcggctcatccactcccgtctcgtcctctcacttgcctcagcaaagttccggccaccttcagcaggtgggagcgctgagtccgagcgcagtgtccagcgcggcaccagccgtcgctaccacgcaagctaacaccctgagtggctcatctttatctcaagcccctagccatatgtacggaaaccgctccaactcttccatggctgcactaatcgcacagagtgagaataatcagacagatcaggatctgggcgataacagccgaaacctggtcggcaggggcagcagcccaaggggatcgctgtcccctcgatcgcccgtcagttccctgcaaattcgatatgatcagccgggaaacagttctctggagaacctgccccctgttgccgctagcatcgaacagctgcttgaacggcagtggtctgagggccaacagttcctcttagagcagggaacaccaagcgatatccttggcatgttaaaaagcctgcaccagctgcaggttgagaaccgccgactagaggagcagattaaaaacctgacagctaaaaaagaaaggctacagctgctgaacgcccagttgagtgtgccttttccaacgatcacggccaacccatcaccttctcaccagatacatacattttctgctcagactgctccaacaacagattcattaaactctagtaaatctccgcacattggcaactctttcctccctgataacagtctgcctgttctaaaccaagaccttacaagtagcggccagtcgaccagtagcagttcagccctgagcacaccccctccggcaggccagtctcccgctcagcaaggcagcggggtctccggagtacagcaggtgaatggggtcacggttggagccctggcgagtgggatgcagcctgtgacctcaacaatacctgccgtgagcgccgttggaggtattatcggggctctgcccggaaaccagttggccataaacggtattgttggagcactgaatggcgtcatgcagactccggtcaccatgagccagaaccctacccccttgacccatacaaccgtcccacctaacgcaacacaccctatgcccgcaaccctgacgaacagtgcatctgggctgggtctgctttcagaccagcaaagacagatccttatccaccaacagcagttccagcagctcctaaactcccaacaactgacaccaaatatggtgaaagaattcagcgcccagattattgcttggcgcccatag

SEQ ID NO: 271992 - DNA, 543 bp, Artificial Sequence
  derived and/or modified sequence
tagtcccagccaaagagttttgagaattctcccggagacctgggcaatagctctcttcccaccgcgggatataagcgagcccagacaagtggaattgaggaagagacggtaaaagagaaaaaacgcaaaggaaataagcagtcgaaacatgggcctggcagacctaagggtaacaagaatcaagaaaatgtgtcacatctaagcgtgtctagcgccagcccaacaagctccgtggctagcgcagctgggtctataacctctagcagccttcagaaatcgcccactctattgagaaacggaagtcttcagtctctgagcgtgggttcctcgccggtaggaagcgaaatttctatgcaatacagacatgacggagcctgtcctactacaagcatctataatagcaacgatgttgcggtcagcttccctaacgtggtctccggctcgggcagttccactcctgtctccagttcacatctgccgcagcaaagctctggacacctgcagcaggtaggcgctttatcgccctccgcagtgagctcgtag

SEQ ID NO: 271993 - protein, 125 aa, Artificial Sequence
  derived and/or modified sequence
MKKEHVLHCQFSAWYPFFRGVTIKSVILPLPQNVKDYLLDDGTLVVSGRDDPPTHSQPDSDDEAEEIQWSDDENTATLTDAYWIAMNSSLKCKTLSDIFLLFKSSDFITRDFTQPFIHCTDDSPD

SEQ ID NO: 271994 - protein, 183 aa, Artificial Sequence
  derived and/or modified sequence
MKKEHVLHCQFSAWYPFFRGVTIKSVILPLPQNVKDYLLDDGTLVVSGRDDPPTHSQPDSDDEAEEIQWSDDENTATLTDAYWIAMNSSLKCKTLSDIFLLFKSSDFITRDFTQPFIHCTDDSPDPCIEYELVLRKWCELIPGAEFRCFVKENKLIGISQRDYTQYYDHISKQKEEIRRCIQD

SEQ ID NO: 271995 - DNA, 378 bp, Artificial Sequence
  derived and/or modified sequence
atgaagaaggagcacgtgctgcactgccagttcagcgcctggtaccccttcttcagaggcgtgaccatcaagagcgtgatcctgcccctgccccagaacgtgaaggactacctgctggacgacggcaccctggtggtgagcggcagagacgacccccccacccacagccagcccgacagcgacgacgaggccgaggagatccagtggagcgacgacgagaacaccgccaccctgaccgacgcctactggatcgccatgaacagcagcctgaagtgcaagaccctgagcgacatcttcctgctgttcaagagcagcgacttcatcaccagagacttcacccagcccttcatccactgcaccgacgacagccccgactag

SEQ ID NO: 271996 - DNA, 435 bp, Artificial Sequence
  derived and/or modified sequence
tgattcatccactgcaccgacgacagccccgacccctgcatcgagtacgagctggtgctgagaaagtggtgcgagctgatccccggcgccgagttcagatgcttcgtgaaggagaacaagctgatcggcatcagccagagagactacacccagtactacgaccacatcagcaagcagaaggaggagatcagaagatgcatccaggacttcttcaagaagcacatccagtacaagttcctggacgaggacttcgtgttcgacatctacagagacagcagaggcaaggtgtggctgatcgacttcaaccccttcggcgaggtgaccgacagcctgctgttcacctgggaggagctgatcagcgagaacaacctgaacggcgacttcagcgaggtggacgcccaggagcagaagagaaaccagcaggaggacgactag

SEQ ID NO: 271997 - DNA, 552 bp, Artificial Sequence
  derived and/or modified sequence
atgaagaaggagcacgtgctgcactgccagttcagcgcctggtaccccttcttcagaggcgtgaccatcaagagcgtgatcctgcccctgccccagaacgtgaaggactacctgctggacgacggcaccctggtggtgagcggcagagacgacccccccacccacagccagcccgacagcgacgacgaggccgaggagatccagtggagcgacgacgagaacaccgccaccctgaccgacgcctactggatcgccatgaacagcagcctgaagtgcaagaccctgagcgacatcttcctgctgttcaagagcagcgacttcatcaccagagacttcacccagcccttcatccactgcaccgacgacagccccgacccctgcatcgagtacgagctggtgctgagaaagtggtgcgagctgatccccggcgccgagttcagatgcttcgtgaaggagaacaagctgatcggcatcagccagagagactacacccagtactacgaccacatcagcaagcagaaggaggagatcagaagatgcatccaggactag

SEQ ID NO: 271998 - DNA, 378 bp, Artificial Sequence
  derived and/or modified sequence
atgaagaaggagcatgtgttacattgccaattttcagcttggtatccattcttccgcggagtcacaatcaagtccgttattctgcccctgcctcaaaacgtgaaggattatctgctcgacgatggcactttggtggtgagtgggagggacgacccccccacgcacagtcaacctgactccgatgatgaggccgaagagattcagtggtccgacgatgaaaataccgcaacgctgactgatgcctattggattgccatgaacagcagcctcaaatgtaaaaccctatcagacattttccttttgttcaaatcaagcgactttataacaagggacttcactcagcctttcattcactgcacagacgattccccagattag

SEQ ID NO: 271999 - DNA, 435 bp, Artificial Sequence
  derived and/or modified sequence
tgattcatccattgcactgatgacagcccggacccctgtattgaatatgagctggtgctgcgcaagtggtgcgagctgatcccaggggccgagtttcggtgctttgtaaaggagaacaaactcatcggcatttcccagagggactatacccaatattatgaccacatttctaaacagaaggaggaaattagaagatgtattcaggacttctttaaaaaacacatccagtacaagtttctggatgaggacttcgtttttgatatctaccgcgattcgcgaggcaaagtttggcttattgacttcaatccctttggggaagtaaccgacagtctgttatttacatgggaggaactcatctctgaaaataatctcaacggtgatttcagtgaggtagatgctcaagaacagaaaagaaaccagcaggaggacgactag

SEQ ID NO: 272000 - DNA, 552 bp, Artificial Sequence
  derived and/or modified sequence
atgaagaaggagcacgtcctacattgccaattctccgcatggtatccttttttccgcggagtgacaattaaatcggtaattttgccgctgccccaaaacgtcaaagattatctgctcgacgatggaaccttggtggtctcagggagggacgaccccccaacccattctcaacctgacagtgacgacgaggctgaagagatccagtggtcagacgatgaaaacacggcaacattgaccgatgcctactggatagccatgaacagctccttgaagtgtaagaccctgtctgatatattcttactgtttaaatcttctgactttatcacccgcgattttacccagccctttatccattgcactgacgattcgcccgatccctgcatagaatatgaacttgtgctcaggaagtggtgtgaactcatccctggcgccgaatttagatgctttgtcaaggagaataagttgatcggcatctcacagcgcgactacacccaatactacgaccacatctccaagcaaaaggaggagatcagaagatgtatccaggactag

SEQ ID NO: 272001 - DNA, 378 bp, Artificial Sequence
  derived and/or modified sequence
atgaagaaggagcacgtgctgcactgccagttcagcgcctggtaccccttcttccggggcgtgaccatcaagagcgtcatcctgcccctgccccagaatgtgaaggactacctgctggatgatggcaccctggtggtgtctggaagagatgacccccccacccacagccagcctgacagtgatgatgaggccgaggagatccagtggagcgatgatgaaaatacagccaccctgacagatgcctactggatcgccatgaacagcagcctgaagtgcaagaccctgagtgacatcttcctgctcttcaagagcagtgacttcatcacccgggacttcacccagcccttcatccactgcacagatgacagcccagactag

SEQ ID NO: 272002 - DNA, 435 bp, Artificial Sequence
  derived and/or modified sequence
tgattcatccactgcacagatgacagcccagacccctgcatcgagtatgagctggtgctgaggaagtggtgtgagctgatccctggagctgagttccgctgctttgtgaaggagaacaagctgattggcatcagccagagggactacacccagtactatgaccacatcagcaagcagaaggaggagatccgccgctgcatccaggacttcttcaagaagcacatccagtacaagttcctggatgaggactttgtgtttgacatctacagagacagccggggcaaggtgtggctgattgacttcaacccctttggagaggtgacagacagcctgctcttcacctgggaggagctgatcagcgagaacaacctgaatggagacttcagcgaggtggatgcccaggagcagaagaggaaccagcaggaggatgactag

SEQ ID NO: 272003 - DNA, 552 bp, Artificial Sequence
  derived and/or modified sequence
atgaagaaggagcacgtgctgcactgccagttcagcgcctggtaccccttcttccggggcgtgaccatcaagagcgtcatcctgcccctgccccagaatgtgaaggactacctgctggatgatggcaccctggtggtgtctggaagagatgacccccccacccacagccagcctgacagtgatgatgaggccgaggagatccagtggagcgatgatgaaaatacagccaccctgacagatgcctactggatcgccatgaacagcagcctgaagtgcaagaccctgagtgacatcttcctgctcttcaagagcagtgacttcatcacccgggacttcacccagcccttcatccactgcacagatgacagcccagacccctgcatcgagtatgagctggtgctgaggaagtggtgtgagctgatccctggagctgagttccgctgctttgtgaaggagaacaagctgattggcatcagccagagggactacacccagtactatgaccacatcagcaagcagaaggaggagatccgccgctgcatccaggactag

SEQ ID NO: 272004 - DNA, 378 bp, Artificial Sequence
  derived and/or modified sequence
atgaagaaggagcacgtgctgcactgccagttcagcgcctggtacccgttcttccgcggcgttacaatcaagtctgtaattctgcccctaccccagaacgtaaaagactatctgctagatgatggaacactggttgtgagtggccgagatgaccctcccacccactcacaacccgactcagacgatgaagccgaggaaatccagtggagtgatgacgaaaacactgccactttgaccgacgcttattggatcgcaatgaattcaagtcttaagtgtaagactctatcggacatctttttgttattcaagagctctgattttattaccagggattttacacaaccctttattcattgcactgatgatagcccagattag

SEQ ID NO: 272005 - DNA, 435 bp, Artificial Sequence
  derived and/or modified sequence
tgattcatccactgcaccgacgacagccccgacccctgcatcgagtatgagcttgtgcttcgcaagtggtgtgagcttataccaggggccgagttccgttgctttgtcaaggagaacaagttgattggcatttcccagcgtgactacactcagtattatgaccatattagcaaacaaaaggaggagatcaggagatgcatacaggactttttcaaaaagcatattcagtataaatttctggatgaagattttgtgtttgatatttatcgtgactctcggggcaaagtctggttgattgattttaacccttttggtgaagtgacagattccttacttttcacatgggaggagctgatctcagagaataacttgaatggtgatttttccgaagtcgacgcacaggaacagaagagaaaccagcaagaagatgattag

SEQ ID NO: 272006 - DNA, 552 bp, Artificial Sequence
  derived and/or modified sequence
atgaagaaggagcacgtgctgcactgccagttcagcgcctggtacccctttttcaggggcgtgactattaagtcagtcattctgccacttcctcagaacgttaaagattacctgcttgatgatggaacactcgtggtgagtgggagagacgacccgcccacccattcccagcctgatagcgacgacgaagccgaagaaattcagtggtctgacgacgaaaatacggcgacccttacggatgcttattggattgcaatgaattcatcgctgaagtgcaagacactgtccgacatttttctcctctttaagagctccgattttataaccagggacttcacacagccattcatccactgtaccgacgacagtccagacccgtgcatagagtacgagctggtgctgagaaaatggtgcgaactcatcccaggtgcagaatttagatgctttgtcaaagagaacaagctcattgggatttctcagcgggactatactcagtactatgaccacatcagcaagcaaaaggaggagatccgtcgttgcatccaggactag

SEQ ID NO: 272007 - DNA, 378 bp, Artificial Sequence
  derived and/or modified sequence
atgaagaaggagcatgtgcttcactgccagttctccgcatggtaccccttttttagaggcgtaacaattaaatcagtcattttgcccttaccacagaatgtaaaggattaccttctggacgacggtacgctcgtcgtttctgggagggatgatccacccactcactctcagcctgactctgacgatgaagccgaagagatacagtggtctgatgacgaaaataccgctaccttaaccgatgcctattggattgctatgaactcgtctttgaagtgtaagaccctgtcagatatcttcctgctgtttaaatctagcgatttcatcacacgtgatttcacacaaccgttcattcactgcacagacgacagccccgactag

SEQ ID NO: 272008 - DNA, 435 bp, Artificial Sequence
  derived and/or modified sequence
taattcattcactgtacggacgactctccagacccctgcatcgagtatgagctcgtgctgcggaagtggtgtgagctcatccccggtgccgagttccggtgcttcgttaaggagaacaagctcatagggatcagccaacgagattacacacagtattacgatcatatttcgaaacagaaagaagaaatacggcgatgcatccaggactttttcaaaaagcacatacagtataagtttttagatgaggacttcgtgtttgacatctaccgggacagtagaggtaaagtgtggctcatcgactttaaccctttcggcgaagtaacagactctcttttatttacctgggaagagctgatttctgagaataatctgaatggagactttagcgaggtggacgcccaagaacagaagcgtaatcagcaggaggatgactag

SEQ ID NO: 272009 - DNA, 552 bp, Artificial Sequence
  derived and/or modified sequence
atgaagaaggaacatgtgctccactgccagtttagtgcatggtaccctttcttccgaggtgtcactataaagagtgtgatcctcccactgccccagaacgtcaaggactatttactcgatgatggcactctggtggtgtcaggtcgtgatgacccaccgacacactcacaaccagactctgatgatgaagccgaggagatccagtggtctgacgacgagaacactgccaccttgaccgacgcttactggatcgcaatgaatagtagcctcaaatgtaagaccctcagcgacatctttctgctattcaagtcctctgatttcataactcgggatttcacacagcccttcatacactgcaccgacgactcgccggacccctgtatagagtatgaactggtcctgcgtaaatggtgtgagctgatccctggcgctgaattccgctgttttgtcaaagaaaataagttaattgggatctcacagcgcgattatacacagtactacgatcacatctcaaaacagaaggaggagattcgcaggtgcattcaggattag

SEQ ID NO: 272010 - DNA, 550 bp, Artificial Sequence
  derived and/or modified sequence
gtgcgtttagggcgaagacggagttgtaaacttcttaaaattcctctctcgacacttcgggaccggaagagtccttgaaccaaaatagctcggcgggcacttccggggccggcgcccagagttccgggagggtgcaggcaggagagggaaaggcagcagcggcggcagctggaggatgaagaaggagcatgtgcttcactgccagttctccgcgtggtacccgttcttccgaggcgttaccatcaagagtgtcattcttccacttcctcagaatgtgaaggattatttactcgatgatggaactctggtggtttcaggaagggatgatccaccaacacattctcagccagacagtgatgatgaagcagaagaaatacagtggtctgatgatgagaacacagccacgcttacggatgcgtattggatagcaatgaatagttctctgaaatgtaaaaccctcagcgacatctttctgcttttcaagagttccgatttcatcactcgtgacttcactcagccgtttattcattgtactgatgattctccagat

SEQ ID NO: 272011 - DNA, 685 bp, Artificial Sequence
  derived and/or modified sequence
gtttattcattgtactgatgattctccagatccatgtatagaatatgagctcgttctccgaaaatggtgtgaattgattcctggggctgagtttcgatgttttgtcaaggaaaacaagcttattggtatttctcaaagagactacacacaatactatgatcatatttctaaacaaaaggaagaaattcgcagatgcatacaagactttttcaagaaacacatacagtacaaattcttagatgaagactttgtgttcgatatatacagagacagtagggggaaggtgtggctcattgactttaatccatttggtgaagtcacagattcactgctgttcacctgggaagaactgatatctgagaacaacttaaacggcgattttagtgaagttgacgctcaagagcagaagagaaatcagcaggaggacgactgatgagcgtactggaactggagaagaggaggccccgccccaccgctccgggagctgctcatcagccgcaacttcctgccgaccctgatgcgggtgggccgagcagtgtggacatcagccactttttatattcatgtacattcacctggggaaaaaaacggagggactttgctacttgtaaaaataacataataaatagatcttaaacataggaaaaccatactgttctgataataaaatgctttctatgaaata

SEQ ID NO: 272012 - DNA, 564 bp, Artificial Sequence
  derived and/or modified sequence
gcggcagctggaggatgaagaaggagcatgtgcttcactgccagttctccgcgtggtacccgttcttccgaggcgttaccatcaagagtgtcattcttccacttcctcagaatgtgaaggattatttactcgatgatggaactctggtggtttcaggaagggatgatccaccaacacattctcagccagacagtgatgatgaagcagaagaaatacagtggtctgatgatgagaacacagccacgcttacggatgcgtattggatagcaatgaatagttctctgaaatgtaaaaccctcagcgacatctttctgcttttcaagagttccgatttcatcactcgtgacttcactcagccgtttattcattgtactgatgattctccagatccatgtatagaatatgagctcgttctccgaaaatggtgtgaattgattcctggggctgagtttcgatgttttgtcaaggaaaacaagcttattggtatttctcaaagagactacacacaatactatgatcatatttctaaacaaaaggaagaaattcgcagatgcatacaagact

SEQ ID NO: 272013 - DNA, 474 bp, Artificial Sequence
  derived and/or modified sequence
atgggccgcctgactgaggccgccgccgcaggatccgggtcacgagcggctgggtgggcggggagtccaccaacactgctacccctcagtcctacatcaccccgttgcgcggccaccatggcctccagtgacgaggatggaacgaatgggggtgcatcggaagcaggagaggaccgcgaagctccaggcgagcgccgcaggctgggcgtgctggctacagcctggctgactttttatgacatcgctatgacggcaggtcgcctcatcctgagccctcggctggagtgcatcggagccatctccgcccattgccagcctcaaccgcctgagttcaagcgattttcctgccttggtctgagatccagctgggattataagcgcggtccaccacgaccaatcaatttttgtattttcggccgagatcgcgtttccccttgctggccaggctggagccgcacccctgatttgaaatag

SEQ ID NO: 272014 - DNA, 474 bp, Artificial Sequence
  derived and/or modified sequence
atgggccgcctgacagaagctgctgctgctggcagcggcagcagagctgctggctgggccggcagcccccccaccctgctgcccctgagccccaccagcccccgctgtgccgccaccatggccagcagtgatgaagatggcaccaatggaggagccagcgaggccggagaagatcgggaggcccctggagagcggcggcggctgggcgtgctggccacagcctggctgaccttctatgacatcgccatgacagctggccgcctcatcctgagcccccggctggagtgcattggagccatcagcgcccactgccagccccagcccccagagttcaagcgcttcagctgcctgggcctgcggagctcctgggactacaagaggggccccccccggcccatcaacttctgcatcttcggccgggacagagtgagcccctgctggccaggctggagcaggaccccagacctgaagtag

SEQ ID NO: 272015 - DNA, 474 bp, Artificial Sequence
  derived and/or modified sequence
atgggccggctgaccgaggccgccgccgccggcagcggcagccgggccgcaggctgggccggtagcccacccactttgctgccactgagccccacgtctcccaggtgcgccgccactatggcatccagcgatgaggatggaaccaacgggggggctagtgaagccggtgaggatcgagaggcccctggcgagcggcgcaggttgggcgtgcttgctaccgcctggcttaccttctacgatatcgccatgaccgccggacggttaatccttagccctcgtctcgagtgtattggcgccattagcgcccactgccaacctcagccccccgaattcaagcgattttcttgcttgggattaagatcttcatgggactacaaacggggccctccaagacccatcaacttctgcatcttcggccgagaccgcgtcagtccctgttggcccggatggagccgcacgcccgatctgaaatag

SEQ ID NO: 272016 - DNA, 474 bp, Artificial Sequence
  derived and/or modified sequence
atgggtcggctcactgaggcggcagcagcaggcagtggatcccgagccgctgggtgggccggttctccaccaaccctgttgcctctatcaccaacgagtcctcgctgcgcagccaccatggctagctccgacgaggacggcactaacggaggcgcatccgaagctggtgaggatagggaggcgcctggagagcggagacgcttgggggtcctggcaactgcctggctcactttttacgatatcgcaatgacagcaggcaggttaattctctccccccgtcttgaatgtattggggcaatctcagcccactgccagcctcaacctcccgagttcaagcggttcagttgtctgggtctgcgtagcagctgggattacaaacgaggaccacccaggcccatcaatttctgtattttcgggagggaccgagtgagtccttgttggccaggctggtcaaggacccccgacttaaagtag

SEQ ID NO: 272017 - DNA, 771 bp, Artificial Sequence
  derived and/or modified sequence
ggctgcgccgagccccctgcgcgctgcacatggggcgcctgacggaagcggcggcagcgggcagcggctctcgggctgcaggctgggcagggtcccctcccacgctcctgccgctgtctcccacgtcccccaggtgcgcggccaccatggcgtccagcgacgaggacggcaccaacggcggcgcctcggaggccggcgaggaccgggaggctcccggcgagcggaggcgcctgggggtcttggccaccgcctggctcaccttctacgacatcgccatgaccgcggggagactcattctgtcgcccaggctggagtgcattggcgcgatctccgctcactgccaacctcagcctccggagttcaagcgattctcctgcctcggcctccggagtagctgggactacaagcgtgggccaccacgccccattaatttttgtatttttggtagagacagggtatcaccatgttggccagggtggtctcgaactcctgacctcaaatgattcccccacttcggcctcccaatgtgctgggattacaggtgtgagccatcgcaccgggcctaatattttattttaattttttaaaaatagagatggcctctcactgtgttggctaggctggtctcaaactcccggcctcaagcaatcctcccacctcaacctccaaaagtgctgggattaccacttccggcttaatattttaaactttctccagggtttatagaaaaatgtgattgacaaaaatttaataaatctttacctatggtga

SEQ ID NO: 272018 - DNA, 474 bp, Artificial Sequence
  derived and/or modified sequence
atgggcagactgaccgaggccgccgccgccggcagcggcagcagagccgccggctgggccggcagcccccccaccctgctgcccctgagccccaccagccccagatgcgccgccaccatggccagcagcgacgaggacggcaccaacggcggcgccagcgaggccggcgaggacagagaggcccccggcgagagaagaagactgggcgtgctggccaccgcctggctgaccttctacgacatcgccatgaccgccggcagactgatcctgagccccagactggagtgcatcggcgccatcagcgcccactgccagccccagccccccgagttcaagagattcagctgcctgggcctgagaagcagctgggactacaagagaggcccccccagacccatcaacttctgcatcttcggcagagacagagtgagcccctgctggcccggctggagcagaacccccgacctgaagtag

SEQ ID NO: 272019 - protein, 246 aa, Artificial Sequence
  derived and/or modified sequence
MSQRQVLQVFEQYQKARTQFVQMVAELATRPQNIETLQNAGEPGARTPVAPRALSPRRLRPAALPVELLGSRSVGTGVRKSIHSFQRVFGGQAERVKLPDGCGRCALSLFPSSLHTGVMSLLRTLLLDVVPTIQQTAALALGRLANYNDDLAEAVVKCDILPQLVYSLAEQNRFYKKAAAFVLRAVGKHSPQLAQAIVDCGALDTLVICLEDFDPGVKEAAAWALRYIARHNAELSQAVVDAGAVP

SEQ ID NO: 272020 - DNA, 741 bp, Artificial Sequence
  derived and/or modified sequence
atgagccagagacaggtgctgcaggtgttcgagcagtaccagaaggccagaacccagttcgtgcagatggtggccgagctggccaccagaccccagaacatcgagaccctgcagaacgccggcgagcccggcgccagaacccccgtggcccccagagccctgagccccagaagactgagacccgccgccctgcccgtggagctgctgggcagcagaagcgtgggcaccggcgtgagaaagagcatccacagcttccagagagtgttcggcggccaggccgagagagtgaagctgcccgacggctgcggcagatgcgccctgagcctgttccccagcagcctgcacaccggcgtgatgagcctgctgagaaccctgctgctggacgtggtgcccaccatccagcagaccgccgccctggccctgggcagactggccaactacaacgacgacctggccgaggccgtggtgaagtgcgacatcctgccccagctggtgtacagcctggccgagcagaacagattctacaagaaggccgccgccttcgtgctgagagccgtgggcaagcacagcccccagctggcccaggccatcgtggactgcggcgccctggacaccctggtgatctgcctggaggacttcgaccccggcgtgaaggaggccgccgcctgggccctgagatacatcgccagacacaacgccgagctgagccaggccgtggtggacgccggcgccgtgccctag

SEQ ID NO: 272021 - DNA, 576 bp, Artificial Sequence
  derived and/or modified sequence
atgagccagagacaggtgctgcaggtgttcgagcagtaccagaaggccagaacccagttcgtgcagatggtggccgagctggccaccagaccccagaacatcgagaccctgcagaacgccggcgtgatgagcctgctgagaaccctgctgctggacgtggtgcccaccatccagcagaccgccgccctggccctgggcagactggccaactacaacgacgacctggccgaggccgtggtgaagtgcgacatcctgccccagctggtgtacagcctggccgagcagaacggcgtgccccagctgagcgtgtgcctgagcgaggagcccgaggaccacatcaaggccgccgccgcctgggccctgggccagatcggcagacacacccccgagcacgccagagccgtggccgtgaccaacaccctgcccgtgctgctgagcctgtacatgagcaccgagagcagcgaggacctgcaggtgaagagcaagaaggccatcaagaacatcctgcagaagtgcacctacctgcccgccctggagcccttcctgtacgacgccccccccaacatcctgaagtag

SEQ ID NO: 272022 - DNA, 741 bp, Artificial Sequence
  derived and/or modified sequence
atgtcacagcgccaggttctccaggtgttcgaacagtaccagaaagctagaactcagttcgtgcagatggtggccgaactcgcgaccagaccacagaacattgagactctccaaaacgccggtgaacctggagcccgcacacctgttgctccccgcgctctgagcccccgtcgcctgaggcctgccgccctacctgtggaactgttgggctctagaagtgtaggtactggagtgcgaaagtccattcactccttccagcgggtgtttggggggcaggcagaaagggtgaaactacccgacggatgtggccggtgtgccctgtctttgttcccttcctcactgcatacaggcgtgatgtccctgctccggacacttctcttggatgtcgtgccaaccatccagcagactgccgctctggccctggggcggctggccaactacaatgatgatctggcggaggcagtggtgaaatgtgacatccttccacagctggtctattccctggccgagcagaataggttttacaagaaggctgccgccttcgttctgcgggctgtaggcaaacactctccacaactggcccaggccattgtcgactgcggggccctcgatacactggtcatttgcctggaagacttcgaccctggtgtgaaagaggcagcagcttgggctctgagatatatcgctcgacacaatgccgaacttagccaggccgttgtggacgccggggccgttccatag

SEQ ID NO: 272023 - DNA, 576 bp, Artificial Sequence
  derived and/or modified sequence
atgagccagcgacaggtcctccaagtgtttgagcagtaccagaaagcacgcactcaattcgtgcagatggtggctgagttggctactaggccgcaaaacattgaaactttacagaacgcgggcgtgatgtctcttctgaggaccttgctgctggacgtcgtaccaaccatccagcaaactgcggccctagccttaggacggctggccaattacaacgacgacttggcagaagccgtggtgaaatgtgacatattgcctcagttggtttattcactagcggaacagaacggcgtgcctcagctatccgtttgcctgtccgaagaacccgaggatcacataaaagcggctgcagcttgggccctcggccagattgggcggcacaccccggagcatgcaagggccgtcgctgtaaccaacacgttgcctgttcttctctccctgtacatgtctacggagagctctgaggacctgcaggtgaagagcaagaaagctatcaagaacatcctgcagaaatgcacttacctgcctgccttagagcccttcctgtatgatgcgcctccaaacattctgaaatag

SEQ ID NO: 272024 - DNA, 741 bp, Artificial Sequence
  derived and/or modified sequence
atgagccagaggcaggtgctgcaggtgtttgagcagtaccagaaggcccggacccagtttgtgcagatggtggccgagctggccacccggccccagaacatcgagaccctgcagaatgctggggagcccggggcccggacccctgtggccccccgggccctgagcccccggcggctgcggcctgctgccctgcctgtggagctgctgggcagccgctctgtgggcaccggggtgaggaagagcatccacagcttccagagggtgtttggaggccaggccgagcgggtgaagctgcctgatggctgcggccgctgtgccctgagcctcttccccagcagcctgcacactggagtgatgagcctgctgcggaccctgctgctggatgtggtgcccaccatccagcagacagctgccctggccctgggccgcctggccaactacaatgatgacctggccgaggccgtggtgaagtgtgacatcctgccccagctggtgtacagcctggccgagcagaaccgcttctacaagaaggctgctgcctttgtgctgcgggctgtgggcaagcacagcccccagctggcccaggccatcgtggactgtggggccctggacaccctggtgatctgcctggaggactttgatcctggggtgaaggaggccgccgcctgggccctgcgctacatcgcccggcacaatgctgagctgagccaggccgtggtggatgctggagctgtgccctag

SEQ ID NO: 272025 - DNA, 576 bp, Artificial Sequence
  derived and/or modified sequence
atgagccagaggcaggtgctgcaggtgtttgagcagtaccagaaggcccggacccagtttgtgcagatggtggccgagctggccacccggccccagaacatcgagaccctgcagaatgctggggtgatgagcctgctgcggaccctgctgctggatgtggtgcccaccatccagcagacagctgccctggccctgggccgcctggccaactacaatgatgacctggccgaggccgtggtgaagtgtgacatcctgccccagctggtgtacagcctggccgagcagaatggagtgccccagctgtctgtgtgcctgtctgaggagcctgaggaccacatcaaggctgctgctgcctgggccctgggccagatcggccgccacaccccagagcacgcccgggctgtggccgtgaccaacaccctgcctgtgctgctgagcctgtacatgagcacagagagcagcgaggacctgcaggtgaagagcaagaaggccatcaagaacatcctgcagaagtgcacctacctgcctgccctggagcccttcctgtatgatgccccacccaacatcctgaagtag

SEQ ID NO: 272026 - DNA, 741 bp, Artificial Sequence
  derived and/or modified sequence
atgagccagcggcaggtgctgcaggtgttcgagcagtaccagaaggcaaggactcaatttgtacagatggtggctgagctagccactcggcctcagaatattgagacattacaaaacgctggcgaacctggcgcccgcacacccgtcgcccccagggctctttctcctcgccggctgcgccctgcggccctgcccgtggaacttctgggtagccggtctgttggtacaggggtgagaaagtccatccacagctttcaacgcgtgttcgggggacaggctgagcgcgtcaaattacctgatgggtgtggacgctgtgcgctgagcctgtttccaagttcactccataccggcgtcatgtccctcctacggacccttctgctcgatgtggtgcccacaattcaacagaccgccgcgctggctctggggaggttggctaactacaacgatgatctggctgaggctgtggttaagtgcgatattttacctcaactcgtgtactccctggcggagcagaacaggttctataagaaggcagctgctttcgtgcttagagccgttgggaagcacagcccccagctagctcaggctatagtggactgtggcgctctcgatactttagtgatttgtctcgaagacttcgaccccggcgtgaaagaagctgccgcttgggcactccgatacattgcacgccataacgcagagctctctcaagcggtcgtagacgcaggcgccgttccatag

SEQ ID NO: 272027 - DNA, 576 bp, Artificial Sequence
  derived and/or modified sequence
atgagccagcggcaggtgctgcaggtgttcgagcagtaccagaaggctcggacgcagttcgtccaaatggtagccgagctggccacccggcctcaaaacatcgagactctccaaaacgccggtgtcatgagccttctgaggactctgttgcttgacgttgtacccacaatccagcagacggcagccctggctctggggaggctggcaaattataacgatgatcttgctgaagcagtcgttaaatgcgacatcttgcctcagctcgtttactctttagccgagcagaatggcgtcccacagttaagcgtatgcctgtcagaagagccagaagaccatatcaaagccgccgccgcgtgggccctgggccaaattggccgacataccccggaacacgcccgcgctgttgctgttacaaacaccttacccgtgctgcttagcctatacatgagtacggagagctcagaggacttgcaggtcaagtctaagaaggcgatcaaaaacatcttgcagaagtgcacgtacctgccagcactggagcccttcctatacgacgccccacctaatatcctgaagtag

SEQ ID NO: 272028 - DNA, 741 bp, Artificial Sequence
  derived and/or modified sequence
atgtcacaaagacaggtgctgcaggtctttgagcaatatcagaaggcacggacgcaattcgtccagatggtagcggagcttgcaacccgcccacagaatattgagaccctgcagaatgcaggagaaccaggtgctcgtacgcctgtcgcgccaagagccctgagccccagacgcctcagaccagctgcactgccggtagagctgcttggttcaagaagcgtcgggaccggggtgaggaagtctattcacagctttcagagggtgttcggcggtcaggccgaacgcgtcaagctacctgacggttgcggcaggtgcgccctcagcttgttcccctctagcctccacaccggagtaatgagcctgctccgcactctgctactcgacgttgtgcctaccattcaacaaaccgcggctctcgctcttggaagacttgccaattacaatgatgacctggctgaggctgtggttaagtgcgacattctacctcagctggtatatagcttggcagaacagaatagattctacaaaaaggccgctgccttcgttcttagagccgtgggcaaacattctcctcagttggcccaggcgattgtagactgcggcgctctcgacacccttgttatatgcctggaggactttgaccctggggtcaaggaagctgctgcctgggcacttaggtatattgcccgtcataacgcggagctgagccaggccgtggtagacgccggtgccgttccatag

SEQ ID NO: 272029 - DNA, 576 bp, Artificial Sequence
  derived and/or modified sequence
atgtctcagaggcaggtactgcaagtattcgagcagtaccaaaaggcgaggacccagtttgtccagatggtggccgagttggcaacaaggccccagaatattgaaacactgcagaacgcgggagtgatgtccctcctgcggaccctgcttttggacgtggtccccaccattcagcagacggccgctcttgcactgggcaggctggctaactacaacgatgatctggccgaggcagtggtgaagtgtgatattctgcctcagctcgtctactctttagccgaacagaatggcgtgccccagctatcagtatgcctcagtgaagagccagaggatcatattaaagctgcagctgcctgggctctcggtcagattggacgccatacaccagaacacgctcgtgccgttgccgtgaccaatacgctgcccgttctgctttctttgtacatgtccacagagagcagtgaggatctgcaggttaaatccaaaaaggccatcaaaaacatactccaaaagtgcacttatctgcctgccttggagcccttcttgtatgatgccccaccaaatattctcaaatag

SEQ ID NO: 272030 - DNA, 853 bp, Artificial Sequence
  derived and/or modified sequence
agaagcggctcccgtcggaggccgagtcgtcgccacgatcgcccccttggtggactcgcaggccgagcggcttccccgcagagctcgaggagggcagacggcggcgggggcgccatgagtcagaggcaggtgctgcaagtgttcgagcaataccagaaggccaggacccagttcgtgcagatggtggcggagctggcgactagaccccaaaacatcgagacgctgcagaacgcgggtgagcccggagcccgaacccccgtcgccccccgcgcactgagtccccgacgcctccgccccgctgccctgcccgtggagctcttggggagccgcagtgtggggaccggagttcgcaaaagcatccattcttttcagcgggtctttgggggtcaggccgagagggtgaagcttccagatggttgtgggaggtgcgcgttgtccctgtttccatcttcattgcacacaggtgtaatgtctttgctgagaactcttcttctggacgtggtcccaacaattcaacagactgctgctttggctcttgggagactggccaattataatgatgacctagcagaagctgttgtgaagtgcgacattcttccacagcttgtttattcattggcagaacagaatcgcttctacaagaaagcagctgcctttgtgttacgagcagttggtaaacattctccccagctagctcaggcaatagtcgattgtggagcactggatacgctggtcatatgcttggaagattttgaccctggagtcaaggaggctgcagcctgggcacttagatatattgcaagacataatgcagaactgtcacaagctgtggtggatgcaggagctgttcctc

SEQ ID NO: 272031 - DNA, 691 bp, Artificial Sequence
  derived and/or modified sequence
agagaagcggctcccgtcggaggccgagtcgtcgccacgatcgcccccttggtggactcgcaggccgagcggcttccccgcagagctcgaggagggcagacggcggcgggggcgccatgagtcagaggcaggtgctgcaagtgttcgagcaataccagaaggccaggacccagttcgtgcagatggtggcggagctggcgactagaccccaaaacatcgagacgctgcagaacgcgggtgtaatgtctttgctgagaactcttcttctggacgtggtcccaacaattcaacagactgctgctttggctcttgggagactggccaattataatgatgacctagcagaagctgttgtgaagtgcgacattcttccacagcttgtttattcattggcagaacagaatggtgtaccccagttgtcagtctgcttgtcagaagaaccggaagatcatattaaggctgcagctgcttgggccttaggacagattggaagacacactcctgaacacgcacgggctgttgcagtcacaaatactttgccagttctgctttctttgtacatgtcaacagaaagttctgaggatctccaagtaaaaagtaaaaaagccataaagaatatcctgcaaaaatgtacctacttaccagcccttgaaccatttctatatgatgctcctcccaatattctgaaaca

SEQ ID NO: 272032 - protein, 596 aa, Artificial Sequence
  derived and/or modified sequence
MFGIQENIPRGGTTMKEEPLGSGMNPVRSWMHTAGVVDANTAAQSGVGLARAHFEKQPPSNLRKSNFFHFVLALYDRQGQPVEIERTAFVDFVEKEKEPNNEKTNNGIHYKLQLLYSNGVRTEQDLYVRLIDSMTKQAIVYEGQDKNPEMCRVLLTHEIMCSRCCDKKSCGNRNETPSDPVIIDRFFLKFFLKCNQNCLKNAGNPRDMRRFQVVVSTTVNVDGHVLAVSDNMFVHNNSKHGRRARRLDPSEGTAPSYLENATPCIKAISPSEGWTTGGATVIIIGDNFFDGLQVVFGTMLVWSELITPHAIRVQTPPRHIPGVVEVTLSYKSKQFCKGAPGRFVYTALNEPTIDYGFQRLQKVIPRHPGDPERLPKEVLLKRAADLVEALYGMPHNNQEIILKRAADIAEALYSVPRNHNQIPTLGNNPAHTGMMGVNSFSSQLAVNVSETSQANDQVGYSRNTSSVSPRGYVPSSTPQQSNYNTVSTSMNGYGSGAMASLGVPGSPGFLNGSSANSPYGIVPSSPTMAASSVTLPSNCSSTHGIFSFSPANVISAVKQKSAFAPVVRPQASPPPSCTSANGNGLQAMSGLVVPPM

SEQ ID NO: 272033 - DNA, 1791 bp, Artificial Sequence
  derived and/or modified sequence
atgtttggcattcaggagaatatcccgcgcggtgggacaactatgaaagaagagcccctgggctctggcatgaaccctgtccgctcttggatgcatactgccggggtggtggacgctaacactgccgctcagtctggtgtcggtctggcacgcgcacatttcgaaaaacagccgccgtcaaacttgcgcaaatctaatttctttcatttcgtgttagccttatacgacagacaaggccagccagtggaaattgaacggaccgcatttgtggacttcgtggagaaggaaaaagaacccaataatgagaagacgaataacggaattcattataagctgcaactgttatatagtaatggcgtacggacggagcaagacctgtatgtcagattgatcgactccatgaccaagcaggctattgtctacgagggacaggacaagaatccggaaatgtgtagggtgctattgacccacgagataatgtgtagcaggtgttgcgataagaagagctgcggcaatcggaacgaaactcccagcgatcctgtgatcatcgacagattttttctgaagttttttctgaagtgcaaccagaactgtctgaaaaatgcggggaatccaagggatatgcggcggttccaagtggtcgtgtccacgacagtaaatgtggatgggcatgtactggcagtgtccgacaacatgtttgtccacaataactcaaagcatggaagacgcgctcggcgcttggaccccagcgagggtacagcccctagttacctggagaacgccaccccctgcattaaagccattagtcctagtgagggctggaccaccggcggggcaactgtgatcataatcggggataactttttcgacgggctccaagtggtgttcggtacgatgctggtgtggtctgaacttatcactcctcacgccattagggtgcagactccacctcgtcacattcccggtgtggttgaagtgaccctatcctacaaatctaagcagttctgtaaaggagccccaggtcgtttcgtgtacacagccctcaatgaacccaccattgattacgggtttcagaggctgcagaaggtgattccacggcaccccggagatcccgagcgattgcccaaggaggttttactcaaacgagctgctgacctagtggaggcattatatggtatgccgcataataatcaggagattatcctgaaaagagctgccgacatcgctgaagccctctactccgtcccgaggaaccacaaccaaatacctactctgggcaataacccagcgcacactggcatgatgggcgtaaacagcttttccagtcagctggctgtgaacgtgagcgagacgagccaggccaatgaccaagtcggatattctagaaatactagttccgtctcacccaggggatacgtgcctagtagcaccccccagcagtcaaattataataccgtgtccacatctatgaacggctacggctctggggcgatggcctcgcttggggtgcctggctctccgggctttctgaacggtagctctgcaaactccccatatgggattgtgccaagcagcccaactatggcagcttcctccgtgacactcccctcgaactgttcaagcacacatgggattttttcttttagtcccgccaacgtcatctcggccgtgaagcagaagtctgctttcgctcccgttgtcaggccacaggcttcgcctcctcctagctgcactagcgctaacggtaacggcctgcaagccatgtcgggattagttgtccctcccatgtag

SEQ ID NO: 272034 - DNA, 1791 bp, Artificial Sequence
  derived and/or modified sequence
atgtttggcatccaggagaacatcccccggggcggcaccaccatgaaggaggagcccctgggcagcggcatgaaccctgtgcgctcctggatgcacacagctggggtggtggatgccaacacagctgcccagagcggcgtgggcctggcccgggcccactttgagaagcagccccccagcaacctgaggaagagcaacttcttccactttgtgctggccctgtatgaccggcagggccagcctgtggagattgaaagaacagcctttgtggactttgtggagaaggagaaggagcccaacaatgagaagaccaacaacggcatccactacaagctgcagctgctgtacagcaatggagtgaggacagagcaggacctgtatgtgcggctgattgacagcatgaccaagcaggccatcgtgtatgagggccaggacaagaaccctgagatgtgccgggtgctgctgacccatgagatcatgtgcagccgctgctgtgacaagaagagctgtggcaacagaaatgagacccccagcgaccccgtcatcatcgaccgcttcttcctgaagttcttcctgaagtgcaaccagaactgcctgaagaatgccggcaacccccgggacatgaggcgcttccaggtggtggtgtccaccaccgtgaatgtggatggccacgtgctggccgtgtctgacaacatgtttgtgcacaacaacagcaagcacggccggcgggcccggcggctggaccccagcgagggcacagcccccagctacctggagaatgccaccccctgcatcaaggccatcagccccagcgagggctggaccaccggcggggccaccgtcatcatcatcggggacaacttctttgatggcctgcaggtggtgtttggcaccatgctggtgtggagcgagctgatcacccctcatgccatccgggtgcagaccccacccaggcacatccctggggtggtggaggtgaccctgagctacaagagcaagcagttctgcaagggggcccctggccgctttgtgtacacagccctgaatgagcccaccattgattatggcttccagaggctgcagaaggtgatccccaggcaccctggggaccctgagcggctgcccaaggaggtgctgctgaagagagctgctgacctggtggaggccctgtatggcatgccccacaacaaccaggagatcatcctgaagagagctgctgacattgctgaggccctgtacagcgtgcccaggaaccacaaccagatccccaccctgggcaacaacccagcccacacaggcatgatgggcgtgaacagcttcagcagccagctggccgtgaatgtgtctgagaccagccaggccaatgaccaggtgggctacagcaggaacaccagctctgtgagcccccggggctacgtgcccagcagcaccccccagcagagcaactacaacacagtgtccacctccatgaatggctacggcagcggggccatggccagcctgggcgtgcccggcagccctggcttcctgaatggcagcagcgccaacagcccctatggaattgtgcccagcagccccaccatggccgccagctctgtgaccctgcccagcaactgcagcagcacccacggcatcttctccttcagccctgccaacgtcatctctgctgtgaagcagaagagcgcctttgcccctgtggtgcggccccaggccagccccccacccagctgcaccagcgccaatggaaatggcctgcaggccatgagcggcctggtggtgccccccatgtag

SEQ ID NO: 272035 - DNA, 1791 bp, Artificial Sequence
  derived and/or modified sequence
atgttcggcatccaggagaacatcccccggggcggcaccaccatgaaggaggagccactcggttccggaatgaatccagtgcgctcttggatgcacactgcaggagtggtggacgccaacactgcagcccagtctggggtcggtttggcgagggcacatttcgagaaacagcctcccagcaacctgagaaaatcaaactttttccacttcgtgctggctctgtacgacaggcagggccagccagtcgagatcgaacggacagccttcgtcgactttgtcgaaaaggagaaagagcccaataacgagaagaccaataacggaatccactacaagctgcagcttctctattccaatggcgtcaggaccgaacaggatctgtatgtgcggttaattgacagcatgactaagcaggccattgtgtacgaggggcaagacaagaatcccgaaatgtgccgcgtattactgacacatgaaattatgtgtagtcgctgttgcgacaaaaagtcttgtggcaaccgcaatgagacaccatccgatcctgtgattatagaccggttcttcctcaaattctttttgaagtgcaatcagaattgtcttaaaaacgccggaaatcctcgcgacatgagacgcttccaggtggtagtcagcaccaccgtgaatgtcgatgggcacgtgttggccgttagcgataacatgttcgtgcataataactcgaagcatggaaggagagctcgaaggctagatccatcagagggcacagctcccagctacctggagaacgctacaccatgcattaaggctataagtccctctgagggctggacaaccggcggggccacagttattatcattggtgataacttcttcgacggcctgcaggtggtgttcggtaccatgcttgtgtggtcggagctgatcacgcctcacgccatacgggtacaaacccctccccggcacataccaggtgtcgtcgaagtgaccttatcctacaagagtaagcaattctgcaaaggcgcacctggaaggtttgtctacacagctttgaatgaacctacaatcgattatggcttccagaggttacagaaggttatcccacggcatcctggcgatcctgagagactgcctaaagaggtccttctcaagagggcagccgatctcgtggaagcactctatggcatgccacacaacaatcaagaaataatcctgaaaagggcagccgatattgctgaagccctttattctgtaccaaggaaccacaaccagatacctaccctggggaacaaccccgcccatacagggatgatgggggtaaattccttcagcagccagctggctgtgaatgtgtccgaaacttctcaggccaatgaccaggttgggtactctcgcaatacgtcaagtgtaagcccaaggggctatgtcccatccagcactccccagcagtcaaattataatacggtgagcacctcgatgaacggctacgggtccggagccatggcatccttaggcgtacctggtagcccaggttttttgaacggaagctctgccaattccccctacggcattgttccatccagccccacgatggccgcctccagcgtgacccttccttcaaattgttccagcacgcacggaatcttcagcttttcccccgcaaacgttatttccgccgtgaaacagaaaagtgcgttcgccccagtagtgagaccccaggcatcacctcccccttcatgcacaagcgctaacggaaatggcctgcaggctatgtctggcctggtggtcccccctatgtag

SEQ ID NO: 272036 - DNA, 1791 bp, Artificial Sequence
  derived and/or modified sequence
atgtttggcatccaggaaaatattcccagggggggtacaaccatgaaagaagagccgctcggaagtggtatgaaccccgtgaggtcatggatgcacaccgccggagtcgttgatgctaataccgcagctcagtcaggcgtggggctggcccgagcacacttcgagaaacagccgcctagtaatctccgaaagtcaaatttctttcactttgtgctggccctgtacgataggcagggccagcccgtggagattgagaggaccgccttcgtggactttgtggagaaagaaaaggagcccaataatgagaaaaccaataatggaattcactataaactccaactgttgtactcgaatggcgtaagaacggaacaggatctctatgtgcggctgatcgactccatgacgaaacaggctatcgtttatgaaggacaggacaagaatccagaaatgtgccgagtgctgctaactcatgaaattatgtgttccaggtgctgcgacaaaaagtcttgtggaaacagaaatgagaccccaagcgaccccgtcatcatagataggttctttctgaaattcttcctaaagtgcaatcaaaactgtttaaagaacgccggaaatcccagagatatgaggcgcttccaggtagtggtgagcacgaccgtgaacgtcgacggacatgtgttggctgttagcgataacatgtttgtgcacaacaactctaagcacgggagacgcgcacggagactggatccttccgaaggcaccgccccttcttacctggaaaatgctaccccctgcatcaaagcaatttcaccgagcgaaggctggactaccggaggcgcaacagtcatcatcataggggacaacttcttcgatgggctgcaggtggtgttcggtactatgttggtctggtctgagctgattacaccccatgcaatccgggtccagacaccccctcggcacattcccggagtagtggaggttactctgtcctacaagtctaaacagttctgcaaaggagccccaggtcggtttgtgtacaccgccctgaacgaacctacaatcgactacggatttcaaagactccagaaggttattccacggcatccaggcgacccggagcggttacccaaagaagtgttgcttaaaagggccgcagacctagtcgaagcactgtatggaatgccacacaacaaccaggaaataatcttaaaacgagcagccgatatcgcagaggctctgtactctgtcccaaggaaccacaatcagattcctaccttgggtaataacccagcccatactgggatgatgggtgtgaactcttttagcagccaactggcagtcaatgtatctgaaacatcccaggccaatgaccaggtggggtattcgcgaaacacttcttcagtgtcacctcggggatatgtcccttcttcaacaccccagcaatccaactacaacacggtgagcacctccatgaatgggtatggttccggagcaatggcctccctaggtgtccccggtagcccaggcttcctgaatgggagcagtgccaattccccttatgggattgttcctagttctcccaccatggcagcgagctccgtcacacttccttcaaattgcagttccacacacggtattttttctttctcgcctgctaacgtgattagtgccgttaagcagaaaagcgccttcgcacctgtcgtgaggccgcaggcctccccccctcccagctgcacgtcagccaatggcaacggccttcaagccatgtctggtctcgtagtgcccccaatgtag

SEQ ID NO: 272037 - DNA, 1791 bp, Artificial Sequence
  derived and/or modified sequence
atgttcggcatccaggagaacatccccagaggcggcaccaccatgaaggaggagcccctgggcagcggcatgaaccccgtgagaagctggatgcacaccgccggcgtggtggacgccaacaccgccgcccagagcggcgtgggcctggccagagcccacttcgagaagcagccccccagcaacctgagaaagagcaacttcttccacttcgtgctggccctgtacgacagacagggccagcccgtggagatcgagagaaccgccttcgtggacttcgtggagaaggagaaggagcccaacaacgagaagaccaacaacggcatccactacaagctgcagctgctgtacagcaacggcgtgagaaccgagcaggacctgtacgtgagactgatcgacagcatgaccaagcaggccatcgtgtacgagggccaggacaagaaccccgagatgtgcagagtgctgctgacccacgagatcatgtgcagcagatgctgcgacaagaagagctgcggcaacagaaacgagacccccagcgaccccgtgatcatcgacagattcttcctgaagttcttcctgaagtgcaaccagaactgcctgaagaacgccggcaaccccagagacatgagaagattccaggtggtggtgagcaccaccgtgaacgtggacggccacgtgctggccgtgagcgacaacatgttcgtgcacaacaacagcaagcacggcagaagagccagaagactggaccccagcgagggcaccgcccccagctacctggagaacgccaccccctgcatcaaggccatcagccccagcgagggctggaccaccggcggcgccaccgtgatcatcatcggcgacaacttcttcgacggcctgcaggtggtgttcggcaccatgctggtgtggagcgagctgatcaccccccacgccatcagagtgcagaccccccccagacacatccccggcgtggtggaggtgaccctgagctacaagagcaagcagttctgcaagggcgcccccggcagattcgtgtacaccgccctgaacgagcccaccatcgactacggcttccagagactgcagaaggtgatccccagacaccccggcgaccccgagagactgcccaaggaggtgctgctgaagagagccgccgacctggtggaggccctgtacggcatgccccacaacaaccaggagatcatcctgaagagagccgccgacatcgccgaggccctgtacagcgtgcccagaaaccacaaccagatccccaccctgggcaacaaccccgcccacaccggcatgatgggcgtgaacagcttcagcagccagctggccgtgaacgtgagcgagaccagccaggccaacgaccaggtgggctacagcagaaacaccagcagcgtgagccccagaggctacgtgcccagcagcaccccccagcagagcaactacaacaccgtgagcaccagcatgaacggctacggcagcggcgccatggccagcctgggcgtgcccggcagccccggcttcctgaacggcagcagcgccaacagcccctacggcatcgtgcccagcagccccaccatggccgccagcagcgtgaccctgcccagcaactgcagcagcacccacggcatcttcagcttcagccccgccaacgtgatcagcgccgtgaagcagaagagcgccttcgcccccgtggtgagaccccaggccagccccccccccagctgcaccagcgccaacggcaacggcctgcaggccatgagcggcctggtggtgccccccatgtag

SEQ ID NO: 272038 - DNA, 4510 bp, Artificial Sequence
  derived and/or modified sequence
ccgccaagccccgagcgccgctgctcgaggaaacgctttcggccgggagctgcggccgccgccagcagttttcatgtttgggattcaggagaatattccgcgcggggggacgaccatgaaggaggagccgctgggcagcggcatgaacccggtgcgctcgtggatgcacacggcgggcgtggtggacgccaacacggccgcccagagcggcgtggggctggcgcgggcgcacttcgagaagcagccgccttccaacctccggaaatccaatttcttccacttcgtgctggcgctctacgataggcaggggcagccggtggagattgaaaggaccgcttttgtggactttgtggagaaagagaaagagccaaacaacgagaaaaccaacaacggcatccactataaactccagttattgtacagcaacggagtcagaacagagcaagatctgtatgttcgcctcatagattcaatgaccaaacaggccatcgtctacgagggccaggacaagaacccggagatgtgccgtgtgctgctgacccacgagatcatgtgcagccggtgctgtgacaagaaaagttgtggcaatagaaacgaaacgccctcagaccctgtaatcattgacagattctttctaaagtttttcctcaagtgcaatcagaactgtttgaagaatgcaggcaaccctcgagatatgcggagattccaggttgttgtatcgacaacagtcaacgtggacggccacgtgctggccgtgtcagacaacatgtttgtgcacaacaattccaaacacgggaggcgggcccgccgcctagacccgtcagaaggtacggccccttcttatctggaaaatgccactccgtgcatcaaggccatcagtcccagtgaaggctggaccacggggggtgccaccgtcatcataattggcgacaacttctttgacgggctgcaagttgtattcggaactatgttggtgtggagcgagctgataactccccatgccatccgagtccagaccccgccgaggcacattcctggcgtcgtcgaagtgaccctctcctacaaatccaagcagttctgcaaaggtgctcctgggcgctttgtctacaccgcccttaatgaaccaaccatagattacggctttcagaggttgcagaaagtgatcccaagacatccgggtgatcccgaaaggttacccaaggaggtgttactgaagcgggcggcggacctggtggaagccttatacggaatgcctcacaacaaccaggagatcatcttgaagcgagcggcggacatcgccgaggcgctgtacagcgttccccgcaatcacaaccagatccccaccctgggcaacaaccctgcacacacgggcatgatgggcgtcaactccttcagcagccagctagccgtcaacgtgtcagagacgtcacaagccaacgaccaagtcggctacagtcgcaatacaagcagcgtgtccccgcgaggctacgtccccagcagtactccccagcagtccaattacaacacagtcagcactagcatgaatggatatggaagtggcgccatggccagtctaggggtccctggctcgcctggatttcttaatggctcctccgctaactctccctacggcatagtgccgtccagccccaccatggcagcctcttcggtcaccctcccttcaaactgtagcagcacacacggcattttctcattctcacctgccaatgtcatctccgcagtgaaacagaagagcgccttcgcgcccgtggtccggccccaagcctctcctcctccttcctgcaccagcgccaacgggaatggactgcaagctatgtctgggctggtagtcccgccaatgtgagggacttctgtttaccttccgcagcacccagcatcaaaggacggacttcaggggacacgtttagtatattaagacatgctgatggaaacagtatcttcaaaaaaatcagcagcaattgaaatgctacaaaagactttgtttaaagattttatttaaactattaagaatcaacatgcaaacagcctacttcttcatgaacaattccattttattgactgaacttttctcatattttcacatttctcagtcctgaagaataaggaaaacaaagcgacgcctattttgtataaagtttccgactccgtcttggccatgtctagtaattgctatgtgttgggagaaactttgtgaatgcaccattttgatgatcatgaaacgctgatgaaaaatgcctccaaacatttttctgtactcatacttagattcacaatggttgtgtatctctataatgtgaaatatttttttgtggtgataaaaagagggccaaggaggtatgagccatcagactggaaaaaaggatgactatatgatgaggagaaactggggtggcagggagggagggagggtttatcactgcttaacttcatcttcatgaaatgaaactttgtaacttattgtagttagaaattgtaactttgatattgaattctcttgccttcaacaagcacactgacagagaaaaaatgctactgtctgttggttccaatattctcccactgctagagcttcctgttaagcaagtgtgatctgcaacattttttcaacttttgctagcactgtatactattgcattcttaggctactgtgaggtctatgtttcttgtaccagaaattgtccttttgacttctagatccttcttccctaatgtgttttgtatgtggttataaaattgtagacttttgtgattttgccaaagttgtagctaaatatttatacacttgtcttgaatttttttcagatccacttaaaatatttagaaaaacaagttttattccttatgtgtcttataaggaataaaatggtcttcatttgacacttactttcccatgaacacttgcagttgctaagggactttattttgtaacatatcaattataaatattgtatttatctttgaaattttgtacattgcttttcccaccttttcctttttcttctttcttgtctgtattggtttttgatcacggcctggtgttgtgatactgggaagagcattagccaagaacttgtctctttgatctgtttcgttaagctgaaccagtgtctttacatttcatttgtacttcaaaaaatatgctattgtttagactttccatcctttttttttttattttgaggaaaagtcaaattcattgtttatttttatattatttttaagttatctgaacaaatacttttgaaaaaaaagtttgttgtatagtcaaaacaaatcggtgccacccggccgtgacaaatcctagtagattctgtgcatgtggagcggccgcgaagaggtgacaccgtttggggctgtgtccttattttattttatttttttgtagaatgtaaaaagtcattttagatgccacccattgactttgccacatagctgaactgtgtttactggaaaaattcagaggcctaaagtttaaaataaaatttacttctgatgttttaattaaaatgtttgccacattaacttttctgatgccttaaaagtgaacttctttaaagaacctttgtgctattttatcacaggcttacactacaattgttaataaatacttcatttggagatgtatggtgtaaaacacacaaacacacacaaaaaagcacaagcccgctgcatgacccgtctctcctttctgggactatttctgctgcgtcctgcaccctcctgggcccacctccgattcacagaggtttcagggggacccaaatcactgctggttttcaatttttttttaacaatacatttttgtggtcagttccaacagcactgtccgtacttttaaaactggaatgacctccttcagatatcgtgcctcttagtgccaaacccacagtgagaccaaaagtgtcaggtgtttttttttttttctttctcctttgcactaagtgctttgcagacacggcacagcaaacattttgcaaactgcagcagaaatcgaatttaaaacaaaaaggagggactttaaaataccttcttgacaaaaatcaacaatgcacaacttacaaagtgttcattctagggacaaaattaaataaacagaatgtccccaggagtcagcaggtcacagtctggctttgtgatggttgacaaggtctagctacatgggaaagcctgagaagtcactttggaactaaattgcctccattttattttgtacgagtaagggtttgatctacaaaagagctcacatggacgcactgagaacgcctgccagcttccccatgccctcacttggtttgtgttttaggttaagtagtcaatgcccacatcacttcactgtctcaagactgagcacttcactaaatggtagattttactgttaaagaccctacaataagattgttttatctgtacattttttcagatatttaactgtataaaaatgttcattttacacaatatttaattaaagtatttcttgtctgtgaatttc

SEQ ID NO: 272039 - protein, 1279 aa, Artificial Sequence
  derived and/or modified sequence
MRGHGNHSRLKSRCASLGNVHHHQAQMAHGAHCRGGRTPQSPDSRGPTAGGHTRGRWTYRPIEALINVSFPGAKGGRTAEGEPSWAWVFRSGYLQRQALPGLPVSTRVAACWWQHHPGRDSGFLGPGFIDLLREEPSGRADGKAAAQKTGRLYLFPTFLGNKLPEAADSFGEIASGNSVIFTSVLQSSHPPGTPPPSARKPSPGAAMLVCEETLELGAQGCWGSTSPRGQAVSLVGGPTAGGSRLGGAGCTMGLLMALQARRPRDGTWADPRRCSRAVEGSGLTRAALVSPGPSGVEEDTRREGCVLVGSWRSSTHRSRVLIINTPSGRTPWSQGSLGSTGRYNQTRAPGSQQQGLCSDAALHEDFVPEPTPAFFQYPPQAFSKTKVRDLGRGGLYAFSKEEKVSEAQRVEAYETHGLGLSTGRQNPVPSPCKPGCVCQGLALDAEAWPRHPGRRPCAAKEACLGPPGCSGELSLPEEEGIAPGAATAAPAWVPHGRVSRFLTVKLFTYVTMYQCKQERILRLCISGESGRYVRRSRFRNFAALMVSTGVPGVLQLGARPLRGGGHPYGDSQAGKVVEWRAGDRASGLSAGERRFLSQSELQTWPRTPHCVGKKVPQPVGAADLAPDTSLCRKEGSSASRSCRPGPGHLTRREEDSFRQLAFPRFEEVTFPPLTAAERAPSVHGGHSLASQGLVLAGRTRSVASGGKQELSGPLAACIPTQDLKTVLSLPRYPGEFLHPVVYACTAVMLLCLLASFVTYIVHQSAIRISRKGRHTLLNFCFHAALTFTVFAGGINRTKYPILCQAVGIVLHYSTLSTMLWIGVTARNIYKQVTKKAPLCLDTDQPPYPRQPLLRFYLVSGGVPFIICGVTAATNIRNYGTEDEDTACWMAWEPSLGAFYGPAAIITLVTCVYFLGTYVQLRRHPGRRYELRTQPEEQRRLATPEGGRGIRPGTPPAHDAPGASVLQNEHSFQAQLRAAAFTLFLFTATWAFGALAVSQGHFLDMVFSCLYGAFCVTLGLFVLIHHCAKREDVWQCWWACCPPRKDAHPALDANGAALGRAACLHSPGLGQPRGFAHPPGPCKMTNLQAAQGHASCLSPATPCCAKMHCEPLTADEAHVHLQEEGAFGHDPHLHGCLQGRTKPPYFSRHPAEEPEYAYHIPSSLDGSPRSSRTDSPPSSLDGPAGTHTLACCTQGDPFPMVTQPEGSDGSPALYSCPTQPGREAALGPGHLEMLRRTQSLPFGGPSQNGLPKGKLLEGLPFGTDGTGNIRTGPWKNETTV

SEQ ID NO: 272040 - protein, 853 aa, Artificial Sequence
  derived and/or modified sequence
MRGHGNHSRLKSRCASLGNVHHHQAQMAHGAHCRGGRTPQSPDSRGPTAGGHTRGRWTYRPIEALINVSFPGAKGGRTAEGEPSWAWVFRSGYLQRQALPGLPVSTRVAACWWQHHPGRDSGFLGPGFIDLLREEPSGRADGKAAAQKTGRLYLFPTFLGNKLPEAADSFGEIASGNSVIFTSVLQSSHPPGTPPPSARKPSPGAAMLVCEETLELGAQGCWGSTSPRGQAVSLVGGPTAGGSRLGGAGCTMGLLMALQARRPRDGTWADPRRCSRAVEGSGLTRAALVSPGPSGVEEDTRREGCVLVGSWRSSTHRSRVLIINTPSGRTPWSQGSLGSTGRYNQTRAPGSQQQGLCSDAALHEDFVPEPTPAFFQYPPQAFSKTKVRDLGRGGLYAFSKEEKVSEAQRVEAYETHGLGLSTGRQNPVPSPCKPGCVCQGLALDAEAWPRHPGRRPCAAKEACLGPPGCSGELSLPEEEGIAPGAATAAPAWVPHGRVSRFLTVKLFTYVTMYQCKQERILRLCISGESGRYVRRSRFRNFAALMVSTGVPGVLQLGARPLRGGGHPYGDSQAGKVVEWRAGDRASGLSAGERRFLSQSELQTWPRTPHCVGKKVPQPVGAADLAPDTSLCRKEGSSASRSCRPGPGHLTRREEDSFRQLAFPRFEEVTFPPLTAAERAPSVHGGHSLASQGLVLAGRTRSVASGGKQELSGPLAACIPTQDLKTVLSLPRYPGEFLHPVVYACTAVMLLCLLASFVTYIVHQSAIRISRKGRHTLLNFCFHAAEHPGVTPLRTSPPLPWWTPIQVGIVLHYSTLSTMLWIGVTARNIYKQVTKKAPLCLDTDQPPYPRQPLL

SEQ ID NO: 272041 - DNA, 3837 bp, Artificial Sequence
  derived and/or modified sequence
atgcgaggccacgggaaccactcgcggctgaaatccagatgtgcttctctgggcaacgtccatcaccaccaggcacagatggcgcacggtgcacactgccgagggggccggacaccacagtcaccagacagccggggcccaaccgctgggggccacacccggggcagatggacgtaccggcccatcgaggccctcatcaacgtcagctttcccggagcaaagggtgggagaacggccgagggcgagccctcatgggcgtgggtcttcagaagtggctatttgcagagacaggctcttcctgggcttcccgtctccacccgagtggctgcctgctggtggcaacaccatccaggcagggactcagggttcttgggacctggatttattgacctgctcagagaggagcccagcggccgtgcagatgggaaggcagctgctcagaaaacagggcgtctttatttgttcccgactttcctaggcaacaaattaccagaggccgccgactcgtttggggaaattgcttctgggaacagtgttatttttacctccgtcttgcaatcctctcacccacctggcaccccaccgcccagcgcacgcaagccaagtcccggagctgccatgctcgtctgtgaggaaacgctggagctgggtgcccagggctgctgggggtccacgagcccccggggccaggccgtgagcttggtcggtgggcccacggccggaggctccaggctgggaggggctggctgcaccatgggcctgctcatggccctccaggccagacgccccagggacggcacctgggctgaccctcgaagatgctccagggctgtagagggctcgggcctcaccagggctgcccttgtgagtccagggccatcgggggtggaggaggacaccaggagggaaggctgcgtgcttgtgggctcctggaggtcgtccacccacagaagccgtgttctgattatcaacacgccctctggcaggaccccctggagccagggctccctcggcagcaccgggcgctacaaccagacccgggcaccaggcagccagcagcaggggctgtgctcggatgcagctctacacgaggattttgtgccggagcctactcctgccttctttcaataccctccacaagccttcagcaaaaccaaggttcgcgacttggggaggggaggcctttatgccttttccaaggaggagaaggtatctgaggcccagcgggtagaggcctacgagacccacggccttggcctgagtacaggccgacagaaccctgtgccgtccccctgtaagcctggatgcgtgtgccagggccttgcgctggacgcagaggcctggccgaggcaccctggacgcaggccctgtgcggccaaggaggcctgcctgggcccacctggctgcagcggggagctgagcctccctgaggaggaaggaatcgcacctggggcagcaacagcagctcctgcctgggtccctcatggccgcgtgagccgcttcctcactgtaaagctcttcacctatgtaactatgtatcaatgtaaacaggaacgtatcctccgcctctgcatctctggtgaatccgggcgatacgtgcggcgctcacgcttccgcaactttgcagcgctcatggtgagtacgggggtcccgggggtcctgcagctgggggctaggccgctgcgggggggcggccacccgtatggggactcccaggctggaaaagttgtggaatggcgagctggtgaccgggcttccgggctcagtgccggggaaagaaggttcctcagccagtcggagctgcagacctggccccggacacctcactgtgtaggaaagaaggttcctcagccagttggagctgcagacctagccccggacacctcactgtgcaggaaagaaggttcctcagccagtcggagctgcagacctggccccggacacctcacccgcagggaggaagattccttcaggcagctggcattccccaggtttgaagaggtcactttcccacctctcactgctgcagaaagagcaccctctgtccacggtggacactctctagccagccagggcctcgtcttggctggacggacaagaagtgtggcctcaggagggaagcaggagctctcgggcccgctggctgcctgcatcccgacacaggatctgaagacagtgctctccctgccccgctacccaggggagttcctgcaccccgtggtgtacgcgtgcacggccgtcatgctgctctgcctcctggcctccttcgtcacctacatcgtgcaccagagcgccatccgcatcagccgcaagggccggcacacgctcctgaatttctgcttccacgcggccctgaccttcactgtgttcgccggcggcatcaatcgcaccaagtaccccatcctgtgccaggcggtgggcatcgtgctgcactattctacactgtccaccatgctgtggataggagtgaccgccaggaacatctacaagcaggtgaccaagaaggcccctctgtgcctggacacagaccagccaccgtaccccaggcagcccctgctcaggttttacctcgtcagcggaggggtcccctttatcatctgtggggtcacggctgccacgaacatcaggaattacgggacagaggacgaggacacggcctgctggatggcctgggagcccagcctgggcgccttctacggcccagccgccatcatcaccctggtcacctgtgtgtacttcctgggcacctacgtgcagctgcggcgccacccagggcgcaggtacgagctgcgcacacagcccgaggagcagcggcggctggcgacacccgagggcggccgtgggatccggccaggcaccccacccgcacacgatgcccccggcgcctccgtgctgcagaacgagcactcattccaggcacagctgcgcgccgccgccttcacgctgttcctgttcacggccacgtgggccttcggggcgctggcggtgtcacagggccacttcctggacatggtcttcagctgcctgtacggcgccttctgcgtgaccctgggactcttcgtgctcatccaccactgcgccaagcgtgaggacgtgtggcagtgctggtgggcatgctgcccgccccgcaaggacgcccaccccgcacttgacgccaacggggccgcgctgggccgcgccgcctgcctgcactcgccgggactgggccagccacggggcttcgcgcacccaccgggcccctgcaagatgaccaacctgcaggccgcgcagggccacgccagttgcctgtcaccggccaccccgtgctgcgccaagatgcactgcgagccactgacggcggacgaggcgcacgtgcacctgcaggaggagggcgccttcgggcacgacccccacctgcacgggtgccttcagggcagaactaagccgccctactttagccggcacccagcagaggagcccgagtacgcctaccacatcccatccagcctggatggcagcccccgcagctcgcgcacagacagcccccccagctctctggatggcccggcggggacacacacgctggcctgctgcacccagggcgaccccttccccatggtcacccagcccgagggcagtgatgggagccctgccctctacagctgccccacgcagccgggcagggaggcagcgctcgggcccggccacttggagatgctgcggaggacacagtccctgccctttggtggccccagccagaacgggctgcccaagggtaaattgctagaaggcctgccgtttggcaccgacgggaccggcaacatccgaacgggaccctggaaaaacgaaactactgtg

SEQ ID NO: 272042 - DNA, 6006 bp, Artificial Sequence
  derived and/or modified sequence
atgcgaggccacgggaaccactcgcggctgaaatccagatgtgcttctctgggcaacgtccatcaccaccaggcacagatggcgcacggtgcacactgccgagggggccggacaccacagtcaccagacagccggggcccaaccgctgggggccacacccggggcagatggacgtaccggcccatcgaggccctcatcaacgtcagctttcccggagcaaagggtgggagaacggccgagggcgagccctcatgggcgtgggtcttcagaagtggctatttgcagagacaggctcttcctgggcttcccgtctccacccgagtggctgcctgctggtggcaacaccatccaggcagggactcagggttcttgggacctggatttattgacctgctcagagaggagcccagcggccgtgcagatgggaaggcagctgctcagaaaacagggcgtctttatttgttcccgactttcctaggcaacaaattaccagaggccgccgactcgtttggggaaattgcttctgggaacagtgttatttttacctccgtcttgcaatcctctcacccacctggcaccccaccgcccagcgcacgcaagccaagtcccggagctgccatgctcgtctgtgaggaaacgctggagctgggtgcccagggctgctgggggtccacgagcccccggggccaggccgtgagcttggtcggtgggcccacggccggaggctccaggctgggaggggctggctgcaccatgggcctgctcatggccctccaggccagacgccccagggacggcacctgggctgaccctcgaagatgctccagggctgtggagggctcgggcctcaccagggctgcccttgtgagtccagggccatcgggggtggaggaggacaccaggagggaaggctgcgtgcttgtgggctcctggaggtcgtccacccacagaagccgtgttctgattatcaacacgccctctggcaggaccccctggagccagggctccctcggcagcaccgggcgctacaaccagacccgggcaccaggcagccagcagcaggggctgtgctcggatgcagctctacacgaggattttgtgccggagcctactcctgccttctttcaataccctccacaagccttcagcaaaaccaaggttcgcgacttggggaggggaggcctttatgccttttccaaggaggagaaggtatctgaggcccagcgggtagaggcctacgagacccacggccttggcctgagtacaggccgacagaaccctgtgccgtccccctgtaagcctggatgcgtgtgccagggccttgcgctggacgcagaggcctggccgaggcaccctggacgcaggccctgtgcggccaaggaggcctgcctgggcccacctggctgcagcggggagctgagcctccctgaggaggaaggaatcgcacctggggcagcaacagcagctcctgcctgggtccctcatggccgcgtgagccgcttcctcactgtaaagctcttcacctatgtaactatgtatcaatgtaaacaggaacgtatcctccgcctctgcatctctggtgaatccgggcgatacgtgcggcgctcacgcttccgcaactttgcagcgctcatggtgagtacgggggtcccgggggtcctgcagctgggggctaggccgctgcgggggggcggccacccgtatggggactcccaggctggaaaagttgtggaatggcgagctggtgaccgggcttccgggctcagtgccggggaaagaaggttcctcagccagtcggagctgcagacctggccccggacacctcactgtgtaggaaagaaggttcctcagccagttggagctgcagacctagccccggacacctcactgtgcaggaaagaaggttcctcagccagtcggagctgcagacctggccccggacacctcacccgcagggaggaagattccttcaggcagctggcattccccaggtttgaagaggtcactttcccacctctcactgctgcagaaagagcaccctctgtccacggtggacactctctagccagccagggcctcgtcttggctggacggacaagaagtgtggcctcaggagggaagcaggagctctcgggcccgctggctgcctgcatcccgacacaggatctgaagacagtgctctccctgccccgctacccaggggagttcctgcaccccgtggtgtacgcgtgcacggccgtcatgctgctctgcctcctggcctccttcgtcacctacatcgtgcaccagagcgccatccgcatcagccgcaagggccggcacacgctcctgaatttctgcttccacgcggccgagcatcctggcgtgaccccactgaggacttcacctcctctcccttggtggacacctatccaggtgggcatcgtgctgcactattctacactgtccaccatgctgtggataggagtgaccgccaggaacatctacaagcaggtgaccaagaaggcccctctgtgcctggacacagaccagccaccgtaccccaggcagcccctgctcaggttttacctcgtcagcggaggggtcccctttatcatctgtggggtcacggctgccacgaacatcaggaattacgggacagaggacgaggacacggcgtactgctggatggcctgggagcccagcctgggcgccttctacggcccagccgccatcatcaccctggtcacctgtgtgtacttcctgggcacctacgtgcagctgcggcgccacccagggcgcaggtacgagctgcgcacacagcccgaggagcagcggcggctggcgacacccgagggcggccgtgggatccggccaggcaccccacccgcacacgatgcccccggcgcctccgtgctgcagaacgagcactcattccaggcacagctgcgcgccgccgccttcacgctgttcctgttcacggccacgtgggccttcggggcgctggcggtgtcacagggccacttcctggacatggtcttcagctgcctgtacggcgccttctgcgtgaccctgggactcttcgtgctcatccaccactgcgccaagcgtgaggacgtgtggcagtgctggtgggcatgctgcccgccccgcaaggacgcccaccccgcacttgacgccaacggggccgcgctgggccgcgccgcctgcctgcactcgccgggactgggccagccacggggcttcgcgcacccaccgggcccctgcaagatgaccaacctgcaggccgcgcagggccacgccagttgcctgtcaccggccaccccgtgctgcgccaagatgcactgcgagccactgacggcggacgaggcgcacgtgcacctgcaggaggagggcgccttcgggcacgacccccacctgcacgggtgccttcagggcagaactaagccgccctactttagccggcacccagcagaggagcccgagtacgcctaccacatcccatccagcctggatggcagcccccgcagctcgcgcacagacagcccccccagctctctggatggcccggcggggacacacacgctggcctgctgcacccagggcgaccccttccccatggtcacccagcccgagggcagtgatgggagccctgccctctacagctgccccacgcagccgggcagggaggcagcgctcgggcccggccacttggagatgctgcggaggacacagtccctgccctttggtggccccagccagaacgggctgcccaagggtaaattgctagaaggcctgccgtttggcaccgacgggaccggcaacatccgaacgggaccctggaaaaacgaaactactgtgtagatgggggcagaggacacggtgttcctggaggagcttcagagcagagtggggggcccatctgccacatgaggtcactgggggtaccgaagtgaccccgcctttcagaagccgttcacacccctgccccttccttgtgatcacacccctgccccttccttgtgatcacacccctgccccttccttgtgatcacacccctgccccttccttgtgaaagacctcagcggggaaacgctccgggccacgcccactccccttatcccaattccgcgtgctggtcccgcacacggtcatccggtttctgtcctgtggtctccagtcctggggcaccctagaggcagagcaggggattccatcaaaggacccactgagaccccagcatggccctgcccgagatgccctgctgcccacggagtcctggcttcccctggtgtggccgggcagggccgagatcgcaggagggggctgccctgacctttcccagtgttcaatgtgtgtgtcttgcgttctactccgggggtggcggcggcaggtctgtccccagcattctcgctctgggcagaaccctcgggaccctccgctgtcgtgtgtctgagccacccctgcagcttcacagggcccctgcacacctctgcccactcagtgtgccctgtcagccctgtccttgtcgtagccccagccctgcagggctgagagcaccacagatgctgggggctgctctggactttggggatggctgtcagcctcagagggccaatggggggctttcacgggcccaaggcttgggaaaatgcccagacatcctttagtgaagactcgacttccaaaaccagccaccgctgggactggattccactccagtataggcacttagcaacacgaaggtttattccaaaaagaaaaggggctgacagacgggagattctcatggacaaaatccctttccctttttctcgtctccatgaacatctgggtaccaagccctgactcaaaggacagatgtggatgacagcaagacttctgtgaaagcaagtggcccgtccctaggtgggagggagtccagagggtcatgggtgtgaaactgtgcacagctttccctccctccctcttcctccttgtctgtgacacatgtgcacccacacacacacacacaaacacatgtgcatatcacacacatgcacacacacaaacacatgtgcatatcacacacgcgcacacacccaaacacgtgcatatcacacacatgcacacacacaaacacgtgcatatcacacacatgcacacaaacgtgcatatcacacacacgcacacacacccaaacacgtgcatatcacacacacgcacacacacaaacacgtgcatatcacacacaaacacacgtgcacacatacttaacacacacttgcacctgctgtgcacatgtgcacacacacgtagtagtgtgttttccagccacccacacactgggtttgcattggagattgtttcaccctgcaaacgtcaacgtcagcagactcgtcggtgcgctgtgctatccggttgggaggtctcaccaggagcagagcctccctaacgtgcacctccgagaagaggggtgtcggggagtgttcccagcacctgctcggtggaagggctctccggagactggcactcagtatctgagtatgaggagcctcacttcccggggtgtcggtaaacttgaccgtgactcagtaacccacagcgtgctcctcccagcaaaccccgtgtgtccttacaggtcgaccagacgggccgtcggaggaccaccaggtggctctgcctctgcctcaccttctcacctgcttccatagctgatgtgaacccgaatccccacgctgtgctgtgtacgcactgtaggtgcagaaccgtccacacaaaaatacagtcttggcattgtttgttctttgtgaggctggttaatagcatccccgtgtgtttttctcaccctcgatggggtagaggggcacctgaatgtgtggcccccgtctgtgtcctggatcctggggcagggctgctctccctggcccctgcagcccctcatgaactttccaccctcagtgcccccggctgagcagagaggcgtcccaccattcaaccaaagaaagtcaacattgaacattaaacctctgtgtgtttctatactg

SEQ ID NO: 272043 - DNA, 3840 bp, Artificial Sequence
  derived and/or modified sequence
atgaggggccatggcaaccacagccgactaaagtcacggtgtgcatcactcggaaatgtgcaccatcaccaggcgcagatggcccacggggcccactgtcggggaggcaggacacctcaatccccagatagcagaggcccaaccgctggcggtcatacaagggggcgatggacctacaggcccattgaagcgctgatcaacgtttcatttcctggcgccaaaggaggacgcacagcggagggggagcctagctgggcctgggtttttagaagcggctacctgcagagacaagccttgcctggactccccgtgagcacgcgggttgctgcatgctggtggcagcaccatccagggcgcgacagcggattccttggccctggttttattgatctgctacgagaagagccctctggtagagcggatggtaaagccgccgctcaaaagactggcaggctctatctcttcccaacctttctggggaacaagctccccgaggctgcagacagttttggggaaatcgccagtggcaattctgtgatcttcacaagtgtcctgcagagcagccacccacccgggaccccaccaccaagcgcccgtaaacccagccccggcgccgctatgctagtctgcgaggagaccctcgagttaggagcccagggatgttggggaagtacttctcctaggggccaggcggttagtctggttggcggcccaacagcaggagggtctaggctagggggcgctgggtgcacaatgggcctcctcatggcgctgcaggccaggagaccacgggacgggacatgggctgatcctagacggtgtagcagagccgtggaaggctccggtctaaccagagccgctctggtgagtcccgggccaagtggtgtcgaagaagacacaaggcgcgagggatgtgtgctcgtcgggagttggcggtcaagtacccatcgatcccgtgtgcttattatcaatactccgtctggtagaacgccatggtcacagggatctctgggttctactggacgctataaccaaacccgggctcccggttcacagcaacagggtctgtgctctgacgctgcgctacatgaggattttgtaccagaaccaacccccgcattttttcagtaccccccacaagccttctccaaaaccaaggtgagggacctgggcaggggaggattgtacgcctttagcaaagaggagaaggtttctgaagcccagagagtggaggcctacgagacccatgggcttggcttatccacgggtagacagaatcctgtcccatcaccttgcaaaccagggtgcgtctgccagggactggctttggacgccgaggcatggccacggcaccctgggcgccggccatgcgcagccaaagaagcctgtttaggtcccccaggatgctcaggcgaactgtccctgcccgaggaggagggcattgcacctggcgcggccaccgccgctccagcttgggtgcctcacggacgtgtgtccagattcctcactgtgaaactgtttacttacgttacgatgtatcaatgcaagcaggagcgcatccttagactgtgtatctcaggtgaatcggggaggtatgtccgccgctccagattcagaaacttcgccgccctgatggtaagtaccggggtcccaggagtgctgcagctgggtgccagacccttaaggggggggggccatccttacggcgactctcaggccggaaaagtcgtggagtggcgcgcaggcgatagagcatcaggtctgagcgccggcgagagacgcttcctttctcagtcagaactccagacctggccccgcactccccattgtgtcggaaagaaggtgcctcagccagttggcgcggctgacttggcccccgacacatccttgtgcagaaaggaaggaagctctgctagcaggtcttgtcggcccgggcctggtcacctaaccagaagagaagaagacagttttaggcaactggcctttccacgcttcgaagaggtgaccttcccacccttgaccgctgccgagcgagccccctcagtgcacggcgggcacagtctcgcctcacaaggcttggtgcttgcaggccggacccgctcagttgcgtccgggggaaaacaggaactgtccggccccctggctgcctgcattcctactcaagacctcaaaacagtgttgtccctcccacgatatccaggggaatttttacaccccgttgtgtatgcttgcacagccgttatgctgctgtgtttgctcgcatcctttgttacgtacatagtacaccagtccgcgatacggatctcacggaaaggccggcatactttgctgaacttctgctttcacgccgctctgacgttcaccgtgttcgccggcgggataaacaggacaaagtaccccatcctatgccaagcagttggaattgtcctccattatagcaccctttctactatgttgtggattggagtaacagcacgcaacatctacaaacaagtgacaaagaaagccccactgtgtctggatactgaccagcctccatatccccgtcagcctctccttaggttttatttggtcagcgggggagtcccctttataatctgtggagtaactgcggcaaccaacattcgcaactacgggactgaagatgaggacaccgcgtgctggatggcttgggagcccagtctcggggccttctatggacctgccgctatcatcacacttgtcacttgtgtctacttcctcggtacctatgttcagctgcgcaggcaccctgggcgtagatacgaactgagaacacagccagaagagcaacgaagactcgcaactcctgaaggcggtagggggatccggccagggacgccgccagcgcacgatgctccgggcgcaagtgtcctccagaatgagcatagttttcaggctcagcttagagctgcggccttcacgctcttcctctttaccgccacctgggctttcggtgcacttgccgtctctcagggtcactttctggatatggtgtttagttgcctgtacggagctttttgtgttacacttggccttttcgtcctgattcaccactgtgccaagagggaagatgtatggcagtgctggtgggcctgctgtccgccccgtaaagatgctcatcctgcactcgatgccaacggcgcagctctaggccgtgcggcgtgtctgcactcccctggacttggccagccaaggggattcgcccatcctcctggtccttgtaaaatgacgaatctacaagccgcgcagggtcatgcgagctgtctaagccccgcaacaccctgttgtgccaagatgcattgcgaacctctaaccgcagacgaagcccacgtccatctgcaggaagaaggggctttcgggcatgatccccacctgcacgggtgtcttcagggccgaaccaagcccccttatttttcacggcaccccgccgaagagcccgaatatgcctatcatatcccatcctccttagacggatcaccacgttcctccaggacagacagcccacctagcagcttggatgggcccgctggcactcatactctcgcttgctgtacgcaaggtgacccgtttcccatggtgacccagcctgaaggcagtgatggctcccccgcattatattcatgccctacccagccaggccgagaggctgcccttgggcctgggcatctggaaatgctgagacggactcagagcctgcctttcggtggtccttctcagaacgggcttcctaaaggaaagctgttggagggtctgccattcgggacggatggcactggaaatattcgcaccgggccatggaagaacgagactaccgtgtag

SEQ ID NO: 272044 - DNA, 2562 bp, Artificial Sequence
  derived and/or modified sequence
atgagaggacacggaaatcattcaagattgaagtcccgatgtgcgagcctgggtaacgtgcatcatcatcaggctcagatggcccacggagctcattgccgcgggggacggacaccgcagagtccggacagccggggccctaccgccggaggccatacccgcggtagatggacgtaccggcccattgaagcattgatcaatgtgtcttttcctggggccaagggaggccgcaccgcagagggagaacccagttgggcatgggtctttcgatcgggttacctgcaaaggcaggccctccccggtctaccagtgtctaccagagtggccgcttgctggtggcaacaccacccagggagggatagtgggttcctgggacccggctttattgatctgctaagggaggaaccttctggaagagcggatggcaaggccgccgcacaaaaaacggggcgcctctatctatttccaacctttttgggcaataagttgcccgaagctgccgattctttcggggaaatcgccagtgggaacagtgtgatttttacctctgtgttacagagcagccatccccccggtactcccccacccagcgcacgtaaacctagcccaggagccgccatgttagtctgcgaggagacgcttgagctgggagcccaggggtgctgggggtccactagtccacggggccaagctgtgtctcttgtcggaggtccaacagcaggggggagccggttgggcggtgccggctgtacaatgggcctccttatggccctgcaggctagaaggccccgggacggaacttgggccgacccgaggcggtgctcaagggccgttgaagggagcgggctgactagggccgctttagtatcacctggaccctctggtgttgaggaggacacacggcgtgaaggatgtgtgctggtgggttcctggaggtcaagcacccatagatctcgcgtgctcatcatcaatactcctagcggacgaaccccctggagtcagggaagcctcggaagtacaggccggtacaaccagacaagggccccggggagtcagcagcagggactctgtagtgacgctgccttgcatgaggattttgtgccagaacccacacctgctttctttcagtacccaccccaggccttctccaagacaaaagtacgggatcttggacggggaggtctctacgccttttccaaagaagagaaggtaagcgaagcacagcgagtcgaagcctacgaaacgcacggactcggactcagcaccggccgacagaacccagtcccaagcccatgtaaacctgggtgcgtctgccagggcttagctctggacgccgaggcctggccacgccacccagggagacgtccctgtgccgccaaggaggcctgccttggaccacccggttgcagcggcgaactctcactgcctgaggaggagggcatcgcaccaggagccgcgaccgctgccccagcctgggtccctcacgggcgcgttagtcggtttctgacggtgaagctcttcacctatgttacgatgtatcagtgtaaacaggagcgtattctgcggctttgcatcagcggcgagtctggcagatacgttagacgttctcgctttcgtaattttgccgctttaatggtcagtaccggggtccctggggtgctgcaattgggagccaggcccctcagagggggtggacacccctatggtgacagtcaggccgggaaggtggttgaatggcgggcgggagacagagcttccggcctgtcagccggcgagagacgattcttgtctcaatccgaactccagacatggcccagaactccacactgcgtcgggaagaaggtcccccagcctgtcggcgccgcagatctagctcctgacacctctctttgccgaaaggagggaagcagcgcctcaaggtcatgcaggccgggacctggacaccttacacgaagagaggaggactcttttcggcaactggcattccccagatttgaagaggtcacgtttcctcccctgactgccgcagagcgcgccccttcagtgcacggcggtcatagcctggctagccagggcctggtcctcgccggtcggactcgtagcgtcgcctcggggggtaagcaggagctgtctgggcctctcgccgcctgcattcctactcaggatcttaaaacagtactgagcttaccccgctatcctggtgagttcctgcaccccgtggtatacgcctgcaccgccgtcatgctcctatgcctgctggctagctttgtcacatatatcgtacatcaaagcgccatccggatcagccggaaaggtcgccacaccttactcaacttttgctttcatgctgctgagcatcccggtgtcaccccactgagaaccagtcctcctctgccttggtggacgccaattcaggtgggaatcgtacttcattactccacactgagcacgatgctctggatcggcgtcactgcaaggaacatctataaacaagttaccaagaaggcccctttgtgtttggacaccgaccagcctccttatcccaggcagcccctgctatag

SEQ ID NO: 272045 - DNA, 3840 bp, Artificial Sequence
  derived and/or modified sequence
atgaggggccacggcaaccacagccggctgaagagccgctgtgccagcctgggcaatgtgcaccaccaccaggcccagatggcccatggagcccactgccggggcggccgcaccccccagagcccagacagccggggccccacagctgggggccacacccggggccgctggacctaccggcccatcgaggccctgatcaacgtgtccttccctggggccaagggcggccgcacagctgagggggagcccagctgggcctgggtgttccgcagcggctacctgcagaggcaggccctgcccggcctgcctgtgtccaccagggtggccgcctgctggtggcagcaccaccctggccgggacagcggcttcctgggccctggcttcatcgacctgctgcgggaggagcccagcggccgggcagatggcaaggctgctgcccagaagacaggccgcctgtacctgttccccaccttcctgggcaacaagctgcctgaggccgctgacagctttggagaaattgccagcggcaacagcgtcatcttcacctctgtgctgcagagcagccaccccccaggcaccccacctccttctgccaggaagcccagccctggagctgccatgctggtgtgtgaggagaccctggagctgggcgcccagggctgctggggcagcaccagcccccggggccaggccgtgtccctggtgggcggccccacagctgggggcagccggctgggcggggccggctgcaccatgggcctgctgatggccctgcaggcccggcggcccagagatggcacctgggccgacccccggcgctgcagcagagctgtggagggcagcggcctgacccgggccgccctggtgtccccaggccccagcggcgtggaggaggacacccggcgggagggctgtgtgctggtgggctcctggaggagcagcacccacaggagccgggtgctgatcatcaacaccccatctggccgcaccccctggagccagggcagcctgggcagcacaggccgctacaaccagacccgggcccctggcagccagcagcagggcctgtgcagtgatgctgccctgcacgaggactttgtgcctgagcccaccccagccttcttccagtacccaccccaggccttcagcaagaccaaggtgcgggacctgggccggggcggcctgtatgccttcagcaaggaggagaaggtgtctgaggcccagagggtggaggcctatgagacccacggcctgggcctgagcacaggccggcagaaccctgtgcccagcccctgcaagccaggctgtgtgtgccagggcctggccctggatgctgaggcctggcccaggcaccctggccggcggccctgtgccgccaaggaggcctgcctgggccccccaggctgcagcggggagctgagcctgcctgaggaggagggcatcgcccctggagctgccacagctgccccagcctgggtgccccacggccgggtgagccgcttcctgactgtgaagctgttcacctacgtgaccatgtaccagtgcaagcaggagcgcatcctgcggctgtgcatcagcggggagagcggccgctacgtgcggcgcagccgcttcaggaactttgctgccctgatggtgtccactggagtgcctggggtgctgcagctgggcgcccggcccctgcggggcggcggccacccctacggggacagccaggccggcaaggtggtggagtggagggctggggaccgggccagcggcctgtctgctggggagcggcgcttcctgagccagagcgagctgcagacctggcccaggaccccccactgtgtgggcaagaaggtgccccagcctgtgggcgctgctgacctggccccagacaccagcctgtgcaggaaggagggcagcagcgccagccgcagctgccggcccggccctggccacctgacccggcgggaggaggacagcttccggcagctggccttccccaggtttgaggaggtgaccttcccccccctgacagctgctgagcgggcccccagcgtgcatggaggccacagcctggccagccagggcctggtgctggccggccgcaccaggtctgtggccagcggcggcaagcaggagctgagcggccccctggccgcctgcatccccacccaggacctgaagacagtgctgagcctgccccgctacccaggagagttcctgcaccctgtggtgtatgcctgcacagctgtgatgctgctgtgcctgctggccagctttgtgacctacatcgtgcaccagagcgccatccgcatcagcaggaagggccgccacaccctgctgaacttctgcttccacgccgccctgaccttcaccgtgtttgctgggggcatcaacagaaccaagtaccccatcctgtgccaggccgtgggcatcgtgctgcactacagcaccctgagcaccatgctgtggattggagtgacagccaggaacatctacaagcaggtgaccaagaaggcccccctgtgcctggacacagaccagcccccctacccccggcagcccctgctgcgcttctacctggtgtctggaggagtgcccttcatcatctgtggggtgacagctgccaccaacatccggaactacggcacagaagatgaggacacagcctgctggatggcctgggagcccagcctgggcgccttctacggccctgctgccatcatcaccctggtgacctgtgtgtacttcctgggcacctacgtgcagctgcggcggcaccctggccgccgctatgagctgcggacccagcctgaggagcagaggcggctggccaccccagagggcggccggggcatccggcccggcaccccaccagcccatgatgcccctggggcctctgtgctgcagaatgagcacagcttccaggcccagctgcgggccgccgccttcaccctcttcctgttcaccgccacctgggcctttggagccctggccgtgtcccagggccacttcctggacatggtgttcagctgcctgtatggagccttctgtgtgaccctgggcctgtttgtgctgatccaccactgtgccaagcgggaggatgtgtggcagtgctggtgggcctgctgcccccccaggaaggatgcccacccagccctggatgccaatggagctgccctgggccgggccgcctgcctgcacagccctggcctgggccagccccggggctttgcccaccccccaggcccctgcaagatgaccaacctgcaggccgcccagggccacgccagctgcctgagccctgccaccccctgctgtgccaagatgcactgtgagcccctgacagcagatgaggcccacgtgcacctgcaggaggagggcgccttcggccatgacccccacctgcacggctgcctgcagggccgcaccaagccaccctacttcagccgccaccctgctgaggagccagaatatgcctaccacatccccagcagcctggatggcagccccaggagcagcaggacagacagcccccccagcagcctggatggccctgctggcacccacaccctggcctgctgcacccagggcgaccccttccccatggtgacccagcctgagggcagtgatggcagccctgccctgtacagctgccccacccagcccggccgggaggccgccctgggccctggccacctggagatgctgcggaggacccagagcctgccctttggaggccccagccagaatggcctgcccaagggcaagctgctggagggcctgcccttcggcacagatggcactggaaacatcagaacaggcccctggaagaatgagaccaccgtgtag

SEQ ID NO: 272046 - DNA, 2562 bp, Artificial Sequence
  derived and/or modified sequence
atgaggggccacggcaaccacagccggctgaagagccgctgtgccagcctgggcaatgtgcaccaccaccaggcccagatggcccatggagcccactgccggggcggccgcaccccccagagcccagacagccggggccccacagctgggggccacacccggggccgctggacctaccggcccatcgaggccctgatcaacgtgtccttccctggggccaagggcggccgcacagctgagggggagcccagctgggcctgggtgttccgcagcggctacctgcagaggcaggccctgcccggcctgcctgtgtccaccagggtggccgcctgctggtggcagcaccaccctggccgggacagcggcttcctgggccctggcttcatcgacctgctgcgggaggagcccagcggccgggcagatggcaaggctgctgcccagaagacaggccgcctgtacctgttccccaccttcctgggcaacaagctgcctgaggccgctgacagctttggagaaattgccagcggcaacagcgtcatcttcacctctgtgctgcagagcagccaccccccaggcaccccacctccttctgccaggaagcccagccctggagctgccatgctggtgtgtgaggagaccctggagctgggcgcccagggctgctggggcagcaccagcccccggggccaggccgtgtccctggtgggcggccccacagctgggggcagccggctgggcggggccggctgcaccatgggcctgctgatggccctgcaggcccggcggcccagagatggcacctgggccgacccccggcgctgcagcagagctgtggagggcagcggcctgacccgggccgccctggtgtccccaggccccagcggcgtggaggaggacacccggcgggagggctgtgtgctggtgggctcctggaggagcagcacccacaggagccgggtgctgatcatcaacaccccatctggccgcaccccctggagccagggcagcctgggcagcacaggccgctacaaccagacccgggcccctggcagccagcagcagggcctgtgcagtgatgctgccctgcacgaggactttgtgcctgagcccaccccagccttcttccagtacccaccccaggccttcagcaagaccaaggtgcgggacctgggccggggcggcctgtatgccttcagcaaggaggagaaggtgtctgaggcccagagggtggaggcctatgagacccacggcctgggcctgagcacaggccggcagaaccctgtgcccagcccctgcaagccaggctgtgtgtgccagggcctggccctggatgctgaggcctggcccaggcaccctggccggcggccctgtgccgccaaggaggcctgcctgggccccccaggctgcagcggggagctgagcctgcctgaggaggagggcatcgcccctggagctgccacagctgccccagcctgggtgccccacggccgggtgagccgcttcctgactgtgaagctgttcacctacgtgaccatgtaccagtgcaagcaggagcgcatcctgcggctgtgcatcagcggggagagcggccgctacgtgcggcgcagccgcttcaggaactttgctgccctgatggtgtccactggagtgcctggggtgctgcagctgggcgcccggcccctgcggggcggcggccacccctacggggacagccaggccggcaaggtggtggagtggagggctggggaccgggccagcggcctgtctgctggggagcggcgcttcctgagccagagcgagctgcagacctggcccaggaccccccactgtgtgggcaagaaggtgccccagcctgtgggcgctgctgacctggccccagacaccagcctgtgcaggaaggagggcagcagcgccagccgcagctgccggcccggccctggccacctgacccggcgggaggaggacagcttccggcagctggccttccccaggtttgaggaggtgaccttcccccccctgacagctgctgagcgggcccccagcgtgcatggaggccacagcctggccagccagggcctggtgctggccggccgcaccaggtctgtggccagcggcggcaagcaggagctgagcggccccctggccgcctgcatccccacccaggacctgaagacagtgctgagcctgccccgctacccaggagagttcctgcaccctgtggtgtatgcctgcacagctgtgatgctgctgtgcctgctggccagctttgtgacctacatcgtgcaccagagcgccatccgcatcagcaggaagggccgccacaccctgctgaacttctgcttccacgccgctgagcaccctggggtgacccccctgcggaccagcccccccctgccctggtggacccccatccaggtgggcatcgtgctgcactacagcaccctgagcaccatgctgtggattggagtgacagccaggaacatctacaagcaggtgaccaagaaggcccccctgtgcctggacacagaccagcccccctacccccggcagcccctgctgtag

SEQ ID NO: 272047 - DNA, 3840 bp, Artificial Sequence
  derived and/or modified sequence
atgcggggccacggcaaccacagccggctgaagagccggtgcgcctctttgggcaacgtgcaccaccatcaggcccagatggcccatggcgcgcactgtcgcggtgggcgcactccccagtcacccgactctcgggggcctacagctgggggacacaccagaggccgatggacttatagacctatcgaagccttaattaatgtgagtttccctggagctaagggtggtcggacggccgagggcgagccatcttgggcatgggtcttcagaagcggatatttgcagaggcaggcgctgccgggcctacctgtcagtactagagtggctgcatgttggtggcaacatcaccccgggagagacagtggctttctcggcccaggtttcatcgacttgctcagagaggagccttcaggccgtgccgacggcaaagcagcagcccaaaagacaggcagactttacctttttccaactttcctcgggaacaaactcccagaggccgccgattcttttggcgagatcgcgtcgggcaactcagtgattttcacttctgtattgcagtcaagccatcctcccgggactcctccgccttccgcaaggaagccctcgccgggcgcggcaatgctggtgtgcgaggagaccctcgaactcggggcccagggctgttggggcagcacttctccccgcggtcaggcggtgagcctggtggggggtccaacagcaggcggcagtagattagggggggctgggtgtaccatgggccttctaatggcattgcaggcaaggaggcctagagatgggacctgggctgacccacgcagatgcagcagagccgttgagggatccggtctgacacgggcagcgctggtgagccccggcccctctggtgttgaggaagatacgaggcgagaagggtgtgttttagtcggatcatggaggtcatctacgcataggtctcgggtgctcataattaacaccccatctggtcgaactccctggagtcaaggtagcctcggctctacgggccgctacaatcagacaagagctccgggttcacagcaacaggggctgtgcagcgacgcagctcttcacgaagactttgtcccggagcctacaccggccttcttccagtacccaccgcaggccttttccaagaccaaagttcgcgatctgggacgcggcgggctgtacgcattctcgaaggaggaaaaggtatccgaggcccagcgcgtagaggcatacgaaactcatggtttaggactttcaaccgggaggcagaatcccgtgccatccccttgtaaaccggggtgcgtctgccagggactggcgctggacgctgaggcctggcccaggcatcccgggcgtcgtccctgtgccgctaaggaggcttgtttggggccacctggttgctctggcgagctgtcgctgcccgaggaagaaggcattgcacctggggctgcaactgccgcacctgcctgggttcctcacggacgagtatcgcgcttcctgaccgtcaaactgtttacgtatgtgactatgtatcagtgcaagcaggagcgaatcctgagactttgcatctctggagagagtgggcgctatgtccgccgttcccgattccgcaatttcgccgccctgatggtgagtaccggggtccctggcgtattacagcttggggcacgacccctgaggggaggcgggcacccctacggcgattctcaggcaggcaaagtggtggagtggcgggctggagaccgggcatccgggctgtccgccggagaacgtcgatttctcagtcaatccgagctccagacatggcctcggactccccactgcgtcggcaaaaaggtgcctcaaccggttggtgcagccgatcttgcacctgacactagtctctgccggaaagagggaagctccgcttctcgaagctgtcggcctggcccgggacacctgactcgccgcgaggaggattcatttcgccagctggccttcccgaggttcgaagaggtgactttccctccacttactgcagcagagagggcaccgagcgtccatggaggacactctctggctagccaaggactggtgttagcagggaggaccaggtctgtcgctagcggcggaaagcaagaactctcgggacccctggccgcttgcatcccgacacaggatcttaagaccgtgctgtctctacctcgctatcccggggaatttctacacccagtggtgtacgcctgtaccgctgtcatgttgctgtgcctcctggcttcttttgtcacgtacattgtgcatcagagcgcaatacggatcagccggaagggccgtcacacgctgctaaacttctgttttcacgcagccctgacctttacagtgttcgccggcggaataaacagaactaagtaccccatactctgccaagcggtgggtattgtgcttcattacagcacactgagcaccatgttgtggattggcgttactgccaggaatatatacaagcaagtgacaaagaaggcccctttgtgcttagataccgatcagcccccctatccaagacagcctctgttgcgtttctatctggtttccggtggtgtgccattcatcatctgtggagtcactgcggctacaaatattcgaaactatggtactgaggacgaagacacagcctgctggatggcgtgggaaccctctcttggagccttctacggccctgctgccatcatcaccctcgtcacctgtgtatacttccttggcacgtatgttcagcttcggcgccatccaggccgccggtacgaactgcggacccagcctgaagaacagcgtcggctggctactccggagggcggacgaggaatcagaccgggtacgcctccagcccacgatgccccgggagcatcagtccttcaaaacgaacacagcttccaagcccaactgcgcgctgcagccttcaccctattcctatttacagccacctgggcatttggcgccttggccgttagccaaggccactttcttgatatggtatttagctgtctttatggggcgttctgcgttacactgggtttgttcgtgcttattcatcattgcgcaaaacgtgaggatgtgtggcagtgttggtgggcatgctgtccgccccgcaaggatgctcatcctgcactcgacgccaatggagccgccctcggtcgagctgcttgtcttcactcacctggcctggggcagccaagaggtttcgcccacccaccaggcccatgtaaaatgacaaacctgcaggcggctcaggggcacgcctcctgtttgagtccagccacaccctgttgcgcaaagatgcactgcgaacctctcacagctgacgaagctcacgtccacctgcaggaggagggggcattcggccacgacccccatctccacgggtgccttcagggtcgcactaagccgccatacttcagccgacatccagccgaagaaccggagtacgcttatcatatcccctcttccctggatggttcacccagaagcagtcgcacagacagtcctccatcaagtctggacggcccagcagggactcacactctggcatgttgcacacagggagacccattcccgatggttacccaacctgaggggtcggatggatccccagctttgtacagctgccccacccagcctggccgcgaagctgcactgggacctggccacctggaaatgcttcgcaggacccagtccctgccctttggtggccctagccagaacgggctgccaaagggcaaactgctagaggggctcccattcgggactgacggcactggcaatattaggaccggcccttggaagaatgagactacagtatag

SEQ ID NO: 272048 - DNA, 2562 bp, Artificial Sequence
  derived and/or modified sequence
atgcggggccacggcaaccacagccggctgaagagccggtgcgccagtctggggaatgtacatcaccatcaggcgcagatggcccatggcgcgcactgcagagggggaagaaccccccaatcccccgatagccggggccctactgctgggggacacaccaggggcaggtggacatatcgccccatcgaggcactgataaatgtcagtttccccggggcaaaaggcggtcggacagcagagggggaaccgtcctgggcttgggtgttccggtcaggctacttgcagaggcaggcgcttcctgggctgcccgtctctactcgagtggccgcctgttggtggcagcatcaccccggtagggattcagggttccttggccctggctttatagatctgctgcgagaagaacccagtggaagggcagatgggaaggccgccgcccagaagaccgggcggttgtacctctttcctacatttttaggtaataaattacccgaagcagctgattcattcggcgaaatcgcttcaggtaactcagtcattttcacctccgtgctgcaaagctcacacccaccagggactccccccccatctgccaggaaaccttccccgggcgcagcaatgttggtctgtgaggaaaccctcgagctcggtgcacagggatgctgggggtctaccagtccaaggggccaagcggtttcattggtcggcggacccaccgctggtggttcacgactgggtggcgccgggtgtacaatgggcctgctcatggctctccaggcacgccgtccccgcgacggtacctgggccgatccgcgtagatgttctcgggccgtcgagggctcgggtcttacgagagccgccctggtgagccccggtcctagtggggtggaagaggacacaaggcgcgagggctgcgtccttgtggggagttggcgctcaagcacacacagatccagagtgctaattatcaatacgccgtccgggaggaccccatggtctcaaggaagcttaggaagcactggaagatacaatcagacaagggccccaggcagtcaacaacaggggttgtgcagtgatgctgccctacacgaggacttcgttcccgagcctacaccagctttcttccaatatcccccgcaagcattcagtaaaactaaggtaagagaccttggcaggggggggctgtacgccttctccaaagaggagaaagtgtctgaggctcagcgtgtcgaggcctatgagacgcatggcctgggactgtctaccggccggcagaaccccgtcccatcaccttgcaaacctggctgtgtgtgtcagggcctggcgcttgatgcagaagcgtggccaagacacccagggaggagaccgtgcgccgctaaggaggcatgcctaggtcctcctggatgcagtggggagctatcattaccagaagaagagggcatagcccctggagccgccaccgctgctcccgcatgggtgccgcacggccgagtctccagattccttaccgtgaagctgttcacctatgtcaccatgtatcagtgcaaacaggaaaggatcctgcggctgtgtattagtggcgagtccggtcgctatgttcgcaggagtaggtttagaaattttgctgccctaatggtgtccactggcgtgccaggagtgttacagctgggagcgcgccccctgaggggcggcgggcacccttacggcgattcccaggctggaaaagtcgtggagtggagggcgggcgatcgcgcctcgggtctttccgccggagaaaggagattcctatctcaaagcgaattacagacttggcccagaaccccccattgtgtgggcaaaaaagttccacaaccagtgggtgctgctgatctcgcacctgatacgtcactgtgtcgcaaggaggggagcagtgcatctcgctcatgtcgccctggacctggccatttaacccgccgcgaagaagactctttccggcagttggctttcccccgatttgaggaagtcactttcccaccactcaccgccgcagaacgcgctccatctgttcacggtggccactcactggcttcgcaaggcctggtgttggccggtcggactaggagcgtagcctctggcggaaagcaagaactgagcggacccctggcagcctgcattcccacacaagacctgaagaccgtgctttcactgccccggtaccccggagagtttctgcacccggtagtttacgcctgtacagctgttatgttgctttgcctgctcgcgtcattcgttacatatatagttcaccaatccgccattcgaatctccaggaaaggcaggcatacactgctcaatttctgttttcacgcagcggaacaccccggcgtgacccctcttcgtacgtcacctcctctgccttggtggaccccaattcaggtcggcattgtactgcactactctactttatccaccatgctgtggatcggcgtcactgcgcgtaatatatacaaacaggtgacaaagaaagctccactgtgcctagacaccgaccagcccccctatcctcgccagccactcttatag

SEQ ID NO: 272049 - DNA, 3840 bp, Artificial Sequence
  derived and/or modified sequence
atgagaggccatggaaatcactcccgcctcaaaagccggtgtgcctcactgggcaacgtacaccaccatcaggcacaaatggcccacggtgcccattgtcggggaggaagaacccctcagtcgcccgattccaggggtcccacagctggcggtcacaccagaggaagatggacatacagacccatagaggctctgatcaacgtcagcttccctggcgcaaaaggcggacggactgccgagggggaaccatcttgggcttgggtgttccggtctggctatctccagcgacaggcgctgcctggcctgccggttagcacccgtgtggccgcatgctggtggcagcaccatccaggacgcgatagcggtttccttggacccggatttattgatctgcttcgcgaagaaccctctggtcgtgcagacggcaaggccgcagcccagaagaccggtaggctgtacttgtttccaacctttttgggtaataagctaccagaggccgcagacagcttcggggagatcgccagtgggaacagtgtgatatttactagcgtactccaatcctcccacccacctggaaccccaccccctagcgcgaggaagccttcacctggcgctgctatgctcgtgtgtgaggagaccctggagctcggggcacaaggctgttgggggtcaacctcccccagggggcaggcagtgtctttggtcggcggtccaacagctggaggcagcagactcggtggggctggatgtacaatgggattgttgatggctctccaggcaaggcggccacgggacggcacctgggctgaccctcgcaggtgtagccgggctgtggagggttctggcttgacccgcgcagctttagtctcccctggcccaagtggagtggaggaggatactagacgggaagggtgcgtactggtcggctcatggcggtcttcaacccaccggtcccgcgtgcttatcattaatacccctagcggacgtacgccttggagccaggggagtctggggagcaccggaaggtacaaccagacgagagctcccggtagccagcagcaggggctgtgctccgacgcagcacttcatgaagactttgtgccagagcctaccccagctttcttccaatacccaccccaggcattcagcaagactaaagtgcgggacctgggcaggggcggattgtacgccttttctaaggaggagaaagtcagtgaggcccagcgcgtcgaagcctacgagacccacggattaggactgtccaccggaagacaaaatcccgtgccctctccgtgtaagccaggttgcgtatgtcagggactagcgcttgacgccgaagcttggcccagacatcctggccgacggccttgcgcagccaaggaagcctgcctcgggcctccaggctgcagcggagagctctctctccccgaggaagaggggatcgcgcctggtgcagctactgctgctccagcatgggtgccgcacggcagagtctctaggttcttgactgtcaagctgttcacctacgtgaccatgtatcaatgtaaacaggaaaggattcttcgactctgcattagtggagagtcagggaggtacgtcaggcgcagcaggtttcgtaactttgccgctttgatggtgagcaccggtgtgccgggagttcttcagctcggcgcaagacctcttcgaggaggcggacacccttacggcgacagtcaagccggaaaagtggtggaatggcgagcaggagacagggctagtggactatcagcaggagagcggaggttcctgtctcagtctgagctgcagacatggcctaggactccccattgcgtcgggaagaaagtgccacagcccgtgggcgctgctgatctcgccccagataccagcttatgtaggaaggagggatctagcgcaagccggagctgcagaccagggcctgggcatctgactaggagggaggaagattcctttcggcagctcgcgttcccaaggttcgaggaggtgacttttccccctctgactgctgctgagcgggctccatccgttcacgggggacacagtcttgcgagccaagggctggtgcttgcgggacggactcgcagcgtggcatccggaggaaaacaagagctttccggcccactagctgcctgcatcccaacacaggatctgaagacagtgctgtcactccctcggtaccccggagaattccttcacccagttgtctatgcttgcactgcggtgatgctgctgtgtctgctggccagctttgtgacctatattgtgcatcagtcagctattagaatctctcgtaaaggcagacatactttgctcaacttctgttttcacgcagcactgacgttcaccgtgttcgccggagggatcaacagaacgaagtatccaatcttgtgccaggcagttggaattgtattacattatagtacattatctaccatgctctggattggcgtaacagccagaaatatatataagcaggtgaccaaaaaagctccgttgtgtcttgacacggatcagcccccatacccccgacagcctctcctgcggttctatctggtttctggaggcgtgccctttattatctgcggcgttaccgcagccaccaatatccgcaattacggtactgaggacgaggacacagcttgctggatggcatgggaaccctctctgggcgctttttacggccctgccgcaatcataacactcgtcacctgcgtatattttttgggaacctatgtgcaactacgcaggcaccccggaagacgctatgagttacgaacccagcctgaggagcaacggagactcgcaacacccgagggagggagaggaatcagacctggcactcccccagctcacgatgcccctggggcatccgtgctgcagaacgaacacagcttccaggcacagctgagggccgcagcattcacgctatttctgttcaccgctacatgggcatttggagccctggctgtcagtcagggtcatttcttagatatggtattttcctgtttgtacggagccttttgcgtcacactggggctgtttgtcctgatccatcactgcgctaaaagagaagatgtctggcaatgctggtgggcttgctgtccaccacggaaggatgcccatccagctctggacgcgaatggagccgctctgggaagagcagcgtgtctacacagtccgggactaggacagccacggggttttgcccaccctccgggaccctgtaaaatgactaatttgcaggcagcacagggccatgcctcttgcctgagtccagccacaccatgttgcgccaaaatgcattgtgaacccctcacagcagatgaggcccatgtacacctgcaagaagaaggggctttcggccacgacccacacttgcatggctgcctgcagggaaggaccaagcctccctatttctcgcgccacccggctgaggaacccgaatacgcctaccacatacccagctcactcgacggctctccgaggtcgagccgaactgattcacctccctccagtctggacgggcctgctgggacccatacgctcgcctgttgcacccaaggggatccttttcctatggtcacccagcccgagggctccgatggctccccggcactctactcctgcccgacgcagccaggaagggaggccgcactggggccagggcacctggaaatgctgagacggacacagtccctgccgtttggaggcccatctcagaacggactacctaaaggaaagttgcttgagggactcccattcgggacggatggcaccgggaacatccgcaccggaccatggaaaaatgaaaccaccgtgtag

SEQ ID NO: 272050 - DNA, 2562 bp, Artificial Sequence
  derived and/or modified sequence
atgcgcggtcatggcaaccacagcagactgaaaagcaggtgcgcctctttggggaacgtgcatcaccaccaagcgcaaatggcgcacggggctcactgtaggggcggaagaaccccgcagagccctgactcccgcggtcccactgccggaggccacacacggggtcgttggacatacagacccatagaggctctgataaatgtgtccttccccggtgcaaagggaggcagaactgctgagggagagccctcctgggcgtgggtctttcgaagcgggtatctgcagcggcaggcgctgcctggtctgcccgtgtcaacacgcgtggcagcatgctggtggcaacatcaccccggacgcgacagtggcttcctcggccctggcttcatcgacttactgcgcgaggagccctcaggaagggcagatggtaaagcagcggctcagaagacaggacgcctgtacctgtttcccacattcctcggtaataaattacctgaggccgctgactcttttggggaaatcgccagcggtaactcagttatctttaccagcgtcttgcagagctctcatcctcccggtactcctccaccttccgccaggaagccctcacctggtgccgctatgcttgtgtgtgaggagacactggagctgggtgcacagggctgttggggaagtacaagtcctagggggcaggcagtttctctggtggggggtcccaccgcaggtggatctaggttgggtggggctggctgcacaatgggcctcctaatggcgttgcaggctagaaggcctagagacggtacatgggccgatccccgaagatgcagcagagccgttgaggggagcgggttgacacgcgcagctctggtgagtcctggaccctctggtgtcgaagaggatacgcgcagagagggctgtgtgctcgtgggtagctggagatcgagcacacatagatcacgggtgttaattatcaatactccctctggtcggactccctggtcacagggctctctgggatctacaggcagatacaatcagacgcgcgctcccggatctcagcaacagggactctgtagcgacgcggctctacacgaggatttcgtgcccgaacccactccggctttcttccaataccctccccaagcgttttctaagaccaaagtgagagatctggggagaggaggattgtatgcctttagcaaagaggaaaaagtgagtgaggcacagcgtgtcgaagcctacgagactcacggccttgggctaagtactggcagacagaaccccgtaccctctccttgcaagcctggctgcgtctgtcaaggtctggccttggacgctgaagcatggccgaggcacccaggacgaagaccctgtgctgccaaggaagcctgcctcggcccaccgggttgctctggagaactcagtctcccagaagaggaaggcatcgcccctggagcagctactgccgctcctgcgtgggttccccacggacgagtgtcccgattcctgacagttaagctctttacttatgtgactatgtaccagtgcaaacaagaacgcatcctcaggctgtgcatctctggagaatcaggcagatacgtgcgcaggtctagattcaggaattttgcagcactcatggtcagcacgggagtgccaggcgttctgcagctgggggcaaggcctctgcgcggagggggtcacccatacggggactcacaagctgggaaagtagtggagtggcgcgcaggagaccgcgcttcggggctgagcgccggagagcgcagattcctctctcagagtgagctgcagacctggcctcgcactccgcactgtgtgggtaagaaggtgcctcaacccgtcggagctgcggacctggctccagacacttctctgtgccggaaggagggatccagcgcctcccgcagctgcaggccgggacctgggcacttgacccgacgagaggaggattcctttaggcagttagccttccccaggtttgaggaagtgacgttccctcccctgacagctgcagaaagggctccaagcgttcatggaggccactcgttggctagccaggggctggtcctagctggcagaactaggagcgtcgccagcgggggaaaacaggagctaagtggcccactcgcagcttgcatcccgacacaggatctgaagaccgtgctcagcctcccacggtaccccggtgagttcctgcaccctgtggtctacgcatgtaccgctgttatgctcctgtgtctccttgcaagctttgtcacctatattgtccaccagtctgccatccggatcagcaggaaaggccgacacactctgctgaacttctgttttcacgcagccgagcaccctggcgttactcctttaagaactagccctcccctgccttggtggacaccaattcaggtcgggattgtgctccattattctactctgtctactatgttatggattggcgttacagctaggaatatttacaaacaggtgactaaaaaggccccactgtgtctggatactgaccagcccccatatcctcggcagccattgttgtag

SEQ ID NO: 272051 - DNA, 3840 bp, Artificial Sequence
  derived and/or modified sequence
atgagaggccacggcaaccacagcagactgaagagcagatgcgccagcctgggcaacgtgcaccaccaccaggcccagatggcccacggcgcccactgcagaggcggcagaaccccccagagccccgacagcagaggccccaccgccggcggccacaccagaggcagatggacctacagacccatcgaggccctgatcaacgtgagcttccccggcgccaagggcggcagaaccgccgagggcgagcccagctgggcctgggtgttcagaagcggctacctgcagagacaggccctgcccggcctgcccgtgagcaccagagtggccgcctgctggtggcagcaccaccccggcagagacagcggcttcctgggccccggcttcatcgacctgctgagagaggagcccagcggcagagccgacggcaaggccgccgcccagaagaccggcagactgtacctgttccccaccttcctgggcaacaagctgcccgaggccgccgacagcttcggcgagatcgccagcggcaacagcgtgatcttcaccagcgtgctgcagagcagccacccccccggcacccccccccccagcgccagaaagcccagccccggcgccgccatgctggtgtgcgaggagaccctggagctgggcgcccagggctgctggggcagcaccagccccagaggccaggccgtgagcctggtgggcggccccaccgccggcggcagcagactgggcggcgccggctgcaccatgggcctgctgatggccctgcaggccagaagacccagagacggcacctgggccgaccccagaagatgcagcagagccgtggagggcagcggcctgaccagagccgccctggtgagccccggccccagcggcgtggaggaggacaccagaagagagggctgcgtgctggtgggcagctggagaagcagcacccacagaagcagagtgctgatcatcaacacccccagcggcagaaccccctggagccagggcagcctgggcagcaccggcagatacaaccagaccagagcccccggcagccagcagcagggcctgtgcagcgacgccgccctgcacgaggacttcgtgcccgagcccacccccgccttcttccagtaccccccccaggccttcagcaagaccaaggtgagagacctgggcagaggcggcctgtacgccttcagcaaggaggagaaggtgagcgaggcccagagagtggaggcctacgagacccacggcctgggcctgagcaccggcagacagaaccccgtgcccagcccctgcaagcccggctgcgtgtgccagggcctggccctggacgccgaggcctggcccagacaccccggcagaagaccctgcgccgccaaggaggcctgcctgggcccccccggctgcagcggcgagctgagcctgcccgaggaggagggcatcgcccccggcgccgccaccgccgcccccgcctgggtgccccacggcagagtgagcagattcctgaccgtgaagctgttcacctacgtgaccatgtaccagtgcaagcaggagagaatcctgagactgtgcatcagcggcgagagcggcagatacgtgagaagaagcagattcagaaacttcgccgccctgatggtgagcaccggcgtgcccggcgtgctgcagctgggcgccagacccctgagaggcggcggccacccctacggcgacagccaggccggcaaggtggtggagtggagagccggcgacagagccagcggcctgagcgccggcgagagaagattcctgagccagagcgagctgcagacctggcccagaaccccccactgcgtgggcaagaaggtgccccagcccgtgggcgccgccgacctggcccccgacaccagcctgtgcagaaaggagggcagcagcgccagcagaagctgcagacccggccccggccacctgaccagaagagaggaggacagcttcagacagctggccttccccagattcgaggaggtgaccttcccccccctgaccgccgccgagagagcccccagcgtgcacggcggccacagcctggccagccagggcctggtgctggccggcagaaccagaagcgtggccagcggcggcaagcaggagctgagcggccccctggccgcctgcatccccacccaggacctgaagaccgtgctgagcctgcccagataccccggcgagttcctgcaccccgtggtgtacgcctgcaccgccgtgatgctgctgtgcctgctggccagcttcgtgacctacatcgtgcaccagagcgccatcagaatcagcagaaagggcagacacaccctgctgaacttctgcttccacgccgccctgaccttcaccgtgttcgccggcggcatcaacagaaccaagtaccccatcctgtgccaggccgtgggcatcgtgctgcactacagcaccctgagcaccatgctgtggatcggcgtgaccgccagaaacatctacaagcaggtgaccaagaaggcccccctgtgcctggacaccgaccagcccccctaccccagacagcccctgctgagattctacctggtgagcggcggcgtgcccttcatcatctgcggcgtgaccgccgccaccaacatcagaaactacggcaccgaggacgaggacaccgcctgctggatggcctgggagcccagcctgggcgccttctacggccccgccgccatcatcaccctggtgacctgcgtgtacttcctgggcacctacgtgcagctgagaagacaccccggcagaagatacgagctgagaacccagcccgaggagcagagaagactggccacccccgagggcggcagaggcatcagacccggcaccccccccgcccacgacgcccccggcgccagcgtgctgcagaacgagcacagcttccaggcccagctgagagccgccgccttcaccctgttcctgttcaccgccacctgggccttcggcgccctggccgtgagccagggccacttcctggacatggtgttcagctgcctgtacggcgccttctgcgtgaccctgggcctgttcgtgctgatccaccactgcgccaagagagaggacgtgtggcagtgctggtgggcctgctgcccccccagaaaggacgcccaccccgccctggacgccaacggcgccgccctgggcagagccgcctgcctgcacagccccggcctgggccagcccagaggcttcgcccacccccccggcccctgcaagatgaccaacctgcaggccgcccagggccacgccagctgcctgagccccgccaccccctgctgcgccaagatgcactgcgagcccctgaccgccgacgaggcccacgtgcacctgcaggaggagggcgccttcggccacgacccccacctgcacggctgcctgcagggcagaaccaagcccccctacttcagcagacaccccgccgaggagcccgagtacgcctaccacatccccagcagcctggacggcagccccagaagcagcagaaccgacagcccccccagcagcctggacggccccgccggcacccacaccctggcctgctgcacccagggcgaccccttccccatggtgacccagcccgagggcagcgacggcagccccgccctgtacagctgccccacccagcccggcagagaggccgccctgggccccggccacctggagatgctgagaagaacccagagcctgcccttcggcggccccagccagaacggcctgcccaagggcaagctgctggagggcctgcccttcggcaccgacggcaccggcaacatcagaaccggcccctggaagaacgagaccaccgtgtag

SEQ ID NO: 272052 - DNA, 2562 bp, Artificial Sequence
  derived and/or modified sequence
atgagaggccacggcaaccacagcagactgaagagcagatgcgccagcctgggcaacgtgcaccaccaccaggcccagatggcccacggcgcccactgcagaggcggcagaaccccccagagccccgacagcagaggccccaccgccggcggccacaccagaggcagatggacctacagacccatcgaggccctgatcaacgtgagcttccccggcgccaagggcggcagaaccgccgagggcgagcccagctgggcctgggtgttcagaagcggctacctgcagagacaggccctgcccggcctgcccgtgagcaccagagtggccgcctgctggtggcagcaccaccccggcagagacagcggcttcctgggccccggcttcatcgacctgctgagagaggagcccagcggcagagccgacggcaaggccgccgcccagaagaccggcagactgtacctgttccccaccttcctgggcaacaagctgcccgaggccgccgacagcttcggcgagatcgccagcggcaacagcgtgatcttcaccagcgtgctgcagagcagccacccccccggcacccccccccccagcgccagaaagcccagccccggcgccgccatgctggtgtgcgaggagaccctggagctgggcgcccagggctgctggggcagcaccagccccagaggccaggccgtgagcctggtgggcggccccaccgccggcggcagcagactgggcggcgccggctgcaccatgggcctgctgatggccctgcaggccagaagacccagagacggcacctgggccgaccccagaagatgcagcagagccgtggagggcagcggcctgaccagagccgccctggtgagccccggccccagcggcgtggaggaggacaccagaagagagggctgcgtgctggtgggcagctggagaagcagcacccacagaagcagagtgctgatcatcaacacccccagcggcagaaccccctggagccagggcagcctgggcagcaccggcagatacaaccagaccagagcccccggcagccagcagcagggcctgtgcagcgacgccgccctgcacgaggacttcgtgcccgagcccacccccgccttcttccagtaccccccccaggccttcagcaagaccaaggtgagagacctgggcagaggcggcctgtacgccttcagcaaggaggagaaggtgagcgaggcccagagagtggaggcctacgagacccacggcctgggcctgagcaccggcagacagaaccccgtgcccagcccctgcaagcccggctgcgtgtgccagggcctggccctggacgccgaggcctggcccagacaccccggcagaagaccctgcgccgccaaggaggcctgcctgggcccccccggctgcagcggcgagctgagcctgcccgaggaggagggcatcgcccccggcgccgccaccgccgcccccgcctgggtgccccacggcagagtgagcagattcctgaccgtgaagctgttcacctacgtgaccatgtaccagtgcaagcaggagagaatcctgagactgtgcatcagcggcgagagcggcagatacgtgagaagaagcagattcagaaacttcgccgccctgatggtgagcaccggcgtgcccggcgtgctgcagctgggcgccagacccctgagaggcggcggccacccctacggcgacagccaggccggcaaggtggtggagtggagagccggcgacagagccagcggcctgagcgccggcgagagaagattcctgagccagagcgagctgcagacctggcccagaaccccccactgcgtgggcaagaaggtgccccagcccgtgggcgccgccgacctggcccccgacaccagcctgtgcagaaaggagggcagcagcgccagcagaagctgcagacccggccccggccacctgaccagaagagaggaggacagcttcagacagctggccttccccagattcgaggaggtgaccttcccccccctgaccgccgccgagagagcccccagcgtgcacggcggccacagcctggccagccagggcctggtgctggccggcagaaccagaagcgtggccagcggcggcaagcaggagctgagcggccccctggccgcctgcatccccacccaggacctgaagaccgtgctgagcctgcccagataccccggcgagttcctgcaccccgtggtgtacgcctgcaccgccgtgatgctgctgtgcctgctggccagcttcgtgacctacatcgtgcaccagagcgccatcagaatcagcagaaagggcagacacaccctgctgaacttctgcttccacgccgccgagcaccccggcgtgacccccctgagaaccagcccccccctgccctggtggacccccatccaggtgggcatcgtgctgcactacagcaccctgagcaccatgctgtggatcggcgtgaccgccagaaacatctacaagcaggtgaccaagaaggcccccctgtgcctggacaccgaccagcccccctaccccagacagcccctgctgtag

SEQ ID NO: 272053 - protein, 68 aa, Artificial Sequence
  derived and/or modified sequence
MSLWLGAPVPDIPPDSAVELWKPGAQDASSQAQGGSSCILREEARMPHSAGGTAGVGLEAAEPTALLT

SEQ ID NO: 272054 - protein, 77 aa, Artificial Sequence
  derived and/or modified sequence
MSLWLGAPVPDIPPDSAVELWKPGAQDASSQAQGGSSCILREEARMPHSAGGTAGVGLEAAEPTALLTRAEPPSEPT

SEQ ID NO: 272055 - DNA, 207 bp, Artificial Sequence
  derived and/or modified sequence
atgagcctgtggctgggcgcccccgtgcccgacatcccccccgacagcgccgtggagctgtggaagcccggcgcccaggacgccagcagccaggcccagggcggcagcagctgcatcctgagagaggaggccagaatgccccacagcgccggcggcaccgccggcgtgggcctggaggccgccgagcccaccgccctgctgacctag

SEQ ID NO: 272056 - DNA, 234 bp, Artificial Sequence
  derived and/or modified sequence
atgagcctgtggctgggcgcccccgtgcccgacatcccccccgacagcgccgtggagctgtggaagcccggcgcccaggacgccagcagccaggcccagggcggcagcagctgcatcctgagagaggaggccagaatgccccacagcgccggcggcaccgccggcgtgggcctggaggccgccgagcccaccgccctgctgaccagagccgagccccccagcgagcccacctag

SEQ ID NO: 272057 - DNA, 207 bp, Artificial Sequence
  derived and/or modified sequence
atgagcttgtggttaggagcaccagtcccagacattccacccgactctgcagtcgagttatggaaacctggggcacaggacgcctctagccaggcccaaggtgggtcctcatgcatcctccgggaagaagccaggatgccccattctgccggtggaaccgctggtgttggccttgaagccgccgagccaacagcccttttgacctag

SEQ ID NO: 272058 - DNA, 234 bp, Artificial Sequence
  derived and/or modified sequence
atgtccctgtggttaggcgcccccgtgcccgatattccccctgatagcgctgtggagttgtggaagccaggggcccaggacgcctctagtcaggctcaggggggatcctcgtgcattctcagggaggaggcccgtatgcctcacagcgcaggcggcactgctggcgtaggtctggaagctgctgagccaaccgctctcttgacacgggcagaacccccttctgaacccacatag

SEQ ID NO: 272059 - DNA, 207 bp, Artificial Sequence
  derived and/or modified sequence
atgagcctgtggctgggcgcccctgtgcctgacatccccccagacagcgctgtggagctgtggaagccaggggcccaggatgccagcagccaggcccagggcggcagcagctgcatcctgcgggaggaggccaggatgccccacagcgctgggggcacagctggggtgggcctggaggccgctgagcccacagccctgctgacctag

SEQ ID NO: 272060 - DNA, 234 bp, Artificial Sequence
  derived and/or modified sequence
atgagcctgtggctgggcgcccctgtgcctgacatccccccagacagcgctgtggagctgtggaagccaggggcccaggatgccagcagccaggcccagggcggcagcagctgcatcctgcgggaggaggccaggatgccccacagcgctgggggcacagctggggtgggcctggaggccgctgagcccacagccctgctgaccagggctgagccccccagcgagcccacctag

SEQ ID NO: 272061 - DNA, 207 bp, Artificial Sequence
  derived and/or modified sequence
atgagcctgtggctgggcgcccccgtgcccgacatcccccccgacagcgccgtggagctctggaaaccaggggctcaagatgcctcctctcaggcgcaggggggtagtagctgtattctgcgcgaggaggcccgaatgcctcacagcgccggtggcacggcaggggtcgggttagaagcggctgaaccaaccgctctgctgacgtag

SEQ ID NO: 272062 - DNA, 234 bp, Artificial Sequence
  derived and/or modified sequence
atgagcctgtggctgggcgcccccgtgcccgacatcccccccgactcagcagttgagttatggaaaccgggggcccaagacgccagctcccaagctcaagggggcagtagttgcatcttaagagaagaagctaggatgcctcacagtgctggcggcacggcgggcgtgggcctggaagctgctgagccaaccgctctcctcacacgcgccgaaccaccaagtgaacccacgtag

SEQ ID NO: 272063 - DNA, 440 bp, Artificial Sequence
  derived and/or modified sequence
tttccccaaattgctacttctctggggctccaggtcctgcttgtgctcagctccagctcactggctggccaccgagacttctggacaggaaactgcaccatcctcttctcccagcaagggggctccagagactgcccacccaggaagtctggtggcctggggatttggtgggtctgctccttagcagtggcctggggctctgttgccttggtaatgaccagggctccaggaagagatgtccttgtggctgggggcccctgtgcctgacattcctcctgactctgcggtggagctgtggaagccaggcgcacaggatgcaagcagccaggcccagggaggcagcagctgcatcctcagagaggaagccaggatgccccactctgctgggggtactgcaggggtggggctggaggctgcagagcccacagccctgctcacca

SEQ ID NO: 272064 - DNA, 552 bp, Artificial Sequence
  derived and/or modified sequence
tttgctccacgaggtgcctatggaggggagggaacacgattctggaggctgctgggattggggtgggggttcctgggaggcagtccttttgcaagagctgctaagagcgctgggtcctgcttgtgctcagctccagctcactggctggccaccgagacttctggacaggaaactgcaccatcctcttctcccagcaagggggctccagagactgcccacccaggaagtctggtggcctggggatttggtgggtctgctccttagcagtggcctggggctctgtgacagtgccttggtaatgaccagggctccaggaagagatgtccttgtggctgggggcccctgtgcctgacattcctcctgactctgcggtggagctgtggaagccaggcgcacaggatgcaagcagccaggcccagggaggcagcagctgcatcctcagagaggaagccaggatgccccactctgctgggggtactgcaggggtggggctggaggctgcagagcccacagccctgctcaccagggcagagcccccttcagaacccacag

SEQ ID NO: 272065 - DNA, 207 bp, Artificial Sequence
  derived and/or modified sequence
atgtccctgtggctaggtgcacctgtccctgatatccctcccgattcagccgtagagctctggaagcctggggctcaagatgcaagcagtcaggcccagggagggtcatcgtgtatccttcgggaggaagcccgaatgccacattccgccggaggtactgcaggcgtgggactcgaagctgccgagccaactgcattacttacttag

SEQ ID NO: 272066 - DNA, 234 bp, Artificial Sequence
  derived and/or modified sequence
atgagtttgtggctgggggcacccgtaccagatatacctccagacagcgcagtggagctgtggaagcccggagctcaggatgcttccagtcaggcgcagggcggaagctcgtgcatcctgcgcgaagaggccagaatgccacatagtgcaggcggtaccgccggtgttggactagaagccgctgaacccacggctctactgaccagagccgagcctcctagcgagccgacctag

SEQ ID NO: 272067 - protein, 277 aa, Artificial Sequence
  derived and/or modified sequence
MILEGGGVMNLNPGNNLLHQPPAWTDSYSTCNVSSGFFGGQWHEIHPQYWTKYQVWEWLQHLLDTNQLDANCIPFQEFDINGEHLCSMSLQEFTRAAGTAGQLLYSNLQHLKWNGQCSSDLFQSTHNVIVKTEQTEPSIMNTWKDENYLYDTNYGSTVAESPDMKKEQDPPAKCHTKKHNPRGTHLWEFIRDILLNPDKNPGLIKWEDRSEGVFRFLKSEAVAQLWGKKKNNSSMTYEKLSRAMRYYYKREILERVDGRRLVYKFGKNARGWRENEN

SEQ ID NO: 272068 - DNA, 2519 bp, Artificial Sequence
  derived and/or modified sequence
atccctataggagctggtgagattgcagcctgctgcctcccctccaacagccacagctattggatttcccacccagaatctttaggtaaatgagatcatgattctggaaggaggtggtgtaatgaatctcaaccccggcaacaacctccttcaccagccgccagcctggacagacagctactccacgtgcaatgtttccagtgggttttttggaggccagtggcatgaaattcatcctcagtactggaccaagtaccaggtgtgggagtggctccagcacctcctggacaccaaccagctggatgccaattgtatccctttccaagagttcgacatcaacggcgagcacctctgcagcatgagtttgcaggagttcacccgggcggcagggacggcggggcagctcctctacagcaacttgcagcatctgaagtggaacggccagtgcagtagtgacctgttccagtccacacacaatgtcattgtcaagactgaacaaactgagccttccatcatgaacacctggaaagacgagaactatttatatgacaccaactatggtagcacagtagcagagtcacctgatatgaaaaaggagcaagacccccctgccaagtgccacaccaaaaagcacaacccgagagggactcacttatgggaattcatccgcgacatcctcttgaacccagacaagaacccaggattaataaaatgggaagaccgatctgagggcgtcttcaggttcttgaaatcagaggcagtggctcagctatggggtaaaaagaagaacaacagcagcatgacctatgaaaagctcagccgagctatgagatattactacaaaagagaaattctggagcgtgtggatggacgaagactggtatataaatttgggaagaatgcccgaggatggagagaaaatgaaaactgaagctgccaatactttggacacaaaccaaaacacacaccaaataatcagaaacaaagaactcctggacgtaaatatttcaaagactacttttctctgatatttatgtaccatgaggggaacaagaaactacttctaacgggaagaagaaacactacggtcgattaaaaaaattattttgttacttcgaagtatgtcctatatggggaaaaaacgtacacagttttctgtgaaatatgatgctgtatgtggttgtgattttttttcacctctattgtgaattctttttcactgcaagagtaacaggatttgtagccttgtgcttcttgctaagagaaagaaaaacaaaatcagagggcattaaatgttttgtatgtgacatgatttagaaaaaggtgatgcatcctcctcacataagcatccatatggcttcgtcaagggaggtgaacattgttgctgagttaaattccagggtctcagatggttaggacaaagtggatggatgccgggaagtttaacctgagccttaggatccaatgagtggagaatggggacttccaaaacccaaggttggctataatctctgcataaccacatgacttggaatgcttaaatcagcaagaagaataatggtggggtctttatactcattcaggaatggtttatctgatgccagggctgtcttcctttctcccctttggatggttggtgaaatactttaattgccctgtctgctcacttctagctatttaagagagaacccagcttggttcttttttgctccaagtgcttaaaaataagttggaaaaaggagacggtggtgtggaaatggctgaagagtttgctcttgtatccctatagtccaaggtttctcaatctgcacaattgacatttttggccggagtgttctttgtggtgagggctttcctgtgcattgtaagatgttcagcagtatccactcatggtctctaaccacttgacaccagaaaccccccagctgtgataacgcaaaatgtctctagacatcaccaaatgttccctgggggtggcaaatttgcccttgattgagaaccaccagtttagctagtcaatatgaggatggtggtttattctcagaagaaaaagatatgtaaggtcttttagctccttagagtgaagcaaaagcaagacttcaacctcaacctatctttatgttttaaatgttagggacaataagttgaaatagctagaggagcttcttttcagaaccccagatgagagccaatgtcagataaagtaagcatagtaatgtagcaggaactacaatagaagacattttcactggaattacaaagcagaattaaaattatattgtagaaggaaacaccaagaaaagaatttccagggaaaatcctctttgcaggtattaattcttataattttttgtcttttggattatctgtttactgtctcatctgaactgatcccaggtgaacggtttattgcctagatttgtactcagaggaattttttttgttttgttttgtcttttaagaaaggaaagaaaggatgaaaaaaataaacagaaaactcagctcaggcacaattgtca

SEQ ID NO: 272069 - DNA, 834 bp, Artificial Sequence
  derived and/or modified sequence
atgatccttgaggggggcggcgttatgaatctgaacccaggaaataatctgcttcatcaacctcctgcttggacagactcctacagcacctgtaatgtgagttctggtttctttggtggacaatggcacgaaattcacccccagtactggacaaagtatcaggtgtgggaatggctccaacacttgcttgatacaaaccagttagatgcaaattgtatcccattccaggagtttgacatcaatggagaacacctgtgctccatgtccctccaagagttcaccagggctgctggcacagcaggccagctgctttattcaaacctgcagcatctaaaatggaacggacagtgctctagtgatctctttcagtccacacataatgtgatagtgaagactgaacagaccgaaccctcaataatgaatacatggaaagatgagaactatctgtacgacaccaattacggctccaccgtggcagagagcccggatatgaaaaaggaacaggatcccccggccaagtgccacacaaaaaaacataatcctaggggaacccatctttgggaattcatccgggatatcctattgaatcccgacaagaacccaggcttaatcaagtgggaggatagatcagaaggagtgttccgctttttaaagagcgaggccgttgcgcagttatggggtaaaaagaagaacaacagttctatgacttatgagaaactgtctcgagccatgcgctactactataagagagaaattctggaaagggtcgacggtaggcggcttgtgtacaaattcgggaaaaatgcacgcgggtggagggaaaatgaaaattag

SEQ ID NO: 272070 - DNA, 834 bp, Artificial Sequence
  derived and/or modified sequence
atgatcctggagggcggcggcgtgatgaacctgaaccctggcaacaacctgctgcaccagcccccagcctggacagacagctacagcacctgcaatgtgagcagcggcttcttcggcggccagtggcatgagatccacccccagtactggaccaagtaccaggtgtgggagtggctgcagcacctgctggacaccaaccagctggatgccaactgcatccccttccaggagtttgacatcaatggagagcacctgtgcagcatgagcctgcaggagttcaccagggctgctggaacagctggccagctgctgtacagcaacctgcagcacctgaagtggaatggccagtgcagcagtgacctcttccagagcacccacaacgtgattgtgaagacagagcagacagagcccagcatcatgaacacctggaaggatgagaactacctgtatgacaccaactacggcagcacagtggccgagagcccagacatgaagaaggagcaggaccccccagccaagtgccacaccaagaagcacaacccccggggcacccacctgtgggagttcatccgggacatcctgctgaacccagacaagaaccctggcctcatcaagtgggaggacagaagtgagggcgtcttccgcttcctgaagtctgaggccgtggcccagctgtggggcaagaagaagaacaacagctccatgacctatgagaagctgagccgggccatgagatactactacaagcgggagatcctggagcgggtggatggaagaaggctggtgtacaagtttgggaagaatgcccggggctggagagaaaatgaaaattag

SEQ ID NO: 272071 - DNA, 834 bp, Artificial Sequence
  derived and/or modified sequence
atgatcctggagggcggcggcgtgatgaacctgaaccccggcaacaatttgttacaccagccacctgcctggactgatagctacagcacctgcaatgttagctccggctttttcggaggacagtggcatgaaattcacccgcagtactggacgaagtaccaggtgtgggagtggctgcagcatctcctagataccaaccagctagatgctaattgtattcccttccaggagttcgacataaatggggaacacttgtgctccatgagtctgcaggagttcaccagagctgcgggtacagccggccagctgttgtattctaatctgcagcaccttaaatggaacggacagtgtagctcagatctgtttcagagcacgcataatgtgatagtgaagaccgagcagaccgagccttctataatgaatacatggaaagatgaaaactacctgtatgataccaactacggtagcaccgtggccgagtctccagacatgaaaaaggaacaggaccccccggcaaaatgtcataccaaaaagcacaaccctcgcgggacccacctgtgggaatttataagggacattctattgaatccggataagaatcctggactgattaagtgggaagaccggtcggagggcgtgtttaggttcctgaagtcagaggctgtggctcagctttgggggaagaaaaagaacaattcaagcatgacgtacgaaaagctctctcgcgcaatgagatactactataaaagagagatactagagcgggtggatgggcggcgcctggtatacaaattcggcaaaaacgccaggggctggcgcgagaacgagaactag

SEQ ID NO: 272072 - DNA, 834 bp, Artificial Sequence
  derived and/or modified sequence
atgattctcgaaggaggcggagttatgaatctgaatcctggaaataatcttctgcaccagccacctgcctggacggactcttactcaacctgtaacgtgtcctcaggtttctttggagggcagtggcatgagattcacccacagtactggactaaatatcaagtgtgggagtggcttcaacacttgctcgacactaaccagctcgacgccaactgcatccctttccaggagtttgacattaacggcgaacacctgtgttctatgtcattgcaggagttcactagagccgcaggaacagctggacagctgctttattccaatttacagcacttgaagtggaacgggcagtgttcgagtgacttgttccagtccacacataacgtgattgtgaagaccgaacagactgaaccatccatcatgaacacctggaaggacgagaactacctttatgacacaaattacgggtctactgtggccgaaagcccggacatgaagaaggagcaggacccgcctgccaaatgtcacactaaaaaacacaacccacgcggtacccacctgtgggagttcatccgggatattctgctcaacccagataagaatcctggactcataaagtgggaagaccgatccgagggggtgtttcgcttcctcaagagcgaagcagtggctcagttgtgggggaagaagaaaaataactcgagtatgacatatgaaaagctgagccgggctatgaggtattactataagagggagattttggagcgtgtcgacggccgacggttagtgtataaattcggtaagaatgctaggggctggagggagaatgaaaactag

SEQ ID NO: 272073 - DNA, 834 bp, Artificial Sequence
  derived and/or modified sequence
atgatcctggagggcggcggcgtgatgaacctgaaccccggcaacaacctgctgcaccagccccccgcctggaccgacagctacagcacctgcaacgtgagcagcggcttcttcggcggccagtggcacgagatccacccccagtactggaccaagtaccaggtgtgggagtggctgcagcacctgctggacaccaaccagctggacgccaactgcatccccttccaggagttcgacatcaacggcgagcacctgtgcagcatgagcctgcaggagttcaccagagccgccggcaccgccggccagctgctgtacagcaacctgcagcacctgaagtggaacggccagtgcagcagcgacctgttccagagcacccacaacgtgatcgtgaagaccgagcagaccgagcccagcatcatgaacacctggaaggacgagaactacctgtacgacaccaactacggcagcaccgtggccgagagccccgacatgaagaaggagcaggacccccccgccaagtgccacaccaagaagcacaaccccagaggcacccacctgtgggagttcatcagagacatcctgctgaaccccgacaagaaccccggcctgatcaagtgggaggacagaagcgagggcgtgttcagattcctgaagagcgaggccgtggcccagctgtggggcaagaagaagaacaacagcagcatgacctacgagaagctgagcagagccatgagatactactacaagagagagatcctggagagagtggacggcagaagactggtgtacaagttcggcaagaacgccagaggctggagagagaacgagaactag

SEQ ID NO: 272074 - protein, 462 aa, Artificial Sequence
  derived and/or modified sequence
MARVLGAPVALGLWSLCWSLAIATPLPPTSAHGNVAEGETKPDPDVTERCSDGWSFDATTLDDNGTMLFFKGEFVWKSHKWDRELISERWKNFPSPVDAAFRQGHNSVFLIKGDKVWVYPPEKKEKGYPKLLQDEFPGIPSPLDAAVECHRGECQAEGVLFFQGDREWFWDLATGTMKERSWPAVGNCSSALRWLGRYYCFQGNQFLRFDPVRGEVPPRYPRDVRDYFMPCPGRGHGHRNGTGHGNSTHHGPEYMRCSPHLVLSALTSDNHGATYAFSGTHYWRLDTSRDGWHSWPIAHQWPQGPSAVDAAFSWEEKLYLVQGTQVYVFLTKGGYTLVSGYPKRLEKEVGTPHGIILDSVDAAFICPGSSRLHIMAGRRLWWLDLKSGAQATWTELPWPHEKVDGALCMEKSLGPNSCSANGPGLYLIHGPNLYCYSDVEKLNAAKALPQPQNVTSLLGCTH

SEQ ID NO: 272075 - protein, 254 aa, Artificial Sequence [sequence omitted]

SEQ ID NO: 272076 - DNA, 1389 bp, Artificial Sequence
  derived and/or modified sequence
atggccagggttctgggggcccccgtcgcactggggttgtggtccctgtgctggtcgttagcaatagctacccctttgccgcctacgtctgctcacggcaatgtagctgagggagagaccaaacccgatcctgatgtcactgagaggtgttcggacggctggagctttgatgctacgaccctcgatgataatggtaccatgctcttcttcaagggagaatttgtatggaagtcccacaagtgggatcgggagctcatctctgaaaggtggaaaaatttcccctcccccgtagatgccgccttccgtcagggacataactcggtctttctcattaagggcgataaagtatgggtgtatccacctgagaagaaagaaaaaggatacccaaagctgttgcaggacgagttcccagggatcccgtcccccctggacgccgctgtcgagtgccatcgtggggagtgccaggctgaaggggtgctgttcttccagggggaccgggagtggttctgggacttggccacaggcacgatgaaggagcggtcctggccagctgtcgggaattgctcatctgcattgagatggctcgggcgttattactgttttcagggaaaccagtttttgcgctttgaccctgttcgaggggaggtgcctcctagatatccccgtgacgtccgtgactattttatgccctgcccagggaggggtcatggacacagaaatggcactggtcatggcaacagcacccaccacgggccggagtacatgaggtgttcccctcatctggttctgtcagctctcacttcagacaaccatggcgctacatatgcttttagcggcacgcactattggagactcgacacttctagggatggctggcattcatggcctatagctcatcagtggcctcaaggcccatccgctgttgatgcagcgttcagctgggaagagaagctctatctggtccagggcacacaggtttacgtctttctcaccaagggcgggtacaccctcgtgagcggatacccgaagcgtctcgaaaaggaggtgggaactcctcacgggatcattctcgacagtgtcgatgccgcgttcatctgccccggaagttcgagactgcacatcatggcggggagacgattgtggtggctggacctgaaaagtggagcgcaagcaacctggacagagctgccttggcctcatgaaaaggtcgacggcgccctctgtatggaaaaatccctcggcccaaacagctgtagtgcaaatggtccgggactctatcttattcatgggcctaatctatactgctacagtgacgttgaaaagctgaacgcggccaaagcactgccacagccgcagaatgtgacctcactgcttggctgcactcactag

SEQ ID NO: 272077 - DNA, 765 bp, Artificial Sequence
  derived and/or modified sequence
atggcacgcgtgctgggcgctcccgtggcactgggtctgtggagtctctgctggtctctggcaatagcaacccctctgccccccacttccgcacatggcaatgttgccgagggcgaaacaaagcctgaccctgatgtgactgagagatgctcggatggctggtcttttgacgctacgacactggatgacaatgggacaatgctctttttcaaaggtgagttcgtctggaaatcccacaagtgggaccgagagttgatatctgaaagatggaaaaacttcccttccccagtggatgctgcttttcgacagggccataatagcgtttttctgatcaagggcgacaaggtatgggtgtaccctcctgaaaaaaaagagaaaggctatcctaagttgttacaggatgaatttccaggcatcccatcacctctcgacgccgcagtagaatgtcatcgcggggaatgccaggcagaaggagtgctttttttccaaggcgaccgggagtggttttgggacttggccaccggcacgatgaaggaacgctcatggcctgctgtgggcaattgctctagcgcactgcgctggctgggtcgatactactgctttcagggaaaccagtttttacgctttgaccccgtgagaggtgaggtgccgccaagatatccacgcgatgttcgagattacttcatgccttgccccggccgcgggcatggtcaccgcaacgggacaggccatgggaacagcatttgcgccgtcgcacacatatag

SEQ ID NO: 272078 - DNA, 1652 bp, Artificial Sequence
  derived and/or modified sequence
cattcccagtagagttggaggtgggggtggtgctgctgccaactctatatagggagttcaactggtcacccagagctgtcctgtggcctctgcagctcagcatggctagggtactgggagcacccgttgcactggggttgtggagcctatgctggtctctggccattgccacccctcttcctccgactagtgcccatgggaatgttgctgaaggcgagaccaagccagacccagacgtgactgaacgctgctcagatggctggagctttgatgctaccaccctggatgacaatggaaccatgctgttttttaaaggggagtttgtgtggaagagtcacaaatgggaccgggagttaatctcagagagatggaagaatttccccagccctgtggatgctgcattccgtcaaggtcacaacagtgtctttctgatcaagggggacaaagtctgggtataccctcctgaaaagaaggagaaaggatacccaaagttgctccaagatgaatttcctggaatcccatccccactggatgcagctgtggaatgtcaccgtggagaatgtcaagctgaaggcgtcctcttcttccaaggtgaccgcgagtggttctgggacttggctacgggaaccatgaaggagcgttcctggccagctgttgggaactgctcctctgccctgagatggctgggccgctactactgcttccagggtaaccaattcctgcgcttcgaccctgtcaggggagaggtgcctcccaggtacccgcgggatgtccgagactacttcatgccctgccctggcagaggccatggacacaggaatgggactggccatgggaacagtacccaccatggccctgagtatatgcgctgtagcccacatctagtcttgtctgcactgacgtctgacaaccatggtgccacctatgccttcagtgggacccactactggcgtctggacaccagccgggatggctggcatagctggcccattgctcatcagtggccccagggtccttcagcagtggatgctgccttttcctgggaagaaaaactctatctggtccagggcacccaggtatatgtcttcctgacaaagggaggctataccctagtaagcggttatccgaagcggctggagaaggaagtcgggacccctcatgggattatcctggactctgtggatgcggcctttatctgccctgggtcttctcggctccatatcatggcaggacggcggctgtggtggctggacctgaagtcaggagcccaagccacgtggacagagcttccttggccccatgagaaggtagacggagccttgtgtatggaaaagtcccttggccctaactcatgttccgccaatggtcccggcttgtacctcatccatggtcccaatttgtactgctacagtgatgtggagaaactgaatgcagccaaggcccttccgcaaccccagaatgtgaccagtctcctgggctgcactcactgaggggccttctgacatgagtctggcctggccccacctcctagttcctcataataaagacagattgcttcttcgcttctcactgaggggccttctgacatgagtctggcctggccccacctccccagtttctcataataaagacagattgcttcttcacttgaa

SEQ ID NO: 272079 - DNA, 826 bp, Artificial Sequence
  derived and/or modified sequence
aactctatatagggagttcaactggtcacccagagctgtcctgtggcctctgcagctcagcatggctagggtactgggagcacccgttgcactggggttgtggagcctatgctggtctctggccattgccacccctcttcctccgactagtgcccatgggaatgttgctgaaggcgagaccaagccagacccagacgtgactgaacgctgctcagatggctggagctttgatgctaccaccctggatgacaatggaaccatgctgttttttaaaggggagtttgtgtggaagagtcacaaatgggaccgggagttaatctcagagagatggaagaatttccccagccctgtggatgctgcattccgtcaaggtcacaacagtgtctttctgatcaagggggacaaagtctgggtataccctcctgaaaagaaggagaaaggatacccaaagttgctccaagatgaatttcctggaatcccatccccactggatgcagctgtggaatgtcaccgtggagaatgtcaagctgaaggcgtcctcttcttccaaggtgaccgcgagtggttctgggacttggctacgggaaccatgaaggagcgttcctggccagctgttgggaactgctcctctgccctgagatggctgggccgctactactgcttccagggtaaccaattcctgcgcttcgaccctgtcaggggagaggtgcctcccaggtacccgcgggatgtccgagactacttcatgccctgccctggcagaggccatggacacaggaatgggactggccatgggaacagtatatgcgctgtagcccacatctag

SEQ ID NO: 272080 - DNA, 1389 bp, Artificial Sequence
  derived and/or modified sequence
atggcccgggtgctgggcgcccctgtggccctgggcctgtggagcctgtgctggagcctggccatcgccacccccctgccccccaccagcgcccacggcaatgtggccgagggggagaccaagccagaccctgatgtgacagagcgctgcagtgatggctggagctttgatgccaccaccctggatgacaatggcaccatgctgttcttcaagggggagtttgtgtggaagagccacaagtgggaccgggagctgatcagcgagcgctggaagaacttccccagccctgtggatgctgccttccggcagggccacaacagcgtcttcctgatcaagggggacaaggtgtgggtgtacccacctgagaagaaggagaagggctaccccaagctgctgcaggatgagttccctggcatccccagccccctggatgctgctgtggagtgccacagaggagagtgccaggccgagggcgtgctcttcttccagggcgaccgggagtggttctgggacctggccaccggcaccatgaaggagaggtcctggccagctgtgggcaactgcagcagcgccctgcgctggctgggccgctactactgcttccagggcaaccagttcctgcgctttgatcctgtgcggggggaggtgcccccacgctaccccagagatgtgcgggactacttcatgccctgccccggccggggccacggccacagaaatggcaccggccacggcaacagcacccaccacggccctgagtacatgcgctgcagcccccacctggtgctgagcgccctgaccagtgacaaccacggggccacctacgccttcagcggcacccactactggaggctggacaccagcagagatggctggcacagctggcccatcgcccaccagtggccccagggccccagcgctgtggatgctgccttctcctgggaggagaagctgtacctggtgcagggcacccaggtgtatgtgttcctgaccaagggcggctacaccctggtgtctggctaccccaagaggctggagaaggaggtgggcacccctcatggcatcatcctggacagcgtggatgctgccttcatctgccccggcagcagccggctgcacatcatggccggccggcggctgtggtggctggacctgaagagcggggcccaggccacctggacagagctgccctggccccatgagaaggtggatggagccctgtgcatggagaagagcctgggccccaacagctgcagcgccaatggacctggcctgtacctgattcatggccccaacctgtactgctacagtgatgtggagaagctgaatgctgccaaggccctgccccagccccagaatgtgaccagcctgctgggctgcacccactag

SEQ ID NO: 272081 - DNA, 765 bp, Artificial Sequence
  derived and/or modified sequence
atggcccgggtgctgggcgcccctgtggccctgggcctgtggagcctgtgctggagcctggccatcgccacccccctgccccccaccagcgcccacggcaatgtggccgagggggagaccaagccagaccctgatgtgacagagcgctgcagtgatggctggagctttgatgccaccaccctggatgacaatggcaccatgctgttcttcaagggggagtttgtgtggaagagccacaagtgggaccgggagctgatcagcgagcgctggaagaacttccccagccctgtggatgctgccttccggcagggccacaacagcgtcttcctgatcaagggggacaaggtgtgggtgtacccacctgagaagaaggagaagggctaccccaagctgctgcaggatgagttccctggcatccccagccccctggatgctgctgtggagtgccacagaggagagtgccaggccgagggcgtgctcttcttccagggcgaccgggagtggttctgggacctggccaccggcaccatgaaggagaggtcctggccagctgtgggcaactgcagcagcgccctgcgctggctgggccgctactactgcttccagggcaaccagttcctgcgctttgatcctgtgcggggggaggtgcccccacgctaccccagagatgtgcgggactacttcatgccctgccccggccggggccacggccacagaaatggcaccggccacggcaacagcatctgtgctgtggcccacatctag

SEQ ID NO: 272082 - DNA, 1389 bp, Artificial Sequence
  derived and/or modified sequence
atggcccgggtgctgggcgcccccgtggccctgggcctgtggagcttgtgctggtccctcgcgatcgcaacaccactgccccctacctcagctcacggaaacgttgcagaaggagagaccaagccggaccccgacgtcacggaaaggtgcagcgacggctggtcattcgatgctaccaccctagacgacaatggcaccatgctcttctttaagggggagttcgtgtggaagtctcacaagtgggaccgcgagcttatctcagaacgttggaagaatttccccagtcctgtggacgctgctttcaggcagggccacaattccgtgttcctcattaagggagacaaagtgtgggtgtatccacctgaaaaaaaggaaaagggctaccctaagcttctccaggatgaattcccaggcataccaagccctctggatgctgccgtagagtgtcatcgcggggaatgtcaagcggaaggggtgctcttctttcagggagatcgcgagtggttttgggacttggccactggcactatgaaggaacgaagttggcctgccgtggggaactgttcttcagctcttcgctggctcggccgctattactgcttccaagggaaccagttcctccgtttcgatcctgtacgcggcgaagtccctccaagatacccacgggacgtgagggattattttatgccttgtccaggcaggggacacggccaccgtaatggcaccggccacgggaacagcactcaccacgggcctgagtacatgagatgcagccctcaccttgtcctgagcgccctgacttccgacaatcacggcgcaacctacgcgttcagcgggactcattattggcgattggacacctctcgcgacggctggcactcctggcccatcgctcaccagtggcctcagggacccagtgccgtcgatgcagcattttcgtgggaagagaaattataccttgtccaaggaacccaggtatacgtgttcctgaccaagggcggctatacactggtatctggttaccccaagaggctggaaaaagaagtcggcactccacatggaataatactcgactcagtcgacgcggcgttcatttgtcccggtagtagccgccttcacatcatggctggacgccgactttggtggctcgatctgaaaagcggcgcacaggccacctggacagagctgccctggccccatgagaaggtagacggcgcgctgtgtatggaaaagagcctcggccccaactcctgcagcgccaatgggcccggactgtacttgattcacggaccgaatctctactgctactcggatgtggagaagcttaatgccgccaaggccctaccgcagccacagaacgtgacaagtttgctgggatgcacccactag

SEQ ID NO: 272083 - DNA, 765 bp, Artificial Sequence
  derived and/or modified sequence
atggcccgggtgctgggcgcccccgtggccctgggcctgtggagcctgtgttggtcactggcgatcgccacgcccctgcctcctaccagcgctcatgggaatgttgctgagggagaaactaagcctgaccctgatgtgaccgagaggtgttctgatggttggtcattcgacgccactacattagatgataacggaaccatgctgttctttaagggcgagtttgtatggaagagccataagtgggacagagagctcatctctgagagatggaagaatttccccagtccagttgatgcagcctttcgtcaagggcacaattccgtcttccttatcaagggagataaggtttgggtgtacccaccagaaaagaaggaaaaaggttatcccaagctgctccaggacgaatttcctgggataccgagccccctcgatgccgctgtggagtgccaccgcggtgagtgtcaggctgagggtgttctcttttttcaaggagacagagaatggttttgggacctggccacaggaaccatgaaagaaaggtcctggcctgctgtggggaactgcagcagcgctctcagatggttggggcgatattactgcttccagggtaatcagttcctgcgctttgatcctgttcggggcgaggtcccgcctcgctacccccgggacgtgcgggattacttcatgccttgccccggccgagggcatggccaccgaaacggcaccggtcatggcaattcaatttgcgcagtcgcccacatttag

SEQ ID NO: 272084 - DNA, 1389 bp, Artificial Sequence
  derived and/or modified sequence
atggcccgagttctgggcgcaccagtggcgttgggcctatggtccctgtgttggagtctggccatagccactcctctgccccctacatcagcccacgggaacgtagcggagggcgagactaagcctgatcctgacgtgacagagcgttgcagcgacggttggagcttcgatgcgacaaccctcgatgataacgggaccatgcttttttttaagggagaattcgtgtggaaaagccacaagtgggatcgggagctgatttccgagaggtggaagaacttcccttcaccagtcgacgccgcatttaggcaggggcacaattctgtcttcctcatcaaaggagacaaggtttgggtctatcctcccgaaaagaaggaaaaaggctatcccaaattattacaggatgagtttcctggcatccctagtcctcttgatgccgcagtggagtgccacaggggcgaatgccaggcagaaggagtgctgttttttcaaggcgatcgcgaatggttctgggatcttgctacaggtacaatgaaggagcgatcttggccggcagtcgggaactgtagtagtgcgctcagatggctcggcagatactattgcttccaggggaaccagtttcttcggttcgaccccgtgagaggcgaggtacctcccagataccccagagacgttcgcgactacttcatgccctgccccggacgcggacatggccaccgaaacggtaccggacatggaaactcgacacaccatggacccgagtacatgaggtgttccccacatctggtcctgagcgctttgacttccgataatcacggtgctacatacgccttctccggtacccactactggagactggatacgtccagggacgggtggcactcctggcctattgcgcaccaatggccgcagggaccctccgccgttgacgcagctttttcctgggaagagaagctttatctcgttcagggcacccaagtgtatgtttttctgacaaaaggcggatataccctggtgtctggttatcctaagcgactggagaaggaggtgggcacaccacatggcattatcctggattctgtggatgccgcttttatctgtccaggatcctcccgcctccacatcatggcgggacgacgactatggtggctggacctcaagagcggggcacaggctacttggactgagcttccatggccccacgaaaaagtggacggtgccctgtgtatggaaaaaagtctaggaccaaactcctgcagcgcgaacggccctggcctttatctgatacatgggccaaacctctattgctattcagatgttgagaaactgaatgcagcgaaagccttgcctcaacctcagaacgtcacatctctcttgggctgtactcactag

SEQ ID NO: 272085 - DNA, 765 bp, Artificial Sequence
  derived and/or modified sequence
atggctcgcgtgctaggcgcaccagttgctctcggcctctggtctttgtgctggtcgctggccatcgctacgccacttccgccaactagtgcccacgggaatgtagccgaaggagaaacgaaaccagaccccgacgtgaccgagagatgcagcgatggctggtcttttgacgccacaacactggatgataacgggactatgctgtttttcaaaggagaattcgtgtggaaatcccacaagtgggatagagaattaatctcggaaaggtggaaaaacttccccagcccagtggatgcagccttcaggcaggggcataactcagtttttttaattaagggtgacaaggtttgggtttatccccctgagaagaaggagaaaggctaccccaaacttctccaggatgaattcccaggcataccctcaccactggacgccgctgtggaatgccacagaggtgagtgtcaggccgaaggggtgctgttttttcaaggagaccgtgagtggttttgggacctggccacaggaacaatgaaagagaggtcctggcccgcagtgggcaactgtagttccgcactacgttggcttggaagatattattgtttccagggcaatcagtttctacggttcgacccagttcgcggtgaggttcctcctaggtaccctcgagacgttcgggactatttcatgccctgccccggacgtgggcacggacataggaacggcacaggacacggaaactcaatatgcgctgtggcccacatctag

SEQ ID NO: 272086 - DNA, 1389 bp, Artificial Sequence
  derived and/or modified sequence
atggccagagtgctgggcgcccccgtggccctgggcctgtggagcctgtgctggagcctggccatcgccacccccctgccccccaccagcgcccacggcaacgtggccgagggcgagaccaagcccgaccccgacgtgaccgagagatgcagcgacggctggagcttcgacgccaccaccctggacgacaacggcaccatgctgttcttcaagggcgagttcgtgtggaagagccacaagtgggacagagagctgatcagcgagagatggaagaacttccccagccccgtggacgccgccttcagacagggccacaacagcgtgttcctgatcaagggcgacaaggtgtgggtgtacccccccgagaagaaggagaagggctaccccaagctgctgcaggacgagttccccggcatccccagccccctggacgccgccgtggagtgccacagaggcgagtgccaggccgagggcgtgctgttcttccagggcgacagagagtggttctgggacctggccaccggcaccatgaaggagagaagctggcccgccgtgggcaactgcagcagcgccctgagatggctgggcagatactactgcttccagggcaaccagttcctgagattcgaccccgtgagaggcgaggtgccccccagataccccagagacgtgagagactacttcatgccctgccccggcagaggccacggccacagaaacggcaccggccacggcaacagcacccaccacggccccgagtacatgagatgcagcccccacctggtgctgagcgccctgaccagcgacaaccacggcgccacctacgccttcagcggcacccactactggagactggacaccagcagagacggctggcacagctggcccatcgcccaccagtggccccagggccccagcgccgtggacgccgccttcagctgggaggagaagctgtacctggtgcagggcacccaggtgtacgtgttcctgaccaagggcggctacaccctggtgagcggctaccccaagagactggagaaggaggtgggcaccccccacggcatcatcctggacagcgtggacgccgccttcatctgccccggcagcagcagactgcacatcatggccggcagaagactgtggtggctggacctgaagagcggcgcccaggccacctggaccgagctgccctggccccacgagaaggtggacggcgccctgtgcatggagaagagcctgggccccaacagctgcagcgccaacggccccggcctgtacctgatccacggccccaacctgtactgctacagcgacgtggagaagctgaacgccgccaaggccctgccccagccccagaacgtgaccagcctgctgggctgcacccactag

SEQ ID NO: 272087 - DNA, 765 bp, Artificial Sequence
  derived and/or modified sequence
atggccagagtgctgggcgcccccgtggccctgggcctgtggagcctgtgctggagcctggccatcgccacccccctgccccccaccagcgcccacggcaacgtggccgagggcgagaccaagcccgaccccgacgtgaccgagagatgcagcgacggctggagcttcgacgccaccaccctggacgacaacggcaccatgctgttcttcaagggcgagttcgtgtggaagagccacaagtgggacagagagctgatcagcgagagatggaagaacttccccagccccgtggacgccgccttcagacagggccacaacagcgtgttcctgatcaagggcgacaaggtgtgggtgtacccccccgagaagaaggagaagggctaccccaagctgctgcaggacgagttccccggcatccccagccccctggacgccgccgtggagtgccacagaggcgagtgccaggccgagggcgtgctgttcttccagggcgacagagagtggttctgggacctggccaccggcaccatgaaggagagaagctggcccgccgtgggcaactgcagcagcgccctgagatggctgggcagatactactgcttccagggcaaccagttcctgagattcgaccccgtgagaggcgaggtgccccccagataccccagagacgtgagagactacttcatgccctgccccggcagaggccacggccacagaaacggcaccggccacggcaacagcatctgcgccgtggcccacatctag

SEQ ID NO: 272088 - protein, 191 aa, Artificial Sequence
  derived and/or modified sequence
MQSIKCVVVGDGAVGKTCLLICYTTNAFPKEYIPTVFDNYSAQSAVDGRTVNLNLWDTAGQEEYDRLRTLSYPQTNVFVICFSIASPPSYENVRHKWHPEVCHHCPDVPILLVGTKKDLRAQPDTLRRLKEQGQAPITPQQGQALAKQIHAVRYLECSALQQDGVKEVFAEAVRAVLNPTPIKRGRSCILL

SEQ ID NO: 272089 - DNA, 576 bp, Artificial Sequence
  derived and/or modified sequence
atgcagagcatcaagtgcgtggtggtgggcgacggcgccgtgggcaagacctgcctgctgatctgctacaccaccaacgccttccccaaggagtacatccccaccgtgttcgacaactacagcgcccagagcgccgtggacggcagaaccgtgaacctgaacctgtgggacaccgccggccaggaggagtacgacagactgagaaccctgagctacccccagaccaacgtgttcgtgatctgcttcagcatcgccagcccccccagctacgagaacgtgagacacaagtggcaccccgaggtgtgccaccactgccccgacgtgcccatcctgctggtgggcaccaagaaggacctgagagcccagcccgacaccctgagaagactgaaggagcagggccaggcccccatcaccccccagcagggccaggccctggccaagcagatccacgccgtgagatacctggagtgcagcgccctgcagcaggacggcgtgaaggaggtgttcgccgaggccgtgagagccgtgctgaaccccacccccatcaagagaggcagaagctgcatcctgctgtag

SEQ ID NO: 272090 - DNA, 576 bp, Artificial Sequence
  derived and/or modified sequence
atgcagtcaattaagtgcgttgttgtgggagacggagcagttgggaagacctgcctactgatttgttatacaaccaacgccttcccgaaggagtatatacctaccgtgttcgacaactactccgcccagtccgcagttgacggtaggacagtcaatttaaatctctgggatactgcgggccaggaagaatacgaccggctccggacactctcctaccctcagactaatgtgttcgtgatctgtttttccatcgccagccctccaagctacgagaatgttagacacaagtggcaccctgaagtttgtcaccattgccctgatgtgccaattctgcttgtgggtaccaaaaaggatctgcgggctcagccagacaccctgagaaggctgaaagaacagggacaagctcccatcacacctcagcaaggccaagctctggccaagcagattcacgctgttcgatatctggaatgctccgctttgcagcaggacggggtgaaggaggtatttgctgaagcggttcgagccgtgttgaaccctactcctattaaacggggccgatcatgtatcctcctctag

SEQ ID NO: 272091 - DNA, 576 bp, Artificial Sequence
  derived and/or modified sequence
atgcagtccatcaagtgcgtggtggtcggggacggggctgtggggaagacttgcctgttgatttgctatactaccaacgcttttcccaaggagtatatcccaaccgtctttgataactactccgcgcagagcgctgttgacggccgaactgtgaatttgaatctatgggacaccgctggacaagaagaatatgatcggctgcgaaccctcagctatcctcagaccaacgtcttcgtaatatgcttcagtatcgcaagccccccctcctatgaaaacgtgagacataagtggcatcctgaggtttgccatcactgccccgacgtgcccatcctgttggtggggacgaaaaaagacctaagagcccaacctgatactttaagaagactcaaagagcaggggcaggctccaataacaccccaacaagggcaggcccttgctaaacagattcacgccgtgaggtacctcgaatgctccgctctacaacaggacggcgtaaaggaggtattcgccgaagcagtgcgagccgtgctgaatcccactccaatcaagcgggggagaagttgcatcttgctgtag

SEQ ID NO: 272092 - DNA, 576 bp, Artificial Sequence
  derived and/or modified sequence
atgcaatcgatcaaatgtgtagtggtaggcgatggcgcagtcgggaaaacctgtctgctgatatgttatacaacaaatgcgttcccgaaagaatatattccgacggtattcgataattatagcgcccaaagcgccgtagatggacgcacagtcaacctcaacttatgggatacagccggtcaggaggaatacgacaggctgcgaacactctcgtatcctcagaccaatgtgttcgttatttgtttcagcatcgcttccccaccaagctatgagaatgtgaggcacaaatggcatcctgaggtttgccatcactgcccggacgtccccatcctgttagttgggacaaagaaggatctacgagcccagcctgataccctgcgcaggttaaaagaacaggggcaggcccccattacgcctcagcagggccaagccctcgcgaaacaaattcacgcggtgcgttatttggaatgtagtgctcttcaacaagacggcgtcaaagaggttttcgctgaggccgtgcgtgcagtactgaatccaactccaataaaaagagggcggtcgtgcatcttattgtag

SEQ ID NO: 272093 - DNA, 576 bp, Artificial Sequence
  derived and/or modified sequence
atgcaatcaatcaaatgcgtagtggtcggggacggcgccgtcggcaaaacctgtctcctaatttgttacacaaccaacgcatttcccaaagaatatattcccaccgtgttcgataactatagcgcccagtccgcagtggacgggcgtaccgtgaacctgaacctgtgggacacagctggacaggaagagtatgacaggttacggaccctgtcatatccacagactaatgtctttgtgatttgcttctctatagcatctccaccttcatacgagaacgtacggcacaagtggcacccagaagtgtgccatcattgccctgatgtgcccattttattggtggggactaagaaagatctgcgtgcccaaccagatacattgcgaaggctcaaggagcagggccaagcccccataacgcctcagcagggacaggcactagcgaagcagatccatgccgtcaggtaccttgagtgctcggctctacaacaggatggtgtcaaagaggtttttgccgaggctgtccgcgcagtgttaaatcctacaccaattaaaagggggcgctcatgtattctcctgtag

SEQ ID NO: 272094 - DNA, 576 bp, Artificial Sequence
  derived and/or modified sequence
atgcagagcatcaagtgtgtggtggtgggagatggagctgtgggcaagacctgcctgctgatctgctacaccaccaatgccttccccaaggagtacatccccaccgtgtttgacaactacagcgcccagagcgctgtggatggccgcacagtgaacctgaacctgtgggacacagctggccaggaggagtatgaccggctgcggaccctgagctacccccagaccaacgtgtttgtgatctgcttcagcatcgccagccccccatcctatgaaaatgtgcgccacaagtggcaccctgaggtgtgccaccactgcccagatgtgcccatcctgctggtgggcaccaagaaggacctgcgggcccagcctgacaccctgcggcggctgaaggagcagggccaggcccccatcaccccccagcagggccaggccctggccaagcagatccatgctgtgcgctacctggagtgcagcgccctgcagcaggatggagtgaaggaggtgtttgctgaggccgtgcgggctgtgctgaaccccacccccatcaagaggggccgcagctgcatcctgctgtag

SEQ ID NO: 272095 - DNA, 576 bp, Artificial Sequence
  derived and/or modified sequence
atgcagagcatcaagtgcgtggtggtgggcgacggcgccgtgggcaagacgtgcttgctgatttgttatactaccaacgctttccctaaagaatacatacctactgtgttcgataactattctgcccagagcgcggttgacggtcggacagtcaatctgaatctgtgggacaccgctggccaggaagaatacgaccgcctgcgcaccctaagctatcctcagaccaatgtctttgtgatctgcttctcaatcgcctctcccccgtcctatgagaacgtcaggcacaagtggcatccagaagtgtgccatcactgcccagatgtgccaatccttctagtgggcacaaagaaggatctgagggctcagcctgacaccctgcgcagactgaaagagcagggacaggcaccaattacgcctcaacaggggcaagccttggccaaacaaatccacgcagttcgatatttggaatgttcagccttgcagcaggatggggtcaaagaggtgttcgcggaggccgttagggcagttctgaaccctacccccatcaagcgaggtaggtcttgtatactgctgtag

SEQ ID NO: 272096 - DNA, 576 bp, Artificial Sequence
  derived and/or modified sequence
atgcagagcatcaagtgcgtggtggtgggcgacggcgccgtgggcaaaacttgcctgctgatctgttataccacaaatgcctttcctaaagaatatatcccaaccgtgtttgataattattcggctcaaagcgccgtggatgggcggaccgttaatctgaatctctgggatactgccggacaggaagaatatgataggttgcgaacattgtcctacccccagaccaacgtcttcgtgatatgcttctctattgcgtccccccctagttatgagaatgtgcgacataaatggcatcctgaagtttgccaccactgccccgatgtgccgatactcttggtgggaacaaagaaggacctgagggcacagccagacactttgcggcgcctcaaagagcaaggccaggcgccgatcactcctcagcaaggacaggcccttgccaaacagattcatgccgtgcgatatctggaatgtagtgctctgcaacaggacggtgtaaaagaggtgttcgccgaggccgtgcgcgcagtcttaaaccctacaccgattaagcgtggccggtcatgtattctcctttag

SEQ ID NO: 272097 - DNA, 576 bp, Artificial Sequence
  derived and/or modified sequence
atgcagagcatcaagtgcgtggtggtgggcgacggcgccgtgggcaagacttgcctgctgatctgctatacaaccaacgcattcccaaaagagtacattcccactgtgtttgataactactcagcccagtcagccgtagacgggcgcactgtaaacttgaacctctgggataccgctgggcaggaagaatatgatcggcttagaacactctcctatccacaaaccaatgtgtttgtcatctgcttctcaatcgcctcccccccctcctacgagaatgtccgtcacaagtggcatcctgaggtgtgtcaccactgccctgatgtcccgatattattagtcggcacgaagaaggacctgagggctcagcccgacaccctacgtagattaaaggagcagggtcaggcccccatcacgccgcagcagggccaggcactggccaagcagattcacgccgtacgctatttggaatgttcggcactccaacaagatggcgtaaaggaggtctttgcagaagcggtgagagcggtcctcaaccccactcccataaagcgggggcggagttgcatccttctgtag

SEQ ID NO: 272098 - DNA, 576 bp, Artificial Sequence
  derived and/or modified sequence
atgcagagcatcaagtgcgtggtggtgggcgacggcgccgtgggcaagacttgcctgctgatctgctacaccaccaatgcatttcccaaagaatatattcccacagtgttcgacaactattccgctcagtcagctgtcgacgggcgcacagtgaatcttaatctgtgggacactgcagggcaggaggagtatgatagactgagaaccctctcgtacccgcagactaatgtgtttgtcatctgtttcagcatagcttcacctccaagttatgaaaatgtgcgccacaagtggcatccagaagtctgccaccactgtccagatgtgccaatactcctggtcggtaccaagaaggacctgagggcacagccagatacgttgaggaggctgaaagagcagggtcaggcccctatcacaccccaacaggggcaggctttagctaagcagatacacgcagtgcgctacctggagtgtagtgctcttcagcaggacggtgtcaaagaggtgtttgctgaggccgtgcgcgctgtgcttaatccgactcccatcaagagggggcgcagctgtatcctcctgtag

SEQ ID NO: 272099 - DNA, 576 bp, Artificial Sequence
  derived and/or modified sequence
atgcagtctattaagtgtgtggtcgtgggggacggggctgtgggaaaaacctgcctgcttatctgctacactacaaacgcatttccaaaagaatatatacccaccgtcttcgacaactattccgcccagtccgccgtagacggcaggactgtgaatctgaatttgtgggataccgctgggcaggaagaatatgatcggctgagaactctctcctatccacagacaaacgtgtttgttatctgtttttccatcgcatccccaccaagctatgagaatgtccggcacaagtggcatcctgaggtctgtcaccactgtccagatgtcccaatcttgttagtcggcactaagaaggaccttagggcccagcccgatacccttcgaagattaaaagaacagggccaggctcctatcaccccccagcaggggcaagcgctggcgaagcagatccacgccgtaaggtatctagagtgctccgccttgcagcaagatggtgttaaggaggtcttcgcggaggctgtgagagcagttctaaacccaacccccattaaaagaggaaggagctgcatcctcctgtag

SEQ ID NO: 272100 - DNA, 576 bp, Artificial Sequence
  derived and/or modified sequence
atgcaatctatcaagtgcgtggtggtgggcgacggggctgtcggaaagacctgtctcctgatttgttataccactaacgcctttcctaaggagtacattcccacagtgtttgataattactcagctcagtcagctgtggacggcaggacagtcaatcttaatctgtgggacaccgccggtcaggaggaatatgatagactgcggactctcagctatcctcaaactaatgtgtttgttatatgtttctccattgcatcgccacccagttatgagaatgtgcggcacaaatggcatcctgaggtgtgccatcactgtcctgacgttcctatcctgctagtgggcacgaaaaaggatctgcgcgcacagccagacacattgcggcgactgaaagagcaaggacaggcgccaataactccacagcagggacaagctctggccaaacaaattcacgccgtccgttatctggagtgctccgcccttcagcaagacggagtgaaagaggtctttgctgaagccgtgcgggcagtcttaaaccccaccccaataaagagaggacgttcctgcatacttctgtag

SEQ ID NO: 272101 - DNA, 576 bp, Artificial Sequence
  derived and/or modified sequence
atgcagagtatcaaatgtgtggtagtcggcgacggagccgtcggcaagacttgcctgttgatctgttacaccaccaatgccttccctaaagagtacattccaacagtattcgacaattactcggcccagtctgcagtggacgggagaacagttaatctgaatctgtgggacaccgccggacaggaggaatacgatcggcttcgtacgctgtcatacccccaaactaacgtcttcgttatttgtttttctatcgcctcccccccatcctacgagaacgtgcgccataagtggcaccctgaggtctgccaccactgcccggatgttcccattttactcgtgggcacaaaaaaagatcttcgcgctcagcctgacacactccggcgattgaaggaacagggacaagctcccataaccccccagcagggccaggctctcgccaagcagatacatgccgtgcggtacctagaatgctccgctctgcaacaggacggcgttaaggaggtgttcgctgaagccgttcgagccgttcttaacccgacgcccatcaaacgcggtaggtcatgtatcctcttatag

SEQ ID NO: 272102 - DNA, 576 bp, Artificial Sequence
  derived and/or modified sequence
atgcagtcgatcaagtgcgtagtcgtgggagacggggcagtgggcaaaacctgtctgctgatctgttacaccacaaacgcctttcccaaagaatacatccccacggtgttcgataattatagtgcacagagcgcagttgacggcaggacagttaacctgaacctatgggacacagccggacaggaggaatacgaccggctcagaacattgagctatccccaaacaaacgtttttgtgatatgcttctctatcgcgtcccctcccagttacgagaacgtacggcacaagtggcatccagaggtgtgtcatcactgtcccgatgtgcctatactattggttggaacaaaaaaggacttgcgggctcagcctgataccctccggagactgaaagagcaggggcaagccccaattacccctcagcaaggccaagctctggctaagcaaatccacgccgtgagatacctggagtgttcagcccttcagcaagatggagtgaaggaagtgttcgctgaggcagtgcgagccgtgctgaatcccacgccaatcaagcgtgggcgaagctgcatcttgctgtag

SEQ ID NO: 272103 - DNA, 1319 bp, Artificial Sequence
  derived and/or modified sequence
cacttcctccggcctcccgctctcacttccttctcgagcccggagccgctgccgccgcccccagctcccccgcctcggggagggcaccaggtcactgcagccagaggggtccagaagagagaggaggcactgcctccactacagcaactgcacccacgatgcagagcatcaagtgcgtggtggtgggtgatggggctgtgggcaagacgtgcctgctcatctgctacacaactaacgctttccccaaagagtacatccccaccgtgttcgacaattacagcgcgcagagcgcagttgacgggcgcacagtgaacctgaacctgtgggacactgcgggccaggaggagtatgaccgcctccgtacactctcctaccctcagaccaacgttttcgtcatctgtttctccattgccagtccgccgtcctatgagaacgtgcggcacaagtggcatccagaggtgtgccaccactgccctgatgtgcccatcctgctggtgggcaccaagaaggacctgagagcccagcctgacaccctacggcgcctcaaggagcagggccaggcgcccatcacaccgcagcagggccaggcactggccaagcagatccacgctgtgcgctacctcgaatgctcagccctgcaacaggatggtgtcaaggaagtgttcgccgaggctgtccgggctgtgctcaaccccacgccgatcaagcgtgggcggtcctgcatcctcttgtgaccctggcacttggcttggaggctgcccctgccctccccccaccagttgtgccttggtgccttgtccgcctcagctgtgccttaaggactaattctggcacccctttccagggggttccctgaatgcctttttctctgagtgcctttttctccttaaggaggcctgcagagaaaggggctttgggctctgcccccctctgcttgggaacactgggtattctcatgagctcatccaagccaaggttggacccctccccaagaggccaacccagtgccccctcccattttccgctactgaccagttcatccagctttccacacagttgttgctgcctattgtggtgccgcctcaggttaggggctctcagccatctctaacctctgccctcgctgctcttggaattgcgcccccaagatgctctctcccttctccaatgagggagccacagaatcctgagaaggtgaatgtgccctaacctgctcctctgtgcctaggccttacgcatttgctgactgactcagcccccatgcttctggggacctttcctacccccatcagcatcaataaaacctcctgtctccagtg

SEQ ID NO: 272104 - DNA, 1066 bp, Artificial Sequence
  derived and/or modified sequence
ccggcccaggactcggcgcgggcgccggctcatgagtttgctggcggaggccgcgggcgggagcttctcggttcagtccaagtagggcgggcgcggccggccgggcggggcgggaacggggccactgcgagccggcggaggctcggcgagggtggcttcccggcggctgtaccgcctctagggagccgagagggacccctgaggtcggagggtcccgggctccaagataagtgtctctgaagtggaagagctcagagctgggagatcggacgcaggtcactgcagccagaggggtccagaagagagaggaggcactgcctccactacagcaactgcacccacgatgcagagcatcaagtgcgtggtggtgggtgatggggctgtgggcaagacgtgcctgctcatctgctacacaactaacgctttccccaaagagtacatccccaccgtgttcgacaattacagcgcgcagagcgcagttgacgggcgcacagtgaacctgaacctgtgggacactgcgggccaggaggagtatgaccgcctccgtacactctcctaccctcagaccaacgttttcgtcatctgtttctccattgccagtccgccgtcctatgagaacgtgcggcacaagtggcatccagaggtgtgccaccactgccctgatgtgcccatcctgctggtgggcaccaagaaggacctgagagcccagcctgacaccctacggcgcctcaaggagcagggccaggcgcccatcacaccgcagcagggccaggcactggccaagcagatccacgctgtgcgctacctcgaatgctcagccctgcaacaggatggtgtcaaggaagtgttcgccgaggctgtccgggctgtgctcaaccccacgccgatcaagcgtgggcggtcctgcatcctcttgtgaccctggcacttggcttggaggctgcccctgccctccccccaccagttgtgccttggtgccttgtccgcctcagctgtgccttaaggactaattctggcacccctttccagggggttccctgaatgcctttttctctgagtgcctttt

SEQ ID NO: 272105 - DNA, 1289 bp, Artificial Sequence
  derived and/or modified sequence
catgaatgcaccaggatgggctaggcatgagagcctgggaacttggaagcaaaaaggctcagatgtcactgcagccagaggggtccagaagagagaggaggcactgcctccactacagcaactgcacccacgatgcagagcatcaagtgcgtggtggtgggtgatggggctgtgggcaagacgtgcctgctcatctgctacacaactaacgctttccccaaagagtacatccccaccgtgttcgacaattacagcgcgcagagcgcagttgacgggcgcacagtgaacctgaacctgtgggacactgcgggccaggaggagtatgaccgcctccgtacactctcctaccctcagaccaacgttttcgtcatctgtttctccattgccagtccgccgtcctatgagaacgtgcggcacaagtggcatccagaggtgtgccaccactgccctgatgtgcccatcctgctggtgggcaccaagaaggacctgagagcccagcctgacaccctacggcgcctcaaggagcagggccaggcgcccatcacaccgcagcagggccaggcactggccaagcagatccacgctgtgcgctacctcgaatgctcagccctgcaacaggatggtgtcaaggaagtgttcgccgaggctgtccgggctgtgctcaaccccacgccgatcaagcgtgggcggtcctgcatcctcttgtgaccctggcacttggcttggaggctgcccctgccctccccccaccagttgtgccttggtgccttgtccgcctcagctgtgccttaaggactaattctggcacccctttccagggggttccctgaatgcctttttctctgagtgcctttttctccttaaggaggcctgcagagaaaggggctttgggctctgcccccctctgcttgggaacactgggtattctcatgagctcatccaagccaaggttggacccctccccaagaggccaacccagtgccccctcccattttccgctactgaccagttcatccagctttccacacagttgttgctgcctattgtggtgccgcctcaggttaggggctctcagccatctctaacctctgccctcgctgctcttggaattgcgcccccaagatgctctctcccttctccaatgagggagccacagaatcctgagaaggtgaatgtgccctaacctgctcctctgtgcctaggccttacgcatttgctgactgactcagcccccatgcttctggggacctttcctacccccatcagcatcaataaaacctcctgtctcc

SEQ ID NO: 272106 - DNA, 886 bp, Artificial Sequence
  derived and/or modified sequence
cagggtcttgctctgtcgcacaggctggagtgcagtggtgtgatcatagcccactgcagccttgaccaccctgggatcaagtgatgctcccacctcagcctcccgagtagctgggactacaggtgtcactgcagccagaggggtccagaagagagaggaggcactgcctccactacagcaactgcacccacgatgcagagcatcaagtgcgtggtggtgggtgatggggctgtgggcaagacgtgcctgctcatctgctacacaactaacgctttccccaaagagtacatccccaccgtgttcgacaattacagcgcgcagagcgcagttgacgggcgcacagtgaacctgaacctgtgggacactgcgggccaggaggagtatgaccgcctccgtacactctcctaccctcagaccaacgttttcgtcatctgtttctccattgccagtccgccgtcctatgagaacgtgcggcacaagtggcatccagaggtgtgccaccactgccctgatgtgcccatcctgctggtgggcaccaagaaggacctgagagcccagcctgacaccctacggcgcctcaaggagcagggccaggcgcccatcacaccgcagcagggccaggcactggccaagcagatccacgctgtgcgctacctcgaatgctcagccctgcaacaggatggtgtcaaggaagtgttcgccgaggctgtccgggctgtgctcaaccccacgccgatcaagcgtgggcggtcctgcatcctcttgtgaccctggcacttggcttggaggctgcccctgccctccccccaccagttgtgccttggtgccttgtccgcctcagctgtgccttaaggactaattctggcacccctttccagggggttcc

SEQ ID NO: 272107 - protein, 681 aa, Artificial Sequence
  derived and/or modified sequence
MELQTLQEALKVEIQVHQKLVAQMKQDPQNADLKKQLHELQAKITALSEKQKRVVEQLRKNLIVKQEQPDKFQIQPLPQSENKLQTAQQQPLQQLQQQQQYHHHHAQQSAAASPNLTASQKTVTTASMITTKTLPLVLKAATATMPASVVGQRPTIAMVTAINSQKAVLSTDVQNTPVNLQTSSKVTGPGAEAVQIVAKNTVTLQVQATPPQPIKVPQFIPPPRLTPRPNFLPQVRPKPVAQNNIPIAPAPPPMLAAPQLIQRPVMLTKFTPTTLPTSQNSIHPVRVVNGQTATIAKTFPMAQLTSIVIATPGTRLAGPQTVQLSKPSLEKQTVKSHTETDEKQTESRTITPPAAPKPKREENPQKLAFMVSLGLVTHDHLEEIQSKRQERKRRTTANPVYSGAVFEPERKKSAVTYLNSTMHPGTRKRGRPPKYNAVLGFGALTPTSPQSSHPDSPENEKTETTFTFPAPVQPVSLPSPTSTDGDIHEDFCSVCRKSGQLLMCDTCSRVYHLDCLDPPLKTIPKGMWICPRCQDQMLKKEEAIPWPGTLAIVHSYIAYKAAKEEEKQKLLKWSSDLKQEREQLEQKVKQLSNSISKCMEMKNTILARQKEMHSSLEKVKQLIRLIHGIDLSKPVDSEATVGAISNGPDCTPPANAATSTPAPSPSSQSCTANCNQGEETK

SEQ ID NO: 272108 - DNA, 2046 bp, Artificial Sequence
  derived and/or modified sequence
atggaactccaaaccctgcaggaggcactgaaggtcgagattcaggtccatcagaaattggtggctcagatgaaacaggacccccagaacgccgacctgaagaagcagctacacgaactgcaggccaaaattaccgcactttctgagaaacagaagcgagtcgtggaacagctgcggaagaatctgatcgtgaagcaagaacagcccgacaagttccagatccagcctctccctcaaagcgagaacaagctccagacagcacagcagcaaccgttacagcagctgcaacagcaacagcagtaccaccatcatcatgcccaacagtctgctgccgcatcacccaacctcacagcaagccagaaaaccgtcacgaccgcttctatgatcaccacaaagactctgcctctggtgctgaaagcggccactgccaccatgcccgcctccgtggtgggccagcgcccaaccatagctatggtcaccgccatcaactctcagaaggctgttctttccacagacgtgcagaacacgcctgtcaatcttcaaacatcgtcaaaggtgactggtccaggggctgaggctgtgcagattgtcgccaagaacaccgttacgcttcaggttcaggctactccaccacagcccatcaaagttcctcaatttatcccccccccccggctgacgccccgcccaaactttctcccgcaggttagaccgaagcccgtcgctcagaacaatattcccatcgcgccggcccctcccccgatgctcgcggccccccagttgatccagcgtccagtgatgctgaccaagtttacacctacaaccctgcctacgtcgcagaattccatacacccagtgcgcgtggtaaacggccagaccgctacgatcgccaaaaccttcccaatggcacaacttacctcgatcgttattgctacacccggcaccagacttgctggaccccagacggtgcagctcagcaagcccagtttagagaagcaaaccgtcaaatcgcataccgaaacagacgaaaagcagaccgagtctaggacgattaccccaccagccgctcccaagcccaaacgagaagagaatccccagaagctagcctttatggtgtctctggggctggtgacccatgaccacctggaggaaatccagagcaaacgtcaggagagaaaaaggaggaccactgcaaaccccgtctattcaggagctgtgtttgaacccgagcggaaaaagagtgcagtgacctatctgaacagcactatgcatcccggcactagaaaacgcggaagaccccctaaatacaatgctgtactaggtttcggtgcactgacccctacttctcctcagtcatcccatccagattcccccgagaacgagaagacggagacaaccttcacattccctgctcctgtgcagcccgtgtctctcccatcccccacttccacggacggggatatacacgaggatttttgctctgtgtgtcggaagtcaggccaactgctgatgtgtgacacgtgcagtcgtgtgtatcatctggactgcctcgatcctccccttaaaacgatccccaaaggcatgtggatctgccctcgctgtcaggatcaaatgctaaagaaggaggaggcaatcccctggcctggtaccctcgctatcgtgcactcttacatcgcttataaggctgctaaggaagaggagaagcagaagcttctgaaatggagtagtgatttgaagcaggaacgagagcaactggagcagaaggttaaacaactgtccaactctatctccaaatgcatggagatgaagaacacaatcctggctcgtcagaaggagatgcactccagcctcgagaaagtaaagcagctcatccgtctgatccatggcattgatctgtccaagcctgtggattctgaagctacagtcggtgctattagtaacggaccggactgcactcctcctgccaacgcggccactagcacgccagctccctccccctcaagccagtcctgcactgctaattgtaaccaaggcgaagagactaagtag

SEQ ID NO: 272109 - DNA, 2046 bp, Artificial Sequence
  derived and/or modified sequence
atggagctgcagaccctgcaggaggccctgaaggtggagatccaggtgcaccagaagctggtggcccagatgaagcaggacccccagaatgctgacctgaagaagcagctgcacgagctgcaggccaagatcacagccctgtctgagaagcagaagagggtggtggagcagctgaggaagaacctgattgtgaagcaggagcagcctgacaagttccagatccagcccctgccccagagcgagaacaagctgcagacagcccagcagcagcccctgcagcagctgcagcagcagcagcagtaccaccaccaccacgcccagcagagcgctgctgccagccccaacctgacagccagccagaagacagtgaccacagcctccatgatcaccaccaagaccctgcccctggtgctgaaggccgccacagccaccatgcctgcctctgtggtgggccagaggcccaccatcgccatggtgacagccatcaacagccagaaggctgtgctgagcacagatgtgcagaacacccctgtgaacctgcagaccagcagcaaggtgactggacctggagctgaggccgtgcagatcgtggccaagaacacagtgaccctgcaggtgcaggccaccccaccccagcccatcaaggtgccccagttcatccccccaccccggctgaccccccggcccaacttcctgccccaggtgcggcccaagcctgtggcccagaacaacatccccatcgccccagcccccccacccatgctggccgccccccagctgatccagaggcctgtgatgctgaccaagttcacccccaccaccctgcccaccagccagaacagcatccaccctgtgcgggtggtgaatggccagacagccaccatcgccaagaccttccccatggcccagctgaccagcatcgtgattgccaccccaggcacccggctggccggcccccagacagtgcagctgagcaagcccagcctggagaagcagacagtgaagagccacacagaaacagatgagaagcagacagagagcaggaccatcaccccacctgctgcccccaagcccaagcgggaggagaacccccagaagctggccttcatggtgtccctgggcctggtgacccatgaccacctggaggagatccagagcaagaggcaggagaggaagaggaggaccacagccaaccctgtgtacagcggggctgtgtttgagcctgagaggaagaagtctgctgtgacctacctgaacagcaccatgcaccctggcaccaggaagaggggccggccccccaagtacaatgctgtgctgggctttggagccctgacccccaccagcccccagagcagccacccagacagcccagaaaatgagaagacagagaccaccttcaccttccctgcccctgtgcagcctgtgtccctgcccagccccaccagcacagatggagacatccacgaggacttctgcagcgtgtgcaggaagagcggccagctgctgatgtgtgacacctgcagccgggtgtaccacctggactgcctggacccccccctgaagaccatccccaagggcatgtggatctgcccccgctgccaggaccagatgctgaagaaggaggaggccatcccctggccaggcaccctggccatcgtgcacagctacatcgcctacaaggccgccaaggaggaggagaagcagaagctgctgaagtggagcagtgacctgaagcaggagcgggagcagctggagcagaaggtgaagcagctgagcaacagcatcagcaagtgcatggagatgaagaacaccatcctggcccggcagaaggagatgcacagcagcctggagaaggtgaagcagctgatccgcctcatccatggaattgacctgagcaagcctgtggacagcgaggccaccgtgggcgccatcagcaatggaccagactgcaccccaccagccaatgctgccaccagcaccccagcccccagccccagcagccagagctgcacagccaactgcaaccagggcgaggagaccaagtag

SEQ ID NO: 272110 - DNA, 2046 bp, Artificial Sequence
  derived and/or modified sequence
atggagctgcagaccctgcaggaggccctgaaggtggagatccaggtgcaccagaaactggttgcccaaatgaagcaggaccctcagaatgcggaccttaagaagcaactgcatgagttacaggccaagattacagccctgagcgagaagcagaaacgcgttgtggaacagctaaggaagaaccttatcgttaaacaggaacagccagacaagtttcagattcaacccctacctcaatcagagaacaagctccagaccgcacagcagcagcctcttcagcagctgcagcagcagcagcagtaccaccaccatcacgcacagcagtcagcggccgcgtctcctaacctgactgcctctcagaagactgtgactaccgcttctatgatcaccacgaaaaccctgcccctggttctgaaagcggccacggccacgatgcccgcgtctgtcgtcggtcagcgcccaacaatcgccatggtcaccgcaattaacagtcagaaagcagtattgagtactgacgtgcagaacacccccgtgaacctgcagacctcttcaaaagtcaccggccccggcgccgaggctgttcagatcgttgcaaagaatacggtgacacttcaggtgcaggcgacaccgccacaaccaatcaaagttcctcagttcattccccctcctcgacttaccccccggccaaattttctgccccaagttcggcccaaaccggttgcacagaataatattccaattgcacccgctcccccccccatgctggccgccccgcaactcattcaaaggcctgtgatgctgaccaagtttactcccacaacgctgccgacctctcagaactcaatccaccccgtgcgggttgtgaatggccaaacagccacgattgccaagacgttccctatggcccagctcacctccatagttatagccaccccaggcactagactggccggcccacagacagttcagctctctaaacctagtctggagaagcagacagtgaagtcacatactgagactgacgagaagcaaactgaatctagaacaattacccctccggctgcgcccaaacccaaacgggaggaaaatcctcagaaactggcatttatggtgtctctcggtcttgtcactcatgaccacttggaggaaatccagtcaaagcgacaggagcggaaacgacgaacaaccgcgaacccagtgtattcaggtgccgtgtttgaacccgagaggaagaagagtgccgtgacttatctaaactctaccatgcacccaggaaccagaaagagaggtcgcccccctaaatacaacgctgttctgggattcggtgccctaacccccacctccccccagtccagtcacccagatagcccggagaacgaaaaaacagaaacaacctttacatttccagcccctgtgcaacctgtctcgctgccctccccaacgtcaacagacggcgatatccatgaggacttttgctccgtctgtagaaagagtggccaactcctgatgtgcgatacatgtagtcgggtgtaccacctcgactgcctggatccccctttaaagacgatccctaagggcatgtggatctgccccagatgccaagatcagatgctcaagaaagaggaggccattccatggccagggaccttagccattgtgcactcctacatcgcttacaaagctgctaaagaggaagaaaagcagaaactcctgaagtggagttctgatttgaaacaggaacgcgaacaattggagcagaaggtcaaacagctgtccaactctatcagcaaatgtatggaaatgaagaacactatcctggccagacagaaagagatgcactcttccttggagaaggtgaagcagctgatacggctaattcacgggatcgatctgagcaaacctgtggacagcgaagctactgtcggcgctatcagcaatgggcctgactgcaccccccctgctaacgccgcaacctctactcctgcaccctctccatcctctcaatcctgcacggccaattgcaaccagggagaggagaccaagtag

SEQ ID NO: 272111 - DNA, 7318 bp, Artificial Sequence
  derived and/or modified sequence
ggtgaatgggctggtggtgctcgctgctgctgctgagaggaggaggaggatgaagagttgggcttgtttgtctcctacagtttctctcctgctgctctgattcccccctcccgattccggcccggggcctgtgtgtgtccctcctggaggaggaggaggatccagttcctccccccaaccccctcctccccacccccccttgcctggggaagaggaggaaagaaacagcccagagagagagagagagagagagtgagtgagagagagaggagaggagaggaggaggaggaggagggagaagggaacaacctaccatcttaacacactaatatctaaaaagtgcgagaggcccagagcagcagcagaagcagcagcagcagctccagcttcttccctccctccccatgaagaagagttccctcctcctcctcctcctgcttctcctgctcagagttcctgcctccagctgccaggggggacagccagccagcagcaggaggggggctagagagctgaaggagagccagtttccccaaaattgctgcagtgagaagaggagtttgttactttaaacagaggctgaagaaactatagaattagcagagaaagtggagaaggtagaggatggagttgcagactctacaggaggctcttaaagtggaaattcaggttcaccagaaactggttgctcaaatgaagcaggatccacagaatgctgacttaaagaaacagcttcatgaactccaagccaaaatcacagctttgagtgagaaacagaaaagagtagttgaacagctacggaagaacctgatagtaaagcaagaacaaccggacaagttccaaatacagccattgccacaatctgaaaacaaactacaaacagcacagcagcaaccactacagcaactacaacaacagcagcagtaccaccaccaccacgcccagcagtcagctgcagcctctcccaacctgactgcttcacagaagactgtaactacagcttctatgattaccacaaagacactacctctcgtcttgaaagcagcaactgcgaccatgcctgcctctgtggtgggccagagacctaccattgctatggtgaccgccatcaacagtcagaaggctgtgctcagcactgatgtgcagaacacaccagtcaacctccagacgtctagtaaggtcactgggcctggggcagaggctgtccaaattgtggcaaaaaacacagtcactctgcaggttcaggcaacacctcctcagcccatcaaagtaccacagtttatcccccctcctagactcactccacgtccaaactttcttccacaggttcgacccaagcctgtggcccagaataacattcctattgccccagcaccacctcccatgctcgcagctcctcagcttatccagaggcccgtcatgctgaccaagttcacccccacaacccttcccacatcccagaattccatccaccccgtccgtgtcgtcaatgggcagactgcaaccatagccaaaacgttccccatggcccagctcaccagcattgtgatagctactccagggaccagactcgctggacctcaaactgtacagcttagcaagccaagtcttgaaaaacagacagttaaatctcacacagaaacagatgagaaacaaacagagagccgcaccatcaccccacctgctgcacccaaaccaaaacgggaggagaaccctcagaaacttgccttcatggtgtctctagggttggtaacacatgaccatctagaagaaatccaaagcaagaggcaagagcgaaaaagaagaacaacagcaaatccggtctacagtggagcagtctttgagccagagcgtaagaagagtgcagtgacatacctaaacagcacaatgcaccctgggacccggaagagaggtcgtcctccaaaatacaatgcagtgctggggtttggagcccttaccccaacatccccccaatccagtcatcctgactcccctgaaaatgaaaagacagagaccacattcactttccctgcacctgttcagcctgtgtccctgcccagccccacctccacagacggtgatattcatgaggatttttgcagcgtttgcagaaaaagtggccagttactgatgtgcgacacatgttcccgtgtatatcatttggactgcttagacccccctctgaaaacaattcccaagggcatgtggatctgtcccagatgtcaggaccagatgctgaagaaggaagaagcaattccatggcctggaactttagcaattgttcattcctatattgcctacaaagcagcaaaagaagaagagaaacagaagttacttaaatggagttcagatttaaaacaagaacgagaacaactagagcaaaaggtgaaacagctcagcaattccataagtaaatgcatggaaatgaagaacaccatcctggcccggcagaaggagatgcacagctccctggagaaggtaaaacagctgattcgcctcatccacggcatcgacctctccaaacctgtagactctgaggccactgtgggggccatctccaatggcccggactgcaccccccctgccaatgccgccacctccacgccggccccttccccctcctcccagagctgcacagcgaactgtaaccagggggaagagactaaataacagagcccctctaggagaagccacgggatcccggcggcaaggagaacagaacactgaagactctagaaaagcaaagccggatttctggaaagtgcagaattcttttggttctttggttccagagagagagaagatgcttgtgccaggtggcaccagagtttgccaattgatccttcttattctgtgtgtacatgcaaagattggaccatgttacatgaaatagtgccagctggaggttctttgccagcaccatgccaagtgaaataatatatttactctctctattatacaccagtgtgtgcctgcagcagcctccacagccacgatgggtttgtttctgttttcttgggtggggagcagggacgggcggagggaggagagcaggtttcagatccttacttgccgagccgtttgtttaggtagagaagacaagtccaaagagtgtgtgggctttcctgtttctaaactttcgctactataaaaccaaaaaaaggaattgagatttcaccaaccccagtgcccagaagagggaaggggagtggctggagggagcagggggtgggacagtgtatcaaataagcagtatttaatcacctctggcgggggcctcgtgcaaggggagactgacaccaagaacagccagtaggttcttctcccctgcactctgctccctgcgcggtaaccccaccactcctgaagcctgcccagtctccttccttccctgcttggtgagtcgcgcatctccgtggttatcccgctgtctcctctccaagaacaagcagagcccgggccactggcccttgcccaaggcagggaagaaggatgtgtgtgtccaggaaggaaaaaaaggtggatcagtgattttacttgaaaacaagctccatcccttttctatatttataagaagagaagatcttgagtgaagcagcacgcgacccaggtgtgtgtgaattgaatggagacgtttcttttctctttctttaatttttgtttttgttctttttttctttaaggaaagttttattttactgttcattttactttcttggtaacaaaaactaaaataaggaatagaaaagctgtttttcaggctgacagtccaattaagggtagccaagaccttgcatggtagagtaggaatcatagtgtcagtgaggtcccgtgagtctttgtgagtccttgtgtcatcgttcgggcactgtttttttatgcaagggcaaaaatctttgtatctggggaaaaaaaacttttttttaaattaaaaaggaaaataaaagatattgaggtcttcctagtgttacttaaattaagatcaaggtaagaaacattgtaaaaaaaaattacaaaagtgctatttgtttcctaaaaacagtgatttctattaaaaaggtgtcagaactggagaaaatgccgtgtagttataattttttagcacagaccctgctgatcacgatgacattttgccgtgtgtgtgtctctagactggtgggccagtctccttgaaggacagaggcggagctccccacccttctctctcctcagaaaagaccgtgctctcttcttggtgcagggatcttgtctcctgttgtgaagcccaaatggaagcgtggatggtatcagggccctacccgtggtcttctcagattctgctagagcaaaaggctggtgcctaaataagatcccttcctttggtgctgcttttggtctttcagccaccagcattatgagtgcctgggggacacctccgagggaactggccagcggagctctgtggtgcgcacgcaccctggccgtgacaggagggtgcgggagtacaggctggctgcatcagcccttggtgcttagaacagaggaggagtgacatgttttgagggtacgtctctgagacagagccccagcgtggccttcgctctgtcttgcctttggggagaggtctgaagctcccactcctttctctgcctgttggctccaggcaccagaaatttactccactccacccacccacaagcctcctgggtgaccctgggctagaattgctgcgcttgcctcggcttggccggttgtggcctctccttgagaaaaccagggttgtgaaagactcagaccattctctcatcttgccttgtcagaagtaaattgtgtcagatttgtgctctcgctggagacctttgccccttgcgtgcccctggccgatgggagggcggtggaggctctgtaccctggccctgctggagcatctcccccaagcccactccaggccctgggaatggccagagtctaggagaggtagaaacgatcctatcagcttctctcccacccaattaggcccagagagacaaagacagatctgaaagcaaatgcaacagagaagagacacttcttagagtaaaatgtgtctcatctctatcagccatcgcctttcatcttcccaggggcctcagaagaaggaattaagttaggctgaacaggcctcagagttaggccctggctgcttgattggctgagggggaaagagttcccttttctcattcagaaaccaaggtgctgtgtctagtcagggagccttggagatgcctggactagttggaggaatcgttggcagaggatcagagaccagcagcaggctgtctgccctgtctagagctcttcccctcaacttgtctgggcccatctgggggttgccacacaacacctaacttaccttttcctgaaagaagttgggaaaccatcatcactagaggcctttgctcagagaggagctgccttaggagtcttgggtcggaggacggggctaggaattgaccagggctttgcctgccgccctcagcagtgtcgggtacattctgacctcgcctgcagctgggctgtggattcttcctgacattcagatgtgagctgttttgggagtcagctagtatggagtacgagatgcaacccagcccccaaacctacattctgcactcaaattccaaaacactgctttactgtaaagaagaggcccctggcacccaatctccctgtccttcactgtcccctcagacctgggcggggaggggggggggcctgtgaccacctgagacatacgctcgtgacactgccccaccccagccacctccacttgcttcctcctccttccctccgctgctctttccccacggcccagaatttagctgctctgacagccacttttgagaccagctggctttgtagtcacttcagagagctggagcggctgcccactgggccctgactgggagtcccctgccagctcctgatcaggcgctgcgccctggtggcagtgatgactgggagtcccctgccagctcctgtccaggcgctgcatcctggtaacagtgaggccatgttgctgtcatctccacctctgcattcttgctgcctgtgggtcctttttctttcatggagcctgctgggtcttgtctcacctgtgctgagctcctctggggttttgatttcttccttccttatcaggccctttggggtaagcctgctggttgtacctgacatagggaggcagttaggggcagtccctggtggggccgccctggcagcctccagctggcaccatcgtgtgcctggtttccctgcaacacctgcctctctgtccctgctgctgcttggctcaggcccaacaggcagcgtgcatggaggtggttacacacagctgtttccgtgagggtgaccgtgtctgcagcacgcttccgtctccgcatgcacggctgcctctccagccacctctgatacttctctcttggggccatcagagcctcccttgggctgtcacctcccagctcacacacactcttcagtggtttcctctcttcattctcttatagggcgtggtccttcttatttatctaaagggctgaatttaggagactttttacccaggggcaaaaggctcttagggtaatgagatggatggtggcccaggtgcattttccagggcctgggttctccagatcccgtggcttctgttgagtggaggcaactttgctctgtgtgaacctcgcccctgtccctctgccgggcacccctggcaggaagcaggactcccatcctcaccctgacttagactgtcctctgagtcagctcctctccaagacaggagtgggcagccctgggcagtcttctggccccttgctaaagtgaggggcaggaagctggggctgccctccagaaagccggggtaggaactctgaaaaatacctcctctaaacggaagcagggctctccagttccacttggcgccccctcccacaaggcccttcctccctgaggaccccacccccctaccccttccccagcagcctttggaccctcacctctctccggtgtccgtgggtcctcagcccagggtgagctgcagtcaggcgggatgggacgggcaggccagaggtcagccagctcctagcagagaagagccagccagaccccaaccctgtctcttgtccatgccctttgtgatttcagtcttggtagacttgtatttggagttttgtgcttcaaagtttttgtttttgtttgtttggtttttgttttgagggggtggggggggatacagagcagctgatcaatttgtatttatttattttaacattttactaaataaagccaaataaagcctctc

SEQ ID NO: 272112 - DNA, 2046 bp, Artificial Sequence
  derived and/or modified sequence
atggagctccagaccctgcaagaggctctcaaggtagaaatccaagtccaccagaagctcgtggcacaaatgaagcaagacccccagaatgcagacctgaaaaagcagctgcacgaactgcaggccaaaattactgcgctgtcggagaagcaaaagagggttgttgagcagctgcgcaagaatttgatcgtgaagcaggagcagcctgacaagttccagatccagcctctgccacaatctgaaaacaaactgcagacggcgcagcagcagcccctgcaacagctgcagcagcagcagcaataccaccatcatcacgcccagcagagtgctgcagcttcccctaacctcacagcttctcaaaagacggttaccactgctagcatgatcactaccaaaactctgccgttggtattgaaagctgccactgcgacaatgccggctagcgtagttggccagaggcccacaattgccatggtgacagccatcaactcacagaaagccgtgctgtcaactgacgtgcagaacactcccgtcaacttgcaaacatccagtaaggtgaccgggcctggcgctgaggcagtccaaatcgtggccaagaacaccgtgacactgcaggtgcaagcaacacctccacagcccatcaaagtgcctcagtttattccgcctccgagactcactccgagacctaattttctgccccaggtgaggcccaaacctgtggcacagaataatatccccattgcacccgcaccacctcctatgctagccgctccccagttgatacaaaggcctgttatgcttaccaagtttactcccaccacgttgcctacaagccagaacagcattcatcccgtgcgggtggtgaatggccagaccgcaactatcgccaagacattccccatggcacaattaacctccatcgttattgccacgccaggaactcgacttgccggaccacaaaccgtacagttgagcaagccctccctcgaaaagcaaaccgtgaagagtcatacagagaccgatgaaaagcagactgagagccgaactattactccccctgctgcgccaaagcctaagagggaggagaatcctcaaaaattggcttttatggtctctctcgggctggtcacccacgaccaccttgaggagatccagtccaagcgccaggagcggaagcggaggacaaccgcgaatccagtgtattccggagcggtctttgaacccgaacgaaagaagtctgcggtcacctatctcaactccacaatgcaccctggcacaaggaagcggggacgaccacccaaatacaatgcggtgctgggctttggagcgctgaccccaacatcaccacagagcagtcaccctgacagtcccgagaatgaaaagacggagaccacctttaccttccctgctcctgtgcagcccgtcagccttccttctcccacgagtaccgacggcgatatccatgaagatttctgttcggtgtgcaggaagagtggccaactgctgatgtgtgatacgtgctctagggtgtaccacctggactgtttagacccccctctgaaaactattcccaagggcatgtggatatgcccgaggtgccaagaccagatgctcaagaaggaggaggctattccatggccaggaactctggccatcgttcactcatatatcgcttacaaggcagccaaagaagaggagaaacaaaagctgctcaagtggtcatctgatcttaaacaggagcgcgaacaactggagcagaaggtgaaacagctgtctaacagcatctctaagtgcatggagatgaaaaataccattctggcgaggcagaaagaaatgcattctagcctggagaaggtcaagcagctgattcgcctcatccacgggattgatctctcgaagccagtggactccgaggctacagtgggggctattagcaacggacctgactgtactccccctgctaacgcagcaacatccacaccggctccttcaccaagttcccagtcatgcacagcgaattgtaatcaaggcgaggaaacaaagtag

SEQ ID NO: 272113 - DNA, 2046 bp, Artificial Sequence
  derived and/or modified sequence
atggagctgcagaccctgcaggaggccctgaaggtggagatccaggtgcaccagaagctggtggcccagatgaagcaggacccccagaacgccgacctgaagaagcagctgcacgagctgcaggccaagatcaccgccctgagcgagaagcagaagagagtggtggagcagctgagaaagaacctgatcgtgaagcaggagcagcccgacaagttccagatccagcccctgccccagagcgagaacaagctgcagaccgcccagcagcagcccctgcagcagctgcagcagcagcagcagtaccaccaccaccacgcccagcagagcgccgccgccagccccaacctgaccgccagccagaagaccgtgaccaccgccagcatgatcaccaccaagaccctgcccctggtgctgaaggccgccaccgccaccatgcccgccagcgtggtgggccagagacccaccatcgccatggtgaccgccatcaacagccagaaggccgtgctgagcaccgacgtgcagaacacccccgtgaacctgcagaccagcagcaaggtgaccggccccggcgccgaggccgtgcagatcgtggccaagaacaccgtgaccctgcaggtgcaggccacccccccccagcccatcaaggtgccccagttcatccccccccccagactgacccccagacccaacttcctgccccaggtgagacccaagcccgtggcccagaacaacatccccatcgcccccgcccccccccccatgctggccgccccccagctgatccagagacccgtgatgctgaccaagttcacccccaccaccctgcccaccagccagaacagcatccaccccgtgagagtggtgaacggccagaccgccaccatcgccaagaccttccccatggcccagctgaccagcatcgtgatcgccacccccggcaccagactggccggcccccagaccgtgcagctgagcaagcccagcctggagaagcagaccgtgaagagccacaccgagaccgacgagaagcagaccgagagcagaaccatcaccccccccgccgcccccaagcccaagagagaggagaacccccagaagctggccttcatggtgagcctgggcctggtgacccacgaccacctggaggagatccagagcaagagacaggagagaaagagaagaaccaccgccaaccccgtgtacagcggcgccgtgttcgagcccgagagaaagaagagcgccgtgacctacctgaacagcaccatgcaccccggcaccagaaagagaggcagaccccccaagtacaacgccgtgctgggcttcggcgccctgacccccaccagcccccagagcagccaccccgacagccccgagaacgagaagaccgagaccaccttcaccttccccgcccccgtgcagcccgtgagcctgcccagccccaccagcaccgacggcgacatccacgaggacttctgcagcgtgtgcagaaagagcggccagctgctgatgtgcgacacctgcagcagagtgtaccacctggactgcctggacccccccctgaagaccatccccaagggcatgtggatctgccccagatgccaggaccagatgctgaagaaggaggaggccatcccctggcccggcaccctggccatcgtgcacagctacatcgcctacaaggccgccaaggaggaggagaagcagaagctgctgaagtggagcagcgacctgaagcaggagagagagcagctggagcagaaggtgaagcagctgagcaacagcatcagcaagtgcatggagatgaagaacaccatcctggccagacagaaggagatgcacagcagcctggagaaggtgaagcagctgatcagactgatccacggcatcgacctgagcaagcccgtggacagcgaggccaccgtgggcgccatcagcaacggccccgactgcaccccccccgccaacgccgccaccagcacccccgcccccagccccagcagccagagctgcaccgccaactgcaaccagggcgaggagaccaagtag

SEQ ID NO: 272114 - DNA, 132 bp, Artificial Sequence
  derived and/or modified sequence
taccggggcatgatgatctacgtgtccactggagcctggggctgggccggcagctgcttctggcagtggagcttctgccccccagcctgtgtgggctgcatcgaggagcggctgcctgtgcccagcagctag

SEQ ID NO: 272115 - protein, 1269 aa, Artificial Sequence
  derived and/or modified sequence
MKVVPEKNAVRILWGRERGARAMGAQRLLQELVEDKTRWMKWEGKRVELPDSPRSTFLLAFSPDRTLLASTHVNHNIYITEVKTGKCVHSLIGHRRTPWCVTFHPTISGLIASGCLDGEVRIWDLHGGSESWFTDSNNAIASLAFHPTAQLLLIATANEIHFWDWSRREPFAVVKTASEMERVRLVRFDPLGHYLLTAIVNPSNQQGDDEPEIPIDGTELSHYRQRALLQSQPVRRTPLLHNFLHMLSSRSSGIQVGEQSTVQDSATPSPPPPPPQPSTERPRTSAYIRLRQRVSYPTAECCQHLGILCLCSRCSGTRVPSLLPHQDSVPPASARATTPSFSFVQTEPFHPPEQASSTQQDQGLLNRPSAFSTVQSSTAGNTLRNLSLGPTRRSLGGPLSSHPSRYHREIAPGLTGSEWTRTVLSLNSRSEAESMPPPRTSASSVSLLSVLRQQEGGSQASVYTSATEGRGFPASGLATESDGGNGSSQNNSGSIRHELQCDLRRFFLEYDRLQELDQSLSGEAPQTQQAQEMLNNNIESERPGPSHQPTPHSSENNSNLSRGHLNRCRACHNLLTFNNDTLRWERTTPNYSSGEASSSWQVPSSFESVPSSGSQLPPLERTEGQTPSSSRLELSSSASPQEERTVGVAFNQETGHWERIYTQSSRSGTVSQEALHQDMPEESSEEDSLRRLSPAAYYAQRMIQYLSRRDSIRQRSMRYQQNRLRSSTSSSSSDNQGPSVEGTDLEFEDFEDNGDRSRHRAPRNARMSAPSLGRFVPRRFLLPEYLPYAGIFHERGQPGLATHSSVNRVLAGAVIGDGQSAVASNIANTTYRLQWWDFTKFDLPEISNASVNVLVQNCKIYNDASCDISADGQLLAAFIPSSQRGFPDEGILAVYSLAPHNLGEMLYTKRFGPNAISVSLSPMGRYVMVGLASRRILLHPSTEHMVAQVFRLQQAHGGETSMRRVFNVLYPMPADQRRHVSINSARWLPEPGLGLAYGTNKGDLVICRPEALNSGVEYYWDQLNETVFTVHSNSRSSERPGTSRATWRTDRDMGLMNAIGLQPRNPATSVTSQGTQTLALQLQNAETQTEREVPEPGTAASGPGEGEGSEYGASGEDALSRIQRLMAEGGMTAVVQREQSTTMASMGGFGNNIIVSHRIHRSSQTGTEPGAAHTSSPQPSTSRGLLPEAGQLAERGLSPRTASWDQPGTPGREPTQPTLPSSSPVPIPVSLPSAEGPTLHCELTNNNHLLDGGSSRGDAAGPRGEPRNR

SEQ ID NO: 272116 - DNA, 3810 bp, Artificial Sequence
  derived and/or modified sequence
atgaaggtcgtgccagagaaaaatgccgtcagaattctctggggccgggagcgaggggccagggctatgggcgcacaacgcctactgcaggagctggttgaagataaaactcgctggatgaaatgggaaggcaagagagtcgagttgcctgattccccgagaagtacttttctccttgccttctccccggatcgcactctgctagcatccacgcacgttaaccataatatctatataactgaagtgaaaaccggcaagtgtgttcactccctcatcggccacaggcggacaccttggtgcgtgaccttccaccccaccatttcaggcctgattgcttccgggtgtctggacggcgaggtacggatttgggatttgcatgggggatccgaatcttggtttacagattccaacaacgctatcgccagccttgcctttcatcctactgcccagttgctgctgatagcgactgctaatgaaattcacttctgggactggagtaggcgggaaccattcgccgtggtcaagaccgcttccgaaatggagagagtaaggctggttagatttgaccctctcggccattacctgctcaccgccatcgtgaacccaagtaatcagcagggggacgacgagccagagatcccaatagacggtaccgaactgagccactaccgacagcgggccttgctgcagagccaacccgtgagacgcacacccctgcttcacaactttctccatatgctgtcctctagaagttccggcatccaggtcggcgagcagtccacagtgcaggattctgccaccccctctccgccacctcccccgccgcagccatcgacagagcgcccccgcacaagtgcctacatacggttacggcagagagtaagctatcccactgccgaatgctgccaacacttgggcatcctgtgcctgtgcagcaggtgtagcggcacgcgcgtgccttcactgctgccccatcaggacagtgtgccccccgcatccgcccgcgccacaacccccagcttttcttttgtccagaccgaaccgttccatccacccgagcaagcatctagcacccagcaggatcagggactactgaaccgtccttcagcattctcgactgtgcagtcttcgacagcaggtaataccttacgcaaccttagtctgggacctacgaggcggtcgctgggaggccctctgagttctcatccatccagatatcaccgtgaaatcgcgccgggcctcacaggctcagagtggacgagaacagtcctcagcttaaacagtaggagcgaagccgagagcatgccaccgccaagaaccagcgcaagttcagtgagcctgctgtccgtgttgcgtcaacaggagggcggcagccaggcttcagtctacaccagcgctacagagggcaggggattccctgcgagtggtctggccaccgagtctgacgggggcaacggctcttctcagaacaactcagggtcgatacgacacgaactccaatgcgacctacgccgcttcttccttgagtatgacaggctgcaggaattagatcagagcctatccggagaagccccacaaacgcaacaggcgcaggagatgttgaacaacaacatcgagagcgaacggcctggaccctcccatcagcctaccccgcactcctcagagaataacagcaatctgagccggggacaccttaacaggtgcagggcctgtcataacctgttgacttttaataatgacactcttcgttgggagcgcacaacccccaattacagctcaggcgaggcctcctccagttggcaagtaccatcaagctttgagtccgtgcctagctccggcagccagctccctcccctggaaaggaccgaaggacagacacctagctcaagccgtctggagctgtcatcctcagcttccccccaggaggagaggactgtgggcgtagccttcaaccaggaaacaggccactgggagagaatttacacacagtcatcacggtctgggacagtctctcaggaagctctccaccaggatatgcccgaagagtcctctgaagaagattcattacgccgactttccccagccgcgtactacgctcagcgcatgatccagtatctctctagaagagacagtattagacagcgctctatgcggtatcagcaaaacaggctgaggagctccacatccagtagtagctccgataatcagggtccaagtgtggaggggacagacctcgaattcgaagactttgaagataatggtgacagatctaggcacagggcaccgcgtaacgcacggatgagcgcgccctcactgggcaggttcgttcctcgcagattcttgttgcctgagtatctcccttatgccggcatctttcacgaacggggccaaccagggcttgctactcacagttcagtcaaccgggtgctcgccggcgcggtgatcggcgatgggcaaagcgccgttgcttccaatatcgccaacacaacgtacagactccagtggtgggattttaccaagttcgatctcccagaaatttccaacgcatctgtcaacgtgttggtgcaaaattgcaaaatttacaatgatgcctcttgcgatatctctgccgacggacagctgctcgccgcattcattcccagctctcagagagggtttccagacgagggaattctcgccgtttatagcctggcccctcacaatctgggtgagatgttatacacgaaacggttcgggcccaacgctatctcggtcagcctgtctcctatgggccggtatgttatggtcgggttagccagccggaggatcctgcttcacccctcaactgagcacatggtggcacaggttttccgattgcagcaggcacatggaggcgagaccagcatgaggcgagtgtttaatgtactctatcccatgcccgcagatcaacggagacatgtgtcaatcaacagtgcccggtggttgccagagccgggcctcggattagcttatggaactaacaaaggcgacctggtcatttgtaggcccgaggctctgaattccggcgttgagtactactgggatcaactgaacgaaacggtgtttaccgtccactccaatagcaggagctcagagaggcccgggactagccgcgcaacttggcgaaccgaccgagatatggggctcatgaacgccatcggccttcagcccagaaatcccgccacatcagtgacctcacagggaacgcagacgctagcgctccagcttcaaaatgccgaaactcagacagagcgggaagttccagagcccggaaccgctgcgagcggaccaggcgagggagagggctctgagtatggcgcatccggagaggacgcattaagcagaatccagcgtctgatggccgaaggcggcatgactgctgttgtgcagcgcgagcagtctaccacaatggcttccatgggcgggtttggaaataatatcattgtatcccacagaatccatcgatcatcacaaaccggcacagagcctggggctgcacatacaagctctccgcagccctcaacttcgaggggcctgttaccagaggcgggccagctcgccgaaagaggtctgagcccccgaacggcgagctgggaccagcctggcactcctggtcgcgaacctacccaaccaacactgccaagctcaagtcccgttcccatccccgtgtcccttccctccgctgaggggccgactttgcattgtgaactcacaaacaataatcatttattagacggggggtcctctcggggggacgctgcagggcccagaggggagcccagaaaccggtag

SEQ ID NO: 272117 - DNA, 3810 bp, Artificial Sequence
  derived and/or modified sequence
atgaaggtcgtgcctgagaagaatgccgtgcgcatcctctgggggcgcgagagaggggccagagccatgggtgcgcagcgactactgcaggaactcgtggaggacaaaactaggtggatgaagtgggaaggaaaacgagtggagctgcctgacagtccgcgaagcaccttcctgcttgctttcagcccagatcgcacgctcctcgctagcacgcacgtaaaccataatatctacatcacggaggtcaagaccggtaaatgtgtacacagtctcattggccaccggagaactccatggtgtgtcaccttccaccccaccatttctggtctcatcgctagtggatgccttgacggggaggtgagaatctgggatcttcatgggggctcagagtcctggtttacagatagtaataatgctattgcatcgctggcattccacccaactgcgcagttattgttgattgcaacagctaacgagatacatttctgggactggtcccggcgggagccttttgctgttgtgaagacagcatccgaaatggagagggtgcgattggttcgatttgaccctctgggccattaccttctaactgccattgtcaacccctctaatcagcagggagacgatgagcctgagatccctatcgacggcaccgagttgtctcactatcgacaacgagccctccttcagtcccagcccgtgcgccgaacaccgttacttcataacttccttcatatgctgtcaagccgttcctctggtattcaggtgggcgagcagagcactgtacaggattctgcaaccccaagccctccgcctcctcccccgcagccatccactgaacgtccgaggacctccgcatatatcagactgcgtcagcgagtgtcctacccaaccgctgagtgttgtcagcatctcggaattctgtgtctctgttctcgctgcagcggtactcgagtccccagcctgcttcctcatcaggattcagtcccccctgcaagcgctcgtgctaccacacctagcttttccttcgttcaaacagagccattccacccacccgaacaggcctcctccacgcagcaggaccagggcctgctgaataggccgagcgctttttctaccgtgcagagctccactgctggcaatactctgcggaatttatcattaggccccacccgccggagtttaggaggacccctgagcagccatccgagtaggtatcacagagaaattgccccaggcttaactggaagtgagtggaccaggaccgtcctttccctgaacagccggagcgaggccgagtcgatgcctccaccgaggacgtccgcgtcttcggtgtccctactcagcgttttgaggcagcaagaggggggctctcaagcgagtgtgtacactagcgcgacagagggcaggggttttcctgccagtgggttggcaacggagagcgacggaggcaatggttccagccaaaacaatagtggctctattcgacacgaactgcagtgtgacttaagaagattctttctggaatatgaccggctccaggagctggatcagagtctcagtggtgaagcccctcagacgcagcaagctcaggagatgctgaacaacaacatagaatccgagcgaccaggaccatcccaccaacctacaccccactcatctgagaacaattctaatctgagcaggggccacctgaacagatgtagggcatgccataatctgctgaccttcaacaacgacactctgagatgggagcgcactaccccgaattactcaagcggagaggctagctcatcatggcaggtgcctagctcatttgagagtgtaccgagctcaggaagtcagctcccacccctggaacggaccgagggccagacccccagttctagcagactcgaattaagttcctctgccagcccacaggaggagagaacagtcggagtggccttcaaccaggagacagggcactgggagcgaatatacacccagagctcaaggagcggaacagtgtcccaagaagctctccaccaagacatgcctgaggaatctagcgaggaggactccctgcgccggctctcacctgccgcctattacgcccagcgaatgatacagtacctctctagacgcgattcaatacgtcagcgctccatgcggtatcaacagaataggctgcgaagctctaccagctcctcttcgtctgacaaccagggccccagtgtggaaggcacagatcttgagtttgaagattttgaggataatggggaccgcagccggcacagagcaccaagaaacgcccggatgtcagccccaagtctaggtcgtttcgtgcctcgcagatttctgctcccagagtaccttccatacgctggaatcttccatgaaagaggacaaccagggctagctacccactctagcgtgaacagggttctggccggcgcagtgatcggggacggtcaaagcgcggtcgcctccaatattgccaataccacctacaggctgcagtggtgggacttcactaagttcgatctgcccgaaatttcaaatgcaagcgtcaacgtactcgtacagaattgtaaaatttacaatgatgcctcatgtgacatatctgctgatggccagctgctggccgcatttatcccatcctctcaacgcggatttcccgacgaagggatcctagctgtgtatagcctcgccccacacaacctgggcgaaatgttgtacacaaaacggttcggaccaaatgcgattagtgtctctttgtctcccatgggcaggtatgtgatggtagggctggcctcacggaggattctgctgcacccttcaacagagcacatggtcgcccaagtgtttcgactgcagcaggcccacggtggcgagacttctatgcggcgagttttcaatgtgctttacccgatgcccgccgaccagagacgccacgtatcaatcaattcagcgcgttggctgccagaacctggactgggtctcgcctacggcaccaataaaggagatctggtcatatgccgaccagaagcgcttaattccggagtggagtattactgggaccagttgaatgaaacagtttttactgtgcacagcaatagccgatcttctgagaggccaggaacttcaagggcaacttggaggactgacagagacatgggcttaatgaatgctatcggcttacagccgcgcaacccagccaccagtgttacaagccagggaacacaaacacttgccctgcagctgcagaacgcagagacacagacagagagggaagtccctgagccagggacggcagcctcgggaccaggtgagggagaagggtcggagtacggcgcctcaggagaagacgctctttctcggatccaacgactcatggcggaaggagggatgaccgctgtggtgcagagagaacaatcaaccacaatggcttccatggggggttttggcaataatattatcgtgtcacatcggattcacagatcttcacagactggcaccgagccaggagcagcacacaccagcagtccacaaccctctaccagccgcgggctgcttcctgaggccgggcaattagctgagcgcggcctgtctccgcgtaccgccagttgggaccagcctggaactccaggtcgagagcccactcagcctactctccctagtagttcacccgtgcccattcccgtatccctgccctctgccgaaggacccacgcttcattgtgagctgacgaacaataaccatctgctggacggcgggagcagccgcggcgacgcggccgggccccggggagagccgcgcaatcgatag

SEQ ID NO: 272118 - DNA, 3810 bp, Artificial Sequence
  derived and/or modified sequence
atgaaggtggtgcctgagaagaatgctgtgcgcatcctgtggggccgggagcggggggcccgggccatgggcgcccagaggctgctgcaggagctggtggaggacaagacccgctggatgaagtgggagggcaagagggtggagctgcctgacagccccaggagcaccttcctgctggccttctccccagacaggaccctgctggccagcacccacgtgaaccacaacatctacatcacagaggtgaagacaggaaaatgtgtgcacagcctcatcggccacaggaggaccccctggtgtgtgaccttccaccccaccatcagcggcctgattgccagcggctgcctggatggagaggtgcgcatctgggacctgcacggcggcagcgagagctggttcacagacagcaacaatgccatcgccagcctggccttccaccccacagcccagctgctgctgattgccacagccaatgagatccacttctgggactggagcagaagagagccctttgctgtggtgaagacagccagcgagatggagcgggtgcggctggtgcgctttgaccccctgggccactacctgctgacagccatcgtgaaccccagcaaccagcagggagatgatgagcctgagatccccattgatggaacagagctgagccactaccggcagagggccctgctgcagagccagcctgtgcggaggacccccctgctgcacaacttcctgcacatgctgagcagccgcagcagcggcatccaggtgggggagcagagcacagtgcaggacagcgccacccccagccccccacctcctccaccccagcccagcacagagcggcccaggaccagcgcctacatccggctgcggcagagggtgtcctaccccacagctgagtgctgccagcacctgggcatcctgtgcctgtgcagccgctgcagcggcaccagggtgcccagcctgctgccccaccaggacagcgtgcccccagccagcgcccgggccaccacccccagcttctcctttgtgcagacagagcccttccaccccccagagcaggccagcagcacccagcaggaccagggcctgctgaaccggcccagcgccttcagcacagtgcagagcagcacagctggcaacaccctgaggaacctgagcctgggccccacccggcgcagcctgggcggccccctgagcagccaccccagccgctaccaccgggagatcgcccctggcctgactggaagtgagtggaccaggacagtgctgagcctgaacagccgctctgaggccgagagcatgcccccacccaggaccagcgccagctctgtgtccctgctgtctgtgctgcggcagcaggagggcggcagccaggcctctgtgtacaccagcgccacagagggccggggcttccctgccagcggcctggccacagaaagtgatggcggcaatggcagcagccagaacaacagcggcagcatcagacatgagctgcagtgtgacctgcggcgcttcttcctggagtatgaccggctgcaggagctggaccagagcctgtctggagaggccccccagacccagcaggcccaggagatgctgaacaacaacatcgagagcgagaggcctggccccagccaccagcccaccccccacagcagcgagaacaacagcaacctgagccggggccacctgaaccgctgccgggcctgccacaacctgctgaccttcaacaatgacaccctgcgctgggagaggaccacccccaactacagcagtggagaggccagcagctcctggcaggtgcccagcagctttgagagcgtgcccagcagcggcagccagctgccccccctggagaggacagagggccagacccccagcagcagccggctggagctgagcagcagcgccagcccccaggaggagaggacagtgggcgtggccttcaaccaggagaccggccactgggagcgcatctacacccagagcagccgctctggaacagtgtcccaggaggccctgcaccaggacatgcctgaggagagcagcgaggaggacagcctgcggcggctgagccctgctgcctactatgcccagaggatgatccagtacctgagccggcgggacagcatccggcagaggtccatgagataccagcagaaccggctgcggagcagcaccagcagcagcagcagtgacaaccagggccccagcgtggagggcacagacctggagtttgaggactttgaagataatggagacaggagccgccaccgggcccccagaaatgccaggatgtctgcccccagcctgggccgctttgtgccccggcgcttcctgctgcctgagtacctgccctatgccggcatcttccacgagcggggccagcccggcctggccacccacagctctgtgaacagagtgctggccggggctgtgattggagatggccagagcgctgtggccagcaacatcgccaacaccacctaccgcctgcagtggtgggacttcaccaagtttgacctgcctgagatcagcaatgcctctgtgaatgtgctggtgcagaactgcaagatctacaatgatgccagctgtgacatctctgcagatggccagctgctggccgccttcatccccagcagccagaggggcttcccagatgagggcatcctggccgtgtacagcctggccccccacaacctgggggagatgctgtacaccaagagatttggccccaatgccatctctgtgtccctgagccccatgggccgctacgtgatggtgggcctggccagccgccgcatcctgctgcaccccagcacagagcacatggtggcccaggtgttccggctgcagcaggcccacggcggggagacctccatgagaagagtcttcaacgtgctgtaccccatgcctgctgaccagaggagacatgtgtccatcaacagcgcccgctggctgcctgagcccggcctgggcctggcctacggcaccaacaagggggacctggtgatctgcaggcctgaggccctgaacagcggcgtggagtactactgggaccagctgaatgagaccgtcttcaccgtgcacagcaacagccgcagcagcgagcggcccggcaccagccgggccacctggaggacagaccgggacatgggcctgatgaatgccatcggcctgcagcccaggaacccagccacctctgtgaccagccagggcacccagaccctggccctgcagctgcagaatgctgagacccagacagagcgggaggtgcctgagcccggcacagctgccagcggccctggagagggggagggctctgaatatggagccagcggggaggatgccctgagccgcatccagaggctgatggccgagggcggcatgacagctgtggtgcagcgggagcagagcaccaccatggcctccatgggcggctttggaaacaacatcatcgtgagccaccgcatccacaggagcagccagacaggaacagagcctggagctgcccacaccagcagcccccagcccagcaccagccggggcctgctgcctgaggccggccagctggccgagcggggcctgagccccaggacagcctcctgggaccagcccggcaccccaggccgggagcccacccagcccaccctgcccagcagcagccctgtgcccatccctgtgtccctgcccagcgctgagggccccaccctgcactgtgagctgaccaacaacaaccacctgctggatggcggcagcagcagaggagatgctgctggccccagaggagagcccaggaacagatag

SEQ ID NO: 272119 - DNA, 3810 bp, Artificial Sequence
  derived and/or modified sequence
atgaaggtggtgcccgagaagaacgccgtgcggatcctgtggggccgcgaaaggggagcacgagcgatgggtgctcagagattactgcaggagttggtcgaagataagaccagatggatgaaatgggagggaaagagggtggagttgcctgattcaccgaggtccacgtttctcttagcattttctcctgatcgtaccctgttagcctctactcacgtcaatcacaatatttatatcacagaggtcaagacagggaaatgcgtgcattctctgataggccacagaagaaccccctggtgcgtgacatttcatcccactatatcagggttaattgcctcagggtgtctggatggcgaagttcggatatgggatctgcatggagggagcgagagttggttcacagattccaacaatgctatcgcaagcctggccttccaccccaccgctcagcttctgctgatcgccacggccaatgagattcacttctgggactggtcccggagagagccctttgcagtggtgaaaaccgcctctgagatggaacgggtcagactggtgcggtttgatcccctgggacattatctgctgactgccatagtgaacccatcgaaccaacagggagatgacgaaccggagatacccattgacggaaccgaactaagccattacaggcagcgtgccctgctgcagagtcagcctgttaggcgtacaccattattacacaatttcctgcacatgctgagcagcagatccagtggaatacaagttggcgaacagtccacggtccaggattctgcgaccccctccccaccgcccccgcctccgcagccaagtaccgagcgtcccagaacgtccgcgtacataagactgcgccaacgcgttagttatcctactgccgaatgctgtcagcacttgggcatcctttgcttatgttccaggtgcagcggtacccgagtaccttcgttgctgccgcaccaggattccgttcctcctgcttcagcccgcgcaacgactccgtctttctcttttgttcagaccgaaccctttcatccccccgagcaggctagttccacccagcaggaccagggtctcctcaatcgacctagtgcattttccactgtgcagtcatccaccgcaggaaacacgctgaggaatctgtctcttggtccaactcggcgaagtctaggtggccctctttctagccatccaagcagatatcaccgagaaatagctccgggcctgacgggttcagaatggacgagaacagtattgagcctgaatagccgctccgaagcagagagtatgccaccacctcgcaccagtgcatccagcgtgtccctgcttagtgtgctgagacagcaagagggcggaagtcaggcctccgtctacactagcgccaccgaggggcgaggattccctgcatccggcctcgccaccgagtccgacgggggcaatggttccagccagaacaatagtggaagcatccgccacgagctgcagtgcgatctgaggaggttctttttggaatatgatagactgcaggagttagaccagtccttgtcaggagaggccccccagacccagcaggcacaggagatgctgaataacaacatagaatcggaaagacctggaccatcccaccaacccacaccccactccagtgaaaacaactcgaatcttagtcgagggcacttaaacaggtgccgtgcctgccacaacctcctgacatttaacaatgacacgctccgatgggagcgcactacacctaactactcatcgggagaggccagctccagttggcaggtgcctagcagctttgagagtgtgccgtcgagcggatctcagctgccacctctggagcggacagagggccaaacgccgagctcttcccggttggaactctcaagctcagcgagcccccaagaagagagaactgtgggcgtcgcattcaaccaggagacgggccattgggaacggatctatacccagagctcaagatctggcactgtatctcaagaggccctgcatcaggacatgcccgaagaatcttccgaagaggattctctcagaaggttatctcctgcagcctactatgcccagagaatgatacagtaccttagccggagagattctatccggcagcgctccatgcggtatcaacagaaccgccttaggtcgtcaactagtagctcatcttcagacaatcaggggccatcagtagaagggacagaccttgagtttgaggatttcgaagacaacggtgatcggtcccgacaccgcgcgccccggaatgcgagaatgtccgcgcctagtctgggacgcttcgttccaagacggttcctgctgccagagtacctgccttatgcaggcatttttcacgaacgcggacagcctggactggctacgcactccagcgtaaaccgcgtcctagccggtgccgtcattggagatggtcagagcgcagttgccagtaatatagctaatactacgtatcgcctacagtggtgggattttactaagttcgacctgcctgaaatatccaatgcaagtgtgaatgtgctggtgcaaaattgtaaaatttacaatgacgcatcttgcgatatttctgctgatgggcagctcctcgccgcttttatccctagtagccaaagaggattccctgacgagggtatactggctgtctattcgctcgcgcctcacaacctgggtgagatgttatacacaaaacgctttggcccgaatgccatcagtgtcagccttagtccaatgggtaggtacgtcatggtcgggctggcatcaaggaggatcctcctccacccatcaacggagcacatggtcgcacaggttttccgactgcagcaagcgcatgggggggagaccagcatgagacgcgtgttcaacgtcctgtatcccatgcccgccgaccaacggcgtcatgtcagtatcaactcggctaggtggctccccgagccaggactgggactggcttacgggactaataagggggatctagttatttgcagacccgaagcacttaactccggggttgaatactactgggaccaactgaacgagaccgtgtttacagtgcattccaacagtcgttccagtgagcgtcctggaacgagccgcgccacatggcggactgatcgtgacatgggtctgatgaacgccattggcctgcagccacggaatcccgccacatcagtgacatctcaaggaactcagaccctggcactgcagctccaaaatgctgagacacagaccgagcgtgaggtgcctgaacctggcacagctgccagcgggcccggagaaggggaggggtcagagtatggcgcaagcggagaggacgccctgagtcgcatccaaaggctgatggccgagggtggaatgacagctgtggtgcagagggagcagtctactaccatggcctctatgggtggatttggaaataatatcatcgtctcccacagaatccataggagcagccaaacaggaactgaacctggggccgctcacacgtcatccccacaacccagcacctcccgtggcctactacctgaagcaggtcagctggctgagaggggcctgagtcctcggacggcaagttgggaccagccaggtacgcctggcagagagcctacacaaccgaccctgccaagcagctcgccggtgcctatacccgtctcactcccttcagcagagggacccacactgcactgcgaactgacaaacaataaccacctattggatgggggatccagccggggagatgcagccggcccccgaggcgagccgaggaaccgatag

SEQ ID NO: 272120 - DNA, 3810 bp, Artificial Sequence
  derived and/or modified sequence
atgaaggtggtgcccgagaagaacgccgtgcggatcctgtggggccgcgaaaggggtgcccgagctatgggcgctcagcgcctactgcaggagcttgtcgaggataagacccgttggatgaagtgggagggtaagagggtcgagctgcccgactcaccacgttcaacctttctgctcgcattttcgccagaccggacactgttggcctctacacacgttaaccacaacatttacataacagaagtgaagacaggaaaatgcgtgcattcacttatcggacatcgccgcacgccctggtgcgtcaccttccaccccacaatctctggactgatcgcatcagggtgtcttgatggcgaagtcagaatttgggatttgcacgggggctccgagtcctggttcactgacagtaataatgccatagcctctctggcattccaccccactgctcagctgctcctgatagcgacggctaacgagatccacttctgggactggagcaggcgagaaccatttgctgtggtgaagacagcctctgagatggagcgggtgagactcgttaggttcgatcccctgggtcactacctcctcaccgcaattgtaaatccttctaaccagcagggagacgacgagccagagatccccattgacgggactgaactcagccattaccgccagagagcgctacttcagagtcagcccgtcagacgtacccctctgctgcacaattttctgcatatgctgagctcacgctccagcggtatccaggtcggagagcagtctaccgttcaggacagcgcaaccccttccccaccccccccaccaccacagccttccaccgaacggccaagaaccagcgcttacattcggctcagacaacgcgtctcttatccgaccgcagaatgctgccagcatcttgggattttgtgtctctgcagccgttgttccggaacgcgcgtgccatctctgctgccacatcaggactccgttcccccagcttctgccagggccactaccccaagcttctcattcgtgcagacagagcccttccatccaccggagcaggcatcctccactcaacaagaccagggccttctcaaccgcccttctgcattttcaaccgtccagtcgtcaactgccgggaacactttaaggaacctgtcacttggtcccacccgcaggtctctgggaggacccctgtctagtcacccatcgcgttaccatcgcgagatcgctccaggtctgaccggttctgaatggactcgtacagtgctgagtctgaacagtaggagtgaagcagagagcatgccacctcctaggacttccgccagtagcgtgagcttgttaagtgtgctaaggcagcaggagggcgggtcccaggcatctgtttacacttccgccaccgagggtaggggcttccccgcctctggcctggccacagaaagtgatggaggaaatggcagcagtcagaataattccggctcaatccgccacgaactgcagtgcgatttgcgaagattcttcctggaatatgaccggctgcaggagctggaccagtccctgtcaggcgaagccccccagactcagcaggcgcaagagatgctaaacaacaacatcgagagtgaaagaccgggaccatcacaccagcctacaccgcactctagcgagaacaacagtaacctgtcccgggggcacttgaaccgctgcagggcctgccacaatctactcacttttaataacgataccttacgatgggaaagaacaacaccaaattactcctctggcgaggcaagcagttcttggcaggtgccgagtagttttgagtcggtgccttctagtggctcacaactcccccccctcgagaggacggaggggcagaccccctcctcctcccggctcgagctgagcagcagtgcatctccacaggaagagaggacagtgggggttgcttttaatcaggagaccggccattgggagcgtatctatacccagtcctccaggtcaggcacagtcagtcaggaagctttacaccaggacatgcctgaggagagcagtgaggaagactcccttcgcaggctgtcacccgcagcttactacgcccagaggatgattcagtacctttcccgccgcgattcgattcggcagcgctcaatgcgctaccagcaaaatcggttgcggtctagtaccagcagttcttcgtccgataaccagggcccatcagtcgaggggaccgatttagagtttgaagacttcgaggataacggagacaggagtcggcacagagctccacggaacgcaagaatgtctgccccttccctaggcaggttcgtgccccgaagatttctgttgccagagtacctcccttacgctggaattttccacgaacgagggcagcccgggctcgcaacccattctagtgtaaatcgagtgcttgccggggctgtcattggcgacggccagagtgccgtggcttccaatattgcgaataccacgtacagactgcagtggtgggactttacgaaattcgacttgcctgagatttccaacgcttcagtgaacgtgctcgttcagaattgcaagatttacaatgacgcctcctgcgatatctccgcagatggtcagttgctagctgcctttattccctctagccagagggggttcccggacgaggggatactggccgtctacagcctggcgccccacaatctgggggagatgttgtataccaaaagatttggtccaaacgccatcagcgtgtctctttccccaatgggacgctacgtcatggtcgggctggcctctcgtaggatactcctccacccttctacggaacatatggttgcccaggtgttccgcctccaacaggctcacggaggcgaaacatcaatgcgacgcgtgttcaatgtgctgtatcccatgccggctgaccaacgccgacacgtgtcaattaacagcgccaggtggctgcctgagcccggcttagggttagcctacggtaccaataaaggcgacctcgtcatctgtagacctgaagcactgaactcgggagtcgaatactactgggaccagctcaacgagactgtgtttaccgtgcacagcaattcgaggtcatcggagagacccggcacctctcgtgctacctggagaaccgatcgagacatgggattgatgaacgccattggtctccaaccaaggaatcccgccacaagcgtgacctcacagggcacccagactttggcactgcaactgcagaacgcagagactcagactgagcgcgaggtgcccgagccaggaacggctgcatccggtccaggcgagggagagggatccgagtacggcgccagcggcgaggatgccctgagtcgaattcagcggctcatggctgagggcggcatgactgccgtagtgcagcgagagcaatcaactactatggcttccatgggaggattcggcaataacataattgtttctcaccgaatccatcgcagttcccaaactggaactgaacctggggccgctcatacaagctctccccaaccctctacttcccgtggccttttgcctgaggcaggacagttggctgagcgaggattaagcccaaggacagcctcctgggatcagccgggcactcccgggcgagagcccacgcagccgacactccctagtagctcaccagttcccatacccgtgagtcttccctctgctgaaggccctacattgcactgcgagttaaccaacaacaaccatctcttggacggtggctcctctaggggcgatgctgctggacccaggggagagcctagaaacaggtag

SEQ ID NO: 272121 - DNA, 3810 bp, Artificial Sequence
  derived and/or modified sequence
atgaaggttgtgccagagaagaatgccgtaagaattctttgggggagggagcggggagctcgggctatgggggctcagaggctccttcaagagctggtggaggataaaacaagatggatgaagtgggagggcaagcgtgtagaactcccggacagccctcgctcaacatttttgctggcattctcacccgatcgcacgctgcttgcaagcacccatgtcaatcataacatttacatcaccgaagttaaaacaggtaaatgcgtgcatagcctcataggccatcgacgaacaccttggtgcgtgaccttccatcctactatcagcggcctcattgcatctggttgcttggacggagaggtgcgtatctgggatctgcatggcggttcagagtcttggttcacggattctaataatgcaatcgcaagcctcgccttccaccctacagcccagctgctgctcattgcaacagccaacgagattcacttctgggactggagcagaagagagccctttgccgttgttaagactgcaagcgagatggaaagggtgaggttggttcgtttcgacccccttggccactacttgcttaccgctatcgtcaacccttccaatcagcagggtgacgacgagcctgaaatccccatcgacggtactgagttaagccactatcgtcaacgagctctcctccaatctcagccagtgaggagaacacccttgctgcataactttctgcacatgctcagcagccgcagctctggcatacaagtaggggagcagagcaccgttcaagactccgctacgccatctccccctcctccccctccccaaccgtccacggagcgaccacgaacgtccgcgtacatccggctcaggcaacgggtctcatatcccaccgctgagtgttgccaacacttgggcattctatgcctgtgctcgcggtgtagcggtacgcgggttccctctctgttgccgcatcaggactcggtgcctcctgcctctgcccgagccaccacgccttctttttcttttgtgcagaccgagccattccacccccctgaacaggcctcctctactcaacaggaccagggattacttaataggccatcagcttttagtacagtgcaatcgtccaccgccggtaatacccttcgtaatttaagccttggacccactcggagatctcttggcggaccgctgagctcacacccttcccggtaccaccgggaaatcgcacctggcctgacagggtctgagtggactagaacagtgctgtccctaaattcccgctccgaggccgaaagtatgcctccaccccgtacttccgcttctagcgtgagccttctaagcgttctcagacagcaggaaggagggagtcaggcatctgtgtatacaagtgcaacggagggacgaggatttcccgctagtggtctcgcaactgagtccgatggtggcaacggctccagccagaacaattcaggttccatcagacatgagctacagtgtgatctccggagattcttcctagaatatgataggctgcaggaactggatcagagtctctccggtgaagcaccccagacccagcaggcacaggagatgctgaacaacaacatcgaatctgaacggcctggaccctcacaccagcctactccacattctagcgaaaacaattcgaatctttcaaggggacatctgaatcgctgtagggcttgccataatttattgactttcaataacgataccctgcgctgggagagaaccaccccaaattactcaagtggcgaggcaagctcatcttggcaggtgccttcatctttcgagtcagtgccttcatccggatctcagctgccaccactcgagcgcactgagggtcaaacacctagttcttccagacttgagttgtcctcctccgccagtccccaggaagagcgaacggtgggcgtggccttcaaccaggagacaggacactgggaacggatctacacacagagcagcagatcagggactgtgtctcaggaggccctgcatcaggacatgccagaagagagctccgaggaggactccctgagaagactttcacccgctgcctactatgcacagagaatgatccagtatctgtctcgcagggatagcattcgacagagaagcatgcggtatcagcagaatagactgagatcatcaaccagctcctccagctccgacaaccaaggcccaagcgtcgaggggaccgatctcgagtttgaggacttcgaggacaacggcgatagatctcgccaccgggctccccgaaacgcgcgaatgtcagctccctctctggggcgatttgtccccagaaggttcctgctcccagagtacctgccatacgccggaatcttccacgaacgcggacagcctgggttggccacacactccagcgtcaaccgggtgctcgctggtgccgtgatcggcgatgggcagagcgcagtggcaagcaacatcgcaaataccacttaccgcttacaatggtgggactttaccaaattcgacctgcccgagattagtaatgcttcagtcaatgttctagtgcagaactgtaagatttacaatgatgcctcctgcgacatctccgcggacggccagctcctggccgctttcattccttcttctcagcgcggatttcctgatgaaggcatactggctgtatacagcctggctcctcataaccttggcgagatgctgtatactaagagattcggccctaacgcaatctcagtaagcctgagccccatgggtcgctacgtgatggtgggcttggctagtcgcagaatcctgctgcatccctccaccgaacatatggtcgcgcaggtgtttagactgcagcaggcacatggcggtgaaacctccatgcgtcgcgtctttaatgtcttgtaccctatgcccgcagatcagcgcagacatgtaagcattaactctgcaaggtggcttccagaacccggactgggactagcttacggcaccaacaagggcgacctcgtgatatgtagacccgaggctcttaatagcggcgtggaatattattgggatcagctcaacgagaccgtttttaccgtgcacagtaattctcgtagctccgagagaccagggacaagcagggcaacgtggcgaaccgacagagacatgggacttatgaacgccatcggcctccagcccaggaatccggcaacatcagtgacttcacagggtacacaaactttggcccttcagctacagaatgctgagacccaaaccgagcgcgaggtccccgagccagggactgcggcaagcgggccaggagagggggagggcagcgagtatggcgcttctggggaagatgcactcagtcggattcagaggttaatggctgaggggggtatgacggctgtggtgcagagagagcagtctaccacaatggcctcaatgggaggcttcggtaacaatatcatcgtctcccaccggattcacaggtcatctcaaaccggcaccgagcccggtgccgctcatacctcctctccacagccctcaacctctcgagggctactccctgaggccggacaactggccgagcgcggtctaagtccccgtactgcctcttgggaccaacccggaacccctggacgagagccgactcagccaactctgccttcctccagcccagtacccatccctgtgagcctgccctccgccgagggtcccaccctgcattgtgagttgaccaacaataatcaccttctggacggtggctcaagcagaggggatgccgctgggcctcggggagaaccgagaaatcgatag

SEQ ID NO: 272122 - DNA, 3810 bp, Artificial Sequence
  derived and/or modified sequence
atgaaggtggtgcccgaaaaaaacgcagtaagaatcttgtggggccgtgagcgaggtgctcgggctatgggagcccagcggctcctccaagagctggttgaagataagactaggtggatgaagtgggaaggcaagcgcgtcgaattacccgattctccaagatctaccttcctgttggccttcagccccgaccgtacgttgttggctagtacccatgtcaaccacaatatctatatcactgaagtcaagacaggcaagtgtgttcactctctgattgggcacaggaggacaccatggtgtgtgacattccatcctactattagtggactgattgccagcggttgtttagacggggaagtgcgcatatgggatctccacggtgggtccgagtcgtggttcaccgattccaacaatgctattgcatccctcgctttccacccaaccgcccaactcttgctgatcgctactgccaacgaaattcatttttgggactggtctaggcgggagccctttgcagtggtaaaaactgcgagcgaaatggaaagagtacgcctggttcggtttgatcctttaggacactatttactaaccgccatagtcaatccctctaatcaacagggtgatgatgaacctgagatccccatcgacggaaccgagctgtcacactaccgtcagagagccctgttgcagtctcagcctgtgcgcagaacacccctccttcacaatttcctgcatatgttatctagccgctcatccggaatccaagtgggggagcagtccacagtccaagacagtgccaccccttctcctcccccaccaccaccgcagccctccacagaacgaccccgaacttccgcatatattaggttgcgacagcgtgtgtcatatcccactgccgagtgctgtcaacacctaggcatcctgtgtctgtgttctcggtgtagcggaaccagggtacccagcctgcttcctcaccaggatagcgttcccccagccagcgccagagccacgaccccttccttttctttcgtgcaaacagagccgttccaccccccagaacaagcgtcttccactcagcaggaccagggactgcttaatcgtccatcagcttttagcacggtacagtccagcacagcaggcaacacactgcgcaacctttctctcggacccactagaagaagtctgggaggccctctgagctctcatccaagccgttaccaccgcgagattgctccgggactgaccgggagcgaatggacccggacggtgttgtcgctgaatagtaggagtgaagccgagtccatgccgcctccacgaacctctgcaagcagcgtgtcactactgtctgtgctgaggcaacaggaaggcggatctcaagcctctgtgtatacttctgccactgagggacgtggtttccccgcaagtggtcttgccactgagtccgacggcggaaacggcagctcccagaacaatagcggatctattcggcacgaactgcagtgtgacttacgcagattcttcctggagtacgaccgactacaggagctcgaccagagtctgagcggcgaagctccacagactcagcaggcacaagaaatgctgaataacaatatcgaatctgagcggcctggcccatcacatcagccgacccctcactccagcgagaataactccaacctgtcaagaggccatctgaaccgctgccgcgcttgccacaacctgttgaccttcaacaacgatacactgcggtgggaaaggaccactcctaattactctagcggagaggcctctagctcctggcaagtgccctcttcatttgagtctgttccaagcagcgggagccagctgcccccactggagcgaacagaaggtcaaactccctcgtcgagcagactggagctctcgtcttcagcctcccctcaggaggaacggacagtcggtgtggccttcaatcaggagaccgggcactgggagcgaatatatactcagtcctcgcgctctgggacggtgtcacaggaggccctccatcaagatatgcctgaggagagcagcgaagaggacagcctaaggaggctgagccctgcagcgtactatgcacagcggatgatccagtatctctctagacgggacagcatacgacaacggtccatgaggtatcagcagaaccggcttcggtcctccacctcatcaagctcaagtgataaccaggggccaagcgtggaggggacagacttggagtttgaagactttgaagacaacggcgataggagccgccaccgggcaccacggaacgcacgcatgagcgccccttcattggggcgttttgtgcccagacgttttttgctgccggagtacctgccatacgccggaatttttcatgagcgcggacaacccggactcgctacacactctagcgtgaatagagtcctggcaggggctgtgattggggatggacagtccgccgttgctagcaacattgccaacaccacatatcggctccagtggtgggacttcactaagttcgacctccccgagatttcgaacgcctcagtgaacgtcctggtgcagaactgcaagatctacaacgacgcctcatgtgacatcagtgcagacggccagcttctggccgctttcatcccgtcgagccagcggggattccccgatgagggaatcctagccgtgtatagcctcgccccacataatctcggggaaatgctctatactaagcgctttgggccaaatgccatcagcgtctctctgagccccatgggcagatatgttatggtcggcctagcctctcgtcgaatcctcctgcacccatctacggagcatatggttgcccaggtctttcgcctgcaacaagcccatggcggagagacctccatgcggagggtcttcaacgtgctgtaccccatgcccgctgatcagcgcaggcacgtgtccattaactctgcgagatggttgccggaacccggactgggcttggcatatggaacaaacaaaggggacctggtaatctgccggcctgaggctctgaactccggcgtcgaatactactgggaccaactgaatgaaacagtgtttacagttcacagtaattcccgctccagtgaacggccagggaccagtagggctacctggagaacagaccgggatatgggactgatgaatgcaatcggtctgcagccacggaatcccgctacctctgtcacatcgcaggggacacagaccctcgcactgcagttacaaaacgcagaaactcagacagaacgcgaagttccagagccaggaaccgctgcaagcggcccaggcgaaggtgagggcagtgagtacggagcatcaggggaagacgccctgtctcggatacaacgtctgatggcggagggtggcatgactgctgtggttcagagggagcaaagtactactatggccagtatgggagggtttggtaataatatcattgtttctcaccggatccataggtcaagccagacaggtacggaacccggagccgcacacacctccagtccacaaccctcaacctctcggggtctactgcccgaggcgggacagcttgcagaacgcggactgtcgcctcggactgctagttgggatcagccaggtacccccggtagggagcctacccagcctacattaccttcttcaagccctgtccccatacccgtgtcacttcctagcgccgagggacctacattgcactgcgagttaacaaataataaccatttgctcgacgggggatcttctcgcggagacgctgccggaccgcgtggagagccaagaaacaggtag

SEQ ID NO: 272123 - DNA, 5206 bp, Artificial Sequence
  derived and/or modified sequence
aggggattaatgaagagccaccagactatctttatggagaatctagattgggaagttaagctaagaatgtgcatttttgaaaaagtttttatggtagaagagaatgtatatcagaggaaagaatgtagagaagaaagcaacattgtccactgggaattgataagttctgcgtagaatttagagttataaggactatctcattggctcctaatgaatgctaaataacaaatggaaattgctatttccatgaggacaacttacaaggacctgtatggcctcattttagctgcttcagtgtgttggagctgttacttgctccttcatttcctgggcctggtgtgacagtggctactgagcgccatgaaggttgtcccagaaaagaatgctgtccggatactctgggggcgagaacggggtgctcgggccatgggagctcagcggcttctgcaggagctggtagaagataaaacccggtggatgaaatgggagggcaagagagtagaactgccggatagtccacgctctaccttcttattggccttcagcccagacaggactctcttagcctccacccatgtgaaccataatatctatattacggaggtgaagactggcaagtgtgttcattccctgattggacaccgccgtactccatggtgtgtcacttttcatcccaccatctcaggccttattgcttctggctgcctagatggggaggttaggatttgggatttacacggtggcagtgaaagctggttcacagatagcaacaatgccattgcctccctggctttccaccctacggctcagctcctgctgattgccactgccaatgagatccacttctgggactggagtcgacgggaaccctttgctgtggtgaagacagctagtgagatggaacgggtccgtctggtgagatttgatccacttggacactacttactcacagcaattgttaacccctctaatcaacagggtgatgacgaaccagagatccccatagatggaacagaattatcccactaccgtcagcgtgccctcctgcaatcacagccagttcgccggacgcctctcctccacaatttcctgcacatgctgtcctcccgctcttctggcatccaggtgggagagcaaagcacagtgcaagattctgctaccccctcacccccaccgcctccccctcagccctccacggagcgccccaggacttccgcttacatcaggctccgacagcgggtcagttaccccacagctgagtgctgccagcaccttgggatcctgtgcctttgcagccgctgctctggcactcgagttccttccctcttgccacaccaggacagtgtcccccctgcttctgccagagctactaccccttccttttcttttgtacagaccgagcccttccatcccccggagcaggcctcgtcaacgcagcaggaccagggcctcctgaaccggccgtctgccttcagtacagtccagagcagcactgccggcaacacgctccgcaacctcagtctgggtcctacccgccgctctttgggagggcctctgtctagccacccttctaggtatcaccgagaaatagctcctgggttgacaggatctgagtggacccggacagtactcagtctgaactcccgctctgaggcggaatccatgcccccgcccagaaccagtgcctcttcggtgagtttgctgtctgtgctgagacagcaggaaggtggctctcaggcatctgtgtacacttcagccacagaagggaggggttttccggcatcagggttggcaactgagtcagatggagggaatggctccagccaaaacaactcgggcagcattcgccatgagcttcagtgtgacctgagacgcttctttctggagtatgaccggcttcaggagctggatcagagcctgagtggggaagctccccagacccaacaggcccaggaaatgctcaacaataacattgaatctgagaggccaggcccttcccaccagcccaccccacacagcagtgagaacaactccaacctgtcccgtggccacctgaatcgctgtcgtgcttgccacaatctcctgaccttcaacaacgataccctgcgctgggaaagaaccacacctaactactcctctggcgaggctagttcctcttggcaggtccccagctcctttgagagtgtgccatcaagtggcagccagttgccacctctcgagcggactgagggccaaacgcccagctccagcaggctggagttgagcagctctgctagtccgcaggaggagaggactgtgggggtggcctttaaccaggagacaggccactgggaaagaatttacacccagtccagcagatctggaactgtgtcacaggaggccttacatcaggatatgcctgaggagagctctgaggaggattcactcaggagattatctcctgctgcatactacgcccagaggatgatccagtatctctcacggagagacagtattcgccagcgctccatgcgctaccaacagaaccgtctccgttcttccacctcctcctcttcctcagacaaccagggtccatcagtagagggaaccgacttggaatttgaggactttgaggacaatggtgacagatccaggcaccgagctccacgcaatgcccggatgtctgcaccttcgcttggacgctttgtcccaaggcgtttcttgctgcctgagtacttgccttatgctgggatttttcatgaacgtggacagcctggcttggctactcactcttctgttaacagggtcctggcaggggcagtgatcggtgatggacagtctgctgtggccagtaacattgccaatactacctaccggctccagtggtgggacttcactaagtttgacctccctgaaatcagtaatgcttccgtgaatgtgctggtgcagaactgcaagatctacaatgatgccagctgtgacatttctgcagatggccagctcctggcagctttcatccccagcagccagaggggctttcctgatgaaggcatcctggcagtgtactccctggccccccataacctgggcgaaatgctctacaccaagcgatttggtcccaatgccatttcggtgagcctgtccccaatgggcagatatgtaatggtgggcttggcctcacgaaggatcctgctgcacccctccacagagcacatggtggcccaggtcttcaggctgcaacaggcccatggtggagagacctccatgaggagagttttcaacgtcctttatcccatgcctgccgaccagcggagacatgtcagtatcaactctgcccgttggctgcctgagccagggcttggcttggcctatggtactaacaaaggagacctggtgatctgccgaccagaggccttaaactctggtgttgagtactactgggaccagctgaacgagacggtcttcactgtccattccaacagcaggagcagcgagcggcctggaaccagcagagccacatggaggacagacagagacatggggctgatgaatgccattgggcttcagccccggaaccctgccacctcagtgacatctcagggcacccagactctggcccttcagctgcagaatgccgaaacacagactgagagggaggtgccggagccagggacagccgcctcaggtcctggtgaaggtgagggttcagagtatggtgccagtggagaagatgcgctcagcaggatccagaggctgatggcggagggcggcatgacagccgtggtgcagcgggagcagagcaccaccatggcctccatgggcggcttcggcaacaacatcatcgtcagccaccgcattcaccgcagctctcagacgggcactgaacctggtgccgcccacacctcctcaccccagccctccacctctcggggactgctcccagaggccgggcaactggcagagcgaggcctaagcccccggacagcttcctgggaccagcctggtacccctgggcgggagccaacccagccaaccctgccctcttcctcccctgtccccattcctgtttcccttcccagcgctgagggaccaaccctccactgcgagttgaccaataacaaccaccttctggatggtggcagcagcaggggggacgctgcaggccctaggggagaaccacggaacaggtagagacaaacgttgcactggtgcctcccctcgaaccgccaagcagaaaccggacctcacagctgactgggaactggacatgtggaagagctgctggctgcatcagggaacaggaggaggaagagggtcagggtggagaggaagatcagtcagtgggcacaagacagtcaaatgggcaaggcctgcctcggggaactagaaccttccaggatctggagcccgggagagccacactgtgggcttaatgtgaatagaggaacaagtgggtatctctgccaggcaccccactttctcctagtaacatgggctcaggggactcagccctggacagagagcctccagagagtgaacagtcttccagatctgggccaatcatcctggacagaggcccgcgaggcagctttgccctgtccacctgttgggtgggcagagccaccaggaacccagacaccacctccaactctgagccttccagagcttcagcctctcttcgtcgtcttaccccactgaaaccaacagggatcgggccaggctcccagattcttgaggacagggacttcggcatttactaatgggggactactgtggggtaagggggcgcctgcttgcctgatacaggatggggtcaagggacagtgggcaggtcctcactcaggagtggggggtgtaggctggccagcccccagggcttgtccaccagtcttctccccgcaaggccctcagagcagcgcctgtgggtgtcagtattacctgagcctaggccaaagctagcccaaggctggggaaggggaggagactccaggtcagaatgtgaggtctcagtctgtgatttaaggtgttgcatgtggactcttaactgtacgtgtagtttctagtggagaaatcaaggctctgatcattttgtttttagtatgaaaatgtgatttcctttctgtttgtaactcatcatagaaacattgtggtgggaggagaggggatagtctacagctaatgagggaaacaccaaagatcacatcattaaaatgatgacatgcccctc

SEQ ID NO: 272124 - DNA, 4102 bp, Artificial Sequence
  derived and/or modified sequence
attcggtgatcttttgcgccgtcttcttgcttgatgtctcctgagcggcggcggcgccgggtcgagggctgagttgtccgcgaggccccgcgctcaagccgccttctcctgccggtcggtagaacggaccccttcctttattcctgtctcctctttctttttccctgtggctcagcccgttcgctggactgcaaaccgagctcccgtctgccttgcagctgcttcagtgtgttggagctgttacttgctccttcatttcctgggcctggtgtgacagtggctactgagcgccatgaaggttgtcccagaaaagaatgctgtccggatactctgggggcgagaacggggtgctcgggccatgggagctcagcggcttctgcaggagctggtagaagataaaacccggtggatgaaatgggagggcaagagagtagaactgccggatagtccacgctctaccttcttattggccttcagcccagacaggactctcttagcctccacccatgtgaaccataatatctatattacggaggtgaagactggcaagtgtgttcattccctgattggacaccgccgtactccatggtgtgtcacttttcatcccaccatctcaggccttattgcttctggctgcctagatggggaggttaggatttgggatttacacggtggcagtgaaagctggttcacagatagcaacaatgccattgcctccctggctttccaccctacggctcagctcctgctgattgccactgccaatgagatccacttctgggactggagtcgacgggaaccctttgctgtggtgaagacagctagtgagatggaacgggtccgtctggtgagatttgatccacttggacactacttactcacagcaattgttaacccctctaatcaacagggtgatgacgaaccagagatccccatagatggaacagaattatcccactaccgtcagcgtgccctcctgcaatcacagccagttcgccggacgcctctcctccacaatttcctgcacatgctgtcctcccgctcttctggcatccaggtgggagagcaaagcacagtgcaagattctgctaccccctcacccccaccgcctccccctcagccctccacggagcgccccaggacttccgcttacatcaggctccgacagcgggtcagttaccccacagctgagtgctgccagcaccttgggatcctgtgcctttgcagccgctgctctggcactcgagttccttccctcttgccacaccaggacagtgtcccccctgcttctgccagagctactaccccttccttttcttttgtacagaccgagcccttccatcccccggagcaggcctcgtcaacgcagcaggaccagggcctcctgaaccggccgtctgccttcagtacagtccagagcagcactgccggcaacacgctccgcaacctcagtctgggtcctacccgccgctctttgggagggcctctgtctagccacccttctaggtatcaccgagaaatagctcctgggttgacaggatctgagtggacccggacagtactcagtctgaactcccgctctgaggcggaatccatgcccccgcccagaaccagtgcctcttcggtgagtttgctgtctgtgctgagacagcaggaaggtggctctcaggcatctgtgtacacttcagccacagaagggaggggttttccggcatcagggttggcaactgagtcagatggagggaatggctccagccaaaacaactcgggcagcattcgccatgagcttcagtgtgacctgagacgcttctttctggagtatgaccggcttcaggagctggatcagagcctgagtggggaagctccccagacccaacaggcccaggaaatgctcaacaataacattgaatctgagaggccaggcccttcccaccagcccaccccacacagcagtgagaacaactccaacctgtcccgtggccacctgaatcgctgtcgtgcttgccacaatctcctgaccttcaacaacgataccctgcgctgggaaagaaccacacctaactactcctctggcgaggctagttcctcttggcaggtccccagctcctttgagagtgtgccatcaagtggcagccagttgccacctctcgagcggactgagggccaaacgcccagctccagcaggctggagttgagcagctctgctagtccgcaggaggagaggactgtgggggtggcctttaaccaggagacaggccactgggaaagaatttacacccagtccagcagatctggaactgtgtcacaggaggccttacatcaggatatgcctgaggagagctctgaggaggattcactcaggagattatctcctgctgcatactacgcccagaggatgatccagtatctctcacggagagacagtattcgccagcgctccatgcgctaccaacagaaccgtctccgttcttccacctcctcctcttcctcagacaaccagggtccatcagtagagggaaccgacttggaatttgaggactttgaggacaatggtgacagatccaggcaccgagctccacgcaatgcccggatgtctgcaccttcgcttggacgctttgtcccaaggcgtttcttgctgcctgagtacttgccttatgctgggatttttcatgaacgtggacagcctggcttggctactcactcttctgttaacagggtcctggcaggggcagtgatcggtgatggacagtctgctgtggccagtaacattgccaatactacctaccggctccagtggtgggacttcactaagtttgacctccctgaaatcagtaatgcttccgtgaatgtgctggtgcagaactgcaagatctacaatgatgccagctgtgacatttctgcagatggccagctcctggcagctttcatccccagcagccagaggggctttcctgatgaaggcatcctggcagtgtactccctggccccccataacctgggcgaaatgctctacaccaagcgatttggtcccaatgccatttcggtgagcctgtccccaatgggcagatatgtaatggtgggcttggcctcacgaaggatcctgctgcacccctccacagagcacatggtggcccaggtcttcaggctgcaacaggcccatggtggagagacctccatgaggagagttttcaacgtcctttatcccatgcctgccgaccagcggagacatgtcagtatcaactctgcccgttggctgcctgagccagggcttggcttggcctatggtactaacaaaggagacctggtgatctgccgaccagaggccttaaactctggtgttgagtactactgggaccagctgaacgagacggtcttcactgtccattccaacagcaggagcagcgagcggcctggaaccagcagagccacatggaggacagacagagacatggggctgatgaatgccattgggcttcagccccggaaccctgccacctcagtgacatctcagggcacccagactctggcccttcagctgcagaatgccgaaacacagactgagagggaggtgccggagccagggacagccgcctcaggtcctggtgaaggtgagggttcagagtatggtgccagtggagaagatgcgctcagcaggatccagaggctgatggcggagggcggcatgacagccgtggtgcagcgggagcagagcaccaccatggcctccatgggcggcttcggcaacaacatcatcgtcagccaccgcattcaccgcagctctcagacgggcactgaacctggtgccgcccacacctcctcaccccagccctccacctctcggggactgctcccagaggccgggcaactggcagagcgaggcctaagcccccggacagcttcctgggaccagcctggtacccctgggcgggagccaacccagccaaccctgccctcttcctcccctgtccccattcctgtttcccttcccagcgctgagggaccaaccctccactgcgagttgaccaataacaaccaccttctggatggtggcagcagcaggggggacgctgcaggccctaggggagaaccacggaacaggtag

SEQ ID NO: 272125 - DNA, 3810 bp, Artificial Sequence
  derived and/or modified sequence
atgaaggtggtgcccgagaagaacgccgtgagaatcctgtggggcagagagagaggcgccagagccatgggcgcccagagactgctgcaggagctggtggaggacaagaccagatggatgaagtgggagggcaagagagtggagctgcccgacagccccagaagcaccttcctgctggccttcagccccgacagaaccctgctggccagcacccacgtgaaccacaacatctacatcaccgaggtgaagaccggcaagtgcgtgcacagcctgatcggccacagaagaaccccctggtgcgtgaccttccaccccaccatcagcggcctgatcgccagcggctgcctggacggcgaggtgagaatctgggacctgcacggcggcagcgagagctggttcaccgacagcaacaacgccatcgccagcctggccttccaccccaccgcccagctgctgctgatcgccaccgccaacgagatccacttctgggactggagcagaagagagcccttcgccgtggtgaagaccgccagcgagatggagagagtgagactggtgagattcgaccccctgggccactacctgctgaccgccatcgtgaaccccagcaaccagcagggcgacgacgagcccgagatccccatcgacggcaccgagctgagccactacagacagagagccctgctgcagagccagcccgtgagaagaacccccctgctgcacaacttcctgcacatgctgagcagcagaagcagcggcatccaggtgggcgagcagagcaccgtgcaggacagcgccacccccagccccccccccccccccccccagcccagcaccgagagacccagaaccagcgcctacatcagactgagacagagagtgagctaccccaccgccgagtgctgccagcacctgggcatcctgtgcctgtgcagcagatgcagcggcaccagagtgcccagcctgctgccccaccaggacagcgtgccccccgccagcgccagagccaccacccccagcttcagcttcgtgcagaccgagcccttccacccccccgagcaggccagcagcacccagcaggaccagggcctgctgaacagacccagcgccttcagcaccgtgcagagcagcaccgccggcaacaccctgagaaacctgagcctgggccccaccagaagaagcctgggcggccccctgagcagccaccccagcagataccacagagagatcgcccccggcctgaccggcagcgagtggaccagaaccgtgctgagcctgaacagcagaagcgaggccgagagcatgcccccccccagaaccagcgccagcagcgtgagcctgctgagcgtgctgagacagcaggagggcggcagccaggccagcgtgtacaccagcgccaccgagggcagaggcttccccgccagcggcctggccaccgagagcgacggcggcaacggcagcagccagaacaacagcggcagcatcagacacgagctgcagtgcgacctgagaagattcttcctggagtacgacagactgcaggagctggaccagagcctgagcggcgaggccccccagacccagcaggcccaggagatgctgaacaacaacatcgagagcgagagacccggccccagccaccagcccaccccccacagcagcgagaacaacagcaacctgagcagaggccacctgaacagatgcagagcctgccacaacctgctgaccttcaacaacgacaccctgagatgggagagaaccacccccaactacagcagcggcgaggccagcagcagctggcaggtgcccagcagcttcgagagcgtgcccagcagcggcagccagctgccccccctggagagaaccgagggccagacccccagcagcagcagactggagctgagcagcagcgccagcccccaggaggagagaaccgtgggcgtggccttcaaccaggagaccggccactgggagagaatctacacccagagcagcagaagcggcaccgtgagccaggaggccctgcaccaggacatgcccgaggagagcagcgaggaggacagcctgagaagactgagccccgccgcctactacgcccagagaatgatccagtacctgagcagaagagacagcatcagacagagaagcatgagataccagcagaacagactgagaagcagcaccagcagcagcagcagcgacaaccagggccccagcgtggagggcaccgacctggagttcgaggacttcgaggacaacggcgacagaagcagacacagagcccccagaaacgccagaatgagcgcccccagcctgggcagattcgtgcccagaagattcctgctgcccgagtacctgccctacgccggcatcttccacgagagaggccagcccggcctggccacccacagcagcgtgaacagagtgctggccggcgccgtgatcggcgacggccagagcgccgtggccagcaacatcgccaacaccacctacagactgcagtggtgggacttcaccaagttcgacctgcccgagatcagcaacgccagcgtgaacgtgctggtgcagaactgcaagatctacaacgacgccagctgcgacatcagcgccgacggccagctgctggccgccttcatccccagcagccagagaggcttccccgacgagggcatcctggccgtgtacagcctggccccccacaacctgggcgagatgctgtacaccaagagattcggccccaacgccatcagcgtgagcctgagccccatgggcagatacgtgatggtgggcctggccagcagaagaatcctgctgcaccccagcaccgagcacatggtggcccaggtgttcagactgcagcaggcccacggcggcgagaccagcatgagaagagtgttcaacgtgctgtaccccatgcccgccgaccagagaagacacgtgagcatcaacagcgccagatggctgcccgagcccggcctgggcctggcctacggcaccaacaagggcgacctggtgatctgcagacccgaggccctgaacagcggcgtggagtactactgggaccagctgaacgagaccgtgttcaccgtgcacagcaacagcagaagcagcgagagacccggcaccagcagagccacctggagaaccgacagagacatgggcctgatgaacgccatcggcctgcagcccagaaaccccgccaccagcgtgaccagccagggcacccagaccctggccctgcagctgcagaacgccgagacccagaccgagagagaggtgcccgagcccggcaccgccgccagcggccccggcgagggcgagggcagcgagtacggcgccagcggcgaggacgccctgagcagaatccagagactgatggccgagggcggcatgaccgccgtggtgcagagagagcagagcaccaccatggccagcatgggcggcttcggcaacaacatcatcgtgagccacagaatccacagaagcagccagaccggcaccgagcccggcgccgcccacaccagcagcccccagcccagcaccagcagaggcctgctgcccgaggccggccagctggccgagagaggcctgagccccagaaccgccagctgggaccagcccggcacccccggcagagagcccacccagcccaccctgcccagcagcagccccgtgcccatccccgtgagcctgcccagcgccgagggccccaccctgcactgcgagctgaccaacaacaaccacctgctggacggcggcagcagcagaggcgacgccgccggccccagaggcgagcccagaaacagatag

SEQ ID NO: 272126 - protein, 1208 aa, Artificial Sequence
  derived and/or modified sequence
MKVVPEKNAVRILWGRERGARAMGAQRLLQELVEDKTRWMKWEGKRVELPDSPRSTFLLAFSPDRTLLASTHVNHNIYITEVKTGKCVHSLIGHRRTPWCVTFHPTISGLIASGCLDGEVRIWDLHGGSESWFTDSNNAIASLAFHPTAQLLLIATANEIHFWDWSRREPFAVVKTASEMERVRLVRFDPLGHYLLTAIVNPSNQQGDDEPEIPIDGTELSHYRQRALLQSQPVRRTPLLHNFLHMLSSRSSGIQTEPFHPPEQASSTQQDQGLLNRPSAFSTVQSSTAGNTLRNLSLGPTRRSLGGPLSSHPSRYHREIAPGLTGSEWTRTVLSLNSRSEAESMPPPRTSASSVSLLSVLRQQEGGSQASVYTSATEGRGFPASGLATESDGGNGSSQNNSGSIRHELQCDLRRFFLEYDRLQELDQSLSGEAPQTQQAQEMLNNNIESERPGPSHQPTPHSSENNSNLSRGHLNRCRACHNLLTFNNDTLRWERTTPNYSSGEASSSWQVPSSFESVPSSGSQLPPLERTEGQTPSSSRLELSSSASPQEERTVGVAFNQETGHWERIYTQSSRSGTVSQEALHQDMPEESSEEDSLRRRLLESSLISLSRYDGAGSREHPIYPDPARLSPAAYYAQRMIQYLSRRDSIRQRSMRYQQNRLRSSTSSSSSDNQGPSVEGTDLEFEDFEDNGDRSRHRAPRNARMSAPSLGRFVPRRFLLPEYLPYAGIFHERGQPGLATHSSVNRVLAGAVIGDGQSAVASNIANTTYRLQWWDFTKFDLPEISNASVNVLVQNCKIYNDASCDISADGQLLAAFIPSSQRGFPDEGILAVYSLAPHNLGEMLYTKRFGPNAISVSLSPMGRYVMVGLASRRILLHPSTEHMVAQVFRLQQAHGGETSMRRVFNVLYPMPADQRRHVSINSARWLPEPGLGLAYGTNKGDLVICRPEALNSGVEYYWDQLNETVFTVHSNSRSSERPGTSRATWRTDRDMGLMNAIGLQPRNPATSVTSQGTQTLALQLQNAETQTEREVPEPGTAASGPGEGEGSEYGASGEDALSRIQRLMAEGGMTAVVQREQSTTMASMGGFGNNIIVSHRIHRSSQTGTEPGAAHTSSPQPSTSRGLLPEAGQLAERGLSPRTASWDQPGTPGREPTQPTLPSSSPVPIPVSLPSAEGPTLHCELTNNNHLLDGGSSRGDAAGPRGEPRNR

SEQ ID NO: 272127 - DNA, 3627 bp, Artificial Sequence
  derived and/or modified sequence
atgaaagtcgttcctgagaaaaacgcagtacggatcctgtgggggcgcgaaagaggggcgagagccatgggggctcagagactgctgcaggaattggtggaggacaagactcgctggatgaaatgggaagggaaaagagtggaactgccagattcccctcggtcaacgttcctgctggcctttagccccgataggactctgctcgctagtacccacgttaaccataatatatacatcacagaggtcaaaactgggaagtgcgtccatagcctcattggccataggaggaccccctggtgtgtgacatttcacccgaccataagcgggctgatagcttccggatgcctagatggcgaggtcaggatctgggatctccacgggggatccgagagttggttcaccgactcaaacaatgcgattgcgtcactcgcattccaccctacggcccagctgctcctcattgccacagcgaatgagattcacttttgggactggagtcggagggagccattcgccgtcgttaagacagcctccgaaatggagcgcgtgcgcctggtccgatttgacccactcggacattacttactcacagcaattgtcaacccctcaaatcagcaaggcgatgacgagcccgagattcccatagatggcaccgagctgtcccactataggcagagggctcttctccagtctcagcctgtaaggcggactccacttctccataactttctgcacatgttatcaagccgctcaagcgggatccaaaccgaaccgttccatccacctgagcaagcctcttccacacagcaggatcagggcttacttaacagaccttccgccttttccactgttcagtctagtaccgccgggaataccttaaggaaccttagtctcgggccaacccgcagatcactcggaggcccgctgtccagtcacccctcacgataccaccgggaaattgcccccggcctcaccgggtccgagtggacccgcacagttctgtctctcaacagccgctcagaggctgagtccatgccgccccctcgcaccagtgcgtccagcgtgagtctgctctccgttttacgtcagcaggaggggggatcacaagctagcgtgtatactagtgcgaccgaggggagggggtttccggcctcggggctggctaccgaatccgatggcggtaacggtagctcccaaaataactccggcagcattcggcacgagctgcaatgtgacctgcgcagattttttctggagtacgaccgcctccaggaactagatcagtctctatcaggcgaggcacctcagacgcagcaagcccaagaaatgctgaataataatattgagagcgaacgccccggacccagccaccagcctacgcctcacagctctgagaataactcaaatctgtccaggggtcacctaaatcgctgccgggcttgtcataacttgcttaccttcaataacgataccttaaggtgggagagaacgacaccaaactatagcagtggggaagcttcttcgtcatggcaagtgccgagttccttcgagagtgtcccatcctccggaagccagctgccacccttggaacggaccgaagggcagaccccgtcgtcctcgcggctcgagctttcctccagcgcttccccacaggaagaacgcaccgtcggtgtagcattcaaccaagagaccggtcactgggaacggatctatactcagagtagcaggtcgggaaccgtctctcaggaggcgttgcaccaagacatgcccgaagagtcaagcgaagaggacagcttgagaaggcgactgctggagagttctcttatcagcctcagccgctacgacggggccggcagccgcgagcaccctatctaccctgaccccgcgcggttatctccagctgcttactacgcccagcgcatgatccagtatctcagcaggagggacagcatcagacagaggtccatgcggtatcagcagaaccgattgcgaagctctacaagtagctcttccagcgacaatcaagggccaagcgtggaaggaaccgacttagagttcgaggacttcgaggataacggagataggtcccgtcatagggcccccagaaatgctcggatgtcggctccttcacttggtcgttttgtgccaagaagattccttctgcccgagtacctgccttacgccggcatattccatgagagaggtcagcctggcctggccactcatagctcagtgaatagagtgctggccggcgctgtgatcggggacggacaatccgccgtggcctctaatattgccaacactacatatcggttgcaatggtgggacttcacgaaatttgacctgcccgagataagcaacgcttcagtgaacgtgcttgttcagaactgcaagatttataatgacgcttcttgtgatatcagcgctgatgggcagttgttggccgccttcatcccgtcctctcagcgcggatttccagatgagggcatcctggccgtttactcccttgcgccacacaacctgggagagatgttgtataccaagcgcttcggccctaatgccatatcagtgtctctgtcgcctatgggtcggtacgtaatggttggacttgcctcaaggagaatcctgctgcacccctccacagaacatatggtagcccaggtttttcgacttcagcaagcccatggcggcgaaacttccatgcgtcgggtgtttaacgtactgtatcccatgccagccgaccagaggcgacacgtcagcattaactcggctcgctggctgcccgaaccaggcctgggacttgcttacggtacaaacaagggggacctggtgatctgtcgaccagaagccctcaactctggggtagaatactattgggaccaattgaacgagaccgtgttcacggtacactccaattcaagaagctcagagcgcccgggcaccagcagggccacctggcgcacagatcgggacatgggactcatgaacgccatcggactgcaaccgcgcaatcccgccactagcgttactagccaggggactcagaccctggcactacagcttcagaacgccgaaactcagaccgaacgcgaagtgccagagcccggtaccgctgcatctggacctggcgagggcgaaggatctgaatatggagcgagcggagaggatgccctttcacgcatccaaagactaatggcggaaggaggcatgacagcagtcgtccagagggaacagtccacgacgatggctagtatgggaggattcggcaacaatatcatcgtttcccaccgcattcatcggtccagccaaactggcactgaaccaggagccgcgcacacctcatccccacagccatctacttcccgtggactcctgccagaagccggacagctcgctgaaaggggactaagtccacgaaccgcctcttgggaccaacctggaacccccgggcgggaacccacacagcccactttgccttcttcatctcccgtgcccattcccgtttctctgccttctgctgaaggtcccacgcttcactgcgaactgacaaacaacaatcatctgctagacggtggaagcagccggggtgatgctgccggcccgcggggagaacccagaaaccgttag

SEQ ID NO: 272128 - DNA, 3627 bp, Artificial Sequence
  derived and/or modified sequence
atgaaggtggtgcctgagaagaatgctgtgcgcatcctgtggggccgggagcggggggcccgggccatgggcgcccagaggctgctgcaggagctggtggaggacaagacccgctggatgaagtgggagggcaagagggtggagctgcctgacagccccaggagcaccttcctgctggccttctccccagacaggaccctgctggccagcacccacgtgaaccacaacatctacatcacagaggtgaagacaggaaaatgtgtgcacagcctcatcggccacaggaggaccccctggtgtgtgaccttccaccccaccatcagcggcctgattgccagcggctgcctggatggagaggtgcgcatctgggacctgcacggcggcagcgagagctggttcacagacagcaacaatgccatcgccagcctggccttccaccccacagcccagctgctgctgattgccacagccaatgagatccacttctgggactggagcagaagagagccctttgctgtggtgaagacagccagcgagatggagcgggtgcggctggtgcgctttgaccccctgggccactacctgctgacagccatcgtgaaccccagcaaccagcagggagatgatgagcctgagatccccattgatggaacagagctgagccactaccggcagagggccctgctgcagagccagcctgtgcggaggacccccctgctgcacaacttcctgcacatgctgagcagccgcagcagcggcatccagacagagcccttccaccccccagagcaggccagcagcacccagcaggaccagggcctgctgaaccggcccagcgccttcagcacagtgcagagcagcacagctggcaacaccctgaggaacctgagcctgggccccacccggcgcagcctgggcggccccctgagcagccaccccagccgctaccaccgggagatcgcccctggcctgactggaagtgagtggaccaggacagtgctgagcctgaacagccgctctgaggccgagagcatgcccccacccaggaccagcgccagctctgtgtccctgctgtctgtgctgcggcagcaggagggcggcagccaggcctctgtgtacaccagcgccacagagggccggggcttccctgccagcggcctggccacagaaagtgatggcggcaatggcagcagccagaacaacagcggcagcatcagacatgagctgcagtgtgacctgcggcgcttcttcctggagtatgaccggctgcaggagctggaccagagcctgtctggagaggccccccagacccagcaggcccaggagatgctgaacaacaacatcgagagcgagaggcctggccccagccaccagcccaccccccacagcagcgagaacaacagcaacctgagccggggccacctgaaccgctgccgggcctgccacaacctgctgaccttcaacaatgacaccctgcgctgggagaggaccacccccaactacagcagtggagaggccagcagctcctggcaggtgcccagcagctttgagagcgtgcccagcagcggcagccagctgccccccctggagaggacagagggccagacccccagcagcagccggctggagctgagcagcagcgccagcccccaggaggagaggacagtgggcgtggccttcaaccaggagaccggccactgggagcgcatctacacccagagcagccgctctggaacagtgtcccaggaggccctgcaccaggacatgcctgaggagagcagcgaggaggacagcctgcggcggcggctgctggagagcagcctcatcagcctgagccgctatgatggagctggcagccgggagcaccccatctacccagaccctgcccggctgagccctgctgcctactatgcccagaggatgatccagtacctgagcagaagagacagcatccggcagaggtccatgagataccagcagaaccggctgcggagcagcaccagcagcagcagcagtgacaaccagggccccagcgtggagggcacagacctggagtttgaagattttgaggacaacggggacaggagccgccaccgggcccccagaaatgccaggatgtctgcccccagcctgggccgctttgtgccccggcgcttcctgctgcctgagtacctgccctatgccggcatcttccacgagcggggccagcccggcctggccacccacagctctgtgaacagagtgctggccggggctgtgattggagatggccagagcgctgtggccagcaacatcgccaacaccacctaccgcctgcagtggtgggacttcaccaagtttgacctgcctgagatcagcaatgcctctgtgaatgtgctggtgcagaactgcaagatctacaatgatgccagctgtgacatctctgcagatggccagctgctggccgccttcatccccagcagccagaggggcttcccagatgagggcatcctggccgtgtacagcctggccccccacaacctgggggagatgctgtacaccaagcgcttcggccccaatgccatctctgtgtccctgagccccatgggccgctacgtgatggtgggcctggccagccgccgcatcctgctgcaccccagcacagagcacatggtggcccaggtgttccggctgcagcaggcccatggaggagagacctccatgagaagagtcttcaacgtgctgtaccccatgcctgctgaccagaggagacatgtgtccatcaacagcgcccgctggctgcctgagcccggcctgggcctggcctacggcaccaacaagggggacctggtgatctgcaggcctgaggccctgaacagcggcgtggagtactactgggaccagctgaatgaaacagtgttcaccgtgcacagcaacagccgcagcagcgagaggcctggcaccagccgggccacctggaggacagaccgggacatgggcctgatgaatgccatcggcctgcagcccagaaatcctgccacctctgtgaccagccagggcacccagaccctggccctgcagctgcagaatgctgagacccagacagagcgggaggtgcctgagcctggaacagctgccagcggccctggagagggggagggctctgaatatggagccagcggagaagatgccctgagccgcatccagaggctgatggccgagggcggcatgacagctgtggtgcagcgggagcagagcaccaccatggcctccatgggcggcttcggcaacaacatcatcgtgagccaccgcatccacaggagcagccagacaggaacagagcccggggccgcccacaccagcagcccccagcccagcaccagccggggcctgctgcctgaggccggccagctggccgagcggggcctgagccccaggacagcctcctgggaccagcccggcaccccaggccgggagcccacccagcccaccctgcccagcagcagccctgtgcccatccctgtgtccctgcccagcgctgagggccccaccctgcactgtgagctgaccaacaacaaccacctgctggatggcggcagcagcagaggagatgctgctggccccagaggagagcccaggaacagatag

SEQ ID NO: 272129 - DNA, 3627 bp, Artificial Sequence
  derived and/or modified sequence
atgaaggtggtgcccgagaagaacgccgtgcggatcctgtggggcagggagcgcggagcccgagctatgggcgcacagaggctcctccaagagctggtggaagacaagacaagatggatgaaatgggagggaaaaagagttgagctccccgatagccctagatctacctttctgctggccttcagtccagataggacacttttagcatctacccacgttaatcacaatatatacattactgaggtgaaaacaggaaagtgcgtgcacagcctgatagggcacaggcgcacgccctggtgcgtgacttttcatcccaccatcagcggattgatcgccagcggctgcctggacggcgaggtgcgcatctgggacctgcatggcggttccgaaagttggtttaccgactcgaataacgcaatcgcctctctcgcattccaccccactgcacaattgttgctgatcgccacagcgaacgagattcatttctgggactggagtcgacgggagcctttcgcagtggtgaagacagcatcagagatggaacgcgttcgtctcgtgagatttgacccattgggccattacttactaactgccattgttaatccctccaaccagcagggtgacgatgagcctgagatacccattgacgggaccgaactgagtcactatcgccaacgcgctttactgcagagtcagcccgtcagacgcactcccctgctccacaactttctgcacatgttgtcatctaggtcctccggcatccaaactgagccgtttcacccacccgagcaggcctccagcactcaacaggatcaaggactccttaacaggccgagcgcctttagcacggtccagagcagcacggcaggaaacaccctacgcaatctcagcctgggaccaacccggcgctccttggggggcccgctgagctcgcatccgtcccgctaccaccgcgagatcgcccccggcttgaccggatcggaatggacaaggacggtgttgtcactcaatagtcgatctgaagctgagtctatgccgccaccgaggaccagcgcttcatccgtcagcctcctaagcgtcctgaggcaacaggagggtgggtcacaggcctccgtgtatacatctgctacagagggacggggctttcccgcgtctggccttgcaaccgaatccgatggcgggaatggctcttcccaaaacaacagtggctccattaggcacgagctgcagtgtgatctgagaagatttttcctagaatatgataggctgcaggagctggaccagagcttaagtggtgaggctccacagacacagcaggctcaggagatgcttaataacaatatcgaaagcgagcggcccggcccttcacatcagccgacaccccactccagcgagaacaattccaacttgtccagagggcaccttaatcggtgccgtgcatgccacaacctgctgaccttcaacaacgacactctccggtgggagcggaccacccctaactactcctctggagaagcgtcatcctcctggcaagttccttccagctttgagtctgtgcccagcagcggatctcagctgccgcctcttgaacgtacagagggacagacgccttctagttccagactggaactgtcctcaagcgctagtccacaggaggaacgtaccgtgggcgtggcttttaatcaagagaccggtcactgggagcggatctacacacagtcgtcacgcagcgggacagtaagccaagaggctctccaccaggatatgcctgaggagagttcagaagaggatagtttgaggcgccgcctcctggaatcgagcttaatctcactttcacgatatgatggggccgggtcccgggagcatcccatttaccctgatcccgcaagactgagccctgccgcatactacgcacagcggatgatccagtacctctctcgccgggatagcattagacagagatcaatgaggtaccagcaaaatcgacttcgcagtagtaccagttcgtctagttctgacaatcagggtcctagcgtagagggcactgacttagagttcgaagactttgaagataacggagaccgctctagacatcgcgcccctcgcaatgcccggatgagcgctcccagcctcggccgcttcgttcctaggcggtttctgctgcctgagtacctgccatacgctggaattttccacgagcgcggtcagccaggactggcaacacatagctccgtaaatagagtcctggccggagccgtcatcggcgatggtcagtcagctgtggcttctaacatagcaaatacaacgtaccgtcttcagtggtgggattttaccaagtttgatctccctgaaattagcaatgcctccgtgaacgtgcttgtacagaattgcaaaatctacaatgatgcctcctgtgatatatcagcagacgggcaactgctggccgcctttattccaagctcccagcggggttttcccgacgagggcatactggctgtctacagccttgctccccacaaccttggggagatgctgtatacgaaaaggtttggccctaatgcgatttccgtctcgctcagccccatggggcggtatgtcatggttggactcgcttctcgaagaattttactacacccctcaaccgaacacatggtcgcacaagtgttcagattacagcaggcccacggaggcgagactagcatgcgaagagtctttaacgttctgtacccaatgccggccgatcagcggcgccatgtgtccatcaatagtgcaaggtggcttcctgaacccggcctggggttggcatacggcactaataagggtgacctcgtaatttgccggccggaagcgctgaattctggagttgagtattattgggaccagcttaacgaaaccgtgttcactgtgcacagtaatagtcggtcctctgagaggcccgggacttctcgggcgacttggcgaaccgatagggacatgggccttatgaatgccatcggactccagccacgaaatcccgcaacaagcgtgacctcccagggaacacagacactagcattacagcttcaaaacgcagagactcagaccgaacgggaggttcctgaaccggggactgccgcttcgggccctggcgagggagaaggcagtgagtatggcgcgtcaggcgaggatgctctgtctcggattcagcgcttaatggccgaaggcggtatgaccgccgtggtgcagagagaacaaagcacgaccatggccagtatggggggctttggcaataacattatcgtgtcccatagaatccacagaagttcacagaccggcacggaacctggcgccgcccacaccagttcccctcaaccttcaacctccaggggcctcctccccgaagctgggcagctcgcagagaggggtttgtcacctcgcactgcgtcctgggatcagccaggtactccaggcagggagccaacccagcccactcttccttcttccagtcctgttcctattcccgtctctctgcctagcgctgaaggccccactctgcactgcgagctgacaaataacaatcatctgttagatggaggcagttcacgtggggacgcagccggtcctcggggagaacctcggaacaggtag

SEQ ID NO: 272130 - DNA, 3627 bp, Artificial Sequence
  derived and/or modified sequence
atgaaggtggtgcccgagaaaaacgcggtacgtatactctggggcagagagaggggggctagggctatgggcgctcaaaggttgcttcaagaactagtggaagataaaacacgctggatgaaatgggaaggcaaaagagtggaactccccgacagccccagaagcactttcctgctggcatttagtccagaccgcaccctgctcgcaagcacgcatgtgaaccacaatatatacatcactgaggtgaaaacagggaagtgcgtccactccctcattgggcatagacggacgccctggtgcgtgacattccaccctacaatcagcggtctcatagcttccggctgtctggatggagaggtgaggatttgggatctccacgggggaagcgaatcatggttcacagattccaacaatgcaatcgccagtctagcatttcaccctactgctcagttattgctcatagcaacagcaaatgaaatccacttttgggactggtcacgccgagagccattcgcggtggttaagaccgcttctgagatggagagggtcaggctcgtgagattcgacccactgggtcactatttactgaccgctatcgtgaacccctctaaccagcagggggacgatgagcctgaaatccctattgatggcactgagctgtcccactatagacagagggccctgcttcaatcccagcccgtacgcaggaccccattactgcacaattttcttcatatgctctcctctcgctccagcggaattcagaccgagccgttccaccccccagagcaagcctcttccacccaacaagaccaaggtctcctgaaccgcccatccgccttctccacagtccagtctagcactgccggtaatacattacgtaatctctctttaggtccaactaggcgctcactgggcggtcctctgtcctcacatccatctcgctatcaccgtgagattgctccaggccttaccggaagcgagtggacacgtacagttctttctttaaacagtcgatctgaagccgagtccatgccaccccctagaactagtgccagctctgtttctttactgagcgtgcttagacaacaggaggggggaagccaggcctccgtctataccagcgccacagagggcagagggttcccagcaagcggcctagctaccgagtcagatggagggaatggcagctcccaaaacaatagtggaagcatcaggcacgaattgcagtgcgatctccgacggtttttccttgagtacgacagactgcaagagctcgaccagtccctgtctggcgaagcaccccagacacagcaagctcaagagatgctgaataataacatagaatcggaaaggcccggacctagccaccaacccactccccactcatccgaaaataactcaaatttgtcacggggacacttgaaccggtgccgcgcttgccataacctgttgacctttaacaacgataccctgaggtgggagcgtactacgccaaactatagctcgggcgaagcatcctcctcttggcaggtacccagtagctttgaaagcgttccgtcatcagggagtcaactgcctccgctcgagcggacagaaggacagacacccagttccagccggctcgaactgagctcttccgcttccccacaggaggagcgcactgtgggagtggcctttaaccaagagaccggtcactgggagcgcatatatacacagagcagccggagcggtacagtgagtcaggaagcgctgcaccaggatatgcctgaagagtcatcagaggaggatagtttacgtagacggctgctggagagttcactgatttctctcagccggtacgacggcgcaggctctcgggagcacccaatctatcccgacccagctaggctctcacccgcagcctattacgcccagagaatgattcaatatttgtcccggagagattccatcagacagagaagcatgcgctaccaacagaatcggttgcgtagtagtacctcgtcaagtagctcagacaatcaagggccatctgtggagggaacggatttagaatttgaagactttgaagataacggtgatcggagccgccaccgcgctcccagaaacgcaagaatgagcgcaccttcactgggaaggtttgtacccaggagatttttgttgcctgaatatctcccatacgctggtatctttcatgaacgaggacagccaggattggccacgcactcctcagtgaatagagtcctcgcaggcgcagtcatcggcgatggtcagagcgccgtggcgtcaaacatagctaataccacataccggcttcaatggtgggactttacaaaatttgacctccctgaaatcagcaacgcctccgtcaacgtgctggttcagaattgtaagatttacaacgatgcaagctgtgacatctctgcagacggacaactcttagccgcttttattccaagctcgcagcggggatttccagacgagggaatccttgctgtgtactcactggcgccacacaatctgggagagatgctttatactaaacggttcggcccaaacgccatctctgtatctctgagccctatgggacgttacgtcatggtcggacttgcgtcccgtcgtattctgctgcacccctccactgagcatatggttgcacaggtatttaggttgcagcaggcccacgggggagagacctctatgagacgcgtgtttaacgtcctctacccgatgccagccgaccagcgtcgtcacgttagcataaactcggcacgctggctgcccgaacctggcttggggctggcctatggcactaataagggcgacctggtcatctgtcggccagaggccctgaatagtggcgttgagtactattgggatcagttgaacgaaacagtttttaccgttcattctaattcacgtagttcagagaggccaggcactagcagggccacctggcgaacagaccgcgacatggggttgatgaatgccataggtcttcagccaaggaaccccgctacctctgtgacgtcccagggcacacaaactcttgcgttacagctgcaaaacgctgagacgcaaacagagcgggaagtgccggaacctggaactgccgcttctggccctggcgagggggaggggtcagaatatggggcaagcggtgaagatgccctctcacgaatccagcgcctaatggctgaaggaggaatgactgcggtggtccagagagaacagagcactacgatggcatccatggggggatttggtaacaatattattgttagccacagaatccaccgctccagccaaactggcactgaaccaggggctgcgcatactagcagtccacagccgtcgacttctaggggccttctgccagaggccggacagctggctgaacgcggattgagtccccgtacggcttcatgggaccagcccggaacgcccggtagagaacccacccagccaacgctgcctagtagcagccctgttcctatacccgtcagtctgcccagcgctgagggccctactctgcattgcgagttaactaataataaccacctattagacggcggatcgtcaaggggcgacgccgctggtccccgaggcgaacccagaaatcgctag

SEQ ID NO: 272131 - DNA, 5023 bp, Artificial Sequence
  derived and/or modified sequence
aggggattaatgaagagccaccagactatctttatggagaatctagattgggaagttaagctaagaatgtgcatttttgaaaaagtttttatggtagaagagaatgtatatcagaggaaagaatgtagagaagaaagcaacattgtccactgggaattgataagttctgcgtagaatttagagttataaggactatctcattggctcctaatgaatgctaaataacaaatggaaattgctatttccatgaggacaacttacaaggacctgtatggcctcattttagctgcttcagtgtgttggagctgttacttgctccttcatttcctgggcctggtgtgacagtggctactgagcgccatgaaggttgtcccagaaaagaatgctgtccggatactctgggggcgagaacggggtgctcgggccatgggagctcagcggcttctgcaggagctggtagaagataaaacccggtggatgaaatgggagggcaagagagtagaactgccggatagtccacgctctaccttcttattggccttcagcccagacaggactctcttagcctccacccatgtgaaccataatatctatattacggaggtgaagactggcaagtgtgttcattccctgattggacaccgccgtactccatggtgtgtcacttttcatcccaccatctcaggccttattgcttctggctgcctagatggggaggttaggatttgggatttacacggtggcagtgaaagctggttcacagatagcaacaatgccattgcctccctggctttccaccctacggctcagctcctgctgattgccactgccaatgagatccacttctgggactggagtcgacgggaaccctttgctgtggtgaagacagctagtgagatggaacgggtccgtctggtgagatttgatccacttggacactacttactcacagcaattgttaacccctctaatcaacagggtgatgacgaaccagagatccccatagatggaacagaattatcccactaccgtcagcgtgccctcctgcaatcacagccagttcgccggacgcctctcctccacaatttcctgcacatgctgtcctcccgctcttctggcatccagaccgagcccttccatcccccggagcaggcctcgtcaacgcagcaggaccagggcctcctgaaccggccgtctgccttcagtacagtccagagcagcactgccggcaacacgctccgcaacctcagtctgggtcctacccgccgctctttgggagggcctctgtctagccacccttctaggtatcaccgagaaatagctcctgggttgacaggatctgagtggacccggacagtactcagtctgaactcccgctctgaggcggaatccatgcccccgcccagaaccagtgcctcttcggtgagtttgctgtctgtgctgagacagcaggaaggtggctctcaggcatctgtgtacacttcagccacagaagggaggggttttccggcatcagggttggcaactgagtcagatggagggaatggctccagccaaaacaactcgggcagcattcgccatgagcttcagtgtgacctgagacgcttctttctggagtatgaccggcttcaggagctggatcagagcctgagtggggaagctccccagacccaacaggcccaggaaatgctcaacaataacattgaatctgagaggccaggcccttcccaccagcccaccccacacagcagtgagaacaactccaacctgtcccgtggccacctgaatcgctgtcgtgcttgccacaatctcctgaccttcaacaacgataccctgcgctgggaaagaaccacacctaactactcctctggcgaggctagttcctcttggcaggtccccagctcctttgagagtgtgccatcaagtggcagccagttgccacctctcgagcggactgagggccaaacgcccagctccagcaggctggagttgagcagctctgctagtccgcaggaggagaggactgtgggggtggcctttaaccaggagacaggccactgggaaagaatttacacccagtccagcagatctggaactgtgtcacaggaggccttacatcaggatatgcctgaggagagctctgaggaggattcactcaggaggaggctgctggaatcttccctcatttcattatcccgttatgatggagcaggatccagagagcacccaatttacccagacccagcgagattatctcctgctgcatactacgcccagaggatgatccagtatctctcacggagagacagtattcgccagcgctccatgcgctaccaacagaaccgtctccgttcttccacctcctcctcttcctcagacaaccagggtccatcagtagagggaaccgacttggaatttgaggactttgaggacaatggtgacagatccaggcaccgagctccacgcaatgcccggatgtctgcaccttcgcttggacgctttgtcccaaggcgtttcttgctgcctgagtacttgccttatgctgggatttttcatgaacgtggacagcctggcttggctactcactcttctgttaacagggtcctggcaggggcagtgatcggtgatggacagtctgctgtggccagtaacattgccaatactacctaccggctccagtggtgggacttcactaagtttgacctccctgaaatcagtaatgcttccgtgaatgtgctggtgcagaactgcaagatctacaatgatgccagctgtgacatttctgcagatggccagctcctggcagctttcatccccagcagccagaggggctttcctgatgaaggcatcctggcagtgtactccctggccccccataacctgggcgaaatgctctacaccaagcgatttggtcccaatgccatttcggtgagcctgtccccaatgggcagatatgtaatggtgggcttggcctcacgaaggatcctgctgcacccctccacagagcacatggtggcccaggtcttcaggctgcaacaggcccatggtggagagacctccatgaggagagttttcaacgtcctttatcccatgcctgccgaccagcggagacatgtcagtatcaactctgcccgttggctgcctgagccagggcttggcttggcctatggtactaacaaaggagacctggtgatctgccgaccagaggccttaaactctggtgttgagtactactgggaccagctgaacgagacggtcttcactgtccattccaacagcaggagcagcgagcggcctggaaccagcagagccacatggaggacagacagagacatggggctgatgaatgccattgggcttcagccccggaaccctgccacctcagtgacatctcagggcacccagactctggcccttcagctgcagaatgccgaaacacagactgagagggaggtgccggagccagggacagccgcctcaggtcctggtgaaggtgagggttcagagtatggtgccagtggagaagatgcgctcagcaggatccagaggctgatggcggagggcggcatgacagccgtggtgcagcgggagcagagcaccaccatggcctccatgggcggcttcggcaacaacatcatcgtcagccaccgcattcaccgcagctctcagacgggcactgaacctggtgccgcccacacctcctcaccccagccctccacctctcggggactgctcccagaggccgggcaactggcagagcgaggcctaagcccccggacagcttcctgggaccagcctggtacccctgggcgggagccaacccagccaaccctgccctcttcctcccctgtccccattcctgtttcccttcccagcgctgagggaccaaccctccactgcgagttgaccaataacaaccaccttctggatggtggcagcagcaggggggacgctgcaggccctaggggagaaccacggaacaggtagagacaaacgttgcactggtgcctcccctcgaaccgccaagcagaaaccggacctcacagctgactgggaactggacatgtggaagagctgctggctgcatcagggaacaggaggaggaagagggtcagggtggagaggaagatcagtcagtgggcacaagacagtcaaatgggcaaggcctgcctcggggaactagaaccttccaggatctggagcccgggagagccacactgtgggcttaatgtgaatagaggaacaagtgggtatctctgccaggcaccccactttctcctagtaacatgggctcaggggactcagccctggacagagagcctccagagagtgaacagtcttccagatctgggccaatcatcctggacagaggcccgcgaggcagctttgccctgtccacctgttgggtgggcagagccaccaggaacccagacaccacctccaactctgagccttccagagcttcagcctctcttcgtcgtcttaccccactgaaaccaacagggatcgggccaggctcccagattcttgaggacagggacttcggcatttactaatgggggactactgtggggtaagggggcgcctgcttgcctgatacaggatggggtcaagggacagtgggcaggtcctcactcaggagtggggggtgtaggctggccagcccccagggcttgtccaccagtcttctccccgcaaggccctcagagcagcgcctgtgggtgtcagtattacctgagcctaggccaaagctagcccaaggctggggaaggggaggagactccaggtcagaatgtgaggtctcagtctgtgatttaaggtgttgcatgtggactcttaactgtacgtgtagtttctagtggagaaatcaaggctctgatcattttgtttttagtatgaaaatgtgatttcctttctgtttgtaactcatcatagaaacattgtggtgggaggagaggggatagtctacagctaatgagggaaacaccaaagatcacatcattaaaatgatgacatgcccctc

SEQ ID NO: 272132 - DNA, 3627 bp, Artificial Sequence
  derived and/or modified sequence
atgaaggtggtgcccgagaagaacgccgtgagaatcctgtggggcagagagagaggcgccagagccatgggcgcccagagactgctgcaggagctggtggaggacaagaccagatggatgaagtgggagggcaagagagtggagctgcccgacagccccagaagcaccttcctgctggccttcagccccgacagaaccctgctggccagcacccacgtgaaccacaacatctacatcaccgaggtgaagaccggcaagtgcgtgcacagcctgatcggccacagaagaaccccctggtgcgtgaccttccaccccaccatcagcggcctgatcgccagcggctgcctggacggcgaggtgagaatctgggacctgcacggcggcagcgagagctggttcaccgacagcaacaacgccatcgccagcctggccttccaccccaccgcccagctgctgctgatcgccaccgccaacgagatccacttctgggactggagcagaagagagcccttcgccgtggtgaagaccgccagcgagatggagagagtgagactggtgagattcgaccccctgggccactacctgctgaccgccatcgtgaaccccagcaaccagcagggcgacgacgagcccgagatccccatcgacggcaccgagctgagccactacagacagagagccctgctgcagagccagcccgtgagaagaacccccctgctgcacaacttcctgcacatgctgagcagcagaagcagcggcatccagaccgagcccttccacccccccgagcaggccagcagcacccagcaggaccagggcctgctgaacagacccagcgccttcagcaccgtgcagagcagcaccgccggcaacaccctgagaaacctgagcctgggccccaccagaagaagcctgggcggccccctgagcagccaccccagcagataccacagagagatcgcccccggcctgaccggcagcgagtggaccagaaccgtgctgagcctgaacagcagaagcgaggccgagagcatgcccccccccagaaccagcgccagcagcgtgagcctgctgagcgtgctgagacagcaggagggcggcagccaggccagcgtgtacaccagcgccaccgagggcagaggcttccccgccagcggcctggccaccgagagcgacggcggcaacggcagcagccagaacaacagcggcagcatcagacacgagctgcagtgcgacctgagaagattcttcctggagtacgacagactgcaggagctggaccagagcctgagcggcgaggccccccagacccagcaggcccaggagatgctgaacaacaacatcgagagcgagagacccggccccagccaccagcccaccccccacagcagcgagaacaacagcaacctgagcagaggccacctgaacagatgcagagcctgccacaacctgctgaccttcaacaacgacaccctgagatgggagagaaccacccccaactacagcagcggcgaggccagcagcagctggcaggtgcccagcagcttcgagagcgtgcccagcagcggcagccagctgccccccctggagagaaccgagggccagacccccagcagcagcagactggagctgagcagcagcgccagcccccaggaggagagaaccgtgggcgtggccttcaaccaggagaccggccactgggagagaatctacacccagagcagcagaagcggcaccgtgagccaggaggccctgcaccaggacatgcccgaggagagcagcgaggaggacagcctgagaagaagactgctggagagcagcctgatcagcctgagcagatacgacggcgccggcagcagagagcaccccatctaccccgaccccgccagactgagccccgccgcctactacgcccagagaatgatccagtacctgagcagaagagacagcatcagacagagaagcatgagataccagcagaacagactgagaagcagcaccagcagcagcagcagcgacaaccagggccccagcgtggagggcaccgacctggagttcgaggacttcgaggacaacggcgacagaagcagacacagagcccccagaaacgccagaatgagcgcccccagcctgggcagattcgtgcccagaagattcctgctgcccgagtacctgccctacgccggcatcttccacgagagaggccagcccggcctggccacccacagcagcgtgaacagagtgctggccggcgccgtgatcggcgacggccagagcgccgtggccagcaacatcgccaacaccacctacagactgcagtggtgggacttcaccaagttcgacctgcccgagatcagcaacgccagcgtgaacgtgctggtgcagaactgcaagatctacaacgacgccagctgcgacatcagcgccgacggccagctgctggccgccttcatccccagcagccagagaggcttccccgacgagggcatcctggccgtgtacagcctggccccccacaacctgggcgagatgctgtacaccaagagattcggccccaacgccatcagcgtgagcctgagccccatgggcagatacgtgatggtgggcctggccagcagaagaatcctgctgcaccccagcaccgagcacatggtggcccaggtgttcagactgcagcaggcccacggcggcgagaccagcatgagaagagtgttcaacgtgctgtaccccatgcccgccgaccagagaagacacgtgagcatcaacagcgccagatggctgcccgagcccggcctgggcctggcctacggcaccaacaagggcgacctggtgatctgcagacccgaggccctgaacagcggcgtggagtactactgggaccagctgaacgagaccgtgttcaccgtgcacagcaacagcagaagcagcgagagacccggcaccagcagagccacctggagaaccgacagagacatgggcctgatgaacgccatcggcctgcagcccagaaaccccgccaccagcgtgaccagccagggcacccagaccctggccctgcagctgcagaacgccgagacccagaccgagagagaggtgcccgagcccggcaccgccgccagcggccccggcgagggcgagggcagcgagtacggcgccagcggcgaggacgccctgagcagaatccagagactgatggccgagggcggcatgaccgccgtggtgcagagagagcagagcaccaccatggccagcatgggcggcttcggcaacaacatcatcgtgagccacagaatccacagaagcagccagaccggcaccgagcccggcgccgcccacaccagcagcccccagcccagcaccagcagaggcctgctgcccgaggccggccagctggccgagagaggcctgagccccagaaccgccagctgggaccagcccggcacccccggcagagagcccacccagcccaccctgcccagcagcagccccgtgcccatccccgtgagcctgcccagcgccgagggccccaccctgcactgcgagctgaccaacaacaaccacctgctggacggcggcagcagcagaggcgacgccgccggccccagaggcgagcccagaaacagatag

SEQ ID NO: 272133 - DNA, 873 bp, Artificial Sequence
  derived and/or modified sequence
atgaacgcaataaacctccctttatctccgataccctttgaactggaccccgaggacaccatgctcgaggagaatgaagtgcgcactatggttgacccgaactctaggtctgatccgaaattgcaggaactgatgaaagtgttgatcgattggattaatgacgtgcttgtgggggagagaatcatagtcaaggatcttgctgaggacctgtacgatggccaggtgctgcagaaattattcgagaagctggaatcggaaaagcttaacgtggcagaggtaacccagagcgagatcgctcaaaagcagaagcttcagaccgtactggaaaagatcaacgagaccctaaagctgccaccaaggtccattaagtggaacgtggacagtgttcatgctaaatcgctcgtggctattctccacctgcttgtggcactgagccaatacttcagggctcccatcaggttgcctgaccacgtaagtattcaggtggtggtggtgcagaagcgggaaggcatacttcaatcacggcagatccaagaggagattacaggcaatacagaagccctgtctggaagacatgagagggatgccttcgataccttgttcgatcatgcccccgataagctcaacgtggtcaagaaagttggaaaagggtgcttgggttggacagaaggctccgaaatgcagcagaacattggaaaaactcatccttgctcacttcgcgctagctgtcaaaactggtggcatcaccttacaagcgcccacacggggttatcgcccctgccctccatgtatctgtcggtgcctcattggatgctgcacttagggctcttcccttcaatctcaatgaatagtctctcgtctcaccctggatag

SEQ ID NO: 272134 - DNA, 873 bp, Artificial Sequence
  derived and/or modified sequence
atgaatgccatcaacctgcccctgagccccatcccctttgagctggaccctgaggacaccatgctggaggagaatgaggtgaggaccatggtggaccccaacagcagaagtgaccccaagctgcaggagctgatgaaggtgctgattgactggatcaatgatgtgctggtgggggagcgcatcatcgtgaaggacctggccgaggacctgtatgatggccaggtgctgcagaagctgtttgagaagctggagagcgagaagctgaatgtggccgaggtgacccagagcgagatcgcccagaagcagaagctgcagacagtgctggagaagatcaatgagaccctgaagctgccccccaggagcatcaagtggaatgtggacagcgtgcacgccaagagcctggtggccatcctgcacctgctggtggccctgagccagtacttccgggcccccatccggctgcctgaccacgtgtccatccaggtggtggtggtgcagaagcgggagggcatcctgcagagccggcagatccaggaggagatcaccggcaacacagaggccctgagcggcagacatgaaagagatgcctttgacaccctgtttgaccacgccccagacaagctgaatgtggtgaagaaggtgggcaagggctgcctgggctggacagagggcagcgagatgcagcagaacatcggcaagacccacccctgcagcctgcgggccagctgccagaactggtggcaccacctgaccagcgcccacacaggcctgagccccctgcccagcatgtacctgtctgtgccccactggatgctgcacctgggcctcttccccagcatctccatgaacagcctgagcagccaccctggatag

SEQ ID NO: 272135 - DNA, 873 bp, Artificial Sequence
  derived and/or modified sequence
atgaacgccatcaacctgcccctgagccccatccccttcgagctggatcccgaggatactatgctggaagaaaatgaggtgaggacaatggtcgaccccaactccagaagcgaccctaaactccaggaactgatgaaagtgcttattgactggattaatgacgtgctggtgggcgagcggattatcgtcaaagaccttgcagaggacctgtatgatggtcaggtgttgcagaagttgttcgagaaactggagtccgagaagctgaatgtcgccgaagtcacccagtccgagattgcccagaagcagaagctgcaaacggtgctggaaaaaatcaacgagacactcaagctgccacctcgttccatcaaatggaacgtggattctgtccacgcgaaatctctggtcgccatattacacttgctggtggctctgagtcagtatttccgggcccccatcagactacccgatcacgtgagcatccaggtggtggtggtgcagaagcgtgaagggattctgcagagtaggcagattcaggaggaaataaccggcaacacagaagcgctgtccggacgacacgagcgggatgcctttgacaccctctttgatcacgccccagataaacttaacgtggtgaagaaagttggaaagggatgtctcgggtggacagagggaagcgaaatgcaacagaatattgggaaaactcacccgtgcagtctgcgcgcatcttgccagaactggtggcaccacctgacctccgcccacaccggattatctcccctcccctctatgtatctctctgtcccgcactggatgctgcacctgggtctcttccctagcatttctatgaattcacttagttcgcaccccggttag

SEQ ID NO: 272136 - DNA, 1219 bp, Artificial Sequence
  derived and/or modified sequence
acattccaagagctgccctccttgggacttagatcactccctgagaacaacaccccaaccaggctgcggaggaagaccagctgctgtttgctggcctgcatgacagggaccagtgtccgagctgcaggaggagggaatgaacgccatcaacctgcccctcagcccaattccctttgagctggaccccgaggacacgatgctggaggagaatgaggtgcgaacaatggtggatccaaactcacgcagtgaccccaagcttcaagaactgatgaaggtattaattgactggattaatgatgtgttggttggagaaagaatcattgtgaaagacctagctgaagatttgtatgatggacaagtcctgcagaagcttttcgagaaactggagagtgagaagctaaatgtggctgaggtcacccagtcagagattgctcagaagcaaaaactgcagactgtcctggagaagatcaatgaaaccctgaaacttcctcccaggagcatcaagtggaatgtggattctgttcatgccaagagcctggtggccatcttacacctgctcgttgctctgtctcagtatttccgcgcaccaattcgactcccagaccatgtttccatccaagtggttgtggtccagaaacgagaaggaatcctccagtctcggcaaatccaagaggaaataactggtaacacagaggctctttccgggaggcatgaacgtgatgcctttgacaccttgttcgaccatgccccagacaagctgaatgtggtgaaaaaggtgggaaaggggtgcctgggatggacagagggaagcgagatgcaacagaacattgggaaaacccatccctgcagcttgcgagcttcctgccagaactggtggcatcacctaacctctgcacacacagggctttcccccttgccatccatgtacctgtctgttcctcactggatgttgcacctgggccttttcccctccatcagcatgaacagcctgtcttcccacccaggctaaccccagcaatctcagccttccccactcctcacagaattccctgtctccctggcctaggcacctgtgccgaagaagggacaggaaggagagatccagtggaatcattttatttcagttcccccacccagacactggctcagacactccacctatcattctgcctcttgggacctccttgttccttacacgccctgagttgtatgggactgc

SEQ ID NO: 272137 - DNA, 873 bp, Artificial Sequence
  derived and/or modified sequence
atgaatgcgattaacctgccactttctccaattccatttgaattggaccccgaagacactatgctggaagagaatgaggtgcgtacaatggtggacccaaactctcggtccgatcccaagctgcaggagttaatgaaagtgttaatagactggatcaacgatgtccttgtcggcgagcgcattatcgtcaaggatctggctgaggacctgtatgatggacaggtgctgcagaagctgttcgaaaaactggaatcagaaaaactaaacgttgccgaggtaacccaaagcgaaattgcccagaagcaaaagctgcagaccgttctggagaagataaatgagacacttaagctgccccctcgctctatcaagtggaacgtggatagcgtccatgccaagagcttggttgctatcttacatctgctggtggctcttagtcagtactttcgtgctcctatccgcctgccagaccatgtgagcatccaggtggtggttgtgcagaagagggaagggattctgcaaagcaggcagatccaagaagagattacggggaatacagaggccctcagtggcaggcatgaaagagacgccttcgacacattgttcgaccacgcgccagacaaactgaacgtcgtgaagaaggtcggaaaaggctgtctcgggtggacagagggctcagaaatgcagcagaatattgggaagacgcacccatgctcactgcgggctagctgccagaattggtggcatcatctgacatcggctcacactgggctgtcgccgcttccttctatgtacctgagtgttccacattggatgctgcatctaggtctcttcccgagcatctctatgaactccctctcgagtcatcccggatag

SEQ ID NO: 272138 - DNA, 873 bp, Artificial Sequence
  derived and/or modified sequence
atgaacgccatcaacctgcccctgagccccatccccttcgagctggaccccgaggacaccatgctggaggagaacgaggtgagaaccatggtggaccccaacagcagaagcgaccccaagctgcaggagctgatgaaggtgctgatcgactggatcaacgacgtgctggtgggcgagagaatcatcgtgaaggacctggccgaggacctgtacgacggccaggtgctgcagaagctgttcgagaagctggagagcgagaagctgaacgtggccgaggtgacccagagcgagatcgcccagaagcagaagctgcagaccgtgctggagaagatcaacgagaccctgaagctgccccccagaagcatcaagtggaacgtggacagcgtgcacgccaagagcctggtggccatcctgcacctgctggtggccctgagccagtacttcagagcccccatcagactgcccgaccacgtgagcatccaggtggtggtggtgcagaagagagagggcatcctgcagagcagacagatccaggaggagatcaccggcaacaccgaggccctgagcggcagacacgagagagacgccttcgacaccctgttcgaccacgcccccgacaagctgaacgtggtgaagaaggtgggcaagggctgcctgggctggaccgagggcagcgagatgcagcagaacatcggcaagacccacccctgcagcctgagagccagctgccagaactggtggcaccacctgaccagcgcccacaccggcctgagccccctgcccagcatgtacctgagcgtgccccactggatgctgcacctgggcctgttccccagcatcagcatgaacagcctgagcagccaccccggctag

SEQ ID NO: 272139 - protein, 1028 aa, Artificial Sequence
  derived and/or modified sequence
MGVAGRNRPGAAWAVLLLLLLLPPLLLLAGAVPPGRGRAAGPQEDVDECAQGLDDCHADALCQNTPTSYKCSCKPGYQGEGRQCEDIDECGNELNGGCVHDCLNIPGNYRCTCFDGFMLAHDGHNCLDVDECLENNGGCQHTCVNVMGSYECCCKEGFFLSDNQHTCIHRSEEGLSCMNKDHGCSHICKEAPRGSVACECRPGFELAKNQRDCILTCNHGNGGCQHSCDDTADGPECSCHPQYKMHTDGRSCLEREDTVLEVTESNTTSVVDGDKRVKRRLLMETCAVNNGGCDRTCKDTSTGVHCSCPVGFTLQLDGKTCKDIDECQTRNGGCDHFCKNIVGSFDCGCKKGFKLLTDEKSCQDVDECSLDRTCDHSCINHPGTFACACNRGYTLYGFTHCGDTNECSINNGGCQQVCVNTVGSYECQCHPGYKLHWNKKDCVEVKGLLPTSVSPRVSLHCGKSGGGDGCFLRCHSGIHLSSGLQGAYSVTCGSSSPLRNKQQKSNDSAFGDVTTIRTSVTFKLNEGKCSLKNAELFPEGLRPALPEKHSSVKESFRYVNLTCSSGKQVPGAPGRPSTPKEMFITVEFELETNQKEVTASCDLSCIVKRTEKRLRKAIRTLRKAVHREQFHLQLSGMNLDVAKKPPRTSERQAESCGVGQGHAENQCVSCRAGTYYDGARERCILCPNGTFQNEEGQMTCEPCPRPGNSGALKTPEAWNMSECGGLCQPGEYSADGFAPCHLCALGTFQPEAGRTSCFPCGGGLATKHQGATSFQDCETRVQCSPGHFYNTTTHRCIRCPVGTYQPEFGKNNCVSCPGNTTTDFDGSTNITQCKNRRCGGELGDFTGYIESPNYPGNYPANTECTWTINPPPKRRILIVVPEIFLPIEDDCGDYLVMRKTSSSNSVTTYETCQTYERPIAFTSRSKKLWIQFKSNEGNSARGFQVPYVTYDEDYQELIEDIVRDGRLYASENHQEILKDKKLIKALFDVLAHPQNYFKYTAQESREMFPRSFIRLLRSKVSRFLRPYK

SEQ ID NO: 272140 - DNA, 3087 bp, Artificial Sequence
  derived and/or modified sequence
atgggagttgcgggcaggaaccggcctggcgcggcctgggcagtcttactgctccttcttcttctgcccccacttctgctactcgccggcgccgtgccccccggaagggggcgcgcagccggcccccaggaggacgtggacgagtgcgctcagggcttggatgactgtcatgctgatgcactatgccagaacacacctaccagttataaatgtagctgcaagcctggctatcagggggaagggagacagtgtgaagacattgacgagtgcggcaacgagctcaacggaggctgtgtccatgattgtttgaacatccccggtaactatcgctgtacttgttttgacggattcatgctcgcgcacgacggccataactgtctcgacgttgatgagtgccttgagaacaatgggggctgccagcatacctgtgtgaacgtgatggggagctatgagtgctgctgcaaggagggattcttcctgtcagataatcagcacacctgtatccatcgatcagaagaaggactgagttgcatgaacaaagaccatgggtgttcgcacatttgtaaagaagctccaaggggctctgtggcctgcgaatgccgaccaggattcgagctcgcaaaaaatcagcgcgattgtatcttgacatgcaaccacgggaacggtgggtgccagcatagctgcgatgatacagcagacggacctgaatgctcttgccacccccagtacaaaatgcacactgatggccggtcctgcttggagagggaggacactgtcctggaagttactgagtccaatacaacaagcgtggtggacggagacaaacgtgtgaagcggagacttctgatggagacgtgtgctgtgaacaatggggggtgtgaccggacgtgtaaggatacctctacaggcgttcactgctcttgtccagtggggttcaccctccagctagatggaaagacttgtaaagacatcgatgaatgccagacgcggaatggcggctgtgaccacttctgcaagaacattgtgggttcatttgactgcggctgtaaaaaaggttttaagctgttaactgatgagaagagctgtcaggacgtagacgaatgctctctggacaggacctgtgatcactcctgcattaatcacccagggactttcgcatgtgcctgcaatagaggctatacgctgtacggctttactcactgtggggacacaaacgaatgttctatcaacaacggcggctgtcaacaagtgtgcgttaacacggtcggcagctacgaatgccagtgtcaccccggctataaactgcattggaataagaaagactgtgtagaggtgaagggcctcctgcccacttctgtctcccctcgcgtctcacttcactgtggcaaatcggggggcggcgatggttgcttcctgaggtgccactctggcatccacctcagtagtggactgcagggtgcttactccgtgacatgcgggtcttccagcccacttaggaacaaacagcaaaagtccaatgactcggcgttcggtgacgtgactacaatcagaacgtcagttacctttaaattgaatgaaggaaagtgctccttaaaaaacgctgaactgtttccagagggactaaggcctgctttacccgagaagcattcctccgtcaaggagtcatttcgttacgtgaatctgacgtgttcttcagggaaacaggtgcccggcgcgcctgggcgcccaagtacccccaaggagatgttcatcacagttgaatttgagctcgagaccaatcagaaggaagttacagcttcttgcgacctctcttgtatcgtaaagcggactgagaagagactccgcaaggctatccgcaccttgcggaaagcagtccatcgggaacaattccatctgcagctgtcaggaatgaacctggatgttgcgaagaaacctcccagaacctccgaacggcaagcagagtcttgcggagtaggacagggccatgccgaaaaccaatgtgtctcctgtcgggcaggaacctactatgacggcgctagagaacggtgtattctgtgtccaaacggcacattccagaacgaggaaggacaaatgacctgcgaaccatgtccccggcctggaaactctggtgctctcaagactccagaggcgtggaatatgtccgagtgtgggggactctgtcaacccggcgagtacagtgccgatgggttcgcaccttgccatctctgcgccttaggaacattccagcctgaggccggccggacaagctgttttccatgtggtggcggcctggccaccaaacatcagggagctactagtttccaagactgtgaaactcgggtgcagtgcagtcccggccatttttacaataccaccactcacagatgtatcaggtgccccgtgggcacttaccagcccgagttcggcaaaaacaactgcgtttcatgccccgggaacacaactacggatttcgatggctcaacaaacattacccagtgcaagaaccgcaggtgcggcggcgagctaggggatttcactggatacatcgaaagtcccaactatccaggaaattatcccgccaacacagagtgcacttggactattaatccccctcccaagcgtaggattctgattgtggttcctgagatctttctcccgatcgaggatgactgcggcgattacttagttatgcggaaaacctcttcctcgaactcggtaactacctatgagacgtgccagacctatgaaagacccattgcttttacaagtcggagcaaaaagctgtggattcaattcaaatcaaacgaaggcaatagcgcccgagggtttcaggttccttacgtcacttacgacgaagactatcaggagcttatagaggacattgttcgtgatggtcgcctgtatgcttccgaaaaccaccaggagattttgaaggataaaaaactgattaaggctctttttgacgtccttgcccacccccagaactatttcaaatatacagcacaggaatccagagagatgttcccgcggtcttttatacgattgctgaggtccaaagtgagcagatttttaaggccttacaaatag

SEQ ID NO: 272141 - DNA, 3087 bp, Artificial Sequence
  derived and/or modified sequence
atgggcgtggccggcaggaacagacctggagctgcctgggccgtgctgctgctgctgctgctgctgccccccctgctgctgctggccggggctgtgcccccaggccggggccgggccgccggcccccaggaggatgtggatgaatgtgcccagggcctggatgactgccacgcagatgccctgtgccagaacacccccaccagctacaagtgcagctgcaagccaggctaccagggcgagggccggcagtgtgaagatattgatgaatgtggaaatgagctgaatggaggctgtgtgcatgactgcctgaacatccctggcaactaccgctgcacctgctttgatggcttcatgctggcccatgatggccacaactgcctggatgtggatgaatgtctggagaacaacggcggctgccagcacacctgtgtgaatgtgatgggcagctatgagtgctgctgcaaggagggcttcttcctgagtgacaaccagcacacctgcatccacaggtctgaggagggcctgagctgcatgaacaaggaccacggctgcagccacatctgcaaggaggccccccggggctctgtggcctgtgaatgtcggcccggctttgagctggccaagaaccagagggactgcatcctgacctgcaaccacggcaatggaggctgccagcacagctgtgatgacacagcagatggccctgagtgcagctgccacccccagtacaagatgcacacagatggccgcagctgcctggagcgggaggacacagtgctggaggtgacagagagcaacaccacctctgtggtggatggagacaagagggtgaagaggcggctgctgatggagacctgtgctgtgaacaacggcggctgtgacaggacctgcaaggacaccagcactggagtgcactgcagctgccctgtgggcttcaccctgcagctggatggcaagacctgcaaggacattgatgagtgccagaccagaaatggaggctgtgaccacttctgcaagaacatcgtgggcagctttgactgtggctgcaagaagggcttcaagctgctgacagatgagaagagctgccaggatgtggatgaatgttccctggacaggacctgtgaccacagctgcatcaaccaccctggcacctttgcctgtgcctgcaacagaggctacaccctgtatggcttcacccactgtggggacaccaatgaatgttccatcaacaatggaggctgccagcaggtgtgtgtgaacacagtgggcagctatgagtgccagtgccaccctggctacaagctgcactggaacaagaaggactgtgtggaggtgaagggcctgctgcccacctctgtgagcccccgggtgtccctgcactgcggcaagagcggcggcggagatggctgcttcctgcgctgccacagcggcatccacctgagcagcggcctgcagggcgcctacagcgtgacctgtggcagcagcagccccctgaggaacaagcagcagaagagcaatgacagcgcctttggagatgtgaccaccatccgcacctctgtgaccttcaagctgaatgaaggcaagtgcagcctgaagaatgctgagctgtttcctgagggcctgcggcctgccctgcctgagaagcacagctctgtgaaggagagcttccgctacgtgaacctgacctgcagcagcggcaagcaggtgcctggggcccctggccggcccagcacccccaaggagatgttcatcaccgtggagtttgagctggagaccaaccagaaggaggtgacagccagctgtgacctgagctgcatcgtgaagaggacagagaagaggctgaggaaggccatccgcaccctgaggaaggctgtgcaccgggagcagttccacctgcagctgagcggcatgaacctggatgtggccaagaagccacccaggaccagcgagcggcaggccgagagctgtggggtgggccagggccatgctgagaaccagtgtgtgtcctgccgggccggcacctactatgatggagcccgggagcgctgcatcctgtgccccaacggcaccttccagaatgaggagggccagatgacctgtgagccctgcccccggcccggcaacagcggggccctgaagaccccagaggcctggaacatgtctgaatgtggcggcctgtgccagcctggagagtacagcgcagatggctttgccccctgccacctgtgtgccctgggcaccttccagcctgaggccggccgcaccagctgcttcccctgtggcggcggcctggccaccaagcaccagggcgccaccagcttccaggactgtgagaccagggtgcagtgcagccctggccacttctacaacaccaccacccaccgctgcatccgctgccctgtgggcacctaccagcctgagtttgggaagaacaactgtgtgtcctgccccggcaacaccaccacagactttgatggcagcaccaacatcacccagtgcaagaacagaagatgtggcggggagctgggggacttcaccggctacatcgagagccccaactacccaggcaactacccagccaacacagaatgtacctggaccatcaaccccccacccaagaggcgcatcctgattgtggtgcctgagatcttcctgcccattgaagatgactgtggggactacctggtgatgaggaagaccagcagcagcaacagcgtgaccacctatgagacctgccagacctatgagcggcccatcgccttcaccagccgcagcaagaagctgtggatccagttcaagagcaatgaaggcaacagcgcccggggcttccaggtgccctacgtgacctatgatgaggactaccaggagctgattgaagatattgtgagagatggccgcctgtatgccagcgagaaccaccaggagatcctgaaggacaagaagctgatcaaggccctgtttgatgtgctggcccacccccagaactacttcaagtacacagcccaggagagccgggagatgttccccaggagcttcatccggctgctgcggagcaaggtgagccgcttcctgcggccctacaagtag

SEQ ID NO: 272142 - DNA, 3087 bp, Artificial Sequence
  derived and/or modified sequence
atgggcgtggccggccggaaccggcccggcgccgcctgggccgtgctactgttgttgctactgctcccccctctgctcttactggctggggcggttccccccggacggggacgggccgcaggtccccaggaggatgttgacgagtgcgcacagggactggatgactgccacgccgacgccctttgtcagaacacacccacatcctacaagtgctcgtgcaaaccaggctatcagggggaaggaagacagtgtgaggacatcgacgagtgtgggaacgagctcaacggcgggtgcgtgcatgattgtctgaatattcccggtaattacagatgcacatgcttcgacggcttcatgctcgcccacgatgggcacaattgcctcgacgtcgacgagtgcctagaaaataacggagggtgtcaacatacgtgcgttaatgtgatggggtcttacgagtgctgttgcaaagaagggtttttcctttcggacaaccagcatacatgcattcatcgatccgaagaggggctgtcctgtatgaataaggaccacggttgtagccatatctgcaaagaagctcctcggggttcagtggcctgcgaatgcaggcccggctttgaactagccaaaaaccagagagactgtatactgacttgtaaccacggcaacggggggtgccagcatagttgcgatgataccgctgacggccccgaatgctcttgccaccctcaatacaagatgcacactgacgggagatcttgcctcgaaagggaagatacagtcttagaagtcacagagtccaacaccacatccgtggtagatggggacaaacgtgtgaaacggaggctcctcatggaaacgtgcgccgttaacaatggcggatgtgaccggacgtgtaaagatacttctactggagtccattgctcttgccccgtcggatttacactgcagctcgatggaaagacctgcaaggacattgacgagtgccagacgcggaatggagggtgcgatcacttttgtaagaatatcgtaggcagcttcgattgcggatgcaaaaaggggtttaagctcttaaccgacgaaaagagttgtcaagacgtggacgaatgctccctagatagaacatgcgatcattcatgcatcaaccaccctgggacttttgcctgtgcttgtaaccgtggctatactctgtatggctttacccactgtggcgatacaaacgagtgttctatcaataatgggggttgccagcaggtttgtgtcaacacagttggctcgtacgaatgccaatgccatccaggctacaaattgcactggaacaagaaggactgtgtcgaggtaaagggactcctgccaacgtctgtatcgccgcgtgtgtcactccactgcggcaagtccggggggggagatgggtgctttctgaggtgtcacagcgggatacacctctccagcggtttacagggcgcgtactcagtgacgtgcggttcatcttctccactgcgaaacaagcagcagaagagcaacgatagtgcttttggagatgtgaccacaatccgaacttccgtgacattcaagttgaacgaagggaaatgctctcttaagaacgcagagctatttccggaaggcctgcgccccgccctgcctgaaaagcacagtagtgtcaaagagagctttagatatgtgaatctcacctgctccagtggaaagcaagtgcccggcgcccctgggagaccctctacgcctaaagagatgttcattactgtggagtttgaattggaaaccaaccagaaggaggtgacagcttcctgtgacttgagttgcattgtcaaacgtactgaaaagcggctgcgaaaagctattcgaaccctgcggaaagctgttcaccgagaacagttccacctccaactgtccggcatgaatctagacgtggcgaagaagcctccccgcacaagcgaacgacaagcagagtcttgtggggtgggtcaggggcacgcggagaatcagtgtgtctcttgccgcgctggaacctattatgatggcgccagggagaggtgcattctctgccctaacggcacctttcagaatgaggagggccagatgacgtgtgaaccttgtccgcggcccggcaattcaggagccctgaaaacccctgaggcctggaatatgagtgagtgcgggggcctctgtcagcccggagagtattccgcggatgggtttgctccctgtcacttatgtgccctgggaacgttccagcctgaagccgggcggacatcatgctttccttgcggagggggcctcgccactaaacatcagggtgccacatcatttcaggattgcgagacccgcgtacagtgttccccgggccatttttacaataccacaactcatagatgtattcggtgcccagtggggacctaccagccagagtttggtaagaataattgcgttagctgcccaggcaataccaccacggattttgacggcagcacaaatatcacacaatgcaagaaccggcgttgcggtggcgagcttggcgactttactggttatatcgagtcccccaattatcctgggaattatcctgcaaatactgaatgcacgtggacaataaatccacctccgaaaagacgcatcctcatcgttgtgcctgagattttccttcccatcgaggacgattgcggagattaccttgtcatgcggaagacctcctccagtaactcagtgaccacctacgagacctgccagacatatgagcgccctattgcgtttactagcagaagtaagaaactgtggattcagtttaaatcaaacgagggtaacagtgcccgcgggttccaagtgccatacgtgacctatgacgaggattaccaagagctgatcgaagacattgtccgtgacggcagactttatgcatccgagaaccatcaagaaatactgaaagacaagaaactcattaaagcattatttgacgtcctcgcccacccccagaattactttaagtacactgctcaggaatctagggagatgttccctagaagcttcatcagattgctcaggagtaaggtgagccgattcctccggccatacaagtag

SEQ ID NO: 272143 - DNA, 3087 bp, Artificial Sequence
  derived and/or modified sequence
atgggggtggccggacgcaataggcctggcgcagcctgggctgtcctgcttctgcttcttcttcttcctccattgctcctccttgcaggagccgtgcccccaggtcgaggccgagctgcgggaccccaggaagacgtcgatgagtgtgctcaaggtttagacgattgccacgccgacgccctgtgtcaaaacacacccacttcctacaagtgtagctgtaagccaggataccaaggggaggggcgacagtgcgaggacattgatgaatgtgggaatgaactgaacggcggttgtgtgcatgattgtctcaacatccccggtaactataggtgcacatgtttcgatggattcatgcttgcccatgatggccacaactgtctggacgttgatgagtgtttggaaaataacggcggatgccagcacacatgcgtcaatgtgatgggcagctacgaatgttgctgcaaggaaggattttttcttagtgacaaccaacatacgtgtatccacaggtccgaagagggcttatcgtgtatgaacaaagatcatggctgcagccatatctgcaaagaggcccctcgtgggtcagtagcatgtgagtgtcgccctggcttcgagctggctaaaaatcagagagattgtatcctgacctgtaaccacggaaatgggggatgtcaacacagctgcgatgacactgccgatgggcctgagtgtagctgtcacccgcaatataaaatgcacacggacggccgatcctgtctggaaagggaagatacagtgctcgaggttactgaatcaaacacaacctccgttgtcgacggcgataaacgcgtgaagcgccgactgctgatggaaacgtgcgccgttaacaacggtggctgcgaccggacatgtaaagatacctcaacaggagttcattgctcatgcccagtggggtttacactccagcttgatgggaaaacatgcaaagatattgacgagtgtcagaccaggaatggaggatgcgatcatttctgcaaaaatatcgtgggatcattcgattgcggctgcaagaaaggttttaaactgttgacagatgaaaaatcctgccaagatgtagatgaatgctcactagaccggacctgtgatcattcctgcattaaccaccctggaacctttgcgtgcgcttgcaataggggatatacactctatggctttacccattgtggcgatacgaatgaatgctccatcaacaatggcggatgtcagcaggtgtgcgtcaacactgtgggtagttatgagtgccaatgccatcccggatacaagttgcactggaacaagaaagattgtgtcgaggtgaaagggctcttaccaacgagcgtcagtcccagggtgagcctccattgtgggaagagcggtgggggagatggatgttttctgcgctgccattctggaatccatttgtccagcggtcttcagggagcctattccgtcacatgtggcagcagctcccctctacgaaataaacagcaaaagtcaaacgactctgccttcggagacgttactacaatccgaaccagcgtgacttttaagctgaacgaggggaagtgcagcttgaagaacgcagaattgttccctgagggcttgagacctgctctgccggagaaacattcgagcgtgaaggaatcatttaggtatgtcaacctgacttgttcgtctggaaagcaagtccccggtgcccctgggcgacccagtactccaaaagagatgttcatcacagtagaatttgagctcgagacaaaccaaaaggaagtaactgcaagctgtgatctgtcatgcatcgttaaacgaaccgagaaaaggctcaggaaagctattcgaacactgcgaaaggctgtgcaccgggaacagtttcatctgcagttgtcaggcatgaacctggacgtcgccaagaagcccccacggacatcggagagacaggccgagagctgcggagttgggcagggccacgcggagaaccagtgcgtgtcctgtagggcgggtacctattatgacggggcaagggagcgctgcattctatgcccgaacggtactttccaaaacgaggagggacagatgacttgtgagccctgcccccgacctggcaactcgggagcactgaaaacaccagaggcttggaacatgagcgaatgtggaggcctgtgtcagcccggagagtactccgcagacgggtttgccccttgtcatctttgtgccctcggaacctttcagcccgaggcagggcgtacatcttgttttccttgtggcggaggcttggctaccaagcatcagggagctacgagtttccaggattgtgagactagggtccaatgtagtcctggacatttctataatactaccacacatagatgcattcggtgtcctgttggaacttatcagcctgagttcggaaagaacaattgcgtatcctgtccgggaaacaccacgacagacttcgatggatccacgaatatcacacaatgcaagaatcggcgatgcggaggagaacttggggatttcacaggatacatcgaaagccctaactatcccggaaattaccccgctaacaccgagtgtacttggacaatcaatcccccacctaaacgccgaatcctgattgttgtacctgaaatcttcctccctatagaagatgattgtggcgattaccttgtgatgcgtaagacatcctcctccaactccgtcaccacttatgaaacctgtcagacgtatgagcggccaattgcgttcaccagtaggagtaaaaagctttggatccagtttaagtccaatgagggaaacagcgctcgcggatttcaggtgccatacgtgacctatgacgaagattatcaagagcttattgaggacattgttagagatggcagattatatgcctctgaaaatcaccaggagatcctaaaggataaaaaactcattaaagccctgtttgatgtgttagcccacccccagaattattttaagtacaccgcccaggagagcagggagatgtttccgaggagcttcatacgtcttcttaggtccaaggtatcacgattcctcaggccgtataaatag

SEQ ID NO: 272144 - DNA, 4683 bp, Artificial Sequence
  derived and/or modified sequence
ccgcgcacacctccccgcgccgccgccgccaccgcccgcactccgccgcctctgcccgcaaccgctgagccatccatgggggtcgcgggccgcaaccgtcccggggcggcctgggcggtgctgctgctgctgctgctgctgccgccactgctgctgctggcgggggccgtcccgccgggtcggggccgtgccgcggggccgcaggaggatgtagatgagtgtgcccaagggctagatgactgccatgccgacgccctgtgtcagaacacacccacctcctacaagtgctcctgcaagcctggctaccaaggggaaggcaggcagtgtgaggacatcgatgaatgtggaaatgagctcaatggaggctgtgtccatgactgtttgaatattccaggcaattatcgttgcacttgttttgatggcttcatgttggctcatgacggtcataattgtcttgatgtggacgagtgcctggagaacaatggcggctgccagcatacctgtgtcaacgtcatggggagctatgagtgctgctgcaaggaggggtttttcctgagtgacaatcagcacacctgcattcaccgctcggaagagggcctgagctgcatgaataaggatcacggctgtagtcacatctgcaaggaggccccaaggggcagcgtcgcctgtgagtgcaggcctggttttgagctggccaagaaccagagagactgcatcttgacctgtaaccatgggaacggtgggtgccagcactcctgtgacgatacagccgatggcccagagtgcagctgccatccacagtacaagatgcacacagatgggaggagctgccttgagcgagaggacactgtcctggaggtgacagagagcaacaccacatcagtggtggatggggataaacgggtgaaacggcggctgctcatggaaacgtgtgctgtcaacaatggaggctgtgaccgcacctgtaaggatacttcgacaggtgtccactgcagttgtcctgttggattcactctccagttggatgggaagacatgtaaagatattgatgagtgccagacccgcaatggaggttgtgatcatttctgcaaaaacatcgtgggcagttttgactgcggctgcaagaaaggatttaaattattaacagatgagaagtcttgccaagatgtggatgagtgctctttggataggacctgtgaccacagctgcatcaaccaccctggcacatttgcttgtgcttgcaaccgagggtacaccctgtatggcttcacccactgtggagacaccaatgagtgcagcatcaacaacggaggctgtcagcaggtctgtgtgaacacagtgggcagctatgaatgccagtgccaccctgggtacaagctccactggaataaaaaagactgtgtggaagtgaaggggctcctgcccacaagtgtgtcaccccgtgtgtccctgcactgcggtaagagtggtggaggagacgggtgcttcctcagatgtcactctggcattcacctctcttcaggactgcaaggggcctactctgtcacctgtggctcttcctctcctctcaggaacaaacaacaaaaatcaaatgactctgcttttggggatgtcaccaccatcaggacaagtgtaacctttaagctaaatgaaggcaagtgtagtttgaaaaatgctgagctgtttcccgagggtctgcgaccagcactaccagagaagcacagctcagtaaaagagagcttccgctacgtaaaccttacatgcagctctggcaagcaagtcccaggagcccctggccgaccaagcacccctaaggaaatgtttatcactgttgagtttgagcttgaaactaaccaaaaggaggtgacagcttcttgtgacctgagctgcatcgtaaagcgaaccgagaagcggctccgtaaagccatccgcacgctcagaaaggccgtccacagggagcagtttcacctccagctctcaggcatgaacctcgacgtggctaaaaagcctcccagaacatctgaacgccaggcagagtcctgtggagtgggccagggtcatgcagaaaaccaatgtgtcagttgcagggctgggacctattatgatggagcacgagaacgctgcattttatgtccaaatggaaccttccaaaatgaggaaggacaaatgacttgtgaaccatgcccaagaccaggaaattctggggccctgaagaccccagaagcttggaatatgtctgaatgtggaggtctgtgtcaacctggtgaatattctgcagatggctttgcaccttgccatctctgtgccctgggcacgttccagcctgaagctggtcgaacttcctgcttcccctgtggaggaggccttgccaccaaacatcagggagctacttcctttcaggactgtgaaaccagagttcaatgttcacctggacatttctacaacaccaccactcaccgatgtattcgttgcccagtgggaacataccagcctgaatttggaaaaaataattgtgtttcttgcccaggaaatactacgactgactttgatggctccacaaacataacccagtgtaaaaacagaagatgtggaggggagctgggagatttcactgggtacattgaatccccaaactacccaggcaattacccagccaacaccgagtgtacgtggaccatcaacccaccccccaagcgccgcatcctgatcgtggtccctgagatcttcctgcccatagaggacgactgtggggactatctggtgatgcggaaaacctcttcatccaattctgtgacaacatatgaaacctgccagacctacgaacgccccatcgccttcacctccaggtcaaagaagctgtggattcagttcaagtccaatgaagggaacagcgctagagggttccaggtcccatacgtgacatatgatgaggactaccaggaactcattgaagacatagttcgagatggcaggctctatgcatctgagaaccatcaggaaatacttaaggataagaaacttatcaaggctctgtttgatgtcctggcccatccccagaactatttcaagtacacagcccaggagtcccgagagatgtttccaagatcgttcatccgattgctacgttccaaagtgtccaggtttttgagaccttacaaatgactcagcccacgtgccactcaatacaaatgttctgctatagggttggtgggacagagctgtcttccttctgcatgtcagcacagtcgggtattgctgcctcccgtatcagtgactcattagagttcaatttttatagataatacagatattttggtaaattgaacttggtttttctttcccagcatcgtggatgtagactgagaatggctttgagtggcatcagcttctcactgctgtgggcggatgtcttggatagatcacgggctggctgagctggactttggtcagcctaggtgagactcacctgtccttctggggtcttactcctcctcaaggagtctgtagtggaaaggaggccacagaataagctgcttattctgaaacttcagcttcctctagcccggccctctctaagggagccctctgcactcgtgtgcaggctctgaccaggcagaacaggcaagaggggagggaaggagacccctgcaggctccctccacccaccttgagacctgggaggactcagtttctccacagccttctccagcctgtgtgatacaagtttgatcccaggaacttgagttctaagcagtgctcgtgaaaaaaaaaagcagaaagaattagaaataaataaaaactaagcacttctggagacataataatgtacatttattgccagccttcctcgttgcaagcttccaccctgcagcaaatgcactatgctgactctcgcaccttcagctgtgccctctgacactctgctggccattgcctgagggactggggagttcaggtgaaatgtaatttcctcagtggatgagaatcatcaattgtcatgaaaaggcgatttcaccaaccctgagtcggtattgccaagggttctactccccaagtgggcttcccatcacaagggatctgaggtccaggtgggtgtggtgaggcccagcctgtcatgtatgccttccttccccagtctcaaatgtgagagacggactctgctccgtggacatgagcagccccttgaagggtggtctcattctctaacagtaacagcactgccagaaacaccccctgaatgccacacgatcatctcactttgggtcaggccagcagggcctcacgatcatttcttgaacttgaattttcagtgttattgaatctttaaacatttaaatccccaagcaaaaatctcattacagtgaataaaaaggaatccaatcaaacaagccaccacttccctaatggatggactacctacaactatagtgttttgttatttcaataacaattctatgcacagccaattctccataccaaagtactaaaaaaatgtttaacaagcatttttgaagaaaacaaagagaacttcattatggttaaacttgcttttcatctcagtgttgctttttttaacctgttaataacattgattcttaaaaagtcctaatcaaacttctttatttggatgggccctaaatattcattttcagatttctcttcaaaagtttgaacatcatcatt

SEQ ID NO: 272145 - DNA, 3087 bp, Artificial Sequence
  derived and/or modified sequence
atgggcgtggccggcagaaacagacccggcgccgcctgggccgtgctgctgctgctgctgctgctgccccccctgctgctgctggccggcgccgtgccccccggcagaggcagagccgccggcccccaggaggacgtggacgagtgcgcccagggcctggacgactgccacgccgacgccctgtgccagaacacccccaccagctacaagtgcagctgcaagcccggctaccagggcgagggcagacagtgcgaggacatcgacgagtgcggcaacgagctgaacggcggctgcgtgcacgactgcctgaacatccccggcaactacagatgcacctgcttcgacggcttcatgctggcccacgacggccacaactgcctggacgtggacgagtgcctggagaacaacggcggctgccagcacacctgcgtgaacgtgatgggcagctacgagtgctgctgcaaggagggcttcttcctgagcgacaaccagcacacctgcatccacagaagcgaggagggcctgagctgcatgaacaaggaccacggctgcagccacatctgcaaggaggcccccagaggcagcgtggcctgcgagtgcagacccggcttcgagctggccaagaaccagagagactgcatcctgacctgcaaccacggcaacggcggctgccagcacagctgcgacgacaccgccgacggccccgagtgcagctgccacccccagtacaagatgcacaccgacggcagaagctgcctggagagagaggacaccgtgctggaggtgaccgagagcaacaccaccagcgtggtggacggcgacaagagagtgaagagaagactgctgatggagacctgcgccgtgaacaacggcggctgcgacagaacctgcaaggacaccagcaccggcgtgcactgcagctgccccgtgggcttcaccctgcagctggacggcaagacctgcaaggacatcgacgagtgccagaccagaaacggcggctgcgaccacttctgcaagaacatcgtgggcagcttcgactgcggctgcaagaagggcttcaagctgctgaccgacgagaagagctgccaggacgtggacgagtgcagcctggacagaacctgcgaccacagctgcatcaaccaccccggcaccttcgcctgcgcctgcaacagaggctacaccctgtacggcttcacccactgcggcgacaccaacgagtgcagcatcaacaacggcggctgccagcaggtgtgcgtgaacaccgtgggcagctacgagtgccagtgccaccccggctacaagctgcactggaacaagaaggactgcgtggaggtgaagggcctgctgcccaccagcgtgagccccagagtgagcctgcactgcggcaagagcggcggcggcgacggctgcttcctgagatgccacagcggcatccacctgagcagcggcctgcagggcgcctacagcgtgacctgcggcagcagcagccccctgagaaacaagcagcagaagagcaacgacagcgccttcggcgacgtgaccaccatcagaaccagcgtgaccttcaagctgaacgagggcaagtgcagcctgaagaacgccgagctgttccccgagggcctgagacccgccctgcccgagaagcacagcagcgtgaaggagagcttcagatacgtgaacctgacctgcagcagcggcaagcaggtgcccggcgcccccggcagacccagcacccccaaggagatgttcatcaccgtggagttcgagctggagaccaaccagaaggaggtgaccgccagctgcgacctgagctgcatcgtgaagagaaccgagaagagactgagaaaggccatcagaaccctgagaaaggccgtgcacagagagcagttccacctgcagctgagcggcatgaacctggacgtggccaagaagccccccagaaccagcgagagacaggccgagagctgcggcgtgggccagggccacgccgagaaccagtgcgtgagctgcagagccggcacctactacgacggcgccagagagagatgcatcctgtgccccaacggcaccttccagaacgaggagggccagatgacctgcgagccctgccccagacccggcaacagcggcgccctgaagacccccgaggcctggaacatgagcgagtgcggcggcctgtgccagcccggcgagtacagcgccgacggcttcgccccctgccacctgtgcgccctgggcaccttccagcccgaggccggcagaaccagctgcttcccctgcggcggcggcctggccaccaagcaccagggcgccaccagcttccaggactgcgagaccagagtgcagtgcagccccggccacttctacaacaccaccacccacagatgcatcagatgccccgtgggcacctaccagcccgagttcggcaagaacaactgcgtgagctgccccggcaacaccaccaccgacttcgacggcagcaccaacatcacccagtgcaagaacagaagatgcggcggcgagctgggcgacttcaccggctacatcgagagccccaactaccccggcaactaccccgccaacaccgagtgcacctggaccatcaaccccccccccaagagaagaatcctgatcgtggtgcccgagatcttcctgcccatcgaggacgactgcggcgactacctggtgatgagaaagaccagcagcagcaacagcgtgaccacctacgagacctgccagacctacgagagacccatcgccttcaccagcagaagcaagaagctgtggatccagttcaagagcaacgagggcaacagcgccagaggcttccaggtgccctacgtgacctacgacgaggactaccaggagctgatcgaggacatcgtgagagacggcagactgtacgccagcgagaaccaccaggagatcctgaaggacaagaagctgatcaaggccctgttcgacgtgctggcccacccccagaactacttcaagtacaccgcccaggagagcagagagatgttccccagaagcttcatcagactgctgagaagcaaggtgagcagattcctgagaccctacaagtag

SEQ ID NO: 272146 - protein, 999 aa, Artificial Sequence
  derived and/or modified sequence
MGVAGRNRPGAAWAVLLLLLLLPPLLLLAGAVPPGRGRAAGPQEDVDECAQGLDDCHADALCQNTPTSYKCSCKPGYQGEGRQCEDIDECGNELNGGCVHDCLNIPGNYRCTCFDGFMLAHDGHNCLDVDECLENNGGCQHTCVNVMGSYECCCKEGFFLSDNQHTCIHRSEEGLSCMNKDHGCSHICKEAPRGSVACECRPGFELAKNQRDCILTCNHGNGGCQHSCDDTADGPECSCHPQYKMHTDGRSCLEREDTVLEVTESNTTSVVDGDKRVKRRLLMETCAVNNGGCDRTCKDTSTGVHCSCPVGFTLQLDGKTCKDIDECQTRNGGCDHFCKNIVGSFDCGCKKGFKLLTDEKSCQDVDECSLDRTCDHSCINHPGTFACACNRGYTLYGFTHCGDTNECSINNGGCQQVCVNTVGSYECQCHPGYKLHWNKKDCVEVKGLLPTSVSPRVSLHCGKSGGGDGCFLRCHSGIHLSSDVTTIRTSVTFKLNEGKCSLKNAELFPEGLRPALPEKHSSVKESFRYVNLTCSSGKQVPGAPGRPSTPKEMFITVEFELETNQKEVTASCDLSCIVKRTEKRLRKAIRTLRKAVHREQFHLQLSGMNLDVAKKPPRTSERQAESCGVGQGHAENQCVSCRAGTYYDGARERCILCPNGTFQNEEGQMTCEPCPRPGNSGALKTPEAWNMSECGGLCQPGEYSADGFAPCHLCALGTFQPEAGRTSCFPCGGGLATKHQGATSFQDCETRVQCSPGHFYNTTTHRCIRCPVGTYQPEFGKNNCVSCPGNTTTDFDGSTNITQCKNRRCGGELGDFTGYIESPNYPGNYPANTECTWTINPPPKRRILIVVPEIFLPIEDDCGDYLVMRKTSSSNSVTTYETCQTYERPIAFTSRSKKLWIQFKSNEGNSARGFQVPYVTYDEDYQELIEDIVRDGRLYASENHQEILKDKKLIKALFDVLAHPQNYFKYTAQESREMFPRSFIRLLRSKVSRFLRPYK

SEQ ID NO: 272147 - DNA, 3000 bp, Artificial Sequence
  derived and/or modified sequence
atgggcgtggctggacgtaaccgaccaggggctgcctgggcagtgctgctgctgctgctgctcctgccaccacttcttctcctcgcgggcgcagtccccccaggccgcggacgagctgctgggccgcaagaagatgtagacgagtgcgcacagggtctggatgactgccacgctgatgccctgtgtcaaaatactcctactagttataaatgttcctgcaaacctgggtaccaaggggagggcagacagtgtgaagacatcgacgagtgtggaaacgagctgaacggtggatgtgtccatgattgtctcaatattcccggtaactatcggtgcacgtgtttcgatggtttcatgctggctcatgacggccacaactgcctggatgtggatgaatgcctggaaaacaatggaggttgccagcacacctgtgtgaacgtgatgggctcgtacgagtgttgctgtaaggaggggttttttctgtccgacaatcagcacacctgtattcatagatccgaggaaggcctcagctgtatgaataaggatcacggctgctcccatatatgcaaagaagcccccagaggatcggtcgcttgcgagtgtcgacctggttttgagctagccaagaatcagagggattgcatcttaacttgcaaccacggcaatggcggctgccagcatagctgtgacgataccgcggacggccctgagtgcagttgtcacccacagtataagatgcacacagatggccgatcctgtctcgaacgcgaggacaccgtgttggaggttacagagagcaatacaacctccgtcgtggatggggacaagcgcgtaaaaagacgcctcctgatggagacttgcgcggtaaataatgggggatgcgatcggacatgtaaggacacgtcaaccggtgtgcattgctcttgccccgtcgggtttaccctccagctggatggtaaaacatgtaaagatatcgacgagtgccaaaccagaaacggaggctgtgaccacttttgtaagaatatcgtaggcagctttgactgcggctgtaagaaagggtttaaactgttgacggatgagaagagctgtcaggatgtggacgagtgttccctagataggacctgtgatcactcatgcattaaccatcctggcacatttgcctgcgcatgtaatcgcggctacaccctatacggctttacccattgtggcgacaccaacgagtgctccatcaataacggtggctgtcagcaggtgtgcgtgaacaccgtagggagctatgagtgtcagtgccaccccggctataagctgcactggaacaaaaaggattgcgtcgaggtcaagggtcttttgcccaccagcgtcagccccagagtgtcgctgcattgtggcaagtcaggtggtggcgacgggtgtttcctgcgctgtcactccgggatccatttatcctccgacgtgactaccatcaggacctctgtcaccttcaaactcaatgagggcaagtgttctttgaaaaatgccgaattatttccggagggtcttaggcctgcccttcccgagaagcatagttcagttaaggaaagctttcgctacgtgaacctaacttgcagttctggtaagcaggtacccggagcccctgggaggcccagcacgccaaaagaaatgtttatcacagtagagtttgagcttgaaacaaaccagaaagaggtaaccgcatcttgcgacctgtcctgcatcgtcaagcggaccgaaaagaggctgaggaaagcaatccggaccctgagaaaagccgtgcatcgcgagcagttccacttacagctttctggaatgaatctcgatgtcgcaaagaagccccctagaacgtcagagcgacaggctgagtcatgcggcgtgggacagggacatgccgaaaatcagtgcgtttcttgccgggccggaacttattatgacggggcccgcgagaggtgtatcctttgccctaatggtacttttcagaacgaagaaggccagatgacctgtgagccgtgccccaggcctggtaattctggggccttaaaaactcctgaggcatggaacatgtccgagtgcgggggcctctgccagccaggcgagtacagcgccgacggcttcgctccatgtcacctgtgtgccctggggacctttcagcctgaggccgggcggacatcatgctttccatgtggtggggggttagccacaaagcatcaaggagccacctcatttcaggactgcgagacacgagtgcagtgttcgccaggacacttctacaacactaccacacatcgttgcattagatgtccagtcggaacctatcagcccgagtttggaaagaacaactgcgtgagttgtccggggaatacaacgactgacttcgacggcagcactaatattacacaatgtaaaaacaggcgctgcggcggcgaactgggtgatttcaccggttatatcgagtccccaaactacccgggcaattaccccgccaatacagagtgtacatggaccattaaccccccacccaaaagaaggattttgatagtcgtacccgagatcttcctgccgatcgaggacgactgcggtgattacctggtgatgaggaaaaccagttcttccaactcagtgaccacgtacgagacttgtcagacgtacgagcgcccaatcgctttcacgtctagatctaagaagctgtggatccagttcaagagtaatgaggggaactctgcccgcggatttcaggtaccctacgtgacatatgatgaggactatcaggaactgatcgaggacattgtgcgcgacggtagattgtatgcatcagagaaccatcaagaaatcctgaaagataaaaagctaataaaggcactgttcgatgtgttggctcacccacagaattatttcaaatacactgctcaggaatcccgcgaaatgtttccaaggtcttttatccggttactgcggtcaaaagtctccaggttcctacgcccctacaaatag

SEQ ID NO: 272148 - DNA, 3000 bp, Artificial Sequence
  derived and/or modified sequence
atgggcgtggccggcaggaacagacctggagctgcctgggccgtgctgctgctgctgctgctgctgccccccctgctgctgctggccggggctgtgcccccaggccggggccgggccgccggcccccaggaggatgtggatgaatgtgcccagggcctggatgactgccacgcagatgccctgtgccagaacacccccaccagctacaagtgcagctgcaagccaggctaccagggcgagggccggcagtgtgaagatattgatgaatgtggaaatgagctgaatggaggctgtgtgcatgactgcctgaacatccctggcaactaccgctgcacctgctttgatggcttcatgctggcccatgatggccacaactgcctggatgtggatgaatgtctggagaacaacggcggctgccagcacacctgtgtgaatgtgatgggcagctatgagtgctgctgcaaggagggcttcttcctgagtgacaaccagcacacctgcatccacaggtctgaggagggcctgagctgcatgaacaaggaccacggctgcagccacatctgcaaggaggccccccggggctctgtggcctgtgaatgtcggcccggctttgagctggccaagaaccagagggactgcatcctgacctgcaaccacggcaatggaggctgccagcacagctgtgatgacacagcagatggccctgagtgcagctgccacccccagtacaagatgcacacagatggccgcagctgcctggagcgggaggacacagtgctggaggtgacagagagcaacaccacctctgtggtggatggagacaagagggtgaagaggcggctgctgatggagacctgtgctgtgaacaacggcggctgtgacaggacctgcaaggacaccagcactggagtgcactgcagctgccctgtgggcttcaccctgcagctggatggcaagacctgcaaggacattgatgagtgccagaccagaaatggaggctgtgaccacttctgcaagaacatcgtgggcagctttgactgtggctgcaagaagggcttcaagctgctgacagatgagaagagctgccaggatgtggatgaatgttccctggacaggacctgtgaccacagctgcatcaaccaccctggcacctttgcctgtgcctgcaacagaggctacaccctgtatggcttcacccactgtggggacaccaatgaatgttccatcaacaatggaggctgccagcaggtgtgtgtgaacacagtgggcagctatgagtgccagtgccaccctggctacaagctgcactggaacaagaaggactgtgtggaggtgaagggcctgctgcccacctctgtgagcccccgggtgtccctgcactgcggcaagagcggcggcggagatggctgcttcctgcgctgccacagcggcatccacctgagcagtgatgtgaccaccatccgcacctctgtgaccttcaagctgaatgaaggcaagtgcagcctgaagaatgctgagctgtttcctgagggcctgcggcctgccctgcctgagaagcacagctctgtgaaggagagcttccgctacgtgaacctgacctgcagcagcggcaagcaggtgcctggggcccctggccggcccagcacccccaaggagatgttcatcaccgtggagtttgagctggagaccaaccagaaggaggtgacagccagctgtgacctgagctgcatcgtgaagaggacagagaagaggctgaggaaggccatccgcaccctgaggaaggctgtgcaccgggagcagttccacctgcagctgagcggcatgaacctggatgtggccaagaagccacccaggaccagcgagcggcaggccgagagctgtggggtgggccagggccacgccgagaaccagtgtgtgtcctgcagagctggcacctactatgatggagcccgggagcgctgcatcctgtgccccaacggcaccttccagaatgaggagggccagatgacctgtgagccctgccccaggcctggcaacagcggggccctgaagaccccagaggcctggaacatgtctgaatgtggcggcctgtgccagcccggggagtacagcgcagatggctttgccccctgccacctgtgtgccctgggcaccttccagcctgaggccggccgcaccagctgcttcccctgtggcggcggcctggccaccaagcaccagggcgccaccagcttccaggactgtgagaccagggtgcagtgcagccctggccacttctacaacaccaccacccaccgctgcatccgctgccctgtgggcacctaccagcctgagtttgggaagaacaactgtgtgtcctgccccggcaacaccaccacagactttgatggcagcaccaacatcacccagtgcaagaacagaagatgtggcggggagctgggggacttcaccggctacatcgagagccccaactacccaggcaactacccagccaacacagagtgcacctggaccatcaaccccccacccaagaggcgcatcctgattgtggtgcctgagatcttcctgcccattgaagatgactgtggggactacctggtgatgaggaagaccagcagcagcaacagcgtgaccacctatgagacctgccagacctatgaaagacccatcgccttcaccagccgcagcaagaagctgtggatccagttcaagagcaatgaaggcaacagcgcccggggcttccaggtgccctacgtgacctatgatgaggactaccaggagctgattgaggacatcgtgagagatggccgcctgtatgccagcgagaaccaccaggagatcctgaaggacaagaagctgatcaaggccctgtttgatgtgctggcccacccccagaactacttcaagtacacagcccaggagagccgggagatgttccccaggagcttcatccggctgctgcggagcaaggtgagccgcttcctgcggccctacaagtag

SEQ ID NO: 272149 - DNA, 3000 bp, Artificial Sequence
  derived and/or modified sequence
atgggcgtggccggccggaaccggcccggcgccgcctgggccgtgctgctgttgctgcttctgctgccaccactactgctactagctggcgcggtcccgcccgggaggggcagagctgcaggtcctcaggaggatgtcgatgagtgcgcccaggggctggatgattgccatgcggacgccctgtgtcaaaatacccctacatcgtacaaatgttcatgcaaaccaggttatcaaggagagggacgccagtgcgaggatatcgacgagtgcggtaacgagctgaatggcgggtgtgtgcacgactgcctcaatataccggggaattatagatgcacttgctttgacgggttcatgctggcccatgatggtcataactgcctagacgtggatgaatgcctggagaataacggcggctgccagcacacatgtgtcaatgttatgggcagctatgaatgctgttgtaaagaaggcttctttctttcggataaccaacacacatgtattcacaggtctgaagaggggctttcctgtatgaacaaagatcacggatgttctcacatttgcaaagaagctcctaggggatctgttgcatgcgagtgtcgacccgggtttgaactcgctaaaaaccagcgagactgcatattaacgtgcaaccacggcaatggcgggtgtcagcactcttgtgatgacactgccgacggaccggaatgttcctgtcaccctcagtacaaaatgcatacagatgggcggtcatgcctcgagcgcgaggacaccgtcttagaggtgaccgagtctaacacgacgagcgtggtagacggcgacaagcgagtcaaaagacgcctcctgatggaaacctgtgctgtgaacaacgggggatgcgatcgtacctgcaaggacaccagcaccggggtgcattgctcctgcccagtaggctttactttgcagctggatggaaaaacgtgcaaagacatcgatgagtgccaaacacggaacggaggatgcgaccatttttgtaaaaatatcgtcggtagcttcgactgcgggtgtaagaaaggatttaagctgctgaccgatgagaagagttgtcaggatgtcgacgagtgttcactggacaggacatgcgatcacagctgcatcaatcaccccggtacgtttgcatgtgcctgtaatagaggatacactttgtatgggtttacacattgcggggatactaacgagtgtagtataaacaacggtggctgtcaacaggtgtgcgtgaacacggtgggaagctatgaatgccagtgccaccctggatacaaactacattggaacaaaaaggactgtgttgaggtaaaggggcttctgcctacttcggttagcccgcgagtgtctctccactgtggtaagagcggcggaggcgatggctgcttcctccggtgtcatagcggaattcacctgtcctcggacgtcaccactattcggacaagcgtgacgttcaaacttaatgagggcaaatgctccctgaaaaatgcagaacttttccccgagggcttaaggccggctctgccagagaagcacagtagtgtcaaggaaagttttagatatgttaacctcacttgttctagtggaaagcaggtaccaggagcacccggccggccaagcactccgaaagagatgtttatcaccgtggagttcgaactggagacaaaccagaaggaggtcactgcatcctgcgatctctcttgcatcgtgaagagaactgagaaaaggcttcgaaaagccattaggacactcagaaaagcggtgcaccgcgaacaattccacctccagctcagtggcatgaaccttgatgtggccaaaaagcctccacggacctcagagaggcaggctgagagctgtggcgtgggccagggtcacgccgagaatcagtgtgtgtcatgtagagccgggacttactatgacggcgctcgagagagatgcatactctgccccaatggcactttccagaacgaggagggacaaatgacatgcgagccctgtcctcgacctggaaacagtggggcactgaagacgcctgaagcatggaatatgagcgagtgcggcggcctgtgccagccaggcgaatacagtgcagacggattcgcgccctgccatttatgcgccctcggaacgtttcagcccgaggcggggaggaccagctgcttcccctgcgggggagggttagctaccaaacatcagggagcaacctccttccaggactgcgagacccgcgtgcagtgctcgccgggtcacttttataacacgacaacacacagatgcattcgatgcccggtgggcacataccagcccgagttcgggaagaacaattgcgtgagttgtccgggaaataccactaccgacttcgacgggagcacgaatatcacccagtgtaagaaccgacgttgtggtggtgagctgggagacttcaccggttacattgagagtcctaactaccctggtaattaccccgcgaacactgaatgtacatggaccatcaatccgccacccaaacggcggatcctgattgtggttccggaaatctttttgccaatcgaagatgactgtggtgactacctggtgatgagaaaaacgagctccagtaatagtgtgactacatatgaaacttgtcaaacatatgagcggcctattgctttcacaagccggagtaagaagttatggatccagtttaagtccaatgagggtaacagcgcccgcggtttccaggtcccctacgtgacctacgatgaggactaccaagagctgattgaagacatcgtgagagatggacgactttacgctagtgaaaaccatcaagagattcttaaggataagaagctgatcaaagccctttttgatgtcctggcccacccacagaactacttcaagtataccgcccaggagtcacgcgaaatgtttccaaggtcgttcatcaggttactgcgtagcaaggtgagccggtttttgcggccttacaaatag

SEQ ID NO: 272150 - DNA, 3000 bp, Artificial Sequence
  derived and/or modified sequence
atgggcgtggctggtcgaaaccgacccggtgcagcatgggccgtacttttgcttctcctcctcctgccacctctgcttttgctggccggtgcagtcccaccaggaagaggccgtgcagctggtccccaagaagatgtagatgagtgcgctcaggggctcgatgactgtcacgcagatgcgctgtgtcagaatacacctacctcttacaagtgtagctgcaaacccggttaccagggagaggggaggcagtgtgaggatattgacgaatgtggaaatgagctaaatggcggttgcgtccatgattgtttgaatattcctgggaattatcgctgtacctgttttgacggtttcatgctcgcccacgacgggcacaattgtcttgacgtggacgagtgcctggagaataacggagggtgtcagcatacatgtgtcaatgtgatgggcagttatgaatgctgttgtaaagagggcttcttcctttccgacaatcagcatacttgcatccaccgctccgaagaaggattatcgtgtatgaataaggaccacgggtgctcacacatctgcaaggaagctccccgaggctccgtggcgtgcgaatgtcggccaggtttcgaactggctaaaaaccagcgggattgtatcctgacatgtaaccacggcaacggtgggtgtcagcattcatgtgatgacaccgcggatggaccagagtgttcttgtcatccccagtataagatgcatacggacggaaggagctgcctggagcgcgaagacaccgtgctggaggtcaccgagagcaataccacctctgtagtggacggcgacaaaagggtgaaacgcagactgctcatggagacgtgcgctgtgaacaacggagggtgcgacaggacatgcaaggacacaagcactggagtgcattgtagctgcccagtgggcttcacacttcaattagacggcaaaacatgcaaggacatcgacgaatgtcagacaagaaatggtggttgcgaccacttctgtaagaatattgttggcagcttcgactgtggttgcaagaaggggtttaagctgctcacggatgagaagtcctgtcaggatgtagacgaatgctcactggatagaacctgtgaccactcttgcataaaccaccccggaacatttgcctgtgcttgcaaccggggttacacgttgtatggattcacccactgcggagacaccaacgagtgctccatcaacaacggagggtgccaacaagtgtgtgtgaacactgtgggctcgtacgagtgccagtgccatcctggctacaagctccactggaacaagaaggactgtgtagaagtgaagggtctactacccacaagtgttagtcctcgggtctcgctacactgcggcaaaagcggtggcggagacggatgcttccttcgctgccacagcggaatccatttgtcaagtgacgtgactactatccggacttcagtgaccttcaagctgaacgaggggaagtgtagcctgaaaaacgcggaactctttccagagggactcagaccggctttgccggagaagcacagctcagtcaaggaaagctttagatacgtgaacctcacttgctcatccggaaagcaggttcccggtgctcccggtaggccctcaactccgaaggagatgtttattacagttgaatttgagctagaaaccaatcaaaaggaagtcacagcaagctgcgacttgtcctgtatagttaagcgtaccgagaaacgcctgaggaaggctatccggacccttcgtaaagccgtgcacagagaacagttccacctgcagctgtctggcatgaatctggacgtggccaagaaacccccacggactagcgaacggcaggccgagagctgcggtgttgggcagggccatgccgagaatcagtgcgtttcctgtcgcgctggtacttattatgacggcgctcgagagcggtgcattttgtgtccaaacggcacgtttcagaatgaggagggccaaatgacatgtgaaccctgtcctaggccaggcaatagcggggcactgaagacccctgaggcttggaatatgtctgagtgtggtggtctgtgccagcctggtgagtactctgccgatggcttcgccccatgtcatctctgcgccctcggtacatttcagccagaggctggcaggacttcctgcttcccatgtggcggtggacttgcaacaaaacaccaaggggctacatcatttcaggactgtgaaacgcgggtgcagtgctctccaggtcacttttacaataccaccacacatcgctgtataagatgccccgtgggcacctaccagccagagtttgggaagaataactgtgtctcatgtcccggtaatacaactacagacttcgacggttccaccaacattacccagtgtaagaaccggaggtgcgggggtgagttgggcgattttacggggtatatcgaaagcccaaattatcccggaaattatcctgcaaatactgagtgcacatggactatcaaccccccacccaaacggagaatcctcatcgttgtccccgagatttttctgccgatcgaggacgattgtggagactaccttgtaatgcgcaagacttccagctccaattctgtaacaacatacgagacatgccagacttacgagcggccaattgcattcacatcccgttctaagaagctgtggattcagtttaaaagtaacgaagggaatagtgccagaggcttccaggttccttacgttacctacgatgaagattaccaggaactgatcgaagacatcgtcagagatggccgactatacgccagtgagaatcaccaggagatactgaaggataagaaactcatcaaagccctctttgatgtgctggctcaccctcagaactatttcaagtacacggcccaagagtcaagggagatgttcccgcgtagcttcatccgcctgctcagaagtaaagttagccgatttctccgtccatataaatag

SEQ ID NO: 272151 - DNA, 3727 bp, Artificial Sequence
  derived and/or modified sequence
gcgcacacctccccgcgccgccgccgccaccgcccgcactccgccgcctctgcccgcaaccgctgagccatccatgggggtcgcgggccgcaaccgtcccggggcggcctgggcggtgctgctgctgctgctgctgctgccgccactgctgctgctggcgggggccgtcccgccgggtcggggccgtgccgcggggccgcaggaggatgtagatgagtgtgcccaagggctagatgactgccatgccgacgccctgtgtcagaacacacccacctcctacaagtgctcctgcaagcctggctaccaaggggaaggcaggcagtgtgaggacatcgatgaatgtggaaatgagctcaatggaggctgtgtccatgactgtttgaatattccaggcaattatcgttgcacttgttttgatggcttcatgttggctcatgacggtcataattgtcttgatgtggacgagtgcctggagaacaatggcggctgccagcatacctgtgtcaacgtcatggggagctatgagtgctgctgcaaggaggggtttttcctgagtgacaatcagcacacctgcattcaccgctcggaagagggcctgagctgcatgaataaggatcacggctgtagtcacatctgcaaggaggccccaaggggcagcgtcgcctgtgagtgcaggcctggttttgagctggccaagaaccagagagactgcatcttgacctgtaaccatgggaacggtgggtgccagcactcctgtgacgatacagccgatggcccagagtgcagctgccatccacagtacaagatgcacacagatgggaggagctgccttgagcgagaggacactgtcctggaggtgacagagagcaacaccacatcagtggtggatggggataaacgggtgaaacggcggctgctcatggaaacgtgtgctgtcaacaatggaggctgtgaccgcacctgtaaggatacttcgacaggtgtccactgcagttgtcctgttggattcactctccagttggatgggaagacatgtaaagatattgatgagtgccagacccgcaatggaggttgtgatcatttctgcaaaaacatcgtgggcagttttgactgcggctgcaagaaaggatttaaattattaacagatgagaagtcttgccaagatgtggatgagtgctctttggataggacctgtgaccacagctgcatcaaccaccctggcacatttgcttgtgcttgcaaccgagggtacaccctgtatggcttcacccactgtggagacaccaatgagtgcagcatcaacaacggaggctgtcagcaggtctgtgtgaacacagtgggcagctatgaatgccagtgccaccctgggtacaagctccactggaataaaaaagactgtgtggaagtgaaggggctcctgcccacaagtgtgtcaccccgtgtgtccctgcactgcggtaagagtggtggaggagacgggtgcttcctcagatgtcactctggcattcacctctcttcagatgtcaccaccatcaggacaagtgtaacctttaagctaaatgaaggcaagtgtagtttgaaaaatgctgagctgtttcccgagggtctgcgaccagcactaccagagaagcacagctcagtaaaagagagcttccgctacgtaaaccttacatgcagctctggcaagcaagtcccaggagcccctggccgaccaagcacccctaaggaaatgtttatcactgttgagtttgagcttgaaactaaccaaaaggaggtgacagcttcttgtgacctgagctgcatcgtaaagcgaaccgagaagcggctccgtaaagccatccgcacgctcagaaaggccgtccacagggagcagtttcacctccagctctcaggcatgaacctcgacgtggctaaaaagcctcccagaacatctgaacgccaggcagagtcctgtggagtgggccagggtcatgcagaaaaccaatgtgtcagttgcagggctgggacctattatgatggagcacgagaacgctgcattttatgtccaaatggaaccttccaaaatgaggaaggacaaatgacttgtgaaccatgcccaagaccaggaaattctggggccctgaagaccccagaagcttggaatatgtctgaatgtggaggtctgtgtcaacctggtgaatattctgcagatggctttgcaccttgccatctctgtgccctgggcacgttccagcctgaagctggtcgaacttcctgcttcccctgtggaggaggccttgccaccaaacatcagggagctacttcctttcaggactgtgaaaccagagttcaatgttcacctggacatttctacaacaccaccactcaccgatgtattcgttgcccagtgggaacataccagcctgaatttggaaaaaataattgtgtttcttgcccaggaaatactacgactgactttgatggctccacaaacataacccagtgtaaaaacagaagatgtggaggggagctgggagatttcactgggtacattgaatccccaaactacccaggcaattacccagccaacaccgagtgtacgtggaccatcaacccaccccccaagcgccgcatcctgatcgtggtccctgagatcttcctgcccatagaggacgactgtggggactatctggtgatgcggaaaacctcttcatccaattctgtgacaacatatgaaacctgccagacctacgaacgccccatcgccttcacctccaggtcaaagaagctgtggattcagttcaagtccaatgaagggaacagcgctagagggttccaggtcccatacgtgacatatgatgaggactaccaggaactcattgaagacatagttcgagatggcaggctctatgcatctgagaaccatcaggaaatacttaaggataagaaacttatcaaggctctgtttgatgtcctggcccatccccagaactatttcaagtacacagcccaggagtcccgagagatgtttccaagatcgttcatccgattgctacgttccaaagtgtccaggtttttgagaccttacaaatgactcagcccacgtgccactcaatacaaatgttctgctatagggttggtgggacagagctgtcttccttctgcatgtcagcacagtcgggtattgctgcctcccgtatcagtgactcattagagttcaatttttatagataatacagatattttggtaaattgaacttggtttttctttcccagcatcgtggatgtagactgagaatggctttgagtggcatcagcttctcactgctgtgggcggatgtcttggatagatcacgggctggctgagctggactttggtcagcctaggtgagactcacctgtccttctggggtcttactcctcctcaaggagtctgtagtggaaaggaggccacagaataagctgcttattctgaaacttcagcttcctctagcccggccctctctaagggagccctctgcactcgtgtgcaggctctgaccaggcagaacaggcaagaggggagggaaggagacccctgcaggctccctccacccaccttgagacctgggaggactcagtttctccacagccttctccagcctgtgtgatacaagtttgatcccaggaacttgagttctaagcagtgctcgtgaaaaaaaaaagcagaaagaattagaaataaataaaaactaagcacttctggaga

SEQ ID NO: 272152 - DNA, 3000 bp, Artificial Sequence
  derived and/or modified sequence
atgggcgtggccggcagaaacagacccggcgccgcctgggccgtgctgctgctgctgctgctgctgccccccctgctgctgctggccggcgccgtgccccccggcagaggcagagccgccggcccccaggaggacgtggacgagtgcgcccagggcctggacgactgccacgccgacgccctgtgccagaacacccccaccagctacaagtgcagctgcaagcccggctaccagggcgagggcagacagtgcgaggacatcgacgagtgcggcaacgagctgaacggcggctgcgtgcacgactgcctgaacatccccggcaactacagatgcacctgcttcgacggcttcatgctggcccacgacggccacaactgcctggacgtggacgagtgcctggagaacaacggcggctgccagcacacctgcgtgaacgtgatgggcagctacgagtgctgctgcaaggagggcttcttcctgagcgacaaccagcacacctgcatccacagaagcgaggagggcctgagctgcatgaacaaggaccacggctgcagccacatctgcaaggaggcccccagaggcagcgtggcctgcgagtgcagacccggcttcgagctggccaagaaccagagagactgcatcctgacctgcaaccacggcaacggcggctgccagcacagctgcgacgacaccgccgacggccccgagtgcagctgccacccccagtacaagatgcacaccgacggcagaagctgcctggagagagaggacaccgtgctggaggtgaccgagagcaacaccaccagcgtggtggacggcgacaagagagtgaagagaagactgctgatggagacctgcgccgtgaacaacggcggctgcgacagaacctgcaaggacaccagcaccggcgtgcactgcagctgccccgtgggcttcaccctgcagctggacggcaagacctgcaaggacatcgacgagtgccagaccagaaacggcggctgcgaccacttctgcaagaacatcgtgggcagcttcgactgcggctgcaagaagggcttcaagctgctgaccgacgagaagagctgccaggacgtggacgagtgcagcctggacagaacctgcgaccacagctgcatcaaccaccccggcaccttcgcctgcgcctgcaacagaggctacaccctgtacggcttcacccactgcggcgacaccaacgagtgcagcatcaacaacggcggctgccagcaggtgtgcgtgaacaccgtgggcagctacgagtgccagtgccaccccggctacaagctgcactggaacaagaaggactgcgtggaggtgaagggcctgctgcccaccagcgtgagccccagagtgagcctgcactgcggcaagagcggcggcggcgacggctgcttcctgagatgccacagcggcatccacctgagcagcgacgtgaccaccatcagaaccagcgtgaccttcaagctgaacgagggcaagtgcagcctgaagaacgccgagctgttccccgagggcctgagacccgccctgcccgagaagcacagcagcgtgaaggagagcttcagatacgtgaacctgacctgcagcagcggcaagcaggtgcccggcgcccccggcagacccagcacccccaaggagatgttcatcaccgtggagttcgagctggagaccaaccagaaggaggtgaccgccagctgcgacctgagctgcatcgtgaagagaaccgagaagagactgagaaaggccatcagaaccctgagaaaggccgtgcacagagagcagttccacctgcagctgagcggcatgaacctggacgtggccaagaagccccccagaaccagcgagagacaggccgagagctgcggcgtgggccagggccacgccgagaaccagtgcgtgagctgcagagccggcacctactacgacggcgccagagagagatgcatcctgtgccccaacggcaccttccagaacgaggagggccagatgacctgcgagccctgccccagacccggcaacagcggcgccctgaagacccccgaggcctggaacatgagcgagtgcggcggcctgtgccagcccggcgagtacagcgccgacggcttcgccccctgccacctgtgcgccctgggcaccttccagcccgaggccggcagaaccagctgcttcccctgcggcggcggcctggccaccaagcaccagggcgccaccagcttccaggactgcgagaccagagtgcagtgcagccccggccacttctacaacaccaccacccacagatgcatcagatgccccgtgggcacctaccagcccgagttcggcaagaacaactgcgtgagctgccccggcaacaccaccaccgacttcgacggcagcaccaacatcacccagtgcaagaacagaagatgcggcggcgagctgggcgacttcaccggctacatcgagagccccaactaccccggcaactaccccgccaacaccgagtgcacctggaccatcaaccccccccccaagagaagaatcctgatcgtggtgcccgagatcttcctgcccatcgaggacgactgcggcgactacctggtgatgagaaagaccagcagcagcaacagcgtgaccacctacgagacctgccagacctacgagagacccatcgccttcaccagcagaagcaagaagctgtggatccagttcaagagcaacgagggcaacagcgccagaggcttccaggtgccctacgtgacctacgacgaggactaccaggagctgatcgaggacatcgtgagagacggcagactgtacgccagcgagaaccaccaggagatcctgaaggacaagaagctgatcaaggccctgttcgacgtgctggcccacccccagaactacttcaagtacaccgcccaggagagcagagagatgttccccagaagcttcatcagactgctgagaagcaaggtgagcagattcctgagaccctacaagtag

SEQ ID NO: 272153 - protein, 1043 aa, Artificial Sequence
  derived and/or modified sequence
MAASFPPTLGLSSAPDEIQHPHIKFSEWKFKLFRVRSFEKTPEEAQKEKKDSFEGKPSLEQSPAVLDKADGQKPVPTQPLLKAHPKFSKKFHDNEKARGKAIHQANLRHLCRICGNSFRADEHNRRYPVHGPVDGKTLGLLRKKEKRATSWPDLIAKVFRIDVKADVDSIHPTEFCHNCWSIMHRKFSSAPCEVYFPRNVTMEWHPHTPSCDICNTARRGLKRKSLQPNLQLSKKLKTVLDQARQARQHKRRAQARISSKDVMKKIANCSKIHLSTKLLAVDFPEHFVKSISCQICEHILADPVETNCKHVFCRVCILRCLKVMGSYCPSCRYPCFPTDLESPVKSFLSVLNSLMVKCPAKECNEEVSLEKYNHHISSHKESKEIFVHINKGGRPRQHLLSLTRRAQKHRLRELKLQVKAFADKEEGGDVKSVCMTLFLLALRARNEHRQADELEAIMQGKGSGLQPAVCLAIRVNTFLSCSQYHKMYRTVKAITGRQIFQPLHALRNAEKVLLPGYHHFEWQPPLKNVSSSTDVGIIDGLSGLSSSVDDYPVDTIAKRFRYDSALVSALMDMEEDILEGMRSQDLDDYLNGPFTVVVKESCDGMGDVSEKHGSGPVVPEKAVRFSFTIMKITIAHSSQNVKVFEEAKPNSELCCKPLCLMLADESDHETLTAILSPLIAEREAMKSSELMLELGGILRTFKFIFRGTGYDEKLVREVEGLEASGSVYICTLCDATRLEASQNLVFHSITRSHAENLERYEVWRSNPYHESVEELRDRVKGVSAKPFIETVPSIDALHCDIGNAAEFYKIFQLEIGEVYKNPNASKEERKRWQATLDKHLRKKMNLKPIMRMNGNFARKLMTKETVDAVCELIPSEERHEALRELMDLYLKMKPVWRSSCPAKECPESLCQYSFNSQRFAELLSTKFKYRYEGKITNYFHKTLAHVPEIIERDGSIGAWASEGNESGNKLFRRFRKMNARQSKCYEMEDVLKHHWLYTSKYLQKFMNAHNALKTSGFTMNPQASLGDPLGIEDSLESQDSMEF

SEQ ID NO: 272154 - DNA, 3132 bp, Artificial Sequence
  derived and/or modified sequence
atggctgcaagtttcccacccacgcttgggttatcatctgcccccgatgagatccagcatccacatatcaagttctctgagtggaaatttaagctgtttagagtccgctctttcgagaagacccccgaggaggcccagaaagagaagaaggactctttcgagggaaagccttcgctcgagcagtcccccgcagtgctggataaagccgatgggcagaagcccgtgcctacccagcccctactcaaagcacatccaaagttctcaaaaaagtttcatgacaatgagaaggcccgggggaaagcgattcaccaagcaaacctgcgccacctgtgccgaatttgcggaaattcgttcagagccgacgaacataatagacggtatcccgtccacggccccgtagacggtaaaaccctgggcctcctcaggaaaaaggaaaagcgagctacgtcgtggccagatctcatagcaaaagtgtttaggattgatgttaaagccgatgtggattctatacatcccacggaattctgtcacaattgttggtctattatgcatcgaaagttttcaagtgcgccttgtgaggtttattttccgcgcaatgtcacaatggaatggcatccacacacaccatcctgtgacatctgtaatacggccaggcgtggacttaagagaaaatccctccaaccaaacctgcagctctcgaagaaacttaaaacagtgctggaccaggcaagacaggctaggcagcacaaacggcgagcccaggccaggatcagctctaaagacgttatgaaaaaaattgccaactgcagcaagatacacctgagcacaaagctgctcgcagttgactttccagaacatttcgtcaaatccatctcgtgccaaatatgtgagcacattctggctgaccctgtggagacaaactgtaagcacgtgttttgccgcgtttgtatcctgaggtgcctgaaggttatgggttcttactgcccctcctgcaggtacccatgctttcctaccgacctagaaagtccagtcaaaagttttttgagcgtcctaaacagtctcatggtcaaatgcccagctaaggagtgcaacgaagaggtgtctcttgagaaatacaatcaccatatttcctcgcacaaagagagcaaagaaattttcgtacacatcaataaggggggcaggcctcgacagcacctgctctctctgacacgcagggcccagaagcatagactcagggagttgaagcttcaggtaaaggccttcgcggacaaggaggaaggtggcgacgtgaagtcggtttgcatgactctgttcctccttgctctaagggctagaaacgaacacagacaggcggacgaactggaggctattatgcaaggcaagggctctgggttgcagcctgctgtgtgtcttgctatccgcgtcaacaccttcctgtcctgcagccaataccacaagatgtatcgcaccgttaaggcaatcactggtagacagatcttccagcccctccatgctctgcgcaacgctgaaaaggtccttctgccggggtaccaccacttcgaatggcagccacctctcaagaacgtaagctcctcgacagacgttggaatcatcgatggcttgagcggactttcttcatccgttgacgactacccagttgacacaatcgccaagcggttccggtacgactcggctctagtgagtgctctgatggatatggaggaggacattcttgagggcatgcgctcgcaggacctagatgactatttgaacgggcctttcacagtagtcgtcaaggaaagttgcgacggcatgggagacgtaagtgaaaagcacggctctggaccagtcgtccctgaaaaggccgtgcgattcagtttcacaattatgaagattactatcgcccattcatctcagaacgtaaaagtctttgaagaggctaaaccaaattctgagttatgctgcaagccactatgcctgatgctggccgacgagtctgatcatgaaacgctcacagccatcctgagcccgctgatcgctgagcgcgaggctatgaaaagcagcgaactgatgttggaactgggcggaatcctgagaacctttaagtttatcttcagggggaccggttatgatgaaaagctggtgagggaggtcgagggcctggaggcaagcggaagtgtttatatctgcacactctgtgatgcaacgaggctggaggcgagtcagaatctggtgtttcactcaatcacacgctcacacgctgagaatttagagagatatgaagtttggcggagcaacccttatcacgaatccgtggaggaactgcgtgaccgggttaaaggagtgtccgccaaacccttcattgagaccgtaccatccatagatgcactacattgtgacataggaaacgcagctgaattttataaaatttttcagctcgagatcggtgaggtgtacaagaaccctaacgccagtaaagaggagcggaaacggtggcaggctactctggacaaacatctgaggaaaaaaatgaacctgaagcctatcatgagaatgaatggcaatttcgcgcggaagcttatgacaaaggagacagtagacgcggtgtgtgaactgattccatctgaggagcgtcatgaggctctccgcgaattaatggacctgtacctgaagatgaaaccagtttggcgcagtagttgcccggccaaggagtgccccgaatccctttgtcagtactctttcaacagtcagcggttcgcagagttgttatccaccaaatttaaataccgttatgagggaaaaatcaccaactatttccataagactcttgcccacgtgccagagattatcgaaagagacggcagcatcggcgcttgggctagcgaagggaatgagtctggtaataagttgtttaggcggttcaggaaaatgaacgccagacagagcaagtgttatgaaatggaagacgtgctgaagcaccattggttgtacacatctaagtacttacagaagtttatgaatgcccacaacgccctgaagaccagtggctttacaatgaaccctcaagctagcctgggcgacccactaggaattgaggattctttggagtctcaggattccatggagttctag

SEQ ID NO: 272155 - DNA, 3132 bp, Artificial Sequence
  derived and/or modified sequence
atggccgccagcttcccccccaccctgggcctgagcagcgccccagatgagatccagcacccccacatcaagttcagcgagtggaagttcaagctgttccgggtgcgcagctttgagaagaccccagaggaggcccagaaggagaagaaggacagctttgagggcaagcccagcctggagcagagccctgctgtgctggacaaggcagatggccagaagcctgtgcccacccagcccctgctgaaggcccaccccaagttcagcaagaagttccatgacaatgagaaggcccggggcaaggccatccaccaggccaacctgcggcacctgtgccgcatctgtggcaacagcttccgggcagatgagcacaacagacgctaccctgtgcacggccctgtggatggcaagaccctgggcctgctgaggaagaaggagaagagggccacctcctggccagacctgattgccaaggtgttcagaattgatgtgaaggcagatgtggacagcatccaccccacagagttctgccacaactgctggagcatcatgcacaggaagttcagcagcgccccctgtgaggtgtacttccccagaaatgtgaccatggagtggcacccccacacccccagctgtgacatctgcaacacagcccggcggggcctgaagaggaagagcctgcagcccaacctgcagctgagcaagaagctgaagacagtgctggaccaggcccggcaggcccggcagcacaagagaagagcccaggcccgcatcagcagcaaggatgtgatgaagaagatcgccaactgcagcaagatccacctgagcaccaagctgctggccgtggacttccctgagcactttgtgaagagcatcagctgccagatctgtgagcacatcctggccgaccctgtggagaccaactgcaagcacgtgttctgccgggtgtgcatcctgcgctgcctgaaggtgatgggcagctactgccccagctgccgctacccctgcttccccacagacctggagagccctgtgaagagcttcctgtctgtgctgaacagcctgatggtgaagtgcccagccaaggagtgcaatgaggaggtgtccctggagaagtacaaccaccacatcagcagccacaaggagagcaaggagatctttgtgcacatcaacaagggcggccggccccggcagcacctgctgagcctgacccggcgggcccagaagcaccggctgcgggagctgaagctgcaggtgaaggcctttgctgacaaggaggagggcggagatgtgaagtctgtgtgcatgaccctcttcctgctggccctgcgggccagaaatgagcaccggcaggctgatgagctggaggccatcatgcagggcaaaggaagtggcctgcagcctgctgtgtgcctggccatccgggtgaacaccttcctgagctgcagccagtaccacaagatgtacagaacagtgaaggccatcaccggccggcagatcttccagcccctgcacgccctgagaaatgctgagaaggtgctgctgcccggctaccaccactttgagtggcagccccccctgaagaatgtgagcagcagcacagatgtgggcatcattgatggcctgagcggcctgagcagctctgtggatgactaccctgtggacaccatcgccaagcgcttccgctatgacagcgccctggtgtctgccctgatggacatggaggaggacatcctggagggcatgaggagccaggacctggatgactacctgaatggccccttcaccgtggtggtgaaggagagctgtgatggcatgggagatgtgtctgagaagcacggcagcggccctgtggtgcctgagaaggctgtgcgcttctccttcaccatcatgaagatcaccatcgcccacagcagccagaatgtgaaggtgtttgaggaggccaagcccaacagcgagctgtgctgcaagcccctgtgcctgatgctggctgatgaaagtgaccacgagaccctgacagccatcctgagccccctgattgctgagcgggaggccatgaagagcagcgagctgatgctggagctgggcggcatcctgcggaccttcaagttcatcttccggggcaccggctatgatgagaagctggtgcgggaggtggagggcctggaggccagcggctctgtgtacatctgcaccctgtgtgatgccacccggctggaggccagccagaacctggtgttccacagcatcaccaggagccatgctgagaacctggagagatatgaggtgtggaggagcaacccctaccatgaatctgtggaggagctgcgggacagagtgaagggcgtgtctgccaagcccttcatcgagaccgtgcccagcattgatgccctgcactgtgacattggaaatgctgctgagttctacaagatcttccagctggagattggagaggtgtacaagaaccccaatgccagcaaggaggagaggaagcgctggcaggccaccctggacaagcacctgaggaagaagatgaacctgaagcccatcatgaggatgaatggaaactttgccaggaagctgatgaccaaggagaccgtggatgctgtgtgtgagctgatccccagcgaggagagacatgaggccctgcgggagctgatggacctgtacctgaagatgaagcctgtgtggaggagcagctgcccagccaaggagtgcccagagagcctgtgccagtacagcttcaacagccagagatttgctgagctgctgagcaccaagttcaagtaccgctatgagggcaagatcaccaactacttccacaagaccctggcccacgtgcctgagatcatcgagagagatggcagcatcggggcctgggccagcgagggcaatgaaagtggcaacaagctgttccgccgcttcaggaagatgaatgcccggcagagcaaatgttatgagatggaggatgtgctgaagcaccactggctgtacaccagcaagtacctgcagaagttcatgaatgcccacaatgccctgaagaccagcggcttcaccatgaacccccaggccagcctgggggaccccctgggcatcgaggacagcctggagagccaggacagcatggagttctag

SEQ ID NO: 272156 - DNA, 3132 bp, Artificial Sequence
  derived and/or modified sequence
atggccgccagcttcccccccaccctgggcctgagcagcgcccccgatgaaattcagcaccctcatatcaaattcagcgagtggaaatttaagttgttccgcgtgagaagcttcgagaagaccccagaggaggcgcagaaggagaaaaaggatagcttcgagggcaagccgtcattggaacagagccccgccgttctagataaggctgacggtcagaagccagtccctactcagccactcctcaaagcccatcctaagttttcgaagaaattccatgataacgaaaaggcacgcgggaaagcgattcaccaggccaatctcaggcacctgtgtcgcatctgtggcaattctttcagagccgacgaacacaacaggaggtatcctgtgcacggccccgtagacgggaagacgcttggcttgctgcggaaaaaggagaaacgagctacgtcttggccagacctgattgctaaggtgtttcggatagatgtcaaggcagatgtcgattcaattcatccgactgaattctgtcacaactgttggagtatcatgcacagaaagtttagcagtgccccctgcgaagtttactttccacgaaatgtaacaatggagtggcatccccacactccctcctgcgatatttgcaacacagcacgcagaggtctcaaacggaaaagcctgcagccgaatcttcagctctccaaaaagctcaagactgtgttggatcaggcaaggcaggcgcggcagcacaagcgccgtgcacaggccagaatctctagcaaagatgttatgaaaaagatcgccaactgttctaaaattcatctgtccactaagttacttgctgtggacttccctgagcactttgttaaatccatcagctgtcagatctgtgaacatatcctggcagaccccgtcgaaacaaattgcaagcatgtgttctgcagagtctgcatcctgaggtgccttaaggtcatggggtcctactgtccgtcttgtcggtatccttgctttccaacagacttggagagtccggttaagtcattcctaagtgtcctcaactccctcatggttaaatgccccgccaaagagtgtaacgaagaggtttctctggagaagtacaaccatcatatctcgtcccataaggagagtaaggaaatatttgtgcacattaataagggagggcgaccccgccagcatcttctgtctcttactcgaagagcacaaaagcacagactgagggaattgaagctccaggtaaaggcgttcgccgataaagaggagggaggcgatgttaagtccgtctgcatgactctcttcctgctggccctccgcgctcgaaacgaacaccgacaagcggatgaacttgaagcaataatgcagggaaaaggtagtggccttcagcccgccgtatgcctggcaatacgggtaaatacattcctctcttgctcacagtaccataagatgtatcgtaccgtgaaggctatcacaggtcgccagatctttcagcctctccatgctctccgaaatgcggagaaggtgctactgcctggttatcaccattttgaatggcagcctcccctgaagaatgtgtcaagcagcaccgacgtggggattattgacgggctcagcggactttcaagctctgttgacgactatccagtggatacgattgctaagcgatttcggtatgactctgctctggtgagtgcactcatggacatggaggaggatatcctcgaaggcatgagaagtcaggaccttgatgactacctgaatggccccttcacagttgtggtgaaagagagctgtgacgggatgggtgacgtgtctgagaaacatggaagtgggcccgtggtgcctgagaaggctgtgcgcttctcctttaccataatgaaaatcaccatcgcccactctagccagaacgtgaaggtcttcgaggaggcaaagccaaactcagaactttgttgtaagcctctttgccttatgttggccgatgagtcagatcatgagacgctgacagccattctttctccattgatcgctgagagggaggcgatgaagtcatcagagctgatgctggagctgggaggaatactacgcacatttaagtttatatttagagggaccggctacgacgaaaagttagtaagagaagtagagggtctggaggcatcagggtctgtgtatatctgcacgctctgcgacgccacccgcctcgaggcatctcagaatctggtgtttcattcaattacacgcagccacgcagaaaatcttgagagatatgaggtttggcgcagcaatccctatcatgagtccgtcgaggaattgcgagaccgagtgaagggcgtctctgctaaaccctttattgaaaccgtgccctccatcgatgccctgcattgcgacatcggtaacgcagcagagttctacaagatcttccaactggagatcggcgaggtctacaaaaaccctaatgcatcaaaagaggaacggaagcggtggcaggctacattggacaaacaccttcgcaaaaaaatgaaccttaagcctatcatgcggatgaatggtaattttgctagaaaattgatgactaaggagaccgtggacgcggtgtgtgaattgattccatccgaggagaggcatgaggcactccgggagctgatggatctgtacctcaaaatgaaacccgtctggcgttcttcgtgtccggccaaggagtgccctgagtccctttgccagtattcattcaatagccagcggttcgcggagctgctttccacaaaattcaagtatcgttacgaaggaaaaattacaaactacttccacaaaaccctggctcatgtacccgagattatcgagagagatgggagtattggagcctgggcaagcgagggcaatgagtccggcaataagctttttcggagattccgcaaaatgaatgccagacagagcaagtgttatgagatggaggacgtgctgaagcatcactggctgtacaccagtaagtatctccagaaatttatgaatgcgcacaacgcactgaagacctccggttttactatgaatccacaggccagtctgggcgacccattaggtatcgaagatagcctggagtctcaggactctatggagttctag

SEQ ID NO: 272157 - DNA, 3132 bp, Artificial Sequence
  derived and/or modified sequence
atggctgcctcatttccacccaccctcgggctttccagcgccccagatgagatccaacacccacatattaaattctcggagtggaagtttaaactcttccgggtgaggagtttcgagaaaactcctgaggaagcccagaaggaaaagaaggatagtttcgaaggtaagccatcccttgagcagtccccagctgtgttagacaaagcggacggacagaagcctgttcccactcaacccctcctgaaggcccaccctaagttctcaaaaaaattccatgataacgagaaggctagagggaaggccatccatcaggccaatctgcgccacctctgtcgtatatgtgggaattctttccgagctgacgagcacaataggagatatcccgtgcatgggcctgtcgacggaaagacgctaggtctgcttcgcaaaaaggagaaacgagccacatcatggccagatcttatcgccaaagtcttccgcatagacgtgaaagctgatgtggattctattcatcctacagagttttgccacaactgctggtctattatgcatcgcaagttcagctccgccccttgcgaagtgtactttcccagaaacgtgaccatggaatggcacccacacaccccaagctgtgacatatgcaacactgcccgtagaggcctcaagaggaagagcctacagcccaatttacaattaagtaagaagcttaaaaccgttcttgatcaggcaaggcaagcacgtcagcacaaaagaagagcacaggcccgaatttcttcaaaggatgtgatgaagaaaattgccaactgttccaagatccacctatcgacaaaactcctggcggttgatttccctgaacacttcgtgaagtcgatttcctgccagatctgcgagcacattctggccgaccccgtcgagacaaactgtaaacatgtcttttgtagggtgtgcatccttaggtgcctgaaggttatgggctcatattgtccctcatgcaggtatccctgttttcctaccgatctggaatcaccagtcaagtcttttctcagcgtccttaactctctgatggttaagtgtcctgctaaagaatgtaacgaggaagtctctctggaaaagtataaccaccacatttcttctcacaaggaaagtaaagagatctttgtgcatatcaataaaggcggaagaccacggcaacacctgctctccctgacccggcgagctcagaagcacaggctgagggagctcaaactgcaggttaaggcattcgctgacaaggaggaggggggagacgtaaagtctgtctgcatgacccttttccttctcgctctgagagcacgcaacgaacaccggcaagccgatgagctggaagcaatcatgcagggcaaaggatcagggctccaaccggctgtctgccttgctataagagtcaacacctttctgagttgctctcagtatcacaagatgtatcggaccgttaaagccatcacaggacggcagatctttcaacctcttcacgcattgcgcaatgctgaaaaagtgctcttgccaggatatcatcatttcgagtggcagcctcctttgaagaacgtttcctcttctactgatgtcggcataatcgatggccttagtggcttaagcagtagcgtggatgactacccagtcgacaccattgcaaaacgatttcggtatgatagtgctctggtaagcgcgttaatggatatggaagaggatattctcgaaggaatgagaagtcaggacctggatgactatttaaatggcccttttacggtagtcgtgaaggaaagttgcgatggcatgggagacgtgtccgaaaaacatgggtccgggccagtcgttcctgagaaggctgtgagatttagcttcactatcatgaagatcactatcgcacactcatcacagaacgtcaaggtgttcgaagaagccaaaccaaatagcgagctgtgctgcaaaccgctgtgcctcatgctcgcagatgagtctgaccacgagaccctgacagctattttatcccccctcatcgccgagcgagaagccatgaagtctagtgaactaatgctggagctggggggtatccttcgtacttttaagttcatcttccgcggtacaggatatgatgaaaaactggttagagaggtggaggggctggaagcttccggaagtgtgtatatctgtactctctgcgacgcaacacgacttgaggctagccaaaatctggtgtttcactctataacgagaagccacgcagagaacctggagcggtatgaagtgtggcgttcaaacccttatcacgaatcagtcgaggaactgagagacagggtcaagggcgtttcagctaagccctttatcgagactgttccctccattgacgccctccattgtgacatcgggaatgcggctgagttttacaagatatttcagttggagattggggaggtgtacaagaatcccaatgcaagcaaagaggagcggaaacgctggcaagccaccctcgacaaacatctgcgtaaaaaaatgaatttgaagcccatcatgagaatgaatggcaactttgctaggaagctgatgactaaggagacagtggatgcagtatgcgaactgatacctagcgaggagagacacgaggctctgcgcgagctgatggatttatatctcaagatgaagccggtctggcgatcttcatgccccgctaaagaatgccctgagagcctctgccagtacagctttaattcccagagatttgctgaactgctgtccaccaagttcaaatacaggtacgagggaaaaattaccaattatttccacaaaactctcgcccacgtgcccgagattatcgagcgggatggatccatcggagcttgggccagcgaaggtaacgaaagtggaaacaagttgtttcggagatttagaaagatgaatgcacggcagtccaagtgttacgaaatggaggacgtgctgaaacaccactggctttacacctccaagtatctgcagaaattcatgaatgctcacaatgcacttaagacctctggcttcaccatgaacccccaggcttccctgggagatccattggggattgaagatagtctcgaatcccaggattcaatggagttctag

SEQ ID NO: 272158 - DNA, 6564 bp, Artificial Sequence
  derived and/or modified sequence
gagagcagagaacacactttgccttctctttggtattgagtaatatcaaccaaattgcagacatctcaacactttggccaggcagcctgctgagcaaggtacctcagccagcatggcagcctctttcccacccaccttgggactcagttctgccccagatgaaattcagcacccacatattaaattttcagaatggaaatttaagctgttccgggtgagatcctttgaaaagacacctgaagaagctcaaaaggaaaagaaggattcctttgaggggaaaccctctctggagcaatctccagcagtcctggacaaggctgatggtcagaagccagtcccaactcagccattgttaaaagcccaccctaagttttcaaagaaatttcacgacaacgagaaagcaagaggcaaagcgatccatcaagccaaccttcgacatctctgccgcatctgtgggaattcttttagagctgatgagcacaacaggagatatccagtccatggtcctgtggatggtaaaaccctaggccttttacgaaagaaggaaaagagagctacttcctggccggacctcattgccaaggttttccggatcgatgtgaaggcagatgttgactcgatccaccccactgagttctgccataactgctggagcatcatgcacaggaagtttagcagtgccccatgtgaggtttacttcccgaggaacgtgaccatggagtggcacccccacacaccatcctgtgacatctgcaacactgcccgtcggggactcaagaggaagagtcttcagccaaacttgcagctcagcaaaaaactcaaaactgtgcttgaccaagcaagacaagcccgtcagcacaagagaagagctcaggcaaggatcagcagcaaggatgtcatgaagaagatcgccaactgcagtaagatacatcttagtaccaagctccttgcagtggacttcccagagcactttgtgaaatccatctcctgccagatctgtgaacacattctggctgaccctgtggagaccaactgtaagcatgtcttttgccgggtctgcattctcagatgcctcaaagtcatgggcagctattgtccctcttgccgatatccatgcttccctactgacctggagagtccagtgaagtcctttctgagcgtcttgaattccctgatggtgaaatgtccagcaaaagagtgcaatgaggaggtcagtttggaaaaatataatcaccacatctcaagtcacaaggaatcaaaagagatttttgtgcacattaataaagggggccggccccgccaacatcttctgtcgctgactcggagagctcagaagcaccggctgagggagctcaagctgcaagtcaaagcctttgctgacaaagaagaaggtggagatgtgaagtccgtgtgcatgaccttgttcctgctggctctgagggcgaggaatgagcacaggcaagctgatgagctggaggccatcatgcagggaaagggctctggcctgcagccagctgtttgcttggccatccgtgtcaacaccttcctcagctgcagtcagtaccacaagatgtacaggactgtgaaagccatcacagggagacagatttttcagcctttgcatgcccttcggaatgctgagaaggtacttctgccaggctaccaccactttgagtggcagccacctctgaagaatgtgtcttccagcactgatgttggcattattgatgggctgtctggactatcatcctctgtggatgattacccagtggacaccattgcaaagaggttccgctatgattcagctttggtgtctgctttgatggacatggaagaagacatcttggaaggcatgagatcccaagaccttgatgattacctgaatggccccttcactgtggtggtgaaggagtcttgtgatggaatgggagacgtgagtgagaagcatgggagtgggcctgtagttccagaaaaggcagtccgtttttcattcacaatcatgaaaattactattgcccacagctctcagaatgtgaaagtatttgaagaagccaaacctaactctgaactgtgttgcaagccattgtgccttatgctggcagatgagtctgaccacgagacgctgactgccatcctgagtcctctcattgctgagagggaggccatgaagagcagtgaattaatgcttgagctgggaggcattctccggactttcaagttcatcttcaggggcaccggctatgatgaaaaacttgtgcgggaagtggaaggcctcgaggcttctggctcagtctacatttgtactctttgtgatgccacccgtctggaagcctctcaaaatcttgtcttccactctataaccagaagccatgctgagaacctggaacgttatgaggtctggcgttccaacccttaccatgagtctgtggaagaactgcgggatcgggtgaaaggggtctcagctaaacctttcattgagacagtcccttccatagatgcactccactgtgacattggcaatgcagctgagttctacaagatcttccagctagagataggggaagtgtataagaatcccaatgcttccaaagaggaaaggaaaaggtggcaggccacactggacaagcatctccggaagaagatgaacctcaaaccaatcatgaggatgaatggcaactttgccaggaagctcatgaccaaagagactgtggatgcagtttgtgagttaattccttccgaggagaggcacgaggctctgagggagctgatggatctttacctgaagatgaaaccagtatggcgatcatcatgccctgctaaagagtgcccagaatccctctgccagtacagtttcaattcacagcgttttgctgagctcctttctacgaagttcaagtataggtatgagggaaaaatcaccaattattttcacaaaaccctggcccatgttcctgaaattattgagagggatggctccattggggcatgggcaagtgagggaaatgagtctggtaacaaactgtttaggcgcttccggaaaatgaatgccaggcagtccaaatgctatgagatggaagatgtcctgaaacaccactggttgtacacctccaaatacctccagaagtttatgaatgctcataatgcattaaaaacctctgggtttaccatgaaccctcaggcaagcttaggggacccattaggcatagaggactctctggaaagccaagattcaatggaattttaagtagggcaaccacttatgagttggtttttgcaattgagtttccctctgggttgcattgagggcttctcctagcaccctttactgctgtgtatggggcttcaccatccaagaggtggtaggttggagtaagatgctacagatgctctcaagtcaggaatagaaactgatgagctgattgcttgaggcttttagtgagttccgaaaagcaacaggaaaaatcagttatctgaaagctcagtaactcagaacaggagtaactgcaggggaccagagatgagcaaagatctgtgtgtgttggggagctgtcatgtaaatcaaagccaaggttgtcaaagaacagccagtgaggccaggaaagaaattggtcttgtggttttcatttttttcccccttgattgattatattttgtattgagatatgataagtgccttctatttcatttttgaataattcttcatttttataattttacatatcttggcttgctatataagattcaaaagagctttttaaatttttctaataatatcttacatttgtacagcatgatgacctttacaaagtgctctcaatgcatttacccattcgttatataaatatgttacatcaggacaactttgagaaaatcagtccttttttatgtttaaattatgtatctattgtaaccttcagagtttaggaggtcatctgctgtcatggatttttcaataatgaatttagaatacacctgttagctacagttagttattaaatcttctgataatatatgtttacttagctatcagaagccaagtatgattctttatttttactttttcatttcaagaaatttagagtttccaaatttagagcttctgcatacagtcttaaagccacagaggcttgtaaaaatataggttagcttgatgtctaaaaatatatttcatgtcttactgaaacattttgccagactttctccaaatgaaacctgaatcaatttttctaaatctaggtttcatagagtcctctcctctgcaatgtgttattctttctataatgatcagtttactttcagtggattcagaattgtgtagcaggataaccttgtatttttccatccgctaagtttagatggagtccaaacgcagtacagcagaagagttaacatttacacagtgctttttaccactgtggaatgttttcacactcatttttccttacaacaattctgaggagtaggtgttgttattatctccatttgatgggggtttaaatgatttgctcaaagtcatttaggggtaataaatacttggcttggaaatttaacacagtccttttgtctccaaagcccttcttctttccaccacaaattaatcactatgtttataaggtagtatcagaatttttttaggattcacaactaatcactatagcacatgaccttgggattacatttttatggggcaggggtaagcaagtttttaaatcatttgtgtgctctggctcttttgatagaagaaagcaacacaaaagctccaaagggccccctaaccctcttgtggctccagttatttggaaactatgatctgcatccttaggaatctgggatttgccagttgctggcaatgtagagcaggcatggaattttatatgctagtgagtcataatgatatgttagtgttaattagttttttcttcctttgattttattggccataattgctactcttcatacacagtatatcaaagagcttgataatttagttgtcaaaagtgcatcggcgacattatctttaattgtatgtatttggtgcttcttcagggattgaactcagtatctttcattaaaaaacacagcagttttccttgctttttatatgcagaatatcaaagtcatttctaatttagttgtcaaaaacatatacatattttaacattagtttttttgaaaactcttggttttgtttttttggaaatgagtgggccactaagccacactttcccttcatcctgcttaatccttccagcatgtctctgcactaataaacagctaaattcacataatcatcctatttactgaagcatggtcatgctggtttatagattttttacccatttctactctttttctctattggtggcactgtaaatactttccagtattaaattatccttttctaacactgtaggaactattttgaatgcatgtgactaagagcatgatttatagcacaacctttccaataatcccttaatcagatcacattttgataaaccctgggaacatctggctgcaggaatttcaatatgtagaaacgctgcctatggttttttgcccttactgttgagactgcaatatcctagaccctagttttatactagagttttatttttagcaatgcctattgcaagtgcaattatatactccagggaaattcaccacactgaatcgagcatttgtgtgtgtatgtgtgaagtatatactgggacttcagaagtgcaatgtatttttctcctgtgaaacctgaatctacaagttttcctgccaagccactcaggtgcattgcagggaccagtgataatggctgatgaaaattgatgattggtcagtgaggtcaaaaggagccttgggattaataaacatgcactgagaagcaagaggaggagaaaaagatgtctttttcttccaggtgaactggaatttagttttgcctcagatttttttcccacaagatacagaagaagataaagatttttttggttgagagtgtgggtcttgcattacatcaaacagagttcaaattccacacagataagaggcaggatatataagcgccagtggtagttgggaggaataaaccattatttggatgcaggtggtttttgattgcaaatatgtgtgtgtcttcagtgattgtatgacagatgatgtattcttttgatgttaaaagattttaagtaagagtagatacattgtacccattttacattttcttattttaactacagtaatctacataaatatacctcagaaatcatttttggtgattattttttgttttgtagaattgcacttcagtttattttcttacaaataaccttacattttgtttaatggcttccaagagccttttttttttttgtatttcagagaaaattcaggtaccaggatgcaatggatttatttgattcaggggacctgtgtttccatgtcaaatgttttcaaataaaatgaaatatgagtttcaatactttttatattttaatatttccattcattaatattatggttattgtcagcaattttatgtttgaatatttgaaataaaagtttaagatt

SEQ ID NO: 272159 - DNA, 3132 bp, Artificial Sequence
  derived and/or modified sequence
atggccgccagcttcccccccaccctgggcctgagcagcgcccccgacgagatccagcacccccacatcaagttcagcgagtggaagttcaagctgttcagagtgagaagcttcgagaagacccccgaggaggcccagaaggagaagaaggacagcttcgagggcaagcccagcctggagcagagccccgccgtgctggacaaggccgacggccagaagcccgtgcccacccagcccctgctgaaggcccaccccaagttcagcaagaagttccacgacaacgagaaggccagaggcaaggccatccaccaggccaacctgagacacctgtgcagaatctgcggcaacagcttcagagccgacgagcacaacagaagataccccgtgcacggccccgtggacggcaagaccctgggcctgctgagaaagaaggagaagagagccaccagctggcccgacctgatcgccaaggtgttcagaatcgacgtgaaggccgacgtggacagcatccaccccaccgagttctgccacaactgctggagcatcatgcacagaaagttcagcagcgccccctgcgaggtgtacttccccagaaacgtgaccatggagtggcacccccacacccccagctgcgacatctgcaacaccgccagaagaggcctgaagagaaagagcctgcagcccaacctgcagctgagcaagaagctgaagaccgtgctggaccaggccagacaggccagacagcacaagagaagagcccaggccagaatcagcagcaaggacgtgatgaagaagatcgccaactgcagcaagatccacctgagcaccaagctgctggccgtggacttccccgagcacttcgtgaagagcatcagctgccagatctgcgagcacatcctggccgaccccgtggagaccaactgcaagcacgtgttctgcagagtgtgcatcctgagatgcctgaaggtgatgggcagctactgccccagctgcagatacccctgcttccccaccgacctggagagccccgtgaagagcttcctgagcgtgctgaacagcctgatggtgaagtgccccgccaaggagtgcaacgaggaggtgagcctggagaagtacaaccaccacatcagcagccacaaggagagcaaggagatcttcgtgcacatcaacaagggcggcagacccagacagcacctgctgagcctgaccagaagagcccagaagcacagactgagagagctgaagctgcaggtgaaggccttcgccgacaaggaggagggcggcgacgtgaagagcgtgtgcatgaccctgttcctgctggccctgagagccagaaacgagcacagacaggccgacgagctggaggccatcatgcagggcaagggcagcggcctgcagcccgccgtgtgcctggccatcagagtgaacaccttcctgagctgcagccagtaccacaagatgtacagaaccgtgaaggccatcaccggcagacagatcttccagcccctgcacgccctgagaaacgccgagaaggtgctgctgcccggctaccaccacttcgagtggcagccccccctgaagaacgtgagcagcagcaccgacgtgggcatcatcgacggcctgagcggcctgagcagcagcgtggacgactaccccgtggacaccatcgccaagagattcagatacgacagcgccctggtgagcgccctgatggacatggaggaggacatcctggagggcatgagaagccaggacctggacgactacctgaacggccccttcaccgtggtggtgaaggagagctgcgacggcatgggcgacgtgagcgagaagcacggcagcggccccgtggtgcccgagaaggccgtgagattcagcttcaccatcatgaagatcaccatcgcccacagcagccagaacgtgaaggtgttcgaggaggccaagcccaacagcgagctgtgctgcaagcccctgtgcctgatgctggccgacgagagcgaccacgagaccctgaccgccatcctgagccccctgatcgccgagagagaggccatgaagagcagcgagctgatgctggagctgggcggcatcctgagaaccttcaagttcatcttcagaggcaccggctacgacgagaagctggtgagagaggtggagggcctggaggccagcggcagcgtgtacatctgcaccctgtgcgacgccaccagactggaggccagccagaacctggtgttccacagcatcaccagaagccacgccgagaacctggagagatacgaggtgtggagaagcaacccctaccacgagagcgtggaggagctgagagacagagtgaagggcgtgagcgccaagcccttcatcgagaccgtgcccagcatcgacgccctgcactgcgacatcggcaacgccgccgagttctacaagatcttccagctggagatcggcgaggtgtacaagaaccccaacgccagcaaggaggagagaaagagatggcaggccaccctggacaagcacctgagaaagaagatgaacctgaagcccatcatgagaatgaacggcaacttcgccagaaagctgatgaccaaggagaccgtggacgccgtgtgcgagctgatccccagcgaggagagacacgaggccctgagagagctgatggacctgtacctgaagatgaagcccgtgtggagaagcagctgccccgccaaggagtgccccgagagcctgtgccagtacagcttcaacagccagagattcgccgagctgctgagcaccaagttcaagtacagatacgagggcaagatcaccaactacttccacaagaccctggcccacgtgcccgagatcatcgagagagacggcagcatcggcgcctgggccagcgagggcaacgagagcggcaacaagctgttcagaagattcagaaagatgaacgccagacagagcaagtgctacgagatggaggacgtgctgaagcaccactggctgtacaccagcaagtacctgcagaagttcatgaacgcccacaacgccctgaagaccagcggcttcaccatgaacccccaggccagcctgggcgaccccctgggcatcgaggacagcctggagagccaggacagcatggagttctag

SEQ ID NO: 272160 - protein, 504 aa, Artificial Sequence
  derived and/or modified sequence
MPGVCDRAPDFLSPSEDQVLRPALGSSVALNCTAWVVSGPHCSLPSVQWLKDGLPLGIGGHYSLHEYSWVKANLSEVLVSSVLGVNVTSTEVYGAFTCSIQNISFSSFTLQRAGPTSHVAAVLASLLVLLALLLAALLYVKCRLNVLLWYQDAYGEVEINDGKLYDAYVSYSDCPEDRKFVNFILKPQLERRRGYKLFLDDRDLLPRAEPSADLLVNLSRCRRLIVVLSDAFLSRAWCSHSFREGLCRLLELTRRPIFITFEGQRRDPAHPALRLLRQHRHLVTLLLWRPGSVTPSSDFWKEVQLALPRKVQYRPVEGDPQTQLQDDKDPMLILRGRVPEGRALDSEVDPDPEGDLGMPAQPHSPTGEAQHRAEWGQAQGTGPGGAPGVEDSSRHREPLHGLCPGGARPSVCLGTSWASQAITAGGEQGQPLAVGLGQGCGWPPQASRSPHPRCPGACLWRAISSTAHQWGLAGREPEQRSGRLGSRLAKLQCPHRLLLPGVQG

SEQ ID NO: 272161 - DNA, 429 bp, Artificial Sequence
  derived and/or modified sequence
atgaacatcaacccctgcctggtgctgtgtgaatgttccctgagcatcagcctggatgctgaccccctggtgagcccctttgccaccggcccctgccctggggccccccgggaggtggtggccatgcagagtgatgtgggccagggcttccccatgcagagcaactggagggcccctgtgcacgcctgcaccagcggggctgtgaggaagggctggccaggctgcggcagaagaagacacaagatgggcggcggccctgtgtcctgggagcagaggcagaaggaggtggaggccgcccagggcagcgaggagcggggccctggcagcctggccgtgtccctgctgagcctggccgtgggcatccaccgcatcagccccatcctgggcttccacatctgctgcatgcaggtgctgatggtgctgaagtag

SEQ ID NO: 272162 - DNA, 1515 bp, Artificial Sequence
  derived and/or modified sequence
atgcccggtgtatgcgacagagcccctgactttctttcaccttccgaggatcaggtgctgcggcccgcgctagggtccagcgtcgccctgaattgtacggcgtgggttgtgtccggcccacattgttccctgccatctgtccagtggttgaaggacggtctacctctcggcataggaggccactattcactgcatgagtactcatgggttaaggccaacctgtccgaagtcttggttagtagcgtgctgggcgtgaacgtgacatctactgaagtgtatggggccttcacctgctcaatccaaaatattagttttagttcctttactctgcaacgcgcaggtccaacctcccacgtggcggctgtgctcgccagtttactagtgctcctcgccctgttgttggcggccctgctctatgtgaagtgccgcctgaacgtactgctgtggtatcaagacgcctacggtgaagtcgagatcaacgatggcaaactctatgacgcatacgtgtcttattcggactgtcccgaagatagaaaatttgtgaacttcattttaaagcctcagctggagcgccgtcgggggtataagttgtttcttgatgacagggacctgctgcctagggctgaacccagcgccgatctcctggtgaacttgagccggtgtaggcgcttgatagtggtactgtctgacgccttcttatctagagcctggtgctcccattcatttcgcgagggtctgtgccgactacttgaactgacacgacgacccattttcattaccttcgagggacaacgtagagatcctgcccatccagctctgcgcctgctgcgccagcaccgtcatcttgtcaccttgctgttatggcgtccggggagcgttacgccatcaagcgatttctggaaggaggtgcagctcgccctgcctaggaaagtccaataccgacctgtcgaaggtgacccacagacccagttgcaagacgataaagatccaatgttaatcctgagagggcgagtccccgaaggtagagccttggattctgaggtggatcccgaccctgaaggggatctcgggatgccagcccagccacactcccccaccggtgaagcacagcacagagcagaatggggccaggcacagggcacaggccctggcggggctcctggtgtagaggatagcagtcgtcatcgtgaacctttacatggtctatgtcccgggggcgcgcggccttcagtgtgccttggtacaagttgggctagccaggccatcacagccggcggcgagcaggggcaaccgttggccgtgggtctggggcaaggatgcggatggccaccacaagctagcaggagcccccaccctaggtgtccaggagcgtgcttgtggcgtgccatctcctccaccgcacaccaatgggggctcgccggtcgggagccagagcagagaagtggacggttgggttccaggttggctaagctgcagtgtccgcacagactcctgctgcctggcgtgcagggatag

SEQ ID NO: 272163 - DNA, 1515 bp, Artificial Sequence
  derived and/or modified sequence
atgcccggcgtctgcgatagagcgccagattttctgagcccctccgaagatcaagtcctgcgcccagccctgggcagcagtgtggccctgaactgtacagcttgggttgtttctggacctcattgcagtttaccttcggttcaatggctaaaggatggattgccattggggattggaggccattattcactgcacgaatattcctgggtgaaggcaaaccttagcgaagttctggtgagctccgtgctgggtgtcaacgtcacgtctaccgaggtctatggcgccttcacctgctcaatccagaatataagcttttctagctttacgctgcagagagctgggccaacctcacatgtggccgccgtcttggccagcttgttagtgttactggccctgctgctggctgccctgctgtacgtaaaatgcaggctgaacgtcctgctgtggtatcaagacgcctacggagaagtggagatcaatgatgggaaactatacgatgcttacgtttcctacagcgattgtcctgaggatagaaaatttgtcaattttatccttaagccgcagttggaacgccggagagggtataagctctttcttgacgatcgggatttgttaccgcgggccgagcccagcgctgatctgctggtcaatttgtcaagatgccgccggctgattgtcgtcctctcggatgcattcctcagtcgtgcctggtgttcccattcttttcgagaaggtctgtgccgcctgttggagctcacccgccggccgatttttattacttttgagggccagcgtcgcgaccctgctcacccagcattgaggctcctccgccagcacagacacttagtcaccctgttgctgtggaggcctggctccgtcacgccatcatcagacttctggaaagaggtgcagctggcactgcctcggaaagtgcagtaccgaccggttgaaggcgaccctcagacgcagcttcaggacgataaagacccaatgttgatcctccgaggcagggtcccagagggcagggccctcgatagtgaagttgatcccgaccccgaaggtgaccttggaatgccagctcagcctcatagccctacaggagaagctcagcacagggctgagtggggccaggcacaagggaccggcccggggggcgctcccggggtggaggatagtagccgtcacagggagcctctgcacgggctgtgtcctggcggtgccaggccgtcagtatgcctaggaaccagttgggctagtcaggccatcaccgccggaggggagcagggccaaccactcgccgtcgggctgggccagggttgcggctggcccccccaagcaagccgcagtccccatccccggtgtccaggggcatgcctgtggcgtgccatctcgtccaccgctcatcaatgggggctggccgggcgggagcctgagcagcgcagcggccggcttgggagccgactggctaaactgcagtgcccacacagacttctcctccctggggtgcaggggtag

SEQ ID NO: 272164 - DNA, 1515 bp, Artificial Sequence
  derived and/or modified sequence
atgcctggggtgtgtgaccgggccccagacttcctgagccccagcgaggaccaggtgctgcggcctgccctgggcagctctgtggccctgaactgcacagcctgggtggtgtctggcccccactgcagcctgcccagcgtgcagtggctgaaggatggcctgcccctgggcatcggcggccactacagcctgcacgagtacagctgggtgaaggccaacctgtctgaggtgctggtgtcctctgtgctgggcgtgaatgtgaccagcacagaggtgtatggagccttcacctgcagcatccagaacatctccttcagcagcttcaccctgcagagagctggccccaccagccacgtggccgctgtgctggccagcctgctggtgctgctggccctgctgctggccgccctgctgtatgtgaagtgccgcctgaatgtgctgctgtggtaccaggatgcctacggggaggtggagatcaatgatggcaagctgtatgatgcctacgtgtcctacagcgactgcccagaggacaggaagtttgtgaacttcatcctgaagccccagctggagcggcggcggggctacaagctgttcctggatgaccgggacctgctgcccagggctgagcccagcgctgacctgctggtgaacctgagccgctgccggcggctgattgtggtgctgagtgatgccttcctgagccgggcctggtgcagccacagcttccgggagggcctgtgccgcctgctggagctgacccggcggcccatcttcatcacctttgagggccagaggcgggaccctgcccacccagccctgcggctgctgcggcagcaccgccacctggtgaccctgctgctgtggaggcctggctctgtgacccccagcagtgacttctggaaggaggtgcagctggccctgcccaggaaggtgcagtacagacctgtggagggggacccccagacccagctgcaggatgacaaggaccccatgctgatcctgcggggccgggtgcctgagggccgggccctggacagcgaggtggaccctgaccctgagggggacctgggcatgcctgcccagccccacagccccaccggggaggcccagcacagagctgagtggggccaggcccagggcactggacctggaggagcccctggggtggaggacagcagccgccaccgggagcccctgcacggcctgtgccctgggggcgcccggcccagcgtgtgcctgggcacctcctgggccagccaggccatcacagctggaggagagcagggccagcccctggccgtgggcctgggccagggctgcggctggccaccccaggccagccgcagcccccacccccgctgccctggggcctgcctgtggagggccatcagcagcacagcccaccagtggggcctggccggccgggagcctgagcagaggagcggccgcctgggcagccggctggccaagctgcagtgcccccaccggctgctgctgcccggggtgcagggctag

SEQ ID NO: 272165 - DNA, 1515 bp, Artificial Sequence
  derived and/or modified sequence
atgcccggcgtgtgcgaccgggcccccgacttcctgagccccagcgaggaccaagtcctgcgacccgctctgggttcctcagtggcactcaactgcacggcctgggtcgttagcggcccgcactgctctctccccagcgtgcagtggctcaaagatgggctgccgctcggtattgggggccattattctcttcacgagtacagttgggtgaaagctaacctctccgaggtgctcgtcagtagtgttcttggagtgaatgttacctctactgaggtttacggtgcattcacatgttcaatacaaaatatctcattcagcagtttcaccttacagcgtgccggccccacgtctcatgtggcagcggtgctcgcctccttacttgtcctcctagctctgctgttggcggcattgttatacgttaagtgtagattgaacgtgctgctttggtatcaggatgcttacggggaggtggagatcaatgatgggaagctatacgacgcatacgtgtcctactccgattgtcctgaagacagaaaattcgtcaactttatcctcaaaccacagctggaacgtagaagggggtacaagctgttcttagacgatagggatctgctgcctagagctgagccctccgccgacttattagttaacttgtctcgctgtcgccggctaatagtcgtcctgagtgacgcattcttgtcacgcgcctggtgcagccacagcttcagagaagggttgtgcagattgctggagcttacccgtcgtcctatctttattaccttcgaaggccagcgtcgagatcccgcccatcccgccctccggctcctaaggcagcacaggcacctcgtgactttattactctggcgtcccggcagcgtgaccccttcttctgatttctggaaggaggtgcagctcgcactgccacgcaaggtgcagtaccggcctgtggagggggatccgcagacacagctgcaggatgataaggaccctatgcttattctgcgtggacgcgtccccgagggacgggctctggatagtgaggttgaccctgatcccgagggtgacctggggatgcctgcccagccacattccccaaccggagaagcgcaacatagggccgagtggggccaggcccagggaacaggccccggtggcgctccgggcgtggaagattctagccgacacagagagccactgcatggcctatgtcccggcggcgctagaccaagcgtgtgtttgggcacatcctgggcatcacaggccatcaccgcgggtggcgaacaagggcagcctctcgccgttggcttggggcaggggtgcggatggcccccccaagcatcccggagccctcacccgaggtgtcctggcgcttgcctctggcgcgctataagtagcacggcacatcaatggggtctcgccggcagggaaccagaacagcgatccggccgcctcggttcaaggttggcaaagctccagtgcccccacaggttactcttgcctggggtccaggggtag

SEQ ID NO: 272166 - DNA, 1515 bp, Artificial Sequence
  derived and/or modified sequence
atgcccggcgtgtgcgaccgggcccccgacttcctgagccccagcgaggatcaagtgttgaggcctgcattgggttcatcagtcgctctgaattgcactgcctgggtcgtcagcggaccccattgttccctcccttcagtccagtggctgaaagacggtttaccactgggcataggagggcactactccctgcatgagtatagctgggtgaaggcgaatctgtctgaggtactagtgagctccgtgctgggggtaaacgtcaccagcacggaggtgtacggcgcgttcacttgttccattcagaatatatccttctctagtttcactctccagcgagccgggcctacttcacacgtagccgccgtgctggcaagcctgctggtcctacttgcgttattactcgctgccttgctctacgtaaaatgcagattgaacgtgctgctgtggtaccaagacgcctacggagaagttgagattaatgatggcaaactttatgatgcttatgtctcgtactctgactgtcctgaagaccgaaagtttgtgaatttcattctgaagccccagctggaaagaaggcgcggctacaagttgtttttagacgatagggatctgttgcctagagcagagccatccgcggatctcttggtcaatcttagcagatgcaggagactgattgtggtgttatccgatgcgttcctgtctcgtgcgtggtgctctcacagctttcgggagggcctctgccgattactcgagctgacccggaggcccatctttataacatttgagggtcaaagacgggatccagcacacccggctttgaggctgctccggcagcaccgccacctagtgaccctgctgctgtggcgtcctgggtcggtaacaccttcatccgatttttggaaggaggtgcagctggccttacctcgaaaggtgcaataccgaccagtggagggagaccctcaaacacaactacaagacgacaaagacccaatgctaatactgcggggaagggtgcctgaaggcagagctctggattcagaggtggatcccgatccagaaggtgatttaggcatgccagcccagccccactctcccactggagaagcccaacacagggccgagtggggtcaggctcagggtaccgggcccgggggagccccaggtgttgaagattcatcccgacaccgggaacccctgcacggattatgccctggcggggcccgcccaagcgtttgccttggcacttcctgggccagtcaagcaattaccgccggcggtgaacagggccagcctctcgccgtgggtttaggccagggatgtggctggcccccacaggcaagccggagtcctcaccctcgctgccctggcgcctgtctctggcgcgctattagtagcaccgctcaccagtggggcttagccgggagagagcccgagcagaggagcggcagattaggctctcgcttagcgaagttgcagtgcccccatcggctgcttcttcctggggttcaggggtag

SEQ ID NO: 272167 - DNA, 1515 bp, Artificial Sequence
  derived and/or modified sequence
atgccgggtgtgtgtgatcgcgctccagactttcttagcccctctgaggaccaggtgttacggccagccctcggcagctccgtcgctctgaactgcacagcttgggtggtctcaggaccacactgtagcctgccaagtgtccagtggctgaaagacggacttccactaggcatcggagggcattattcgctgcatgaatattcgtgggtaaaggccaacctatcagaagtgcttgtgtcctccgttcttggggtgaatgtaacgagcacagaggtgtatggggctttcacatgtagtattcagaacatctctttctcatcattcactcttcaaagggccggacctacaagccacgttgcagcagtgttagcatcactgttagtactcctcgcgctgttgctcgccgctttactatacgtgaagtgccgcttgaacgttctgctatggtatcaggacgcatacggggaggtagaaataaacgatggaaagctctatgatgcatatgtgagctactctgactgtcccgaggataggaaatttgtgaacttcatcttgaaaccccagctcgagagaagacgcggatacaaactgtttctcgatgaccgcgatctcctcccccgtgccgagcccagcgctgacctgctggttaatctctctaggtgcaggagacttattgttgtgctgagcgacgcattcctgtcgagggcgtggtgttctcatagcttccgggaggggctctgccggctcctcgaattgacacggagacctatctttattactttcgaaggccaaagaagagatccagcccaccccgcactgagattgctgagacaacaccggcacctagtcaccctgctcctgtggaggccgggaagcgtaacaccttccagcgacttttggaaagaagttcagctggcattgccaagaaaggtgcagtataggcccgtagaaggagaccctcagacccagctgcaggatgataaagatcccatgctgattctacgcggtagggtccctgagggccgagctctggattccgaagtagaccccgaccccgagggggatctgggtatgccagcacagccgcatagtcctacaggtgaggcccaacaccgcgctgaatgggggcaggcacaaggaactggcccagggggagccccaggcgttgaggacagctccaggcatcgtgagcccctgcacggcctatgccctggtggcgctagaccgtcagtctgtctaggcacaagctgggcttcgcaagccattacagccggaggcgagcagggtcaacctctggccgttggcctgggccagggctgcggttggccccctcaggcttccagatccccacacccaagatgccctggcgcatgcttgtggagagctatttcctcaacagcacatcagtggggactcgccggacgggaaccggaacagaggtcaggcaggttggggtcacggctagccaagctccagtgtccacataggctgttgcttccaggtgttcaggggtag

SEQ ID NO: 272168 - DNA, 1515 bp, Artificial Sequence
  derived and/or modified sequence
atgccaggagtgtgcgaccgggctcccgatttcttatcacccagcgaggaccaggtcctaagacccgctttggggagcagcgtggcgcttaactgcaccgcatgggtggtgtctgggccacattgttctctgcctagcgtgcaatggttgaaggacggattgccactcggcataggtgggcattacagcttgcacgagtattcttgggtcaaagccaacctgagtgaggttctggtatctagtgtactgggtgtgaacgtgaccagcacagaggtttacggcgcttttacctgctctatccagaatatcagcttcagcagtttcaccctacagcgggcaggacctacaagccatgtggccgctgtgctggccagcctgctggtcctattggcgttactcctcgcagccctgctgtacgtgaaatgtcggctcaacgtgctcctttggtatcaggacgcctacggcgaggtggaaatcaacgatggaaagctgtacgacgcttatgttagttactctgattgtcccgaggaccggaaattcgtgaattttatactgaagccacagctcgaaaggagaaggggctacaaactgtttctcgacgatagggatctgcttcccagggctgagccgtctgccgacctcctagttaatttaagccgctgccgacgtctgatcgtcgttctgagcgacgccttcctatccagggcgtggtgcagtcactcgttcagagagggcctttgcaggctgctggaattgactaggcgaccgatttttattacttttgaggggcaaaggcgcgatcccgctcaccccgctctaagattgctacgccagcaccgacatctcgttaccctcttactgtggaggcccggaagtgtaactcctagtagcgacttctggaaggaggtacagttagcgcttcctcgtaaggttcagtaccgacctgtggaaggtgacccacagacccaactacaggacgataaggatcccatgctcatccttagggggagagtgcctgagggcagagcgctggattccgaggtcgatcccgaccctgaaggagatcttgggatgcctgcccagccccatagccccaccggagaagcccagcatagggctgaatggggccaggctcaaggcaccggccctgggggtgcacccggagttgaagactcctctaggcacagggagcctttgcacgggctgtgcccgggtggagccagaccctccgtctgtctgggaaccagctgggcaagccaagcaattacagcgggtggcgagcaggggcagcctcttgctgtggggctcggccagggatgtggttggccccctcaggcttcacggtctccacacccgcgttgtcccggtgcgtgcctgtggagagcgatttcctctaccgcccaccagtggggattggctggccgagagcctgaacagaggtcgggtcggctgggcagccgtcttgcaaagctgcagtgtcctcatcggctgctgttgccaggcgtgcagggctag

SEQ ID NO: 272169 - DNA, 1700 bp, Artificial Sequence
  derived and/or modified sequence
ggtgagtggcggtcgccatcagacccgcgaagcctctgacctgtccaggtgccctgtccagctgactgcaaggacagagaggagtcctgcccagctcttggatcagtctgctggccgaggagcccggtggagccaggggtgaccctggagcccagcctgccccgaggaggccccggctcagagccatgccaggtgtctgtgatagggcccctgacttcctctccccgtctgaagaccaggtgctgaggcctgccttgggcagctcagtggctctgaactgcacggcttgggtagtctctgggccccactgctccctgccttcagtccagtggctgaaagacgggcttccattgggaattgggggccactacagcctccacgagtactcctgggtcaaggccaacctgtcagaggtgcttgtgtccagtgtcctgggggtcaacgtgaccagcactgaagtctatggggccttcacctgctccatccagaacatcagcttctcctccttcactcttcagagagctggccctacaagccacgtggctgcggtgctggcctccctcctggtcctgctggccctgctgctggccgccctgctctatgtcaagtgccgtctcaacgtgctgctctggtaccaggacgcgtatggggaggtggagataaacgacgggaagctctacgacgcctacgtctcctacagcgactgccccgaggaccgcaagttcgtgaacttcatcctaaagccgcagctggagcggcgtcggggctacaagctcttcctggacgaccgcgacctcctgccgcgcgctgagccctccgccgacctcttggtgaacctgagccgctgccgacgcctcatcgtggtgctttcggacgccttcctgagccgggcctggtgcagccacagcttccgggagggcctgtgccggctgctggagctcacccgcagacccatcttcatcaccttcgagggccagaggcgcgaccccgcgcacccggcgctccgcctgctgcgccagcaccgccacctggtgaccttgctgctctggaggcccggctccgtgactccttcctccgatttttggaaagaagtgcagctggcgctgccgcggaaggtgcagtacaggcctgtggaaggagacccccagacgcagctgcaggacgacaaggaccccatgctgattcttcgaggccgagtccctgagggccgggccctggactcagaggtggacccggaccctgagggcgacctgggtatgcccgcccagccccactccccaactggagaagctcagcacagggcggagtgggggcaggcacagggcacagggcctggaggggctccaggtgttgaggactcttcccggcaccgggagcccctgcacggcctctgccctggaggtgctcggccctcggtctgcctgggaacttcctgggcctcacaggccatcacagcagggggtgagcaggggcagcccctggcagtgggtctgggccaaggctgtgggtggccacctcaggcgtctcggtctccccaccccaggtgtccgggggcctgtctttggagagccatcagctccaccgcacaccagtggggtctcgctgggagagagccggagcagcgaagtggacgtctcggatctcggctcgcgaaactacagtgcccgcacagacttctactgcctggtgtccaaggatga

SEQ ID NO: 272170 - DNA, 1649 bp, Artificial Sequence
  derived and/or modified sequence
agtcctgcccagctcttggatcagtctgctggccgaggagcccggtggagccaggggtgaccctggagcccagcctgccccgaggaggccccggctcagagccatgccaggtgtctgtgatagggcccctgacttcctctccccgtctgaagaccaggtgctgaggcctgccttgggcagctcagtggctctgaactgcacggcttgggtagtctctgggccccactgctccctgccttcagtccagtggctgaaagacgggcttccattgggaattgggggccactacagcctccacgagtactcctgggtcaaggccaacctgtcagaggtgcttgtgtccagtgtcctgggggtcaacgtgaccagcactgaagtctatggggccttcacctgctccatccagaacatcagcttctcctccttcactcttcagagagctggccctacaagccacgtggctgcggtgctggcctccctcctggtcctgctggccctgctgctggccgccctgctctatgtcaagtgccgtctcaacgtgctgctctggtaccaggacgcgtatggggaggtggagataaacgacgggaagctctacgacgcctacgtctcctacagcgactgccccgaggaccgcaagttcgtgaacttcatcctaaagccgcagctggagcggcgtcggggctacaagctcttcctggacgaccgcgacctcctgccgcgcgctgagccctccgccgacctcttggtgaacctgagccgctgccgacgcctcatcgtggtgctttcggacgccttcctgagccgggcctggtgcagccacagcttccgggagggcctgtgccggctgctggagctcacccgcagacccatcttcatcaccttcgagggccagaggcgcgaccccgcgcacccggcgctccgcctgctgcgccagcaccgccacctggtgaccttgctgctctggaggcccggctccgtgactccttcctccgatttttggaaagaagtgcagctggcgctgccgcggaaggtgcagtacaggcctgtggaaggagacccccagacgcagctgcaggacgacaaggaccccatgctgattcttcgaggccgagtccctgagggccgggccctggactcagaggtggacccggaccctgagggcgacctgggtatgcccgcccagccccactccccaactggagaagctcagcacagggcggagtgggggcaggcacagggcacagggcctggaggggctccaggtgttgaggactcttcccggcaccgggagcccctgcacggcctctgccctggaggtgctcggccctcggtctgcctgggaacttcctgggcctcacaggccatcacagcagggggtgagcaggggcagcccctggcagtgggtctgggccaaggctgtgggtggccacctcaggcgtctcggtctccccaccccaggtgtccgggggcctgtctttggagagccatcagctccaccgcacaccagtggggtctcgctgggagagagccggagcagcgaagtggacgtctcggatctcggctcgcgaaactacagtgcccgcacagacttctactgcctggtgtccaaggatgatatgtagctcccaccccagagtgcaggatca

SEQ ID NO: 272171 - DNA, 1515 bp, Artificial Sequence
  derived and/or modified sequence
atgcccggcgtgtgcgacagagcccccgacttcctgagccccagcgaggaccaggtgctgagacccgccctgggcagcagcgtggccctgaactgcaccgcctgggtggtgagcggcccccactgcagcctgcccagcgtgcagtggctgaaggacggcctgcccctgggcatcggcggccactacagcctgcacgagtacagctgggtgaaggccaacctgagcgaggtgctggtgagcagcgtgctgggcgtgaacgtgaccagcaccgaggtgtacggcgccttcacctgcagcatccagaacatcagcttcagcagcttcaccctgcagagagccggccccaccagccacgtggccgccgtgctggccagcctgctggtgctgctggccctgctgctggccgccctgctgtacgtgaagtgcagactgaacgtgctgctgtggtaccaggacgcctacggcgaggtggagatcaacgacggcaagctgtacgacgcctacgtgagctacagcgactgccccgaggacagaaagttcgtgaacttcatcctgaagccccagctggagagaagaagaggctacaagctgttcctggacgacagagacctgctgcccagagccgagcccagcgccgacctgctggtgaacctgagcagatgcagaagactgatcgtggtgctgagcgacgccttcctgagcagagcctggtgcagccacagcttcagagagggcctgtgcagactgctggagctgaccagaagacccatcttcatcaccttcgagggccagagaagagaccccgcccaccccgccctgagactgctgagacagcacagacacctggtgaccctgctgctgtggagacccggcagcgtgacccccagcagcgacttctggaaggaggtgcagctggccctgcccagaaaggtgcagtacagacccgtggagggcgacccccagacccagctgcaggacgacaaggaccccatgctgatcctgagaggcagagtgcccgagggcagagccctggacagcgaggtggaccccgaccccgagggcgacctgggcatgcccgcccagccccacagccccaccggcgaggcccagcacagagccgagtggggccaggcccagggcaccggccccggcggcgcccccggcgtggaggacagcagcagacacagagagcccctgcacggcctgtgccccggcggcgccagacccagcgtgtgcctgggcaccagctgggccagccaggccatcaccgccggcggcgagcagggccagcccctggccgtgggcctgggccagggctgcggctggcccccccaggccagcagaagcccccaccccagatgccccggcgcctgcctgtggagagccatcagcagcaccgcccaccagtggggcctggccggcagagagcccgagcagagaagcggcagactgggcagcagactggccaagctgcagtgcccccacagactgctgctgcccggcgtgcagggctag

SEQ ID NO: 272172 - protein, 565 aa, Artificial Sequence
  derived and/or modified sequence
MPKQVEVRMHDSHLGSEEPKHRHLGLRLCDKLGKNLLLTLTVFGVILGAVCGGLLRLASPIHPDVVMLIAFPGDILMRMLKMLILPLIISSLITGLSGLDAKASGRLGTRAMVYYMSTTIIAAVLGVILVLAIHPGNPKLKKQLGPGKKNDEVSSLDAFLDLIRNLFPENLVQACFQQIQTVTKKVLVAPPPDEEANATSAVVSLLNETVTEVPEETKMVIKKGLEFKDGMNVLGLIGFFIAFGIAMGKMGDQAKLMVDFFNILNEIVMKLVIMIMWYSPLGIACLICGKIIAIKDLEVVARQLGMYMVTVIIGLIIHGGIFLPLIYFVVTRKNPFSFFAGIFQAWITALGTASSAGTLPVTFRCLEENLGIDKRVTRFVLPVGATINMDGTALYEAVAAIFIAQMNGVVLDGGQIVTVSLTATLASVGAASIPSAGLVTMLLILTAVGLPTEDISLLVAVDWLLDRMRTSVNVVGDSFGAGIVYHLSKSELDTIDSQHRVHEDIEMTKTQSIYDDMKNHRESNSNQCVYAAHNSVIVDECKVTLAANGKSADCSVEEEPWKREK

SEQ ID NO: 272173 - DNA, 11538 bp, Artificial Sequence
  derived and/or modified sequence
cgactccgctggacctgggacccccagacgtgggaggatgggggtgacctagtgtcttccagtagggcaatctctggacatctttatctccccagtacctctccagatcctgaagcctggggccagggaggagaggttagatgtcagcagtggaaggacagtgccaacaatatgcccaagcaggtggaagtgcgaatgcacgacagtcatcttggctcagaggaacccaagcaccggcacctgggcctgcgcctgtgtgacaagctggggaagaatctgctgctcaccctgacggtgtttggtgtcatcctgggagcagtgtgtggagggcttcttcgcttggcatctcccatccaccctgatgtggttatgttaatagccttcccaggggatatactcatgaggatgctaaaaatgctcattctccctctaatcatctccagcttaatcacagggttgtcaggcctggatgctaaggctagtggccgcttgggcacgagagccatggtgtattacatgtccacgaccatcattgctgcagtactgggggtcattctggtcttggctatccatccaggcaatcccaagctcaagaagcagctggggcctgggaagaagaatgatgaagtgtccagcctggatgccttcctggaccttattcgaaatctcttccctgaaaaccttgtccaagcctgctttcaacagattcaaacagtgacgaagaaagtcctggttgcaccaccgccggacgaggaggccaacgcaaccagcgctgttgtctctctgttgaacgagactgtgactgaggtgccggaggagactaagatggttatcaagaagggcctggagttcaaggatgggatgaacgtcttaggtctgatagggtttttcattgcttttggcatcgctatggggaagatgggagatcaggccaagctgatggtggatttcttcaacattttgaatgagattgtaatgaagttagtgatcatgatcatgtggtactctcccctgggtatcgcctgcctgatctgtggaaagatcattgcaatcaaggacttagaagtggttgctaggcaactggggatgtacatggtaacagtgatcataggcctcatcatccacgggggcatctttctccccttgatttactttgtagtgaccaggaaaaaccccttctccttttttgctggcattttccaagcttggatcactgccctgggcaccgcttccagtgctggaactttgcctgtcacctttcgttgcctggaagaaaatctggggattgataagcgtgtgactagattcgtccttcctgttggagcaaccattaacatggatggtacagccctttatgaagcggtagccgccatctttatagcccaaatgaatggtgttgtcctggatggaggacagattgtgactgtaagcctcacagccaccctggcaagcgtcggcgcggccagtatccccagtgccgggctggtcaccatgctcctcattctgacagccgtgggcctgccaacagaggacatcagcctgctggtggctgtggactggctgctggacaggatgagaacttcagtcaatgttgtgggtgactcttttggggctgggatagtctatcacctctccaagtctgagctggataccattgactcccagcatcgagtgcatgaagatattgaaatgaccaagactcaatccatttatgatgacatgaagaaccacagggaaagcaactctaatcaatgtgtctatgctgcacacaactctgtcatagtagatgaatgcaaggtaactctggcagccaatggaaagtcagccgactgcagtgttgaggaagaaccttggaaacgtgagaaataaggatatgagtctcagcaaattcttgaataaactccccagcgtatcctatggtaactgatgatataaacaagctttctttaaaaaggaaaaaaatgcgtatatttctatgtttacttaatctgttagccgaggcttagaggagctcttgtgagtcagtgatgacaggcacggtgctgtgtctttgccaaataatgctttataaccgtctaattttctcacttgtattattatttgaatggatgctgctggaggaatcagttggaattgaagacacgttcttgccagcttcccttttctcccaagatgcagaaatgtggatgctcttttcccaggggacatgagtaaagcagtgtggtacactccagggacttgggaaaatgagcaaacacacagcgtgttattccttaaagtgttctccatgtctcgccttgttatgcacaagagattctattaaaagcctctagaagtaactccccttaaaatgtctagtaaagcttgcacatggattgattaaaagcaaatacctgtcttagggaattctgacaatttatcttccatatgctctttaagtaaaatgtttcaaagacagttttaaagggagccatgctcttaaaggcagttgattaaagaacctgttacatctctgccttaccctgtgtaatctgtgagaacaatggttgaaatttcaaagtatgtttcattattctttctaaatttgataattgattaggaagtattttatatataaccactgtagatattgacaaaagtaagagagcacagtcaacataaagtttaaccagagttaaatattcaaatttatttatgttcggtttgccttcacctggtgtagtaaaatcaaatgagattatttggtatgtgttttgctttgtttaacccaaaagattattttttggttcctaaagaaaaagatatttttaatctgtcaattatttcagtcatcatctcatcgtcctagaaagcctggtcattttactgtcctcacacatggaagacacttgtgttggctgtgcctcttttaatgtcatctcttgatgaaacaaaaatactggtatttatccaatatgttgaaagcgttttgttatcttctatcaaagcacataaaaccagttataggacacagttggaagcagagccagtcttcctcctcagtcttctcagtagaaaggaacagaaaacaaacatctgtgcaaaaccctataaaagtgatattcctatggcagagtccaggcagccttgaacaatgacatggcaacaaaggatggctctgtacaacttcacagatggaatcttgtttaaggctgtgaagttttaaggaataaataatataattggtgtagcacagtgccttgcatgcagtaggcagccaacaaatccttaatgattggtaatgcaagctaaaatttttaatgtctctactatccttttttattgaataacgcacagtattttcctaaggttgctgggtttgggagtaagcttgggacttgaatcattgagaaataaagcacatttgactctaagaagtatgtagaaccttgtttataggtgagaataggctgtattatatgaaaccagcggagggatgctgagacagtcatggtttatagaatccaaattctctgagatgagggtgcttatggacctcaaatagcctttcttatctgctccttgtgacttctctcttttaaatcagatacctttgaaacatacaagagacatgagattccagttgtttttgtctcctaaaccctagtgatttttggataaggatcactactgaacagtattaggcaacttttcatttttgcttttcaaatgacattggtctttatttccagtagatgggcagtaaacagggtcagggtggtcaagggatatgattaagtgtagtagtagaaaatgcattctttttttttttttttttttagacagagtcttgctctgttgctcaggctggagtacagtggcacgatctcagctcactgcactgcaatgtccacctctctagttcaagcgattctcctgtctcagcctcccgagtagctgggactacaggcacatgccaccatgcctggctaattttttgtatttttagtacagatgggtttcattatgttagccaggatggtctcgatctcctgacctcatgatccacccgccatggcctcccaaagtgctgggattacaggcgtgagccaccgtgcccggccagaaaatacattctttacagcaaatgttataggttaaggagacagttcctgggtttagctgtgaaactgtttaggattttctttaagtggtgttcccaagagcttttttctggtaagttggaggctataggcaaagcgtctaggagcttgttgttttttgctatggaaggccagctttgggatctatatacatgggcatgtttctcaatggagtggtcacaggattctcttctcagaactctgcctgaaacctttccggtgtgttttgtcttcaactttttcctagctatcctattagcctgtaaatatgtcagcagacaatgtgtttggaagaaacaaggtgtacaacttcacaaagcaagttttttctggtctgagacttactgtgtgcaggaagtctcgtgagaatatacttagaaaatcacacttatctggaaattcaataagtcatattaaaaatatacaatttcttgaactcaggactagcctgaaaatccaaaatgcatgtagagttgacatgttgacatatgtctatgtcctctgtttttatttaagcctcatttatttctcccttgccatgcccatttgggattttctttgcccagcatatgtgccataaacagaacaaatggatccagggtatacctctaataacctttatctaaatagaatacatttaacctgtcaattatatgtatagatttatcctaattggttcaacatatatatgaatgcttgtaatagtctgttactatttgataatgcataaatgttatatttatatacagttacagcaggccagaaacatacatacactgcatcctgtaaggtctgtaaatcagggcttcggcaatgccattttgctatagactcattcatgttttttaggaatcagaatcatttcaggagaaaaccaactaagtagactttaattcttctctttctcattcttgccctttgagaaacccaagtggaatcatcacttaattacttactcaaattcaatgaatcaaatccaatccaatcagtgagaagaatagcttatctttcaaggtaatactttaccttagatctttgagggcatgcttcccatacaaagagcatcagaaaatcagggcaatcatctagatctcacagatcttcaacataggactctaggttatgagagctgaaccacatagctatcagtttcagtttttacttcctattgagtgtgtagaaacacagcctatggttttgctgtctgcggaagttaccataccctgtaaaagacaaatatttctttctcctctcgaaccactagtcagcctggatattcatgaaagctgaaagaaggggtgccaaaatgcctagctcctggatttagactcatggaatatgagaaaggcttagggaaaattcaagtcatggggagattcctgctaggtgatgccaggaatctcaatgacctgttgattagagggtctctggtcatttccacttgtgtgtggagaaatacatcatttgcatatgtatctagtcaagaagcccttttggagcaaagtggttgggaaactcatttactgggtccaccaaaggaaacccaattctgccatgtttttgcaaatactacacgtccctttgctctcaatagcaaaagtgatgttatagttttttttacttttgtcagaatcaaggcttcggccacctgtgcaatattttcccatggaatgcagcagtaaatccaagtaggtatatccgtgctcagagagaattctccatagttctgactcctgaaaaacaagtctcattagctctcatctagtttgatgactaaaagtgcacagcagttataccccagtggaagtgatttttctcacctagctgctctctaactcttacggctatctagttgtctgagctgctggtttgttttacttattctccaactgaactcattccaaaccaagaaaaaggaccaaatgaaattttcagttattatcatacttgctccttgaataagaatgctagagtctggaggcagaagaagactaagttaaaaaaaaaacagcctgaaggaattctggagtgagttttgtaagtctaattgtcaaagaagataaatggtctcagtatctgtagtaatttctggttaagcctagagggatcactgagtgccaatccaagcaggtggcactagaggcagattgttctcctagcatagagtgagtttccagctgctcatgacacattttcttatgattttccctaaaagaaaaccaaattttctactccacctcttcctttcctatcattccacttattgttgctgctttgctaacagccagcttagtaagccatcacacaagttagtgtgaggcttggttttaaaatagataacagagaatcttgattaaatagtatccaactttgtagcataacacagctaattcaggcaatgacatagagatgataagaaacaacatggtttggtagagggaacatttgatttagactctgcccatttttagctgtatgacttacataagtcattttgtgtccaagcctcattttctcccatatgaaaagtgaaggggttggattaaatgactaaaatccccttccagccctatgagcccaatgtattatgatctctgctttgtttccttcttaagaggcttcctactataaaatgtgacctatttacattttaagttgaagtagcccacaataatgaataatcaatttagatttttctcatctcctttgggagaaattaaattcaagcctctattcatttgatgttttacaacaagcttcaaagttggccatgttcattcacagtttgatattttgagacaccaataaaagttttttaataaaagttcccttgacttaaactcaccttcctaatagaagtagtgatttggctcacggaaaaatgtttccagagtcaacatgagaggactggatgaacctacagcctcactcaagctgttgcatcattgctgctgtagcaacagagccctctctgaatacccaaaacacacaattttctccaacaattctaattgcccacccagtatgggaatttgagagcctttggtgaataaccttgatcactcttttgaaatttggtacaacacttgcacaatcacggcaactgtttgtaaatatcttttcttctccgccagtatgtagacatgcacacccattcacaagtaagcccgcaaattcattttcacattttcctcttggtttgtttttatcatgggtatcacattgcaggaagagatgctctaacttacaagaatggaattttctgactatcattgccctcttcaaggcctgattagtttgtagggtggatgggatacaatgcatggtctacaaggtccatgtcaccagccatgatctttaaacaacctcttgcactttctggcactgctgcaatggcccatggtggacacctctgctgtttgtccaaacttctgctaaatagagtagtgttggtatttgttgtgttgtgaactcctttgttgtcagagaagacttcagctcttcaggtttgcaagggcaagatgtaaagctaggactgaaaggattgggttttgtttttcggccggcttttttccattagtgcaaaaaacctgatgcaagggcagcaagataaacacaatttcttcattgacccagataagaacctgtagaaaagtgagagatgcccctaagttcctatttcatttatcctaaataatatcctgaataactactgatcagtttttttctatgtccagccttgcttcactttccaacctccaggccaaatattcattttgatattttacaaaatccttctggtttttacacagggcccttttgtgctgagaataaaaccagctattggaacagacctcactgctttgtagagtcagaagttgacctagagaatgggtagcaacaggtcctcagtttctctggagacacccccaatccttgggtgagtgttgaaacctgacaactgactgttagccttgtcatcatcctcactggagatggagatgttgcagtcggagcctcactccttctggggcactgtttcttctcatggcaaccattttgcctgcctggaaacagcctgttgcctttgctagggggcaaatacacacactagccaaggaagttggtccagcacatctctgaggtttctcccccatggacccatggagcgaattccctgagataaatgatcagaaagttggctgtctggtggtttaatactccataagagttacttcccttatagaaagtcatcctttggcatctagatttttctacaaatcaccttaactccctccctttctctttctcctggaaaacctcagcattgcatctccatgttgcacaacacagatcagattatctggtcactatagagatttgtatataaaaaaactacttttttgaggattttgtatattgtttttctatttgttttctacagcttgaggaaagagctggcaaactgtgaatctaacttgatcttgttgccagcagatatattttggcttcctggtaagagtctgtgttaccagggacaatatattgccctctgatcagtattgcaccctaaatccacaaattcctccagcccagtcttacatttttttaaacaaatcccctagcttgtttgctattatttataaagagcattagaaaatgtatttatagacctggatgttatatgtttaatattaatttagcctttaataatgttataggtttgtaactattcttcagaaattataaagaactcagtgtagactgaattaatctatttagtatctgtaattttgcagacatattttcttacagtattttctatgtaaccacacatgtagaattataactaattagagcacaagaagtttcttcagcaatttagagctaccaattgtttcttgactatatagtcacatttgacaaatttaagaacccagtctttagtgatgcaataaacaaaatgaaccattaagaacaaggaattgcttaaatcccttagctggtgaggatatacatctaaataattcatctttctaactcaaggaatggtgctgattttttaaatgtttgacaccaggccttgtttttccagctgagcattctcattttgcttttctctaagactatcaaagacaaggtattaatagtaggattattcctagatcagaatgtttcatacattcctaaaggtttatgtggaaattggcttaggaaaactttgagtagcagagactgaggatgagtgctagagatgaaatcaggacagatttgttgcagttaattcttgccaagcaaattagtggtaaatgtcacattgttatgtgaattgagcacatatttttaaagaaagtttacaaaaaatttttagaaccaactatgaggcaatactgtatcactgggggctgggagtgggggcttagaatcatactgaaattgtttaaaagcagcccaggtagtttctgtcctcaggtgaataacagactatataacttccccgaaaggtaaaacgatagccactgcagagacgaggtgtcttccttccaccaaatactttctgagatggtggtaggagtagtatttttaccgtggtttaaaaagtagtcagttacatagaaagtgtattggtatgtatttgaacctgctcttcattaaacaaacagattagatgtaccctcgactggcaataattgtatctattttcaagtacagctagctgtcaaagcatgaagctcttgtgtatacacactgacacttggttcacgcatgaagaacagtgcctatgcactttgtgtagctataatgtaggtatctaggtgtaatttcagtgaaatggtgtatagatgtattgtaatttaaatgtatatgttatttttggctattcatctaaatgcagtagacatgttgatcggtgttttgcaaacatttctttttccttcttagataactagtcgtgaatcatttctcctctttctcagtgtggcttgggaatatatatgagtgaagaatttatctgtgaatcctttgtactgatgattgtttgaaagtctgtgtgtgtccagcacctttgtaaatacacaattcagagcagggatgggctgggtgtgtgtcctggttcttagtgaaaggtcatctcatgtctgtttaatacatggtgaatgcaactgtggaacttttgattacctagacttaggtaggtttagaatgagaacatccatctacagtcctcctttgcttggtggattgggctcagaggaacaaaaagttagtctgactctgtgcatattagcatcatgtctttagagaaaggtcagcctctctggttgccaaatactcatcatgatgctcatgacttaaaggttctgaggagccttgtctcccttggatttttgagtcagggtacaggaaaaaacattgctgactaactaactgcaaatgcatctgcaggtgaaaccctacgaaagcacagttctggctataaacttcagagttctctgtaaaaaacttagagcactagaagcacaggaatagtgagtgtacagcttatgcggttgtagaggggcaactgatgaacacaggtcccacatatatgagggagtatgacgttctctacctaatatgttctgtgtgcatgttttgaatgattgaagatgggattaactaatgcaagtttacagttgcctcctaaaacacacattctgtataattatcgctaaatacaatgctgtgaggtctatagttcctgtaacccctttctcctccccaaggacagagaagaactagccatgtgctatagggaaccctgagtgccctactcttttcccaagaagggtaaagcctacaatatcatcagggggcatgaagcacattaatttgcagtggctgcttcatatgaggagatatggtggacaggctaatttttccttgaaaatgtggcttcttcaactcctttcaaatttaggatggaatacttcctgaaataaaactgggctttatgcaggattctctttgaaaattcttgtatgtccagaacaaaagataaaactaattgtattcctcacattcacaatccccattggtctgaagtcacgtagcacagagcatctatagcacatagtgtttaaagactaatgaatgcaaaaagataaaatcttcaactaatttttgaattgtttctcatatatgctactagaaaatgccttgttgatgaagcacattttgggtagttgaggtcttttgttttcgcctttagctttctaagctttcttacaatgtggactgattactgtaacatttcacgtgtaaaataactggatattctttatatactggaaataacctgtgaatccaatatttcactaagtgttttaacttttgtgtatatatctctcatcaa

SEQ ID NO: 272174 - DNA, 11689 bp, Artificial Sequence
  derived and/or modified sequence
aggccagagatttattcgagcttcggcgggggagggagcgcagctgggccgcgtttaggctgcaccacccgcgtgtttcagccgctcgactccgctggacctgggacccccagacgtgggaggatggggtgggtgtgcctgcctgtgagtttgggggtgctggaccaaagtgaacacagatgagtcaactccacccattgtctctgcaagaaaacagctcaaaactcaccccatgaatgagagaggaagatgccaccctttgggactgtctgtaccctggcagaaatggaatgatttatccaaataagcaagtgccaacaatatgcccaagcaggtggaagtgcgaatgcacgacagtcatcttggctcagaggaacccaagcaccggcacctgggcctgcgcctgtgtgacaagctggggaagaatctgctgctcaccctgacggtgtttggtgtcatcctgggagcagtgtgtggagggcttcttcgcttggcatctcccatccaccctgatgtggttatgttaatagccttcccaggggatatactcatgaggatgctaaaaatgctcattctccctctaatcatctccagcttaatcacagggttgtcaggcctggatgctaaggctagtggccgcttgggcacgagagccatggtgtattacatgtccacgaccatcattgctgcagtactgggggtcattctggtcttggctatccatccaggcaatcccaagctcaagaagcagctggggcctgggaagaagaatgatgaagtgtccagcctggatgccttcctggaccttattcgaaatctcttccctgaaaaccttgtccaagcctgctttcaacagattcaaacagtgacgaagaaagtcctggttgcaccaccgccggacgaggaggccaacgcaaccagcgctgttgtctctctgttgaacgagactgtgactgaggtgccggaggagactaagatggttatcaagaagggcctggagttcaaggatgggatgaacgtcttaggtctgatagggtttttcattgcttttggcatcgctatggggaagatgggagatcaggccaagctgatggtggatttcttcaacattttgaatgagattgtaatgaagttagtgatcatgatcatgtggtactctcccctgggtatcgcctgcctgatctgtggaaagatcattgcaatcaaggacttagaagtggttgctaggcaactggggatgtacatggtaacagtgatcataggcctcatcatccacgggggcatctttctccccttgatttactttgtagtgaccaggaaaaaccccttctccttttttgctggcattttccaagcttggatcactgccctgggcaccgcttccagtgctggaactttgcctgtcacctttcgttgcctggaagaaaatctggggattgataagcgtgtgactagattcgtccttcctgttggagcaaccattaacatggatggtacagccctttatgaagcggtagccgccatctttatagcccaaatgaatggtgttgtcctggatggaggacagattgtgactgtaagcctcacagccaccctggcaagcgtcggcgcggccagtatccccagtgccgggctggtcaccatgctcctcattctgacagccgtgggcctgccaacagaggacatcagcctgctggtggctgtggactggctgctggacaggatgagaacttcagtcaatgttgtgggtgactcttttggggctgggatagtctatcacctctccaagtctgagctggataccattgactcccagcatcgagtgcatgaagatattgaaatgaccaagactcaatccatttatgatgacatgaagaaccacagggaaagcaactctaatcaatgtgtctatgctgcacacaactctgtcatagtagatgaatgcaaggtaactctggcagccaatggaaagtcagccgactgcagtgttgaggaagaaccttggaaacgtgagaaataaggatatgagtctcagcaaattcttgaataaactccccagcgtatcctatggtaactgatgatataaacaagctttctttaaaaaggaaaaaaatgcgtatatttctatgtttacttaatctgttagccgaggcttagaggagctcttgtgagtcagtgatgacaggcacggtgctgtgtctttgccaaataatgctttataaccgtctaattttctcacttgtattattatttgaatggatgctgctggaggaatcagttggaattgaagacacgttcttgccagcttcccttttctcccaagatgcagaaatgtggatgctcttttcccaggggacatgagtaaagcagtgtggtacactccagggacttgggaaaatgagcaaacacacagcgtgttattccttaaagtgttctccatgtctcgccttgttatgcacaagagattctattaaaagcctctagaagtaactccccttaaaatgtctagtaaagcttgcacatggattgattaaaagcaaatacctgtcttagggaattctgacaatttatcttccatatgctctttaagtaaaatgtttcaaagacagttttaaagggagccatgctcttaaaggcagttgattaaagaacctgttacatctctgccttaccctgtgtaatctgtgagaacaatggttgaaatttcaaagtatgtttcattattctttctaaatttgataattgattaggaagtattttatatataaccactgtagatattgacaaaagtaagagagcacagtcaacataaagtttaaccagagttaaatattcaaatttatttatgttcggtttgccttcacctggtgtagtaaaatcaaatgagattatttggtatgtgttttgctttgtttaacccaaaagattattttttggttcctaaagaaaaagatatttttaatctgtcaattatttcagtcatcatctcatcgtcctagaaagcctggtcattttactgtcctcacacatggaagacacttgtgttggctgtgcctcttttaatgtcatctcttgatgaaacaaaaatactggtatttatccaatatgttgaaagcgttttgttatcttctatcaaagcacataaaaccagttataggacacagttggaagcagagccagtcttcctcctcagtcttctcagtagaaaggaacagaaaacaaacatctgtgcaaaaccctataaaagtgatattcctatggcagagtccaggcagccttgaacaatgacatggcaacaaaggatggctctgtacaacttcacagatggaatcttgtttaaggctgtgaagttttaaggaataaataatataattggtgtagcacagtgccttgcatgcagtaggcagccaacaaatccttaatgattggtaatgcaagctaaaatttttaatgtctctactatccttttttattgaataacgcacagtattttcctaaggttgctgggtttgggagtaagcttgggacttgaatcattgagaaataaagcacatttgactctaagaagtatgtagaaccttgtttataggtgagaataggctgtattatatgaaaccagcggagggatgctgagacagtcatggtttatagaatccaaattctctgagatgagggtgcttatggacctcaaatagcctttcttatctgctccttgtgacttctctcttttaaatcagatacctttgaaacatacaagagacatgagattccagttgtttttgtctcctaaaccctagtgatttttggataaggatcactactgaacagtattaggcaacttttcatttttgcttttcaaatgacattggtctttatttccagtagatgggcagtaaacagggtcagggtggtcaagggatatgattaagtgtagtagtagaaaatgcattctttttttttttttttttttagacagagtcttgctctgttgctcaggctggagtacagtggcacgatctcagctcactgcactgcaatgtccacctctctagttcaagcgattctcctgtctcagcctcccgagtagctgggactacaggcacatgccaccatgcctggctaattttttgtatttttagtacagatgggtttcattatgttagccaggatggtctcgatctcctgacctcatgatccacccgccatggcctcccaaagtgctgggattacaggcgtgagccaccgtgcccggccagaaaatacattctttacagcaaatgttataggttaaggagacagttcctgggtttagctgtgaaactgtttaggattttctttaagtggtgttcccaagagcttttttctggtaagttggaggctataggcaaagcgtctaggagcttgttgttttttgctatggaaggccagctttgggatctatatacatgggcatgtttctcaatggagtggtcacaggattctcttctcagaactctgcctgaaacctttccggtgtgttttgtcttcaactttttcctagctatcctattagcctgtaaatatgtcagcagacaatgtgtttggaagaaacaaggtgtacaacttcacaaagcaagttttttctggtctgagacttactgtgtgcaggaagtctcgtgagaatatacttagaaaatcacacttatctggaaattcaataagtcatattaaaaatatacaatttcttgaactcaggactagcctgaaaatccaaaatgcatgtagagttgacatgttgacatatgtctatgtcctctgtttttatttaagcctcatttatttctcccttgccatgcccatttgggattttctttgcccagcatatgtgccataaacagaacaaatggatccagggtatacctctaataacctttatctaaatagaatacatttaacctgtcaattatatgtatagatttatcctaattggttcaacatatatatgaatgcttgtaatagtctgttactatttgataatgcataaatgttatatttatatacagttacagcaggccagaaacatacatacactgcatcctgtaaggtctgtaaatcagggcttcggcaatgccattttgctatagactcattcatgttttttaggaatcagaatcatttcaggagaaaaccaactaagtagactttaattcttctctttctcattcttgccctttgagaaacccaagtggaatcatcacttaattacttactcaaattcaatgaatcaaatccaatccaatcagtgagaagaatagcttatctttcaaggtaatactttaccttagatctttgagggcatgcttcccatacaaagagcatcagaaaatcagggcaatcatctagatctcacagatcttcaacataggactctaggttatgagagctgaaccacatagctatcagtttcagtttttacttcctattgagtgtgtagaaacacagcctatggttttgctgtctgcggaagttaccataccctgtaaaagacaaatatttctttctcctctcgaaccactagtcagcctggatattcatgaaagctgaaagaaggggtgccaaaatgcctagctcctggatttagactcatggaatatgagaaaggcttagggaaaattcaagtcatggggagattcctgctaggtgatgccaggaatctcaatgacctgttgattagagggtctctggtcatttccacttgtgtgtggagaaatacatcatttgcatatgtatctagtcaagaagcccttttggagcaaagtggttgggaaactcatttactgggtccaccaaaggaaacccaattctgccatgtttttgcaaatactacacgtccctttgctctcaatagcaaaagtgatgttatagttttttttacttttgtcagaatcaaggcttcggccacctgtgcaatattttcccatggaatgcagcagtaaatccaagtaggtatatccgtgctcagagagaattctccatagttctgactcctgaaaaacaagtctcattagctctcatctagtttgatgactaaaagtgcacagcagttataccccagtggaagtgatttttctcacctagctgctctctaactcttacggctatctagttgtctgagctgctggtttgttttacttattctccaactgaactcattccaaaccaagaaaaaggaccaaatgaaattttcagttattatcatacttgctccttgaataagaatgctagagtctggaggcagaagaagactaagttaaaaaaaaaacagcctgaaggaattctggagtgagttttgtaagtctaattgtcaaagaagataaatggtctcagtatctgtagtaatttctggttaagcctagagggatcactgagtgccaatccaagcaggtggcactagaggcagattgttctcctagcatagagtgagtttccagctgctcatgacacattttcttatgattttccctaaaagaaaaccaaattttctactccacctcttcctttcctatcattccacttattgttgctgctttgctaacagccagcttagtaagccatcacacaagttagtgtgaggcttggttttaaaatagataacagagaatcttgattaaatagtatccaactttgtagcataacacagctaattcaggcaatgacatagagatgataagaaacaacatggtttggtagagggaacatttgatttagactctgcccatttttagctgtatgacttacataagtcattttgtgtccaagcctcattttctcccatatgaaaagtgaaggggttggattaaatgactaaaatccccttccagccctatgagcccaatgtattatgatctctgctttgtttccttcttaagaggcttcctactataaaatgtgacctatttacattttaagttgaagtagcccacaataatgaataatcaatttagatttttctcatctcctttgggagaaattaaattcaagcctctattcatttgatgttttacaacaagcttcaaagttggccatgttcattcacagtttgatattttgagacaccaataaaagttttttaataaaagttcccttgacttaaactcaccttcctaatagaagtagtgatttggctcacggaaaaatgtttccagagtcaacatgagaggactggatgaacctacagcctcactcaagctgttgcatcattgctgctgtagcaacagagccctctctgaatacccaaaacacacaattttctccaacaattctaattgcccacccagtatgggaatttgagagcctttggtgaataaccttgatcactcttttgaaatttggtacaacacttgcacaatcacggcaactgtttgtaaatatcttttcttctccgccagtatgtagacatgcacacccattcacaagtaagcccgcaaattcattttcacattttcctcttggtttgtttttatcatgggtatcacattgcaggaagagatgctctaacttacaagaatggaattttctgactatcattgccctcttcaaggcctgattagtttgtagggtggatgggatacaatgcatggtctacaaggtccatgtcaccagccatgatctttaaacaacctcttgcactttctggcactgctgcaatggcccatggtggacacctctgctgtttgtccaaacttctgctaaatagagtagtgttggtatttgttgtgttgtgaactcctttgttgtcagagaagacttcagctcttcaggtttgcaagggcaagatgtaaagctaggactgaaaggattgggttttgtttttcggccggcttttttccattagtgcaaaaaacctgatgcaagggcagcaagataaacacaatttcttcattgacccagataagaacctgtagaaaagtgagagatgcccctaagttcctatttcatttatcctaaataatatcctgaataactactgatcagtttttttctatgtccagccttgcttcactttccaacctccaggccaaatattcattttgatattttacaaaatccttctggtttttacacagggcccttttgtgctgagaataaaaccagctattggaacagacctcactgctttgtagagtcagaagttgacctagagaatgggtagcaacaggtcctcagtttctctggagacacccccaatccttgggtgagtgttgaaacctgacaactgactgttagccttgtcatcatcctcactggagatggagatgttgcagtcggagcctcactccttctggggcactgtttcttctcatggcaaccattttgcctgcctggaaacagcctgttgcctttgctagggggcaaatacacacactagccaaggaagttggtccagcacatctctgaggtttctcccccatggacccatggagcgaattccctgagataaatgatcagaaagttggctgtctggtggtttaatactccataagagttacttcccttatagaaagtcatcctttggcatctagatttttctacaaatcaccttaactccctccctttctctttctcctggaaaacctcagcattgcatctccatgttgcacaacacagatcagattatctggtcactatagagatttgtatataaaaaaactacttttttgaggattttgtatattgtttttctatttgttttctacagcttgaggaaagagctggcaaactgtgaatctaacttgatcttgttgccagcagatatattttggcttcctggtaagagtctgtgttaccagggacaatatattgccctctgatcagtattgcaccctaaatccacaaattcctccagcccagtcttacatttttttaaacaaatcccctagcttgtttgctattatttataaagagcattagaaaatgtatttatagacctggatgttatatgtttaatattaatttagcctttaataatgttataggtttgtaactattcttcagaaattataaagaactcagtgtagactgaattaatctatttagtatctgtaattttgcagacatattttcttacagtattttctatgtaaccacacatgtagaattataactaattagagcacaagaagtttcttcagcaatttagagctaccaattgtttcttgactatatagtcacatttgacaaatttaagaacccagtctttagtgatgcaataaacaaaatgaaccattaagaacaaggaattgcttaaatcccttagctggtgaggatatacatctaaataattcatctttctaactcaaggaatggtgctgattttttaaatgtttgacaccaggccttgtttttccagctgagcattctcattttgcttttctctaagactatcaaagacaaggtattaatagtaggattattcctagatcagaatgtttcatacattcctaaaggtttatgtggaaattggcttaggaaaactttgagtagcagagactgaggatgagtgctagagatgaaatcaggacagatttgttgcagttaattcttgccaagcaaattagtggtaaatgtcacattgttatgtgaattgagcacatatttttaaagaaagtttacaaaaaatttttagaaccaactatgaggcaatactgtatcactgggggctgggagtgggggcttagaatcatactgaaattgtttaaaagcagcccaggtagtttctgtcctcaggtgaataacagactatataacttccccgaaaggtaaaacgatagccactgcagagacgaggtgtcttccttccaccaaatactttctgagatggtggtaggagtagtatttttaccgtggtttaaaaagtagtcagttacatagaaagtgtattggtatgtatttgaacctgctcttcattaaacaaacagattagatgtaccctcgactggcaataattgtatctattttcaagtacagctagctgtcaaagcatgaagctcttgtgtatacacactgacacttggttcacgcatgaagaacagtgcctatgcactttgtgtagctataatgtaggtatctaggtgtaatttcagtgaaatggtgtatagatgtattgtaatttaaatgtatatgttatttttggctattcatctaaatgcagtagacatgttgatcggtgttttgcaaacatttctttttccttcttagataactagtcgtgaatcatttctcctctttctcagtgtggcttgggaatatatatgagtgaagaatttatctgtgaatcctttgtactgatgattgtttgaaagtctgtgtgtgtccagcacctttgtaaatacacaattcagagcagggatgggctgggtgtgtgtcctggttcttagtgaaaggtcatctcatgtctgtttaatacatggtgaatgcaactgtggaacttttgattacctagacttaggtaggtttagaatgagaacatccatctacagtcctcctttgcttggtggattgggctcagaggaacaaaaagttagtctgactctgtgcatattagcatcatgtctttagagaaaggtcagcctctctggttgccaaatactcatcatgatgctcatgacttaaaggttctgaggagccttgtctcccttggatttttgagtcagggtacaggaaaaaacattgctgactaactaactgcaaatgcatctgcaggtgaaaccctacgaaagcacagttctggctataaacttcagagttctctgtaaaaaacttagagcactagaagcacaggaatagtgagtgtacagcttatgcggttgtagaggggcaactgatgaacacaggtcccacatatatgagggagtatgacgttctctacctaatatgttctgtgtgcatgttttgaatgattgaagatgggattaactaatgcaagtttacagttgcctcctaaaacacacattctgtataattatcgctaaatacaatgctgtgaggtctatagttcctgtaacccctttctcctccccaaggacagagaagaactagccatgtgctatagggaaccctgagtgccctactcttttcccaagaagggtaaagcctacaatatcatcagggggcatgaagcacattaatttgcagtggctgcttcatatgaggagatatggtggacaggctaatttttccttgaaaatgtggcttcttcaactcctttcaaatttaggatggaatacttcctgaaataaaactgggctttatgcaggattctctttgaaaattcttgtatgtccagaacaaaagataaaactaattgtattcctcacattcacaatccccattggtctgaagtcacgtagcacagagcatctatagcacatagtgtttaaagactaatgaatgcaaaaagataaaatcttcaactaatttttgaattgtttctcatatatgctactagaaaatgccttgttgatgaagcacattttgggtagttgaggtcttttgttttcgcctttagctttctaagctttcttacaatgtggactgattactgtaacatttcacgtgtaaaataactggatattctttatatactggaaataacctgtgaatccaatatttcactaagtgttttaacttttgtgtatatatctctcatcaa

SEQ ID NO: 272175 - DNA, 4507 bp, Artificial Sequence
  derived and/or modified sequence
gagagagagagagagagagagagagagagagagacagtgagaaagaaagaaaaagagagcgcccttgtgcacgcgctaggccaagagcgcgccgctgtgcgcgcgcccgcctagcgaggacagggtctccatgacaaccggcctggccggctagcagtgctctgctcacttggctgcgaggagcgccacgaaaggtcagaggaaggagctgtgggaagctcgcagcaggtatcggagcttaagccagtggatttgggggccctgggctccctagccggctgcggtgtgagaatggagtgggcaggaaagcagcgggactttcagggctctgggtttgcagagagccgaaatgaccatgactgccaacaagaattccagcatcacccacggagctggtggcactaaagcccctcgggggactctgagcaggtctcagtcagtctctccacctccagttctctccccaccaaggagtcccatctacccgctcagtgatagtgaaacctcagcctgcaggtaccccagccactccagctcccgggtgctcctcaaggaccggcaccccccagctccttcaccccagaatcctcaagatccctccccagatacttccccacccacctgtcccttcaagaccgccagcttcggttatttggacagaagcccttcggcgtgcaagagagacgcccaaaaggaaagtgtccaaggcgcagcccaggatgtagcaggggtcgctgcctgcctcccccttgcccagagcacgccattcccggggccagcagctggcccccggggcgtcttgctgacccgtaccggtacccgcgcccacagcctgggcatccgggagaagatatcagcatgggaaggtcgccgagaggcgtcgcccaggatgagcatgtgtggagagaagcgggagggctctgggagcgagtgggcggccagtgagggctgccccagcctgggctgtcccagcgtggtgccgtccccctgcagctctgaaaagacctttgatttcaagggcctccggaggatgagcaggaccttctccgagtgttcctacccagagactgaggaggagggagaggcgctccctgtccgggactctttctaccggctggagaaacggctgggccggagtgagcccagcgccttcctcagggggcatggcagcaggaaggagagctcagcagtgctgagccggatccagaaaattgaacaggtcctgaaggagcagccgggccgggggctcccccagctccccagcagctgctacagcgtggaccgggggaaaaggaagactggaaccttgggctccttggaggagccggcagggggcgcgagtgtgagcgctggcagccgggcagtcggagtggctggtgttgcgggggaggcgggcccacccccagagagggaaggcagtggttccactaagcccgggacccctggaaatagccctagctcccagcggctgccatcgaagagttccctcgatcccgctgtgaaccctgtccccaaacccaagcgcacctttgaatacgaggctgacaagaaccccaagagtaagcccagtaatggtctacctccttcacccacacctgctgctccacctcccttgccctccaccccagccccgccagtcacccggagacccaagaaggacatgcgtggtcaccgcaagtcccagagcagaaaatcctttgagtttgaggatgcatccagtctccagtccctgtacccctcttctcccactgagaatggtactgagaaccaacccaagtttggatccaaaagcactttagaagaaaatgcctatgaagatattgtgggagatctgcccaaggagaatccatatgaggatgtggacttaaagagccgaagagcaggacgaaaatcccagcaactgtctgagaactccttggactctttgcacaggatgtggagtcctcaggacaggaagtacaacagcccgcccacacagctttccctgaaacccaacagccagtccctgcgcagtgggaactggtcagaaaggaagagccaccggctgccacgattacccaagaggcacagccatgacgacatgctgctgctggctcagctgagtctgccgtcctcaccctccagcctcaatgaagacagcctcagcaccaccagcgagctgctgtccagccgccgggcccgccgcattcccaagcttgtccaaagaattaactccatctacaatgccaagagaggaaagaagagattaaaaaagttgtctatgtccagcattgaaacagcatcactgagagatgaaaacagtgagagcgagagcgactctgatgacaggttcaaagcccacacacagcgcctggtccacatccagtcgatgctgaagcgcgcccccagctatcgcacgctggagctggagctgctggagtggcaggagcgggagctttttgagtactttgtggtggtgtccctcaagaagaagccatcgcgaaacacctacctccccgaagtctcctaccagtttcccaagctggaccgacccaccaagcagatgcgagaggcagaggaaaggctcaaagccattccccagttttgcttccctgatgccaaggactggcttcctgtgtcagagtatagcagtgagaccttttctttcatgctgactggggaagatggcagcagacgctttggctactgcaggcgcttactgccaagtgggaaagggccccggttgccagaggtgtactgtgtcatcagccgccttggctgcttcggcttgttttccaaggtcctagatgaggtggagcgccggcgtgggatctccgctgcattggtctatcctttcatgagaagtctcatggagtcgcccttcccagccccagggaagaccatcaaagtgaagacattcctgccaggtgctggcaatgaggtgttagagctgcggcggcccatggactcaaggctggagcacgtggactttgagtgcctttttacctgcctcagtgtgcgccagctcatccgaatctttgcctcactgctgctggagcgccgggtcatttttgtggcagataagctcagtaccctctccagctgctcccacgcggtggtggccttgctctaccccttctcctggcagcacaccttcattcctgtcctcccggcctccatgattgacatcgtctgctgtcccacccccttcctggttggcctgctctccagctccctccccaaactgaaggagctgcctgtggaggaggcgctgatggtgaatctgggatctgaccgattcatccgacagatggacgacgaagacacgttgttacctaggaagttacaggcagctctggagcaggctctggagaggaagaatgagctgatctcccaggactctgacagcgactccgacgatgaatgtaataccctcaatgggctggtgtcggaggtgtttatccggttctttgtggagaccgttgggcactactccctctttctgacacagagtgagaagggagagagggcctttcagcgagaggccttccgcaaatctgtggcctccaaaagcatccgccgctttcttgaggtttttatggagtctcagatgtttgctggcttcatccaagacagggagctaagaaagtgtcgggcaaagggcctttttgagcagcgagtggagcagtacttagaagaactcccagacactgagcagagtggaatgaataagtttctccgaggtttgggcaacaaaatgaagtttctccacaagaagaattaagcctccttctcagtagcagagtccagtgccttgcagagcctgaagcctggggagaaggcccagcctgggaccctctgggctgctgtggctcctctgcccccacagatcctatcctccaagccagcccacctctgccttcatcatatcccaggatactgtttgtaaataatctgctgtaagctttcttaactgttttttgtaacaagcaaagagaatatggcaaatatttgtatattcccaaggggccgggtgctttcctgtcctgccagagcatggatgaagtttcgctgggtgctcgtgactggccagttttgtgcagctgactgtctcagccaaaccactgatcttccctggaggccttcggcctgcctgcctgcctgaggtccccgctgccagtcccgggccctggagagcagatgctgtcttgttatgtacaggaggaccttttaaaaaaatcaagtttctattttttgctggtagtccgcatacccataccctctgtttttgaaaggcaaaggccaatcagtccccatttgtagcatggcaccagggtcttaggcctagtcctctcattcctcccaccctccgagatggtcagtgtgtcatgggaagcccacccccagctctgccagtgctctctgggcctggctcccagtcagtggtggccacgatgcggtacagggcatccctccttcccatctacgggtgttctcaataaacaatgtacagttgtttgggcccaga

SEQ ID NO: 272176 - DNA, 4315 bp, Artificial Sequence
  derived and/or modified sequence
cacagatttcacaccctttggagagtttctttcttggataattcaggaagatgagagactgcttaggcgccaccactagtaccatgagtccctgcactggttaaagccatcgccacaacctggacaggcagcaagggctctgggtttgcagagagccgaaatgaccatgactgccaacaagaattccagcatcacccacggagctggtggcactaaagcccctcgggggactctgagcaggtctcagtcagtctctccacctccagttctctccccaccaaggagtcccatctacccgctcagtgatagtgaaacctcagcctgcaggtaccccagccactccagctcccgggtgctcctcaaggaccggcaccccccagctccttcaccccagaatcctcaagatccctccccagatacttccccacccacctgtcccttcaagaccgccagcttcggttatttggacagaagcccttcggcgtgcaagagagacgcccaaaaggaaagtgtccaaggcgcagcccaggatgtagcaggggtcgctgcctgcctcccccttgcccagagcacgccattcccggggccagcagctggcccccggggcgtcttgctgacccgtaccggtacccgcgcccacagcctgggcatccgggagaagatatcagcatgggaaggtcgccgagaggcgtcgcccaggatgagcatgtgtggagagaagcgggagggctctgggagcgagtgggcggccagtgagggctgccccagcctgggctgtcccagcgtggtgccgtccccctgcagctctgaaaagacctttgatttcaagggcctccggaggatgagcaggaccttctccgagtgttcctacccagagactgaggaggagggagaggcgctccctgtccgggactctttctaccggctggagaaacggctgggccggagtgagcccagcgccttcctcagggggcatggcagcaggaaggagagctcagcagtgctgagccggatccagaaaattgaacaggtcctgaaggagcagccgggccgggggctcccccagctccccagcagctgctacagcgtggaccgggggaaaaggaagactggaaccttgggctccttggaggagccggcagggggcgcgagtgtgagcgctggcagccgggcagtcggagtggctggtgttgcgggggaggcgggcccacccccagagagggaaggcagtggttccactaagcccgggacccctggaaatagccctagctcccagcggctgccatcgaagagttccctcgatcccgctgtgaaccctgtccccaaacccaagcgcacctttgaatacgaggctgacaagaaccccaagagtaagcccagtaatggtctacctccttcacccacacctgctgctccacctcccttgccctccaccccagccccgccagtcacccggagacccaagaaggacatgcgtggtcaccgcaagtcccagagcagaaaatcctttgagtttgaggatgcatccagtctccagtccctgtacccctcttctcccactgagaatggtactgagaaccaacccaagtttggatccaaaagcactttagaagaaaatgcctatgaagatattgtgggagatctgcccaaggagaatccatatgaggatgtggacttaaagagccgaagagcaggacgaaaatcccagcaactgtctgagaactccttggactctttgcacaggatgtggagtcctcaggacaggaagtacaacagcccgcccacacagctttccctgaaacccaacagccagtccctgcgcagtgggaactggtcagaaaggaagagccaccggctgccacgattacccaagaggcacagccatgacgacatgctgctgctggctcagctgagtctgccgtcctcaccctccagcctcaatgaagacagcctcagcaccaccagcgagctgctgtccagccgccgggcccgccgcattcccaagcttgtccaaagaattaactccatctacaatgccaagagaggaaagaagagattaaaaaagttgtctatgtccagcattgaaacagcatcactgagagatgaaaacagtgagagcgagagcgactctgatgacaggttcaaagcccacacacagcgcctggtccacatccagtcgatgctgaagcgcgcccccagctatcgcacgctggagctggagctgctggagtggcaggagcgggagctttttgagtactttgtggtggtgtccctcaagaagaagccatcgcgaaacacctacctccccgaagtctcctaccagtttcccaagctggaccgacccaccaagcagatgcgagaggcagaggaaaggctcaaagccattccccagttttgcttccctgatgccaaggactggcttcctgtgtcagagtatagcagtgagaccttttctttcatgctgactggggaagatggcagcagacgctttggctactgcaggcgcttactgccaagtgggaaagggccccggttgccagaggtgtactgtgtcatcagccgccttggctgcttcggcttgttttccaaggtcctagatgaggtggagcgccggcgtgggatctccgctgcattggtctatcctttcatgagaagtctcatggagtcgcccttcccagccccagggaagaccatcaaagtgaagacattcctgccaggtgctggcaatgaggtgttagagctgcggcggcccatggactcaaggctggagcacgtggactttgagtgcctttttacctgcctcagtgtgcgccagctcatccgaatctttgcctcactgctgctggagcgccgggtcatttttgtggcagataagctcagtaccctctccagctgctcccacgcggtggtggccttgctctaccccttctcctggcagcacaccttcattcctgtcctcccggcctccatgattgacatcgtctgctgtcccacccccttcctggttggcctgctctccagctccctccccaaactgaaggagctgcctgtggaggaggcgctgatggtgaatctgggatctgaccgattcatccgacagatggacgacgaagacacgttgttacctaggaagttacaggcagctctggagcaggctctggagaggaagaatgagctgatctcccaggactctgacagcgactccgacgatgaatgtaataccctcaatgggctggtgtcggaggtgtttatccggttctttgtggagaccgttgggcactactccctctttctgacacagagtgagaagggagagagggcctttcagcgagaggccttccgcaaatctgtggcctccaaaagcatccgccgctttcttgaggtttttatggagtctcagatgtttgctggcttcatccaagacagggagctaagaaagtgtcgggcaaagggcctttttgagcagcgagtggagcagtacttagaagaactcccagacactgagcagagtggaatgaataagtttctccgaggtttgggcaacaaaatgaagtttctccacaagaagaattaagcctccttctcagtagcagagtccagtgccttgcagagcctgaagcctggggagaaggcccagcctgggaccctctgggctgctgtggctcctctgcccccacagatcctatcctccaagccagcccacctctgccttcatcatatcccaggatactgtttgtaaataatctgctgtaagctttcttaactgttttttgtaacaagcaaagagaatatggcaaatatttgtatattcccaaggggccgggtgctttcctgtcctgccagagcatggatgaagtttcgctgggtgctcgtgactggccagttttgtgcagctgactgtctcagccaaaccactgatcttccctggaggccttcggcctgcctgcctgcctgaggtccccgctgccagtcccgggccctggagagcagatgctgtcttgttatgtacaggaggaccttttaaaaaaatcaagtttctattttttgctggtagtccgcatacccataccctctgtttttgaaaggcaaaggccaatcagtccccatttgtagcatggcaccagggtcttaggcctagtcctctcattcctcccaccctccgagatggtcagtgtgtcatgggaagcccacccccagctctgccagtgctctctgggcctggctcccagtcagtggtggccacgatgcggtacagggcatccctccttcccatctacgggtgttctcaataaacaatgtacagttgtttgggccc

SEQ ID NO: 272177 - DNA, 4545 bp, Artificial Sequence
  derived and/or modified sequence
gggggtcgggggtcgggggctgggggctgaggactgagtcgagccagcagcccagggcatctgtccacgctgtcagaggagcctctgggcgtggggctggcccttagagggctactgcgctgcttaacttgcctttcacagaaaaccactggaggagatactcacaaaaatgaaggggaagaacaggaaacaggaagacatgagatgaaggaaacaggagattcaacatggatttcacaccctttggagagtttctttcttggataattcaggaagatgagagactgcttaggcgccaccactagtaccatgagtccctgcactggttaaagccatcgccacaacctggacaggcagcaagggctctgggtttgcagagagccgaaatgaccatgactgccaacaagaattccagcatcacccacggagctggtggcactaaagcccctcgggggactctgagcaggtctcagtcagtctctccacctccagttctctccccaccaaggagtcccatctacccgctcagtgatagtgaaacctcagcctgcaggtaccccagccactccagctcccgggtgctcctcaaggaccggcaccccccagctccttcaccccagaatcctcaagatccctccccagatacttccccacccacctgtcccttcaagaccgccagcttcggttatttggacagaagcccttcggcgtgcaagagagacgcccaaaaggaaagtgtccaaggcgcagcccaggatgtagcaggggtcgctgcctgcctcccccttgcccagagcacgccattcccggggccagcagctggcccccggggcgtcttgctgacccgtaccggtacccgcgcccacagcctgggcatccgggagaagatatcagcatgggaaggtcgccgagaggcgtcgcccaggatgagcatgtgtggagagaagcgggagggctctgggagcgagtgggcggccagtgagggctgccccagcctgggctgtcccagcgtggtgccgtccccctgcagctctgaaaagacctttgatttcaagggcctccggaggatgagcaggaccttctccgagtgttcctacccagagactgaggaggagggagaggcgctccctgtccgggactctttctaccggctggagaaacggctgggccggagtgagcccagcgccttcctcagggggcatggcagcaggaaggagagctcagcagtgctgagccggatccagaaaattgaacaggtcctgaaggagcagccgggccgggggctcccccagctccccagcagctgctacagcgtggaccgggggaaaaggaagactggaaccttgggctccttggaggagccggcagggggcgcgagtgtgagcgctggcagccgggcagtcggagtggctggtgttgcgggggaggcgggcccacccccagagagggaaggcagtggttccactaagcccgggacccctggaaatagccctagctcccagcggctgccatcgaagagttccctcgatcccgctgtgaaccctgtccccaaacccaagcgcacctttgaatacgaggctgacaagaaccccaagagtaagcccagtaatggtctacctccttcacccacacctgctgctccacctcccttgccctccaccccagccccgccagtcacccggagacccaagaaggacatgcgtggtcaccgcaagtcccagagcagaaaatcctttgagtttgaggatgcatccagtctccagtccctgtacccctcttctcccactgagaatggtactgagaaccaacccaagtttggatccaaaagcactttagaagaaaatgcctatgaagatattgtgggagatctgcccaaggagaatccatatgaggatgtggacttaaagagccgaagagcaggacgaaaatcccagcaactgtctgagaactccttggactctttgcacaggatgtggagtcctcaggacaggaagtacaacagcccgcccacacagctttccctgaaacccaacagccagtccctgcgcagtgggaactggtcagaaaggaagagccaccggctgccacgattacccaagaggcacagccatgacgacatgctgctgctggctcagctgagtctgccgtcctcaccctccagcctcaatgaagacagcctcagcaccaccagcgagctgctgtccagccgccgggcccgccgcattcccaagcttgtccaaagaattaactccatctacaatgccaagagaggaaagaagagattaaaaaagttgtctatgtccagcattgaaacagcatcactgagagatgaaaacagtgagagcgagagcgactctgatgacaggttcaaagcccacacacagcgcctggtccacatccagtcgatgctgaagcgcgcccccagctatcgcacgctggagctggagctgctggagtggcaggagcgggagctttttgagtactttgtggtggtgtccctcaagaagaagccatcgcgaaacacctacctccccgaagtctcctaccagtttcccaagctggaccgacccaccaagcagatgcgagaggcagaggaaaggctcaaagccattccccagttttgcttccctgatgccaaggactggcttcctgtgtcagagtatagcagtgagaccttttctttcatgctgactggggaagatggcagcagacgctttggctactgcaggcgcttactgccaagtgggaaagggccccggttgccagaggtgtactgtgtcatcagccgccttggctgcttcggcttgttttccaaggtcctagatgaggtggagcgccggcgtgggatctccgctgcattggtctatcctttcatgagaagtctcatggagtcgcccttcccagccccagggaagaccatcaaagtgaagacattcctgccaggtgctggcaatgaggtgttagagctgcggcggcccatggactcaaggctggagcacgtggactttgagtgcctttttacctgcctcagtgtgcgccagctcatccgaatctttgcctcactgctgctggagcgccgggtcatttttgtggcagataagctcagtaccctctccagctgctcccacgcggtggtggccttgctctaccccttctcctggcagcacaccttcattcctgtcctcccggcctccatgattgacatcgtctgctgtcccacccccttcctggttggcctgctctccagctccctccccaaactgaaggagctgcctgtggaggaggcgctgatggtgaatctgggatctgaccgattcatccgacagatggacgacgaagacacgttgttacctaggaagttacaggcagctctggagcaggctctggagaggaagaatgagctgatctcccaggactctgacagcgactccgacgatgaatgtaataccctcaatgggctggtgtcggaggtgtttatccggttctttgtggagaccgttgggcactactccctctttctgacacagagtgagaagggagagagggcctttcagcgagaggccttccgcaaatctgtggcctccaaaagcatccgccgctttcttgaggtttttatggagtctcagatgtttgctggcttcatccaagacagggagctaagaaagtgtcgggcaaagggcctttttgagcagcgagtggagcagtacttagaagaactcccagacactgagcagagtggaatgaataagtttctccgaggtttgggcaacaaaatgaagtttctccacaagaagaattaagcctccttctcagtagcagagtccagtgccttgcagagcctgaagcctggggagaaggcccagcctgggaccctctgggctgctgtggctcctctgcccccacagatcctatcctccaagccagcccacctctgccttcatcatatcccaggatactgtttgtaaataatctgctgtaagctttcttaactgttttttgtaacaagcaaagagaatatggcaaatatttgtatattcccaaggggccgggtgctttcctgtcctgccagagcatggatgaagtttcgctgggtgctcgtgactggccagttttgtgcagctgactgtctcagccaaaccactgatcttccctggaggccttcggcctgcctgcctgcctgaggtccccgctgccagtcccgggccctggagagcagatgctgtcttgttatgtacaggaggaccttttaaaaaaatcaagtttctattttttgctggtagtccgcatacccataccctctgtttttgaaaggcaaaggccaatcagtccccatttgtagcatggcaccagggtcttaggcctagtcctctcattcctcccaccctccgagatggtcagtgtgtcatgggaagcccacccccagctctgccagtgctctctgggcctggctcccagtcagtggtggccacgatgcggtacagggcatccctccttcccatctacgggtgttctcaataaacaatgtacagttgtttgggcccagag

SEQ ID NO: 272178 - protein, 174 aa, Artificial Sequence
  derived and/or modified sequence
MAIGFVGCLGAIKENKCLLLTFFLLLLLVFLLEATIAILFFAYTDKIDRYAQQDLKKGLHLYGTQGNVGLTNAWSIIQTDFRCCGVSNYTDWFEVYNATRVPDSCCLEFSESCGLHAPGTWWKAPCYETVKVWLQENLLAVGIFGLCTALVQILGLTFAMTMYCQVVKADTYCA

SEQ ID NO: 272179 - protein, 238 aa, Artificial Sequence
  derived and/or modified sequence
MARACLQAVKYLMFAFNLLFWLGGCGVLGVGIWLAATQGSFATLSSSFPSLSAANLLIITGAFVMAIGFVGCLGAIKENKCLLLTFFLLLLLVFLLEATIAILFFAYTDKIDRYAQQDLKKGLHLYGTQGNVGLTNAWSIIQTDFRCCGVSNYTDWFEVYNATRVPDSCCLEFSESCGLHAPGTWWKAPCYETVKVWLQENLLAVGIFGLCTALVQILGLTFAMTMYCQVVKADTYCA

SEQ ID NO: 272180 - protein, 257 aa, Artificial Sequence
  derived and/or modified sequence
MTPRSAGTSAHGAELKRCGMARACLQAVKYLMFAFNLLFWLGGCGVLGVGIWLAATQGSFATLSSSFPSLSAANLLIITGAFVMAIGFVGCLGAIKENKCLLLTFFLLLLLVFLLEATIAILFFAYTDKIDRYAQQDLKKGLHLYGTQGNVGLTNAWSIIQTDFRCCGVSNYTDWFEVYNATRVPDSCCLEFSESCGLHAPGTWWKAPCYETVKVWLQENLLAVGIFGLCTALVQILGLTFAMTMYCQVVKADTYCA

SEQ ID NO: 272181 - protein, 159 aa, Artificial Sequence
  derived and/or modified sequence
MARACLQAVKYLMFAFNLLFWLGGCGVLGVGIWLAATQGSFATLSSSFPSLSAANLLIITGAFVMAIGFVGCLGAIKENKCLLLTFFLLLLLVFLLEATIAILFFAYTDKIDRYAQQDLKKGLHLYGTQGNVGLTNAWSIIQTDFRCCGVSNYTDWFEV

SEQ ID NO: 272182 - protein, 85 aa, Artificial Sequence
  derived and/or modified sequence
MARACLQAVKYLMFAFNLLFWLGGCGVLGVGIWLAATQGSFATLSSSFPSLSAANLLIITGAFVMAIGFVGCLGAIKENKCLLLT

SEQ ID NO: 272183 - DNA, 717 bp, Artificial Sequence
  derived and/or modified sequence
atggccagagcctgcctgcaggccgtgaagtacctgatgttcgccttcaacctgctgttctggctgggcggctgcggcgtgctgggcgtgggcatctggctggccgccacccagggcagcttcgccaccctgagcagcagcttccccagcctgagcgccgccaacctgctgatcatcaccggcgccttcgtgatggccatcggcttcgtgggctgcctgggcgccatcaaggagaacaagtgcctgctgctgaccttcttcctgctgctgctgctggtgttcctgctggaggccaccatcgccatcctgttcttcgcctacaccgacaagatcgacagatacgcccagcaggacctgaagaagggcctgcacctgtacggcacccagggcaacgtgggcctgaccaacgcctggagcatcatccagaccgacttcagatgctgcggcgtgagcaactacaccgactggttcgaggtgtacaacgccaccagagtgcccgacagctgctgcctggagttcagcgagagctgcggcctgcacgcccccggcacctggtggaaggccccctgctacgagaccgtgaaggtgtggctgcaggagaacctgctggccgtgggcatcttcggcctgtgcaccgccctggtgcagatcctgggcctgaccttcgccatgaccatgtactgccaggtggtgaaggccgacacctactgcgcctag

SEQ ID NO: 272184 - DNA, 774 bp, Artificial Sequence
  derived and/or modified sequence
atgacccccagaagcgccggcaccagcgcccacggcgccgagctgaagagatgcggcatggccagagcctgcctgcaggccgtgaagtacctgatgttcgccttcaacctgctgttctggctgggcggctgcggcgtgctgggcgtgggcatctggctggccgccacccagggcagcttcgccaccctgagcagcagcttccccagcctgagcgccgccaacctgctgatcatcaccggcgccttcgtgatggccatcggcttcgtgggctgcctgggcgccatcaaggagaacaagtgcctgctgctgaccttcttcctgctgctgctgctggtgttcctgctggaggccaccatcgccatcctgttcttcgcctacaccgacaagatcgacagatacgcccagcaggacctgaagaagggcctgcacctgtacggcacccagggcaacgtgggcctgaccaacgcctggagcatcatccagaccgacttcagatgctgcggcgtgagcaactacaccgactggttcgaggtgtacaacgccaccagagtgcccgacagctgctgcctggagttcagcgagagctgcggcctgcacgcccccggcacctggtggaaggccccctgctacgagaccgtgaaggtgtggctgcaggagaacctgctggccgtgggcatcttcggcctgtgcaccgccctggtgcagatcctgggcctgaccttcgccatgaccatgtactgccaggtggtgaaggccgacacctactgcgcctag

SEQ ID NO: 272185 - DNA, 480 bp, Artificial Sequence
  derived and/or modified sequence
atggccagagcctgcctgcaggccgtgaagtacctgatgttcgccttcaacctgctgttctggctgggcggctgcggcgtgctgggcgtgggcatctggctggccgccacccagggcagcttcgccaccctgagcagcagcttccccagcctgagcgccgccaacctgctgatcatcaccggcgccttcgtgatggccatcggcttcgtgggctgcctgggcgccatcaaggagaacaagtgcctgctgctgaccttcttcctgctgctgctgctggtgttcctgctggaggccaccatcgccatcctgttcttcgcctacaccgacaagatcgacagatacgcccagcaggacctgaagaagggcctgcacctgtacggcacccagggcaacgtgggcctgaccaacgcctggagcatcatccagaccgacttcagatgctgcggcgtgagcaactacaccgactggttcgaggtgtag

SEQ ID NO: 272186 - DNA, 258 bp, Artificial Sequence
  derived and/or modified sequence
atggccagagcctgcctgcaggccgtgaagtacctgatgttcgccttcaacctgctgttctggctgggcggctgcggcgtgctgggcgtgggcatctggctggccgccacccagggcagcttcgccaccctgagcagcagcttccccagcctgagcgccgccaacctgctgatcatcaccggcgccttcgtgatggccatcggcttcgtgggctgcctgggcgccatcaaggagaacaagtgcctgctgctgacctag

SEQ ID NO: 272187 - DNA, 717 bp, Artificial Sequence
  derived and/or modified sequence
atggcaagggcctgcctgcaggcggtcaaatacctgatgtttgcttttaatctgctgttctggctgggtggctgcggcgttcttggcgtgggtatctggctggcagccacacagggctcttttgcgacactgtcatcctctttcccgtccctctccgccgccaatctgttgataattaccggcgctttcgttatggcaatcggcttcgtcggctgcctgggagctattaaggaaaacaagtgtctcctgctgaccttcttcctgctcctgctgttagtctttctcctcgaggccacaatcgccattctcttctttgcttacactgacaagattgacaggtacgcacaacaggacctcaagaagggccttcacctgtacgggacccagggaaacgttggactgactaacgcgtggtcgataatccagaccgattttaggtgctgcggagtatcgaattataccgattggtttgaggtgtacaacgctacaagagttcccgacagctgttgcctggaatttagtgaatcctgcggattgcatgctccaggcacttggtggaaagctccatgttatgagactgtaaaagtctggctccaggaaaatctgctggctgtgggcatctttggtctatgcacagccctcgtacagattttggggctcacatttgccatgactatgtattgtcaggttgtgaaggcagatacatattgtgcttag

SEQ ID NO: 272188 - DNA, 717 bp, Artificial Sequence
  derived and/or modified sequence
atggctagggcatgcctccaggccgtcaagtaccttatgtttgcttttaatctgctcttctggttagggggctgcggcgtgcttggagtcggcatctggctcgctgccacacaaggaagcttcgcaaccctctcctcatctttccctagcctctcagctgctaatttgcttattattaccggtgcctttgtgatggccattggatttgtgggctgtctgggggccatcaaggaaaacaaatgtctcctgctcactttcttcctattattgctgctcgtatttcttcttgaggccactatcgctatcctgtttttcgcatataccgataagatcgacaggtacgcgcagcaagatctgaagaaaggcctgcatctgtacgggacacaaggcaacgtgggcctgaccaacgcctggagcattattcagacagactttaggtgctgtggggtgtctaattatactgattggttcgaggtctacaatgccaccagagtgcccgacagctgctgccttgaatttagtgaaagctgcggcctgcacgcccctgggacttggtggaaggccccctgttatgaaaccgtgaaagtatggctacaggaaaaccttctcgccgtcgggatttttggtctgtgcaccgccctggttcagatcctgggccttactttcgcgatgacgatgtactgccaagtagtgaaagccgatacctattgcgcgtag

SEQ ID NO: 272189 - DNA, 717 bp, Artificial Sequence
  derived and/or modified sequence
atggcccgcgcctgcttacaggctgtcaagtacctgatgttcgcgtttaacctcctcttttggttggggggctgcggagtcctcggcgtggggatttggctcgcagccacccagggaagctttgccactcttagctcctctttcccctccctttccgcggcaaacttactcatcatcaccggagcatttgtgatggctattgggtttgtgggttgtttgggagcgattaaggaaaataaatgccttttgcttactttctttctcttactactactggtgttccttcttgaggctacgatagcaatcttgtttttcgcttacacagacaagatagatagatatgcacagcaggacctgaagaagggcctgcatttgtacggcactcagggcaatgtcggcttgacgaacgcctggagtattattcaaaccgattttcgctgctgtggggtttcaaactacactgattggttcgaggtgtacaatgccactagggtcccggacagctgctgcctcgagttttcggaaagctgcggcctccacgctcccggtacgtggtggaaggcaccatgttatgaaacggttaaggtgtggctgcaggagaacttgcttgctgtcgggattttcggactatgtactgcactggtacagattttgggcttaaccttcgccatgacaatgtactgccaagtcgtgaaggcagatacttattgtgcatag

SEQ ID NO: 272190 - DNA, 717 bp, Artificial Sequence
  derived and/or modified sequence
atggcaagagcgtgcctccaagctgtcaaatacttgatgtttgcctttaacctcctgttctggttgggaggctgcggggtgctgggggtgggcatctggcttgccgccacccagggaagttttgcaactctgagcagctcatttccctccctctcagccgccaatttacttattataacaggcgcctttgtaatggcaatcggcttcgtcggatgcttaggggctataaaggaaaacaaatgcctcttgctaacctttttcttactgctgctgctggtattcctcctcgaagcaacaattgccatcctattcttcgcttatacagataagatcgacagatacgctcagcaggatctgaaaaaaggacttcacctgtatggcacacaaggtaacgtcgggttgacaaatgcctggtcaataattcagaccgatttccggtgctgtggcgtgtctaattataccgactggttcgaagtgtacaatgcgacaagagtaccggactcctgttgtctggaattctcagagtcctgtggacttcacgcaccaggaacctggtggaaagcaccctgttatgagaccgtcaaggtgtggttgcaggaaaatttgctggctgtcggaatcttcggcctgtgtacagcactggtgcagattcttggcctgacctttgccatgaccatgtactgccaagtggtaaaagccgacacttattgcgcctag

SEQ ID NO: 272191 - DNA, 717 bp, Artificial Sequence
  derived and/or modified sequence
atggccagagcttgtctccaggctgtcaagtatctgatgtttgcttttaaccttctcttctggttgggagggtgcggcgtgttgggagtcggtatttggcttgcagccacacaggggtcatttgctacactgtcgagcagtttcccctcgctctcagccgcaaacctactcatcattaccggcgcgtttgtcatggccatcggattcgtcggctgcctcggggccatcaaggagaacaagtgtttgctgctgacattttttctgctccttttgcttgtattcctgctcgaagcaacaattgctattcttttttttgcctatacagataagattgaccggtacgcccagcaggaccttaaaaaaggacttcacctctatggcacacaggggaacgtcggactcactaacgcatggagcatcattcaaacagatttccgatgctgcggggttagcaattacacagactggtttgaagtttataacgctactcgcgtgcccgattcttgttgcttagaattctcagagtcctgcgggttgcacgcgccaggtacatggtggaaagccccctgctacgaaacggtaaaagtgtggctgcaggaaaatctgttggctgtgggaatctttgggctatgtacagcactagtccagatcctaggactcaccttcgcaatgaccatgtactgccaggtcgtcaaagcggatacgtattgtgcttag

SEQ ID NO: 272192 - DNA, 774 bp, Artificial Sequence
  derived and/or modified sequence
atgacaccaagatccgccgggaccagtgcacacggagctgagctgaagcgctgtgggatggcccgcgcatgcttgcaggccgtcaagtatctcatgttcgctttcaacctacttttttggctgggggggtgcggggtcttgggcgttggtatttggttagcagcgactcagggatcattcgcaaccctatcttcatcttttccttccctgtcagcagccaacctcttgatcattacgggcgcttttgttatggctatcgggttcgtgggatgcctgggcgccatcaaggagaataaatgcctattgctcactttcttcctgctgttgctcctcgttttcctgttggaagccacaattgccatcctgtttttcgcatatactgacaagatcgacagatacgcccagcaggatctgaaaaagggcctgcacctgtacggtacacagggaaatgtagggctcactaatgcttggagtataatacagaccgatttcaggtgctgcggggtatccaattacaccgactggttcgaggtctacaatgccacacgcgttcctgatagctgttgtctggaatttagcgagtcctgcgggctgcacgctcccggaacgtggtggaaagctccctgctatgagacagtcaaggtatggctacaggaaaatctgttggccgtggggatttttgggctgtgcacagctttggtgcagatcctgggactaaccttcgccatgactatgtattgccaggtagttaaagctgacacatactgcgcttag

SEQ ID NO: 272193 - DNA, 717 bp, Artificial Sequence
  derived and/or modified sequence
atggcacgggcgtgcctccaagccgtcaaatatctaatgttcgcctttaacttgctgttctggctgggtggctgcggggtgcttggcgtggggatttggctggcagccactcagggcagctttgcgacgctttcttctagcttcccctccctgagcgcggccaatctccttataattaccggtgccttcgtgatggctattggcttcgtggggtgtctcggtgctataaaagagaataagtgtttgctcctgaccttttttctgctgctgttgctggtgtttcttctcgaagccaccatcgctattctgtttttcgcttatactgataagatcgaccgctatgcgcagcaggacctgaagaaagggttgcacctgtacggtacccagggcaatgtcggcctcactaatgcatggtcaatcatccagacggacttcaggtgctgcggcgtttctaactataccgactggttcgaagtctataacgccactagggtacctgacagttgctgtctcgagtttagtgagagctgcggactccatgctccagggacatggtggaaggccccctgttacgaaactgtcaaggtctggctccaggagaacctactggctgtcggcatcttcggtctgtgcacagctctggtgcagatcctaggactgacttttgctatgactatgtattgtcaagtggtaaaagccgatacatattgtgcttag

SEQ ID NO: 272194 - DNA, 480 bp, Artificial Sequence
  derived and/or modified sequence
atggctcgggcgtgtttacaagcggtcaagtacctgatgtttgcctttaatcttctattttggctcggtgggtgtggtgtcttgggggtgggcatctggcttgctgcaacgcagggaagtttcgctactttgagcagctcttttccatcactcagcgctgctaacctgttgattatcaccggcgcgttcgttatggcgatcggcttcgtgggttgtttgggggcgatcaaggaaaacaagtgtctcctactaacgttctttctgctgctcctattagtgttccttctggaagctaccattgctatcttgttcttcgcctacactgacaaaattgaccgttacgctcagcaagaccttaaaaagggacttcacctgtacgggacgcagggcaatgtcggactgaccaacgcttggtcaattatacagacggatttcaggtgctgcggcgtctcaaattatactgattggtttgaggtatag

SEQ ID NO: 272195 - DNA, 258 bp, Artificial Sequence
  derived and/or modified sequence
atggctcgggcttgcttacaagctgtgaaatatctcatgttcgcttttaacctcttgttttggcttggggggtgtggtgtgttgggtgtaggtatctggttggccgcaacccaaggcagtttcgctacactgtcttctagcttccctagtctgagcgcggctaaccttctgatcatcaccggagcctttgtcatggccatcgggtttgtaggctgcctgggcgcaataaaggagaacaagtgtctcttacttacctag

SEQ ID NO: 272196 - DNA, 717 bp, Artificial Sequence
  derived and/or modified sequence
atggcccgggcctgcctgcaggccgtgaagtacctgatgtttgccttcaacctgctcttctggctgggcggctgcggcgtgctgggcgtgggcatctggctggccgccacccagggcagctttgccaccctgagcagcagcttccccagcctgtctgctgccaacctgctgatcatcaccggggcctttgtgatggccatcggctttgtgggctgcctgggcgccatcaaggagaacaagtgcctgctgctgaccttcttcctgctgctgctgctggtgttcctgctggaggccaccatcgccatcctcttctttgcctacacagacaagattgacagatatgcccagcaggacctgaagaagggcctgcacctgtatggcacccagggcaatgtgggcctgaccaatgcctggagcatcatccagacagacttccgctgctgcggcgtgagcaactacacagactggtttgaggtgtacaatgccaccagggtgcctgacagctgctgcctggagttcagcgagagctgtggcctgcacgcccctggcacctggtggaaggccccctgctatgaaacagtgaaggtgtggctgcaggagaacctgctggccgtgggcatcttcggcctgtgcacagccctggtgcagatcctgggcctgacctttgccatgaccatgtactgccaggtggtgaaggctgacacctactgtgcctag

SEQ ID NO: 272197 - DNA, 774 bp, Artificial Sequence
  derived and/or modified sequence
atgacccccaggtctgctggcaccagcgcccatggagctgagctgaagagatgtggcatggcccgggcctgcctgcaggccgtgaagtacctgatgtttgccttcaacctgctcttctggctgggcggctgcggcgtgctgggcgtgggcatctggctggccgccacccagggcagctttgccaccctgagcagcagcttccccagcctgtctgctgccaacctgctgatcatcactggagcctttgtgatggccatcggctttgtgggctgcctgggcgccatcaaggagaacaagtgcctgctgctgaccttcttcctgctgctgctgctggtgttcctgctggaggccaccatcgccatcctcttctttgcctacacagacaagattgacagatatgcccagcaggacctgaagaagggcctgcacctgtatggcacccagggcaatgtgggcctgaccaatgcctggagcatcatccagacagacttccgctgctgcggcgtgagcaactacacagactggtttgaggtgtacaatgccaccagggtgcctgacagctgctgcctggagttcagcgagagctgtggcctgcacgcccctggcacctggtggaaggccccctgctatgagaccgtgaaggtgtggctgcaggagaacctgctggccgtgggcatcttcggcctgtgcacagccctggtgcagatcctgggcctgacctttgccatgaccatgtactgccaggtggtgaaggctgacacctactgtgcctag

SEQ ID NO: 272198 - DNA, 480 bp, Artificial Sequence
  derived and/or modified sequence
atggcccgggcctgcctgcaggccgtgaagtacctgatgtttgccttcaacctgctcttctggctgggcggctgcggcgtgctgggcgtgggcatctggctggccgccacccagggcagctttgccaccctgagcagcagcttccccagcctgtctgctgccaacctgctgatcatcaccggggcctttgtgatggccatcggctttgtgggctgcctgggcgccatcaaggagaacaagtgcctgctgctgaccttcttcctgctgctgctgctggtgttcctgctggaggccaccatcgccatcctcttctttgcctacacagacaagattgacagatatgcccagcaggacctgaagaagggcctgcacctgtatggcacccagggcaatgtgggcctgaccaatgcctggagcatcatccagacagacttccgctgctgcggcgtgagcaactacacagactggtttgaggtgtag

SEQ ID NO: 272199 - DNA, 258 bp, Artificial Sequence
  derived and/or modified sequence
atggcccgggcctgcctgcaggccgtgaagtacctgatgtttgccttcaacctgctcttctggctgggcggctgcggcgtgctgggcgtgggcatctggctggccgccacccagggcagctttgccaccctgagcagcagcttccccagcctgtctgctgccaacctgctgatcatcaccggggcctttgtgatggccatcggctttgtgggctgcctgggcgccatcaaggagaacaagtgcctgctgctgacctag

SEQ ID NO: 272200 - DNA, 717 bp, Artificial Sequence
  derived and/or modified sequence
atggcccgggcctgcctgcaggccgtgaagtacctgatgttcgccttcaatctgctgttttggctcggcggatgcggagttctcggggtgggcatatggctagccgccacccagggaagctttgctacattatcatcaagcttcccctcactctccgcagccaatctgctgatcattaccggagcctttgttatggccatcggtttcgtgggttgcctcggagcaatcaaggagaacaaatgtttgctgctcaccttcttcctcctgcttctcttggtcttcctgctcgaagcaaccatcgctatccttttcttcgcttacaccgataaaatagacaggtacgcacagcaggacttgaagaagggcctccatctttatgggacccagggaaatgtcggcctgaccaacgcatggtccatcatccagacagactttcgctgctgcggagtttcaaactacactgactggtttgaggtctataacgcaacaagggtgcctgacagctgctgcctggagttctcagagtcatgtggcttacatgcacccggcacctggtggaaagctccctgctacgaaactgtgaaagtgtggctccaggagaacctgttggcagtcggaatctttggcttgtgtactgctctagtccagatcctgggtctcactttcgccatgaccatgtactgccaggtcgtgaaggccgacacctactgtgcctag

SEQ ID NO: 272201 - DNA, 717 bp, Artificial Sequence
  derived and/or modified sequence
atggcccgggcctgcctgcaggccgtgaagtacctgatgttcgccttcaacttgttattttggctaggcggctgcggggttctgggagtgggaatatggctggcggctacccagggttctttcgctacactgagttcttctttcccaagcctcagcgctgcaaacctgctcattataactggggcattcgttatggccataggatttgtgggatgcctgggggcgatcaaagagaacaaatgcctgctgctcactttctttcttttgctactgttggtttttctcctggaggccaccatcgctatcttgttttttgcctacacagacaaaatcgatcgctacgcccaacaggacctgaaaaaaggcctacatctctatgggacacaggggaacgtgggactgactaacgcgtggagtatcatccagaccgatttccgatgctgcggggttagcaattacaccgattggtttgaggtgtataacgcaactagagtgcccgatagctgttgcctggagttctccgagtcttgtggcctacatgcccccggcacatggtggaaggcaccttgttatgagaccgttaaagtctggcttcaggagaatctgctggcagtgggaatctttggactctgtaccgccctggtacagattctcgggctgactttcgctatgaccatgtactgtcaggtagtaaaagccgatacatactgcgcctag

SEQ ID NO: 272202 - DNA, 717 bp, Artificial Sequence
  derived and/or modified sequence
atggcccgggcctgcctgcaggccgtgaagtacctgatgttcgcctttaatcttctgttttggttgggtggttgcggcgtgctgggtgtcggaatttggctcgcagcaacccagggaagcttcgcgacgctttccagctctttcccatcgttgagtgctgcgaacctcctgatcataactggagccttcgtgatggccattggtttcgtggggtgtctgggagccattaaagagaacaaatgtctgctcctgacattcttcctgcttctcctgctggtctttctgctggaggccactatcgcgattctctttttcgcatacacagataagatcgatcggtatgcccagcaggacctcaaaaagggactccatttgtacggtactcaggggaatgttggtcttaccaatgcatggagcattatccagactgatttccgatgttgcggcgtgtccaactatacagactggtttgaggtgtacaatgcgacccgagtgcctgatagttgctgccttgagttctccgagagttgtggactgcatgcgccaggaacgtggtggaaggccccctgttacgagacagtgaaggtgtggcttcaggagaacctcctggcggttggcatctttggcctgtgtaccgccttggtacaaatcttaggattgacttttgccatgacaatgtactgtcaggtggtgaaggctgacacctactgcgcctag

SEQ ID NO: 272203 - DNA, 717 bp, Artificial Sequence
  derived and/or modified sequence
atggcccgggcctgcctgcaggccgtgaagtacctgatgttcgcctttaacctcctgttctggctcggggggtgtggggtgttgggagtgggtatttggttggccgctacccagggaagtttcgctactctgtcatcaagttttccttccctctccgccgctaacctgctgatcattactggagcattcgtaatggccattggtttcgtggggtgccttggcgcaataaaggagaataagtgcttgctgcttacatttttccttctgcttctgttagtattcctgctggaagccaccatcgccattctgttctttgcttataccgacaagatcgatagatatgcgcagcaggacttaaagaagggccttcacctgtacggcacccagggtaacgtgggtctgacgaacgcctggtccattatccagacagactttcgatgttgtggagtgtctaattatacagactggtttgaggtttacaatgcgactagagtgcctgactcctgttgtttagagttttctgaatcttgtgggttacacgcccctggcacttggtggaaggctccgtgctatgaaacggttaaggtgtggttgcaggaaaacttgctggccgtaggcatctttgggttgtgtactgccctcgttcagatactggggctgacatttgccatgacgatgtactgtcaggtggtgaaagccgacacctattgcgcctag

SEQ ID NO: 272204 - DNA, 717 bp, Artificial Sequence
  derived and/or modified sequence
atggcccgggcctgcctgcaggccgtgaagtacctgatgttcgcctttaatctgctattttggcttggcggctgtggggtcctcggggtggggatctggctcgccgcaacacaaggttctttcgcaaccctgtctagtagtttccctagtctgagcgcggctaacctgctcataattaccggggcatttgtgatggccattggattcgtcggctgcctgggggcaatcaaggaaaacaaatgcctgttactcacatttttcttgctgctgctgctcgtatttttgctggaggccaccatcgcaatcttgttcttcgcctacactgacaaaatcgatcgatacgcacagcaggacctgaaaaaggggctgcacctgtacggaactcaaggaaatgtcggactgactaacgcctggagcatcatccagacagatttccgctgttgtggggtgtcaaactacacggactggtttgaagtgtacaatgctacacgcgtgccagattcctgctgcctggaattcagtgaaagctgcggtcttcacgcccctggcacctggtggaaagcaccctgctatgaaacggttaaagtgtggttgcaggaaaacctgctggccgtaggcattttcgggctgtgcacggccctggtgcagattctcggccttacctttgcgatgaccatgtactgtcaggttgtcaaggcagatacctactgtgcgtag

SEQ ID NO: 272205 - DNA, 774 bp, Artificial Sequence
  derived and/or modified sequence
atgaccccccggagcgccggcaccagcgcccacggcgccgagctgaaaagatgcgggatggctagagcatgcttgcaggctgtcaagtatctgatgtttgcctttaatctgctattttggctcggcggatgcggagtcctgggggtcggcatctggctggccgctactcagggttcttttgccactttatcctcctccttcccttccctcagcgcggccaacctgctaataatcactggggcattcgttatggcaatcggatttgtcggctgtctaggggccataaaggagaataagtgcctactgttgacttttttcttgctcctcctcctggtgtttctgctggaagctactatcgctattctctttttcgcctacacagacaagatcgatcgttatgcacagcaggatcttaagaagggtctgcacctgtacggcactcagggtaacgtgggcctgactaatgcatggtctattattcaaacagacttccgttgctgcggggtttctaattacaccgattggtttgaggtttacaatgctacacgagtacccgactcctgttgtttggagtttagcgaatcctgtggtctccacgcacccggcacctggtggaaggcgccttgttacgagactgtcaaggtgtggctccaggagaatctcctcgcagtcggaatctttggcttgtgtaccgccctggtgcagattcttggactcacttttgcaatgactatgtactgtcaggtggtgaaggcggacacctactgtgcctag

SEQ ID NO: 272206 - DNA, 717 bp, Artificial Sequence
  derived and/or modified sequence
atggcccgggcctgcctgcaggccgtgaagtacctgatgttcgcctttaacctgctgttttggttgggcgggtgcggtgttttgggagtgggcatttggctggctgccacccagggttccttcgctacactctcaagcagctttccctctctctcggctgccaatctgctaattatcactggcgctttcgtaatggccattggtttcgtgggatgcctgggagctataaaagagaacaaatgtctgctgttgaccttctttctgctgctgctgctggtgttccttctagaggctacaatcgccattctgttttttgcctataccgataaaatcgaccgctacgcgcagcaggacctgaagaagggactgcacctgtacgggacccagggtaacgtggggcttaccaatgcatggtctataatccagacggatttccgatgctgtggcgtgagtaattataccgattggtttgaggtctataatgctacacgggtgccggactcgtgttgcctggaattctcggaatcatgtgggctgcatgcccctggtacctggtggaaggccccttgctacgaaactgtcaaggtttggctccaggaaaatctgctggctgtgggcattttcggcctgtgcacagcactggtgcaaattctggggcttacgtttgccatgacgatgtattgtcaggtcgttaaagcggacacctactgtgcttag

SEQ ID NO: 272207 - DNA, 480 bp, Artificial Sequence
  derived and/or modified sequence
atggcccgggcctgcctgcaggccgtgaagtacctgatgttcgcctttaacctgctcttttggctgggtggctgcggggtgctaggtgttgggatctggcttgcggctacacaggggagctttgccaccctgtcctcctctttcccctctctttcagccgctaacctgctaatcattaccggagccttcgtgatggccatcggattcgtagggtgcctgggtgccatcaaagagaacaagtgtctcctgctgactttttttctccttctcttacttgtgttccttctcgaagctactattgctattctcttttttgcatataccgacaagatcgacagatacgcacagcaggacctcaagaagggattgcatttgtatggaacccaaggcaacgttgggctgaccaacgcctggagcattattcagaccgattttagatgctgcggggtgtcaaattacacagactggttcgaagtgtag

SEQ ID NO: 272208 - DNA, 258 bp, Artificial Sequence
  derived and/or modified sequence
atggcccgggcctgcctgcaggccgtgaagtacctgatgttcgccttcaacctgcttttctggcttggggggtgcggagtgttgggtgtaggtatctggctagctgccactcaaggaagcttcgcgacactcagttcatcatttccatcattgtctgcagccaatcttctgataatcacaggagcctttgttatggccatcgggttcgtcggctgtttgggggccattaaggagaacaaatgcctgctcttgacatag

SEQ ID NO: 272209 - DNA, 717 bp, Artificial Sequence
  derived and/or modified sequence
atggccagagcttgcctgcaggccgtaaagtacctgatgtttgcttttaacctgctcttctggctcggaggatgtggggtgctgggcgttggtatctggttggctgccacccagggtagtttcgcaacattaagctccagctttccctctctgtcagcagccaatctgttaattattacaggtgcgtttgtgatggccattggattcgtcgggtgcctcggagccatcaaggagaacaagtgtttactgctgacgttcttcctgctccttctgttggtgtttctcttagaggctaccatcgccatactattctttgcgtacactgacaaaattgacagatacgctcagcaggacctgaagaaaggcctccatctttatgggacccagggcaatgtgggtctgactaatgcctggagcatcatccagacggacttcaggtgttgtggcgtcagcaactataccgactggttcgaggtgtataatgctactcgcgttcccgattcctgctgtttggagttttctgagtcttgtggcctacacgcacctggcacctggtggaaagcaccctgctatgagaccgtgaaggtctggttacaggaaaatctcctggccgtcggaattttcggcctgtgcacggcgttagtgcagattctgggactgacctttgctatgacaatgtactgtcaggtggtgaaagcagatacctattgcgcctag

SEQ ID NO: 272210 - DNA, 717 bp, Artificial Sequence
  derived and/or modified sequence
atggcgagggcatgtcttcaagccgtgaagtatttgatgtttgcttttaacctactattctggttaggcggttgcggcgtactgggggtaggcatctggctggccgctactcaaggttcattcgctacactttcatcaagcttcccttctctttcagccgctaatctgctgattataacaggtgctttcgtcatggccattgggtttgtcggttgtctgggagcaattaaggaaaataagtgccttctcctcacattttttcttcttctgctgcttgtcttccttctggaggcgaccattgccattctgtttttcgcgtacactgacaagatcgatcggtatgcccaacaggaccttaagaaaggcctgcacctctacggcactcagggtaacgtgggccttactaatgcctggtcgataattcagacagacttccggtgctgcggggtgtcaaactatacagattggttcgaagtttataacgccacccgcgtgcccgacagttgctgtttggaattttcagaatcttgtggattgcacgccccaggaacctggtggaaggctccatgctatgagacagtaaaagtctggctgcaggaaaatctattggctgtgggcattttcgggctctgtaccgccctggtgcaaattttggggctgacctttgccatgaccatgtactgtcaggtcgtgaaggctgacacctactgcgcttag

SEQ ID NO: 272211 - DNA, 717 bp, Artificial Sequence
  derived and/or modified sequence
atggccagggcttgtctgcaggccgttaagtacttaatgttcgcctttaacctacttttctggctgggcggttgcggcgtgcttggagtgggcatctggcttgccgctactcagggctcttttgcaactttgtctagctcctttccttctctaagtgccgcaaatctgctcattataactggagcattcgtcatggctattggatttgttggttgcctcggcgctattaaggagaataaatgcctgcttctcacgtttttcctcctcctgttacttgtgttcctgctggaggctactattgctatcctctttttcgcgtacactgacaaaatcgataggtatgcccaacaggatctcaagaagggcctgcatctgtatggaacacaggggaacgtggggttaacaaacgcttggtctatcatccagaccgatttccgatgttgcggggtgtctaactacacagattggttcgaagtctacaacgccaccagggtgcctgacagttgctgtttggagttctcagaatcatgtggtctacacgcaccaggaacatggtggaaggcaccctgctacgaaacggtcaaggtgtggctccaggagaatctgctcgcagtgggcattttcgggctctgtactgcactggttcagattcttgggctcacgtttgccatgactatgtattgtcaggtagtaaaagcggacacttactgtgcatag

SEQ ID NO: 272212 - DNA, 717 bp, Artificial Sequence
  derived and/or modified sequence
atggctagggcctgcctgcaggccgtcaaatacctcatgttcgcgtttaatctgctcttctggctcggcggatgtggagtactgggagtgggcatttggctcgccgcaacgcagggctctttcgcgacgctgtcttcttcatttccaagtctctcagctgccaacctgctcatcattaccggcgcatttgtcatggctatcggcttcgtcggctgtctgggagcaatcaaagagaacaagtgtttactactaactttctttctcctgctgctgcttgtgttcttacttgaagctacaatcgctatcctgttctttgcttataccgacaaaatcgaccggtatgcccagcaggacctcaaaaagggcctgcatctgtacggcactcagggcaacgtggggctgacaaacgcttggagtatcatacaaaccgacttccgttgctgtggagtgtctaattataccgactggttcgaagtctacaatgccacccgcgtccccgacagctgttgcctcgaattttcagagtcgtgcggccttcacgcaccaggtacctggtggaaggccccttgttatgagactgtgaaggtgtggctgcaggaaaatttgctggccgtgggcattttcgggctgtgcaccgctctggtgcagatcctgggcttgacctttgcgatgacaatgtactgccaagtggtgaaggcagatacctattgcgcgtag

SEQ ID NO: 272213 - DNA, 717 bp, Artificial Sequence
  derived and/or modified sequence
atggcaagagcatgcctgcaggcggtgaagtatctgatgttcgcctttaatttactattctggctaggcggatgcggcgtactgggtgtagggatttggctcgcggctacacaaggttccttcgccacgctctctagttccttcccctctctttctgcggcaaatctcctaattataacaggtgcatttgttatggccattggatttgttggctgtttgggggctatcaaggaaaacaaatgcctcctcctgacatttttcctgctgctgttactggtgttcctgttagaagccaccatagccattctgtttttcgcctacacggacaaaatcgatcggtacgctcagcaggatctcaaaaagggcctgcacttatacgggactcaaggcaacgtgggtctgacaaacgcctggtcaattattcagaccgacttcagatgctgtggcgttagcaattacacagattggttcgaagtgtataatgcaacaagagttccggattcatgttgcctcgagttcagtgagtcttgcgggttgcatgctcccggtacatggtggaaggccccatgctacgaaactgtgaaggtgtggctgcaggaaaatctgctcgccgtaggcatttttggtttgtgcactgcattggtccagattttagggcttacgttcgcaatgacgatgtactgccaggttgtcaaagccgacacctactgtgcttag

SEQ ID NO: 272214 - DNA, 774 bp, Artificial Sequence
  derived and/or modified sequence
atgacaccaagatccgccggaacttctgcgcacggcgctgagctgaaacgttgcggcatggcgcgagcctgcctccaggccgttaagtatctgatgtttgcctttaatctcctgttctggctgggcggatgcggagtcctcggcgtcggcatatggctcgcagccacacaggggtcgtttgctacactgagctcttctttcccctcgctaagtgcggcaaatctgcttatcatcactggcgcattcgtgatggccattgggtttgtcggctgtctgggagctatcaaggaaaacaaatgtctgttacttaccttttttttactgcttttactggtcttcctcttggaggcaactatcgctatcctgttcttcgcctataccgataagattgatagatacgcccagcaggatttgaaaaagggtctgcatctatatggtacccaggggaatgtcgggctcacaaacgcttggagtataattcagactgatttcaggtgctgtggggttagtaactacaccgactggttcgaggtttacaatgcaactagagttccggactcgtgctgcttagagttttcagaaagttgcggactccacgcacccggaacatggtggaaagctccctgctacgaaactgttaaggtgtggctccaggagaatctcctcgctgttgggatttttggtctctgcactgcgttagtccaaatcttgggacttacctttgccatgaccatgtactgccaggtggttaaggccgacacgtactgcgcctag

SEQ ID NO: 272215 - DNA, 717 bp, Artificial Sequence
  derived and/or modified sequence
atggcacgcgcttgtctacaggcagtcaaatacctgatgttcgcatttaatctcctcttttggctaggtggatgtggagttctgggcgtggggatttggctggccgcaacccaggggagtttcgcaactctctcttcaagtttcccatcacttagtgccgcaaacctgctgattattacaggagccttcgtgatggccataggctttgtcggatgccttggagccatcaaggagaacaagtgtctcctactgactttttttctcctgcttctcctggtcttcctgctcgaagctactatcgccatcttattttttgcctacactgacaaaatcgataggtatgcgcagcaggaccttaaaaaagggctacatttgtatggtacccagggtaacgttggcctgacgaacgcttggtccattatccagaccgactttcggtgttgtggggtctccaactacacggattggttcgaggtgtataatgccactagagttcccgactcctgctgtctggaattttctgagagctgcggcctccacgccccaggcacctggtggaaagccccatgctacgagactgtgaaagtttggctgcaggagaatcttttggctgttgggattttcggactgtgtacagcccttgtgcagatacttggcttaactttcgctatgacaatgtactgtcaggtggtgaaggcagatacatactgcgcctag

SEQ ID NO: 272216 - DNA, 480 bp, Artificial Sequence
  derived and/or modified sequence
atggcacgagcgtgtctacaagccgtcaaatacttgatgtttgccttcaatctgttgttctggctgggcggatgtggggtgctgggggtgggaatctggctcgctgctacccaaggaagcttcgctaccctgagctctagttttccttcactgtctgccgctaacctgctcattatcactggcgcttttgttatggctattgggtttgtgggctgcctgggagcgataaaggagaacaaatgtcttctgttgaccttctttctcttactgctactggtgttcctgttagaagccaccattgctatcctttttttcgcttatacagacaaaatcgataggtacgctcagcaggatctcaagaagggacttcatctgtacgggacgcaaggaaatgtaggcctgactaatgcctggtcaataatacagactgattttagatgctgtggtgtatctaattatacggactggtttgaggtgtag

SEQ ID NO: 272217 - DNA, 258 bp, Artificial Sequence
  derived and/or modified sequence
atggctcgcgcatgccttcaggccgttaaatacctcatgttcgctttcaatctcctgttctggctcggcggttgcggcgtgttaggagtggggatctggttggcagccacacagggttcattcgctacactgtcctctagctttccctctctcagcgctgccaacttactaattatcaccggcgcattcgtaatggctattggcttcgtggggtgtctgggtgcgataaaggagaataaatgtttactgctaacctag

SEQ ID NO: 272218 - DNA, 1423 bp, Artificial Sequence
  derived and/or modified sequence
gtctgagcagggccgtaaagctgcggcggcggttcgcgtttctcgtgtccgcttgactgacagctgcgcggcgggagcgggcggcgcgagcgggaggcggcggcgcagagcttggggcttccttggtcgcacccaccacctgcctgcccactggtcagccttcagggaccctgagcaccgcctggtctctttcctgtggccagcccagaactgaagcgctgcggcatggcgcgcgcctgcctccaggccgtcaagtacctcatgttcgccttcaacctgctcttctggctgggaggctgtggcgtgctgggtgtcggcatctggctggccgccacacaggggagcttcgccacgctgtcctcttccttcccgtccctgtcggctgccaacttgctcatcatcaccggcgcctttgtcatggccatcggcttcgtgggctgcctgggtgccatcaaggagaacaagtgcctcctgctcactttcttcctgctgctgctgctggtgttcctgctggaggccaccatcgccatcctcttcttcgcctacacggacaagattgacaggtatgcccagcaagacctgaagaaaggcttgcacctgtacggcacgcagggcaacgtgggcctcaccaacgcctggagcatcatccagaccgacttccgctgctgtggcgtctccaactacactgactggttcgaggtgtacaacgccacgcgggtacctgactcctgctgcttggagttcagtgagagctgtgggctgcacgcccccggcacctggtggaaggcgccgtgctacgagacggtgaaggtgtggcttcaggagaacctgctggctgtgggcatctttgggctgtgcacggcgctggtgcagatcctgggcctgaccttcgccatgaccatgtactgccaagtggtcaaggcagacacctactgcgcgtaggccgcccaccgcccgcttctctgccaaaaggacgcccacggggagatggccgcacccacagctgcctttcccaccaccagcctcggtgctctgccccatgctgggaggagggagggagggacaggtgcctggagcccccggaaccctgtttctggaaggccctagctcaggtggcttcagggcctccggaccccccctgggaggggtggccacgtgctggctgcggaacccagggcaggggtgggaggggcctccagcactttttatatttacgtattctccaaagcagtgttcacacgggagccagcctgtggcccccagcctcctggaaaacaggttggcgctggaggagccgggtcttggcatcctggaggtggccccactggtcctggtgctccaggcggggccgtggacccctcacctacattccatagtgggcccgtggggctcctggtgcatcttaataaagtgtgagcagcaa

SEQ ID NO: 272219 - DNA, 1462 bp, Artificial Sequence
  derived and/or modified sequence
actgccccagcctcaggctctgtgcatctcccccgagcccccaccacatatgtgcggaggcccctgggggcccaggcctgtcctcagtcccgactgggctctacctgaggaccctggggagcctgggcctggccctcctcagagcttggggcttccttggtcgcacccaccacctgcctgcccactggtcagccttcagggaccctgagcaccgcctggtctctttcctgtggccagcccagaactgaagcgctgcggcatggcgcgcgcctgcctccaggccgtcaagtacctcatgttcgccttcaacctgctcttctggctgggaggctgtggcgtgctgggtgtcggcatctggctggccgccacacaggggagcttcgccacgctgtcctcttccttcccgtccctgtcggctgccaacttgctcatcatcaccggcgcctttgtcatggccatcggcttcgtgggctgcctgggtgccatcaaggagaacaagtgcctcctgctcactttcttcctgctgctgctgctggtgttcctgctggaggccaccatcgccatcctcttcttcgcctacacggacaagattgacaggtatgcccagcaagacctgaagaaaggcttgcacctgtacggcacgcagggcaacgtgggcctcaccaacgcctggagcatcatccagaccgacttccgctgctgtggcgtctccaactacactgactggttcgaggtgtacaacgccacgcgggtacctgactcctgctgcttggagttcagtgagagctgtgggctgcacgcccccggcacctggtggaaggcgccgtgctacgagacggtgaaggtgtggcttcaggagaacctgctggctgtgggcatctttgggctgtgcacggcgctggtgcagatcctgggcctgaccttcgccatgaccatgtactgccaagtggtcaaggcagacacctactgcgcgtaggccgcccaccgcccgcttctctgccaaaaggacgcccacggggagatggccgcacccacagctgcctttcccaccaccagcctcggtgctctgccccatgctgggaggagggagggagggacaggtgcctggagcccccggaaccctgtttctggaaggccctagctcaggtggcttcagggcctccggaccccccctgggaggggtggccacgtgctggctgcggaacccagggcaggggtgggaggggcctccagcactttttatatttacgtattctccaaagcagtgttcacacgggagccagcctgtggcccccagcctcctggaaaacaggttggcgctggaggagccgggtcttggcatcctggaggtggccccactggtcctggtgctccaggcggggccgtggacccctcacctacattccatagtgggcccgtggggctcctggtgcatcttaataaagtgtgagcagcaaccttg

SEQ ID NO: 272220 - DNA, 1426 bp, Artificial Sequence
  derived and/or modified sequence
tggacgcacatcctgctctgggcagaagggcaggacaggggccctgagtaacggtggcctggggtcagagccaggttcagctgcgaggctgctggtggctgtggagagcttggggcttccttggtcgcacccaccacctgcctgcccactggtcagccttcagggaccctgagcaccgcctggtctctttcctgtggccagcccagaactgaagcgctgcggcatggcgcgcgcctgcctccaggccgtcaagtacctcatgttcgccttcaacctgctcttctggctgggaggctgtggcgtgctgggtgtcggcatctggctggccgccacacaggggagcttcgccacgctgtcctcttccttcccgtccctgtcggctgccaacttgctcatcatcaccggcgcctttgtcatggccatcggcttcgtgggctgcctgggtgccatcaaggagaacaagtgcctcctgctcactttcttcctgctgctgctgctggtgttcctgctggaggccaccatcgccatcctcttcttcgcctacacggacaagattgacaggtatgcccagcaagacctgaagaaaggcttgcacctgtacggcacgcagggcaacgtgggcctcaccaacgcctggagcatcatccagaccgacttccgctgctgtggcgtctccaactacactgactggttcgaggtgtacaacgccacgcgggtacctgactcctgctgcttggagttcagtgagagctgtgggctgcacgcccccggcacctggtggaaggcgccgtgctacgagacggtgaaggtgtggcttcaggagaacctgctggctgtgggcatctttgggctgtgcacggcgctggtgcagatcctgggcctgaccttcgccatgaccatgtactgccaagtggtcaaggcagacacctactgcgcgtaggccgcccaccgcccgcttctctgccaaaaggacgcccacggggagatggccgcacccacagctgcctttcccaccaccagcctcggtgctctgccccatgctgggaggagggagggagggacaggtgcctggagcccccggaaccctgtttctggaaggccctagctcaggtggcttcagggcctccggaccccccctgggaggggtggccacgtgctggctgcggaacccagggcaggggtgggaggggcctccagcactttttatatttacgtattctccaaagcagtgttcacacgggagccagcctgtggcccccagcctcctggaaaacaggttggcgctggaggagccgggtcttggcatcctggaggtggccccactggtcctggtgctccaggcggggccgtggacccctcacctacattccatagtgggcccgtggggctcctggtgcatcttaataaagtgtgagcagcaaccttg

SEQ ID NO: 272221 - DNA, 1430 bp, Artificial Sequence
  derived and/or modified sequence
cgtgcggccagggtcccgtggccggaggtgtccgaccgggagcggctggagccggacgcgagcggggcgcgcgagttcgagcccagagccgacacgcagcaacaagtgggagcttggggcttccttggtcgcacccaccacctgcctgcccactggtcagccttcagggaccctgagcaccgcctggtctctttcctgtggccagcccagaactgaagcgctgcggcatggcgcgcgcctgcctccaggccgtcaagtacctcatgttcgccttcaacctgctcttctggctgggaggctgtggcgtgctgggtgtcggcatctggctggccgccacacaggggagcttcgccacgctgtcctcttccttcccgtccctgtcggctgccaacttgctcatcatcaccggcgcctttgtcatggccatcggcttcgtgggctgcctgggtgccatcaaggagaacaagtgcctcctgctcactttcttcctgctgctgctgctggtgttcctgctggaggccaccatcgccatcctcttcttcgcctacacggacaagattgacaggtatgcccagcaagacctgaagaaaggcttgcacctgtacggcacgcagggcaacgtgggcctcaccaacgcctggagcatcatccagaccgacttccgctgctgtggcgtctccaactacactgactggttcgaggtgtacaacgccacgcgggtacctgactcctgctgcttggagttcagtgagagctgtgggctgcacgcccccggcacctggtggaaggcgccgtgctacgagacggtgaaggtgtggcttcaggagaacctgctggctgtgggcatctttgggctgtgcacggcgctggtgcagatcctgggcctgaccttcgccatgaccatgtactgccaagtggtcaaggcagacacctactgcgcgtaggccgcccaccgcccgcttctctgccaaaaggacgcccacggggagatggccgcacccacagctgcctttcccaccaccagcctcggtgctctgccccatgctgggaggagggagggagggacaggtgcctggagcccccggaaccctgtttctggaaggccctagctcaggtggcttcagggcctccggaccccccctgggaggggtggccacgtgctggctgcggaacccagggcaggggtgggaggggcctccagcactttttatatttacgtattctccaaagcagtgttcacacgggagccagcctgtggcccccagcctcctggaaaacaggttggcgctggaggagccgggtcttggcatcctggaggtggccccactggtcctggtgctccaggcggggccgtggacccctcacctacattccatagtgggcccgtggggctcctggtgcatcttaataaagtgtgagcagcaaccttg

SEQ ID NO: 272222 - DNA, 1025 bp, Artificial Sequence
  derived and/or modified sequence
gagcagggccgtaaagctgcggcggcggttcgcgtttctcgtgtccgcttgactgacagctgcgcggcgggagcgggcggcgcgagcgggaggcggcggcgcagaactgaagcgctgcggcatggcgcgcgcctgcctccaggccgtcaagtacctcatgttcgccttcaacctgctcttctggctgggaggctgtggcgtgctgggtgtcggcatctggctggccgccacacaggggagcttcgccacgctgtcctcttccttcccgtccctgtcggctgccaacttgctcatcatcaccggcgcctttgtcatggccatcggcttcgtgggctgcctgggtgccatcaaggagaacaagtgcctcctgctcactttcttcctgctgctgctgctggtgttcctgctggaggccaccatcgccatcctcttcttcgcctacacggacaagattgacaggtatgcccagcaagacctgaagaaaggcttgcacctgtacggcacgcagggcaacgtgggcctcaccaacgcctggagcatcatccagaccgacttccgctgctgtggcgtctccaactacactgactggttcgaggtgtacaacgccacgcgggtacctgactcctgctgcttggagttcagtgagagctgtgggctgcacgcccccggcacctggtggaaggcgccgtgctacgagacggtgaaggtgtggcttcaggagaacctgctggctgtgggcatctttgggctgtgcacggcgctggtgcagatcctgggcctgaccttcgccatgaccatgtactgccaagtggtcaaggcagacacctactgcgcgtaggccgcccaccgcccgcttctctgccaaaaggacgcccacggggagatggccgcacccacagctgcctttcccaccaccagcctcggtgctctgccccatgctgggaggagggagggagggacaggtgcctggagcccccggaaccctgtttctggaaggccctagctcaggtggcttcagggcctcc

SEQ ID NO: 272223 - DNA, 1339 bp, Artificial Sequence
  derived and/or modified sequence
agaggcgtggggtaggctgcagggcacagctgggggcctctgtccccatctccggctgtgggaggtgtgtgcgcatccggcgtgatgacacccaggagtgcaggcacatctgcgcacggggccgaactgaagcgctgcggcatggcgcgcgcctgcctccaggccgtcaagtacctcatgttcgccttcaacctgctcttctggctgggaggctgtggcgtgctgggtgtcggcatctggctggccgccacacaggggagcttcgccacgctgtcctcttccttcccgtccctgtcggctgccaacttgctcatcatcaccggcgcctttgtcatggccatcggcttcgtgggctgcctgggtgccatcaaggagaacaagtgcctcctgctcactttcttcctgctgctgctgctggtgttcctgctggaggccaccatcgccatcctcttcttcgcctacacggacaagattgacaggtatgcccagcaagacctgaagaaaggcttgcacctgtacggcacgcagggcaacgtgggcctcaccaacgcctggagcatcatccagaccgacttccgctgctgtggcgtctccaactacactgactggttcgaggtgtacaacgccacgcgggtacctgactcctgctgcttggagttcagtgagagctgtgggctgcacgcccccggcacctggtggaaggcgccgtgctacgagacggtgaaggtgtggcttcaggagaacctgctggctgtgggcatctttgggctgtgcacggcgctggtgcagatcctgggcctgaccttcgccatgaccatgtactgccaagtggtcaaggcagacacctactgcgcgtaggccgcccaccgcccgcttctctgccaaaaggacgcccacggggagatggccgcacccacagctgcctttcccaccaccagcctcggtgctctgccccatgctgggaggagggagggagggacaggtgcctggagcccccggaaccctgtttctggaaggccctagctcaggtggcttcagggcctccggaccccccctgggaggggtggccacgtgctggctgcggaacccagggcaggggtgggaggggcctccagcactttttatatttacgtattctccaaagcagtgttcacacgggagccagcctgtggcccccagcctcctggaaaacaggttggcgctggaggagccgggtcttggcatcctggaggtggccccactggtcctggtgctccaggcggggccgtggacccctcacctacattccatagtgggcccgtggggctcctggtgcatcttaataaagtgtgagcagcaa

SEQ ID NO: 272224 - DNA, 1031 bp, Artificial Sequence
  derived and/or modified sequence
aggggccctgagtaacggtggcctggggtcagagccaggttcagctgcgaggctgctggtggctgtggagaactgaagcgctgcggcatggcgcgcgcctgcctccaggccgtcaagtacctcatgttcgccttcaacctgctcttctggctgggaggctgtggcgtgctgggtgtcggcatctggctggccgccacacaggggagcttcgccacgctgtcctcttccttcccgtccctgtcggctgccaacttgctcatcatcaccggcgcctttgtcatggccatcggcttcgtgggctgcctgggtgccatcaaggagaacaagtgcctcctgctcactttcttcctgctgctgctgctggtgttcctgctggaggccaccatcgccatcctcttcttcgcctacacggacaagattgacaggtatgcccagcaagacctgaagaaaggcttgcacctgtacggcacgcagggcaacgtgggcctcaccaacgcctggagcatcatccagaccgacttccgctgctgtggcgtctccaactacactgactggttcgaggtgtacaacgccacgcgggtacctgactcctgctgcttggagttcagtgagagctgtgggctgcacgcccccggcacctggtggaaggcgccgtgctacgagacggtgaaggtgtggcttcaggagaacctgctggctgtgggcatctttgggctgtgcacggcgctggtgcagatcctgggcctgaccttcgccatgaccatgtactgccaagtggtcaaggcagacacctactgcgcgtaggccgcccaccgcccgcttctctgccaaaaggacgcccacggggagatggccgcacccacagctgcctttcccaccaccagcctcggtgctctgccccatgctgggaggagggagggagggacaggtgcctggagcccccggaaccctgtttctggaaggccctagctcaggtggcttcagggcctccggaccccccctgggaggggtggccacgtgctggctgcgga

SEQ ID NO: 272225 - DNA, 968 bp, Artificial Sequence
  derived and/or modified sequence
cggggtcgggggcgcgggggccgcagcgcgcgggccgggcagatgtttgggttccgccgccggggtccgagcggatccgcgcgacccgctgccaccgcgggggccagagcgggagcaggagcggggccggagcaggcgccggccggcgggatggggcgttccggggcggcgggtgcggggcgctgagcggcggccccggcacacccgggcgcgatgcgccgctccagcacggacgagtccacgtaccggcgcagcccctctccggagggcaaggagccggacttcgcgcgcggcggccccttccggcgctacagcagcctatacgggcgcgcgggcggcggggacgccgggggctccttcttcggcctgcacgcgaaccccggccccaaggcggcccaggcgcgctacacgtcgcccaagggcaacaagtacgtggttttctacctggacctctccttcatcttcctcctagaactgaagcgctgcggcatggcgcgcgcctgcctccaggccgtcaagtacctcatgttcgccttcaacctgctcttctggctgggaggctgtggcgtgctgggtgtcggcatctggctggccgccacacaggggagcttcgccacgctgtcctcttccttcccgtccctgtcggctgccaacttgctcatcatcaccggcgcctttgtcatggccatcggcttcgtgggctgcctgggtgccatcaaggagaacaagtgcctcctgctcactttcttcctgctgctgctgctggtgttcctgctggaggccaccatcgccatcctcttcttcgcctacacggacaagattgacaggtatgcccagcaagacctgaagaaaggcttgcacctgtacggcacgcagggcaacgtgggcctcaccaacgcctggagcatcatccagaccgacttccgctgctgtggcgtctccaactacactgactggttcgaggtgta

SEQ ID NO: 272226 - DNA, 818 bp, Artificial Sequence
  derived and/or modified sequence
cgggaatggggtcggggtgcgccctcccgggtcccggctctgctggctgctcgccgtcccgagctcccgacgctcagacgcgcctctgagcacggggagaggggacccgggagggaggtcggggagggagtcgtggaagaggtgctttttgagctgaacctggaagaccccggcacaggggatccctgggcagactcccggaggctgcactggcaggaccccctgaaggcctcagctctggcttgccctggagctcagggcctacggacgacgagggacgaggagcccgtgtctctcggatggagtgcgggggggctggcaccagcacccttcttgctgtgcccctggggtgggggtgaggaaatggggggtcggtgtgcagtgagaggcaaagaaggctccttggaggtgcgagggctccactctgcccatctttccttttgcagagcttggggcttccttggtcgcacccaccacctgcctgcccactggtcagccttcagggaccctgagcaccgcctggtctctttcctgtggccagcccagaactgaagcgctgcggcatggcgcgcgcctgcctccaggccgtcaagtacctcatgttcgccttcaacctgctcttctggctgggaggctgtggcgtgctgggtgtcggcatctggctggccgccacacaggggagcttcgccacgctgtcctcttccttcccgtccctgtcggctgccaacttgctcatcatcaccggcgcctttgtcatggccatcggcttcgtgggctgcctgggtgccatcaaggagaacaagtgcctcctgctcact

SEQ ID NO: 272227 - DNA, 858 bp, Artificial Sequence
  derived and/or modified sequence
atggccgtgagcgagagccagctgaagaagatggtgagcaagccccagagcgacctgctgggcctgatccaggtgatgatcgtggtgttcggcgacgagccccccgtgttcagcagacccatcagcgccagctaccccccctaccaggccaccggcccccccaacaccagctacatgcccggcatgcccggcggcatcagcccctaccccagcggctacccccccaaccccagcggctaccccggctgcccctacccccccggcggcccctaccccgccaccaccagcagccagtaccccagccagccccccgtgaccaccgtgggccccagcagagacggcaccatcagcgaggacaccatcagagccagcctgatcagcgccgtgagcgacaagctgagatggagaatgaaggaggagatggacagagcccaggccgagctgaacgccctgaagagaaccgaggaggacctgaagaagggccaccagaagctggaggagatggtgaccagactggaccaggaggtggccgaggtggacaagaacatcgagctgctgaagaagaaggacgaggagctgagcagcgccctggagaagatggagaaccagagcgagaacaacgacatcgacgaggtgatcatccccaccgcccccctgtacaagcagatcctgaacctgtacgccgaggagaacgccatcgaggacaccatcttctacctgggcgaggccctgagaagaggcgtgatcgacctggacgtgttcctgaagcacgtgagactgctgagcagaaagcagttccagctgagagccctgatgcagaaggccagaaagaccgccggcctgagcgacctgtactag

SEQ ID NO: 272228 - DNA, 858 bp, Artificial Sequence
  derived and/or modified sequence
atggcagtgtcagagtcacagttgaagaagatggtgagcaagccccagtcagacttgctaggccttattcaggtaatgatagtggtcttcggggatgagccgcccgtctttagtcgccccatcagtgctagctatcctccatatcaggcgacgggtcctcctaatacttcatacatgcccggaatgccaggtggaatctccccatacccaagcggctatccacccaaccccagtgggtatcccggctgcccttacccacccggtggaccctatccagccacaacctcctcccaatatccatcacagccacctgtgaccactgtggggcctagcagagacggtaccatctctgaagacacaatccgagcctcacttatatctgctgtgtctgataagcttagatggcgaatgaaggaggaaatggaccgggcacaagctgaattgaacgcactgaaaaggacagaggaagatttgaaaaagggtcatcagaagttagaagagatggttactaggctggatcaggaagtggccgaagtagataaaaatatcgagcttctgaaaaaaaaggatgaggagctctccagcgcgctggagaaaatggaaaaccagtccgagaataatgatatcgatgaagttattatccccaccgctcccctctacaaacagatcttgaatctgtatgccgaagagaacgctatcgaggataccatcttctatttgggagaggcactgagaagaggtgttatagatctagatgtctttctgaagcatgttagactgctctccagaaagcagtttcagctcagagccctcatgcagaaggctagaaagaccgctggtctcagcgatctgtactag

SEQ ID NO: 272229 - DNA, 858 bp, Artificial Sequence
  derived and/or modified sequence
atggctgtgtctgagagccagctgaagaagatggtgtccaagccccagagcgacctgctgggcctcatccaggtgatgattgtggtgtttggagatgagccccctgtgttcagccggcccatcagcgccagctacccaccctaccaggccactggaccacccaacaccagctacatgcctggcatgcctgggggcatcagcccctaccccagcggctacccacccaaccccagcggctacccaggctgcccctacccacctgggggcccctacccagccaccaccagcagccagtaccccagccagccccctgtgaccaccgtgggccccagcagagatggcaccatcagcgaggacaccatccgggccagcctcatctctgctgtgtctgacaagctgcgctggaggatgaaggaggagatggaccgggcccaggccgagctgaatgccctgaagaggacagaggaggacctgaagaagggccaccagaagctggaggagatggtgacccggctggaccaggaggtggccgaggtggacaagaacatcgagctgctgaagaagaaggatgaggagctgagcagcgccctggagaagatggagaaccagagtgaaaataatgacattgatgaggtgatcatccccacagcccccctgtacaagcagatcctgaacctgtatgcagaggagaatgccatcgaggacaccatcttctacctgggggaggccctgcggcggggcgtgattgacctggatgtgttcctgaagcacgtgcggctgctgagcaggaagcagttccagctgcgggccctgatgcagaaggccaggaagacagctggcctgagtgacctgtactag

SEQ ID NO: 272230 - DNA, 858 bp, Artificial Sequence
  derived and/or modified sequence
atggccgtgagcgagagccagctgaagaagatggtgagcaagccccaaagcgatttgctcgggctgatccaagtcatgatcgtggtcttcggggatgaaccacccgttttttcccggcctattagcgccagctaccctccttaccaagcaaccggtcccccaaatacttcgtacatgcccggcatgcccggcggaatcagtccctacccatctggctacccccccaatcccagtggctatccgggctgcccctaccccccggggggcccttatcccgccaccacctcttcccagtatcccagccaaccaccagtaacaactgtgggcccgagtcgcgatgggaccatttccgaggacactatcagagcttcattaatcagtgctgtctcagataaactcagatggcggatgaaggaagagatggacagggctcaagccgaattaaacgccctgaaacgtacggaagaagatctgaagaaaggacaccagaagcttgaagagatggtcactagactggatcaggaagtggccgaggtggacaagaatatagagctcctcaagaagaaggatgaggagctgtcctccgccctggagaagatggagaaccagagtgaaaacaacgatattgacgaggtcatcatccccaccgcacccctctacaagcagatactgaatctctatgccgaagagaatgcgatcgaggacacaattttttaccttggggaagctctgcgccgaggagtgatcgacttagatgtgtttctcaagcatgttagattgctgagtaggaaacagtttcagttacgagccctgatgcagaaagccaggaaaacagctgggctatcagacctgtactag

SEQ ID NO: 272231 - DNA, 858 bp, Artificial Sequence
  derived and/or modified sequence
atggccgtgtcagagagtcagctcaagaaaatggtgtcgaagccccaaagcgaccttctcggcctaatccaagtgatgatcgtggtttttggagacgagccgccagttttctcacgacctatctcagcaagctaccccccatatcaggctaccggtcctcccaatacgagttatatgcctggcatgcctggtgggatctccccttacccttccggatacccacccaatcccagcggttacccaggatgtccttacccgccaggaggcccatatcctgcgaccacatcttcacagtatcccagtcagccaccagttacaacagtgggaccaagcagagatggaactattagcgaggacactattagggcctcgctcatctccgctgttagcgataaactcagatggcggatgaaggaggagatggatagggcacaggccgaactcaacgccttgaagagaacagaggaagacttgaagaagggccaccaaaaactcgaggagatggtgactaggctagatcaggaagttgccgaagtagacaagaatattgagctgttaaaaaaaaaggatgaggagctgagctccgcccttgagaagatggaaaaccagagtgaaaataatgatatagacgaggtaattatccctactgccccattatataagcagatcctcaacctgtatgctgaagaaaacgccattgaggatacaatcttctacctgggggaagccctgagacgtggcgttatagaccttgacgtttttttgaagcacgtgcgtctgctgtctcgaaagcagtttcagctgagagctctgatgcaaaaagcacgaaagactgcaggactctccgacctttattag

SEQ ID NO: 272232 - DNA, 1200 bp, Artificial Sequence
  derived and/or modified sequence
ctgttgtttgaggccgggttgggggtgtgcgattgtgtgggacggtctggggcagcccagcagcggctgaccctctgcctgcggggaagggagtcgccaggcggccgtcatggcggtgtcggagagccagctcaagaaaatggtgtccaagccacagtcagacttgttggggcttattcaggtcatgattgtggtatttggagatgaacctccagtcttctctcgtcctatttcggcatcctatccgccataccaggcaacggggccaccaaatacttcctacatgccaggcatgccaggtggaatctctccatacccatccggataccctcccaatcccagtggttacccaggctgtccttacccacctggtggtccatatcctgccacaacaagttctcagtacccttctcagcctcctgtgaccactgttggtcccagtagggatggcacaatcagcgaggacaccatccgagcctctctcatctctgcggtcagtgacaaactgagatggcggatgaaggaggaaatggatcgtgcccaggcagagctcaatgccttgaaacgaacagaagaagacctgaaaaagggtcaccagaaactggaagagatggttacccgtttagatcaagaagtagccgaggttgataaaaacatagaacttttgaaaaagaaggatgaagaactcagttctgctctggaaaaaatggaaaatcagtctgaaaacaatgatatcgatgaagttatcattcccacagctcccttatacaaacagatcctgaatctgtatgcagaagaaaacgctattgaagacactatcttttacttgggagaagccttgagaaggggcgtgatagacctggatgtcttcctgaagcatgtacgtcttctgtcccgtaaacagttccagctgagggcactaatgcaaaaagcaagaaagactgccggtctcagtgacctctactgacttctctgataccagctggaggttgagctcttcttaaagtattcttctcttccttttatcagtaggtgcccagaataagttattgcagtttatcattcaagtgtaaaatattttgaatcaataatatattttctgttttcttttggtaaagactggcttttattaatgcactttctatcctctgtaaactttttgtgctgaatgttgggactgctaaataaaatttgttgcat

SEQ ID NO: 272233 - protein, 294 aa, Artificial Sequence
  derived and/or modified sequence
MAHGIPSQGKVTITVDEYSSNPTQAFTHYNINQSRFQPPHVHMVDPIPYDTPKPAGHTRFVCISDTHSRTDGIQMPYGDILLHTGDFTELGLPSEVKKFNDWLGNLPYEYKIVIAGNHELTFDKEFMADLVKQDYYRFPSVSKLKPEDFDNVQSLLTNSIYLQDSEVTVKGFRIYGAPWTPWFNGWGFNLPRGQSLLDKWNLIPEGIDILMTHGPPLGFRDWVPKELQRVGCVELLNTVQRRVRPKLHVFGGIHEGYGIMTDGYTTYINASTCTVSFQPTNPPIIFDLPNPQGS

SEQ ID NO: 272234 - DNA, 885 bp, Artificial Sequence
  derived and/or modified sequence
atggcccatggcatacccagtcaggggaaggtgacgatcactgtggatgagtactcttccaatccaacgcaggccttcacccactataacatcaatcagagtcgattccagcctccccatgtccatatggtggatcctattccctacgatacccccaaacccgctgggcacaccagatttgtctgcattagtgatacacactctagaactgatggcatacagatgccgtatggggatatattgttgcacactggagactttaccgaactgggtcttccttcagaagtgaaaaaatttaacgactggttgggtaatctgccatacgaatacaagattgtaatcgccggcaatcatgagctgaccttcgataaggaattcatggctgacctagtcaaacaggattactatcggttccctagcgtttcaaagctgaaaccagaggacttcgacaatgtgcaaagtctgctaacaaactccatttacctacaggactcagaggttaccgtcaagggtttccgcatttacggcgccccttggactccatggttcaacgggtggggctttaatcttcctaggggacagtcgcttcttgacaaatggaaccttatcccagagggcatcgatattctgatgacgcacggacctcccctgggcttccgagattgggtccctaaagagttgcagagggtgggctgcgtggagctactgaacacagtgcaacgacgggtgagacccaagctgcatgtgtttggcgggatccacgaggggtatggcatcatgaccgacggctacactacatatattaatgcctccacttgcacggtgtcctttcagccaacaaatcctcccataatcttcgacctgccgaatcctcagggtagctag

SEQ ID NO: 272235 - DNA, 885 bp, Artificial Sequence
  derived and/or modified sequence
atggcccacggcatccccagccagggcaaggtgaccatcaccgtggatgagtacagcagcaaccccacccaggccttcacccactacaacatcaaccagagccgcttccagcccccccacgtgcacatggtggaccccatcccctatgacacccccaagccagctggccacaccaggtttgtgtgcatcagtgacacccacagcaggacagatggcatccagatgccctatggagacatcctgctgcacactggagacttcacagagctgggcctgcccagcgaggtgaagaagttcaatgactggctgggcaacctgccctatgagtacaagatcgtgattgctggcaaccacgagctgacctttgacaaggagttcatggctgacctggtgaagcaggactactaccgcttccccagcgtgtccaagctgaagccagaagattttgacaacgtgcagagcctgctgaccaacagcatctacctgcaggacagcgaggtgacagtgaagggcttccgcatctatggagccccctggaccccctggttcaacggctggggcttcaacctgccccggggccagagcctgctggacaagtggaacctgatccctgagggcatcgacatcctgatgacccacggcccccccctgggcttccgggactgggtgcccaaggagctgcagagggtgggctgtgtggagctgctgaacacagtgcagaggagagtgcggcccaagctgcacgtgtttggaggcatccacgagggctacggcatcatgacagatggctacaccacctacatcaatgccagcacctgcaccgtgtccttccagcccaccaacccccccatcatctttgacctgcccaacccccagggcagctag

SEQ ID NO: 272236 - DNA, 2252 bp, Artificial Sequence
  derived and/or modified sequence
agaaatgcacagcggtattgatgagtagatccttggattcagaggttggctgaaacgcaccatgcctgcttccatcttttgctctgtaaagttgtgaattgctcatgcctatagggaggaaggatggcacatgggattccttctcaaggcaaagttaccataacggtggatgagtacagctcaaaccccacccaggcattcacgcactacaacatcaaccagagcagattccagcctccacatgtacatatggtcgaccccatcccatatgacactccaaaaccagcgggccacacgcggtttgtctgcatctcagacacacactccagaacagatggtatccagatgccttatggggacatccttctccacacaggcgatttcaccgagctgggactgccctcagaggttaagaagtttaatgactggttaggaaacctgccatatgaatataaaatagtgattgctgggaatcatgaactgacatttgataaggaattcatggcagaccttgttaaacaggactactaccgtttcccctctgtgtccaaattgaaaccagaggactttgacaatgttcagtccctcctgacaaacagtatttacttacaagattcggaggtaacagtgaagggattcaggatatacggtgcaccttggaccccgtggtttaatggatggggctttaacctacccagaggtcagtctctgctggacaagtggaacctcatccctgagggcattgacatactcatgacacatggacctcctctaggttttcgagactgggttccaaaggagcttcaaagagtgggctgtgtggagctgttaaacacggttcagaggcgagtccggcccaagctccatgtgtttggtggaatccatgaaggttatggcatcatgaccgacggttacacaacgtacatcaatgcctcgacgtgtacagtcagctttcaaccgaccaaccctccaattatatttgaccttccaaacccacagggttcctgaagctctaaatgccctattggaatgtgagggaaggtctataaactgccatttttctaattataaacttacattctcttacttatttacaaaccctgtgagttctttttgtaaattgttggaacacaaatgatgctagaggttgtgcttcttattttattttattttaaatggggcatccatttgaaatcagaggaacattgtgaatttgtaaaatgacttctgttttctcaaaggccatgccattgtaaattgttagtgttcgccaaaggacagccaagctttcttttaaaaagtgataaaagtcttattttaatatgctttaagctgaaagaaaaaaaaataagaaacaggcagtgttttaaaaaccaacacagatttgcacaactgtttaagagtattgtttgaaatattttaattttcaatgttttgttgttgttgttttcttggtaatgcttcttttttgcagatgtggtcccaatttatagcaatcttctcaacagaagtaggcatggaaaagacttcttttcatactctcactataaagaaagctgcattgagaagaaaatggctgtcatttaaaggatggtttaactagtgagattcctattgtggttatacaaggtctcattgtttgtttgtttcttttaaattatttcagctttaaaaatacagaaatggaatctgtcaagagcaggtatttcatacggttaaaaaaatgaacatgcagactccttttcaatatgggtttatatatataagtattttttgtgtattatgactacgttaggagtttattattgtcaaggacagtacaactgcaaagggatgctgtatagcaacacatcagaagtcggaaggaactgacacattctctcagagctcaaggtcttaaagagcttgagttaaatctaggtacagttacaggcatgtatagacttaaatggatgcaatggaagctaactaaaataaggcttagttgtcctttctatttaaataccccaagttgtcttcttacttcctctcccctctcccattttgcactgtgtgtcgatgcaatcttcgctagcacaaaatattgtcgctaatagtcatttctgttttcccattgtaaatgctgttgagctttattctattttatgttactttgttaatgaaatttaggaaagcagttgtttctttaaatttattgtgatattctatatctagcggcctttatatgcaaataaaattgcaagatttttaaa

SEQ ID NO: 272237 - DNA, 885 bp, Artificial Sequence
  derived and/or modified sequence
atggcccacggcatccccagccagggcaaggtgaccatcaccgtggatgaatacagctccaacccgacacaggcattcacccattacaatattaaccagagccggtttcaacccccccacgtgcacatggtggacccgattccatacgacactcctaaacccgcagggcataccagatttgtttgcatatcagatacccattcccgaaccgacgggatccaaatgccgtacggtgatatccttctgcatactggagatttcaccgagctgggtctgccgagcgaggtcaaaaagtttaatgattggttaggaaatctcccttatgagtataagattgtcatcgccggaaatcacgaactgacttttgacaaggagttcatggcggacttggtcaaacaggattactatcggttcccctctgtcagtaaactaaagcctgaggatttcgataacgtgcagagcctactaactaactccatctatctccaagacagcgaggtcacagtaaagggtttccggatctacggagctccatggacaccttggttcaatggctggggcttcaatctccctcgcggccaatccttactcgacaaatggaatcttatacctgaggggattgacattctgatgacacacgggcctccactgggttttagagactgggttcccaaggagctgcaacgcgtcggttgcgtggagttgctgaacacagtgcaaaggcgggtgcgccccaagctccatgtattcggaggaattcacgaggggtatggcataatgactgatggctacaccacctatattaacgccagtacatgtacagtatcattccagccgactaaccctcccattatttttgaccttcctaacccacaaggaagctag

SEQ ID NO: 272238 - DNA, 885 bp, Artificial Sequence
  derived and/or modified sequence
atggctcacgggatccccagccagggtaaagtaacaataaccgttgacgaatatagctctaacccaacacaggccttcacccactataacatcaaccagagccggttccaaccacctcatgtgcacatggtggacccgattccttatgacaccccaaagcccgcaggtcacactcggttcgtgtgcatcagtgacactcactcccggaccgatgggatccagatgccatacggggatattcttcttcacaccggagactttactgagttaggtttgccttccgaagtgaaaaaattcaatgactggctgggaaacctcccttacgagtataagattgtcatcgccggaaaccatgagctgacattcgataaggagtttatggctgacctcgttaagcaggactattacaggtttcctagcgtgtcgaaactgaaaccagaggattttgataatgtgcagagtctgcttacaaattcaatttacctgcaggattccgaagttaccgtgaaaggcttccggatttatggcgcaccttggacgccatggttcaacggctggggtttcaatcttccgagagggcagtcactgctggataagtggaacttaataccagagggaatcgacattctcatgacacatggtccccctttggggttccgagattgggtgcctaaggagctacaacgggtcgggtgtgtggagttgttgaacaccgtgcagcgcagagtgcgacctaaacttcatgtgttcggtgggatccacgaaggatacgggattatgactgacggctacaccacatacattaacgcttccacttgcacggtctcgttccagcccactaatcctccaataatattcgaccttcccaacccgcaaggatcctag

SEQ ID NO: 272239 - DNA, 885 bp, Artificial Sequence
  derived and/or modified sequence
atggcccacggcatccccagccagggcaaggtgaccatcaccgtggacgagtacagcagcaaccccacccaggccttcacccactacaacatcaaccagagcagattccagcccccccacgtgcacatggtggaccccatcccctacgacacccccaagcccgccggccacaccagattcgtgtgcatcagcgacacccacagcagaaccgacggcatccagatgccctacggcgacatcctgctgcacaccggcgacttcaccgagctgggcctgcccagcgaggtgaagaagttcaacgactggctgggcaacctgccctacgagtacaagatcgtgatcgccggcaaccacgagctgaccttcgacaaggagttcatggccgacctggtgaagcaggactactacagattccccagcgtgagcaagctgaagcccgaggacttcgacaacgtgcagagcctgctgaccaacagcatctacctgcaggacagcgaggtgaccgtgaagggcttcagaatctacggcgccccctggaccccctggttcaacggctggggcttcaacctgcccagaggccagagcctgctggacaagtggaacctgatccccgagggcatcgacatcctgatgacccacggcccccccctgggcttcagagactgggtgcccaaggagctgcagagagtgggctgcgtggagctgctgaacaccgtgcagagaagagtgagacccaagctgcacgtgttcggcggcatccacgagggctacggcatcatgaccgacggctacaccacctacatcaacgccagcacctgcaccgtgagcttccagcccaccaacccccccatcatcttcgacctgcccaacccccagggcagctag

SEQ ID NO: 272240 - DNA, 132 bp, Artificial Sequence
  derived and/or modified sequence
atggcacatgggattccatcgcaaggcaaggtgaccataactgtggacgaatactcttccaatcccactcaggctttcacgcattataacataaatcagtccaggttccaacctcctcacgtgcacatgtag

SEQ ID NO: 272241 - DNA, 132 bp, Artificial Sequence
  derived and/or modified sequence
atggcccacggcatccccagccagggcaaggtgaccatcaccgtggatgagtacagcagcaaccccacccaggccttcacccactacaacatcaaccagagccgcttccagcccccccacgtgcacatgtag

SEQ ID NO: 272242 - DNA, 381 bp, Artificial Sequence
  derived and/or modified sequence
agatcagcagatgggagggaacctagggtcgccttcctaggtctgagcgaagtgtcccagccgctccccttacccctgcggtgagccctgcgtcctggaacggtgccaggactcctgacagagcctggcagaaatgcacagcggtattgatgagtagatccttggattcagaggttggctgaaacgcaccatgcctgcttccatcttttgctctgtaaagttgtgaattgctcatgcctatagggaggaaggatggcacatgggattccttctcaaggcaaagttaccataacggtggatgagtacagctcaaaccccacccaggcattcacgcactacaacatcaaccagagcagattccagcctccacatgtacatatg

SEQ ID NO: 272243 - DNA, 132 bp, Artificial Sequence
  derived and/or modified sequence
atggcccacggcatccccagccagggcaaggtgaccatcaccgtggacgaatacagtagcaatccgacacaggcctttacccactacaacatcaatcagagtagattccagccaccccatgtacacatgtag

SEQ ID NO: 272244 - DNA, 132 bp, Artificial Sequence
  derived and/or modified sequence
atggcccacgggatcccaagccagggcaaggttactatcaccgttgatgaatattcatccaatccaactcaggcgttcacccactataatataaatcagtctaggttccagcctccacacgtgcacatgtag

SEQ ID NO: 272245 - DNA, 132 bp, Artificial Sequence
  derived and/or modified sequence
atggcccacggcatccccagccagggcaaggtgaccatcaccgtggacgagtacagcagcaaccccacccaggccttcacccactacaacatcaaccagagcagattccagcccccccacgtgcacatgtag

SEQ ID NO: 272246 - protein, 190 aa, Artificial Sequence
  derived and/or modified sequence
MLLAQINRDSQGMTEFPGGGMEAQHVTLCLTEAVTVADGDNLENMEGVSLQAVTLADGSTAYIQHNSKDAKLIDGQVIQLEDGSAAYVQHVPIPKSTGDSLRLEDGQAVQLEDGTTAFIHHTSKDSYDQSALQAVQLEDGTTAYIHHAVQVPQSDTILAIQADGTVAGLHTGDATIDPDTISALEQYAAK

SEQ ID NO: 272247 - protein, 175 aa, Artificial Sequence
  derived and/or modified sequence
MLLAQINRDSQGMTEFPGGGMEAQHVTLCLTEAVTVADGDNLENMEGVSLQAVTLADGSTAYIQHNSKDAKLIDGQVIQLEDGSAAYVQHVPIPKSTGDSLRLEDGQAVQLEDGTTAFIHHTSKDSYDQSALQAVQLEDGTTAYIHHAVQVPQSDTILAIQADGTVAGLHTGDAT

SEQ ID NO: 272248 - DNA, 2955 bp, Artificial Sequence
  derived and/or modified sequence
gggcgggcctcagacacactatgcgggttgcggggcctgggggccggacggctgtttcctgtcctggtgcatggtggtcggacgaaggaattgttggaaaattttctcggaggtagaagatgttgttagcccaaataaatcgagattctcagggaatgacagagtttcctggaggagggatggaggcgcaacatgttacgctgtgcttgacagaggcagtcaccgtggcagatggtgacaacttagaaaatatggaaggcgtaagcttgcaagcagtaacacttgcagatggttctactgcttacatacaacacaattctaaagatgcaaaactcatagatggccaggtcattcagttggaagatggttctgcggcctatgttcaacatgtacccatacctaaaagtacaggggacagtttgcgtctagaggatggtcaagcagtacagttagaagatggtaccacagcatttattcaccacacctccaaagatagttatgaccagagtgcattacaggcggttcagctggaagatggtaccacagcttatatccaccatgcagtgcaagtcccgcagtctgacaccatcttggcaattcaggctgatgggacagtggcaggtctgcacactggggatgctacaattgaccctgacaccatcagtgctttggaacagtatgcagcaaaggtgtccattgatggaagtgaaagtgtagcaggtactggaatgattggagaaaatgagcaagagaaaaaaatgcagattgttttacaaggacatgctacaagagtaactgctaaatctcaacagagtggagagaaggcatttcgatgtgaatatgatggatgtggaaaattatatacaacagctcatcatctcaaggtccatgagaggtcacacacaggagatcggccttatcagtgtgagcatgcaggctgtgggaaggcatttgcaacaggttatggattaaaaagtcacgtcagaactcatacaggagaaaagccatatcggtgttcggaagataattgtactaaatctttcaaaacttcaggagatctacagaaacacatcagaactcatacaggagaaaggccctttaagtgtcccttcgaaggctgcggtcggtcctttacaacatcaaatatcagaaaagtgcacgttaggacacacacaggagaaagaccttattactgcacagagccaggatgtgggagggcatttgccagtgcaacaaattataaaaaccatgtgaggatacacacaggagaaaagccatatgtttgtacagttcctgggtgtgacaaaaggtttacagaatattccagtttgtacaaacatcatgttgtccacactcattccaaaccttacaactgtaaccactgtgggaagacatacaagcagatctccacgctggccatgcacaaacggacagcccacaacgacactgagcccatcgaggaggagcaggaagccttctttgagccgcccccaggtcaaggtgaagatgttcttaaagggtcccagattacgtatgttacaggtgtagaaggggacgacgttgtttctacacaagtagccacagtaacccaatctggactgagtcaacaagttacactcatatcccaggatgggactcagcatgtcaacatatctcaagctgacatgcaggccattggcaacaccatcacaatggtaacgcaggatggcacgcccatcacagtccccgcccatgatgcagtcatctcctcagcaggaacgcactctgttgctatggttactgctgagggtacagaaggggaacaggttgcaattgtagctcaagacttggcagcattccatactgcctcatcagaaatggggcaccagcagcatagccatcacttagtaaccacagaaaccagacctctgaccttagtagcaacatccaatggcacccagattgcagttcagcttggagaacagccatctctggaagaagccatcagaatagcgtctagaatccaacaaggagaaacgccagggttggatgattaatcctcagaacaatggagcaataaagcagaaggagtctttcatcttctggcagcagaaatccatgaagcccgggcccaggaaaattagaagttttccattcctgatacactgtacacatttttatgcgagagtggagaacattttattcttgacacttttgtgtatataacccttggaatagattctcagagtgattcattgtgtacaaggaagtatgaaattagggcaatacagtaaattttcatgttactcttttatcagatcacaaactcctagagtctacatgcaagactagtaaagtcttatggagtcttatgatggatttttaacttcccgtggaaaaaaaaataaaggctgtatctaaaatatcaaaggttctatatgtcacacaatcgtaattccaaaagccattatggataataaagggtgtaaagccttcagatatttccccagttagtagagtgtctgcggtttttgttctactatatgcttgtccatttttatttgtatctcatggtttgcagactgtttgaataatttatagtttcccatccctgttaaaaaccagctcttcaagctgaaatgctaattatattggcattacattgaattatgtacaaaattataaaatttggttatttaaaattaaaaagttaaatccagtggttttgttaaagattttgcttagtattcaatttttattactgttttttaaaaataatgaatcatcaaagtttaaccacaggctggtgcccgggataacagtactgtaattggaaatggctttactctgaaaattaggttagtgggttggtgtaaattatttatttttgcttatgtacttttgttttaaagcttatttaccccaaagtttattattaattttgaatacagcaatttttaaaatgttaaaaaaaaa

SEQ ID NO: 272249 - DNA, 2947 bp, Artificial Sequence
  derived and/or modified sequence
gggcgggcctcagacacactatgcgggttgcggggcctgggggccggacggctgtttcctgtcctggtgcatggtggtcggacgaaggaattgttggaaaattttctcggaggtagaagatgttgttagcccaaataaatcgagattctcagggaatgacagagtttcctggaggagggatggaggcgcaacatgttacgctgtgcttgacagaggcagtcaccgtggcagatggtgacaacttagaaaatatggaaggcgtaagcttgcaagcagtaacacttgcagatggttctactgcttacatacaacacaattctaaagatgcaaaactcatagatggccaggtcattcagttggaagatggttctgcggcctatgttcaacatgtacccatacctaaaagtacaggggacagtttgcgtctagaggatggtcaagcagtacagttagaagatggtaccacagcatttattcaccacacctccaaagatagttatgaccagagtgcattacaggcggttcagctggaagatggtaccacagcttatatccaccatgcagtgcaagtcccgcagtctgacaccatcttggcaattcaggctgatgggacagtggcaggtctgcacactggggatgctacaattgaccctgacaccatcagtgctttggaacagtatgcagcaaaggtgtccattgatggaagtgaaagtgtagcaggtactggaatgattggagaaaatgagcaagagaaaaaaatgcagattgttttacaaggacatgctacaagagtaactgctaaatctcaacagagtggagagaaggcatttcgatgtgaatatgatggatgtggaaaattatatacaacagctcatcatctcaaggtccatgagaggtcacacacaggagatcggccttatcagtgtgagcatgcaggctgtgggaaggcatttgcaacaggttatggattaaaaagtcacgtcagaactcatacaggagaaaagccatatcggtgttcggaagataattgtactaaatctttcaaaacttcaggagatctacagaaacacatcagaactcatacaggagaaaggccctttaagtgtcccttcgaaggctgcggtcggtcctttacaacatcaaatatcagaaaagtgcacgttaggacacacacaggagaaagaccttattactgcacagagccaggatgtgggagggcatttgccagtgcaacaaattataaaaaccatgtgaggatacacacaggagaaaagccatatgtttgtacagttcctgggtgtgacaaaaggtttacagaatattccagtttgtacaaacatcatgttgtccacactcattccaaaccttacaactgtaaccactgtgggaagacatacaagcagatctccacgctggccatgcacaaacggacagcccacaacgacactgagcccatcgaggaggagcaggaagccttctttgagccgcccccaggtcaaggtgaagatgttcttaaagggtcccagattacgtatgttacaggtgtagaaggggacgacgttgtttctacacaagtagccacagtaacccaatctggactgagtcaacaagttacactcatatcccaggatgggactcagcatgtcaacatatctcaagctgacatgcaggccattggcaacaccatcacaatggtaacgcaggatggcacgcccatcacagtccccgcccatgatgcagtcatctcctcagcaggaacgcactctgttgctatggttactgctgagggtacagaaggggaacaggttgcaattgtagctcaagacttggcagcattccatactgcctcatcagaaatggggcaccagcagcatagccatcacttagtaaccacagaaaccagacctctgaccttagtagcaacatccaatggcacccagattgcagttcagcttggagaacagccatctctggaagaagccatcagaatagcgtctagaatccaacaaggagaaacgccagggttggatgattaatcctcagaacaatggagcaataaagcagaaggagtctttcatcttctggcagcagaaatccatgaagcccgggcccaggaaaattagaagttttccattcctgatacactgtacacatttttatgcgagagtggagaacattttattcttgacacttttgtgtatataacccttggaatagattctcagagtgattcattgtgtacaaggaagtatgaaattagggcaatacagtaaattttcatgttactcttttatcagatcacaaactcctagagtctacatgcaagactagtaaagtcttatggagtcttatgatggatttttaacttcccgtggaaaaaaaaataaaggctgtatctaaaatatcaaaggttctatatgtcacacaatcgtaattccaaaagccattatggataataaagggtgtaaagccttcagatatttccccagttagtagagtgtctgcggtttttgttctactatatgcttgtccatttttatttgtatctcatggtttgcagactgtttgaataatttatagtttcccatccctgttaaaaaccagctcttcaagctgaaatgctaattatattggcattacattgaattatgtacaaaattataaaatttggttatttaaaattaaaaagttaaatccagtggttttgttaaagattttgcttagtattcaatttttattactgttttttaaaaataatgaatcatcaaagtttaaccacaggctggtgcccgggataacagtactgtaattggaaatggctttactctgaaaattaggttagtgggttggtgtaaattatttatttttgcttatgtacttttgttttaaagcttatttaccccaaagtttattattaattttgaatacagcaatttttaaaatgtta

SEQ ID NO: 272250 - DNA, 554 bp, Artificial Sequence
  derived and/or modified sequence
gttggaaaattttctcggagaaacgtggcatggctgcattgaactgtgcctctactacatggttttatttttaaaataaaaaaccactccaccctcatagcatagttccatttctggaaggtagaagatgttgttagcccaaataaatcgagattctcagggaatgacagagtttcctggaggagggatggaggcgcaacatgttacgctgtgcttgacagaggcagtcaccgtggcagatggtgacaacttagaaaatatggaaggcgtaagcttgcaagcagtaacacttgcagatggttctactgcttacatacaacacaattctaaagatgcaaaactcatagatggccaggtcattcagttggaagatggttctgcggcctatgttcaacatgtacccatacctaaaagtagggacagtttgcgtctagaggatggtcaagcagtacagttagaagatggtaccacagcatttattcaccacacctccaaagatagttatgaccagagtgcattacaggcggttcagctggaagatggtaccacagctt

SEQ ID NO: 272251 - DNA, 255 bp, Artificial Sequence
  derived and/or modified sequence
atgctgctggcccagatcaacagagacagccagggcatgaccgagttccccggcggcggcatggaggcccagcacgtgaccctgtgcctgaccgaggccgtgaccgtggccgacggcgacaacctggagaacatggagggcgtgagcctgcaggccgtgaccctggccgacggcagcaccgcctacatccagcacaacagcaaggacgccaagctgatcgacggccaggtgatccagctggaggacggcagctag

SEQ ID NO: 272252 - DNA, 222 bp, Artificial Sequence
  derived and/or modified sequence
atgctgctggcccagatcaacagagacagccagggcatgaccgagttccccggcggcggcatggaggcccagcacgtgaccctgtgcctgaccgaggccgtgaccgtggccgacggcgacaacctggagaacatggagggcgtgagcctgcaggccgtgaccctggccgacggcagcaccgcctacatccagcacaacagcaaggacgccaagctgatctag

SEQ ID NO: 272253 - DNA, 573 bp, Artificial Sequence
  derived and/or modified sequence
atgctgctggcccagatcaacagagacagccagggcatgaccgagttccccggcggcggcatggaggcccagcacgtgaccctgtgcctgaccgaggccgtgaccgtggccgacggcgacaacctggagaacatggagggcgtgagcctgcaggccgtgaccctggccgacggcagcaccgcctacatccagcacaacagcaaggacgccaagctgatcgacggccaggtgatccagctggaggacggcagcgccgcctacgtgcagcacgtgcccatccccaagagcaccggcgacagcctgagactggaggacggccaggccgtgcagctggaggacggcaccaccgccttcatccaccacaccagcaaggacagctacgaccagagcgccctgcaggccgtgcagctggaggacggcaccaccgcctacatccaccacgccgtgcaggtgccccagagcgacaccatcctggccatccaggccgacggcaccgtggccggcctgcacaccggcgacgccaccatcgaccccgacaccatcagcgccctggagcagtacgccgccaagtag

SEQ ID NO: 272254 - DNA, 411 bp, Artificial Sequence
  derived and/or modified sequence
atgctgctggcccagatcaacagagacagccagggcatgaccgagttccccggcggcggcatggaggcccagcacgtgaccctgtgcctgaccgaggccgtgaccgtggccgacggcgacaacctggagaacatggagggcgtgagcctgcaggccgtgaccctggccgacggcagcaccgcctacatccagcacaacagcaaggacgccaagctgatcgacggccaggtgatccagctggaggacggcagcgccgcctacgtgcagcacgtgcccatccccaagagcaccggcgacagcctgagactggaggacggccaggccgtgcagctggaggacggcaccaccgccttcatccaccacaccagcaaggacagctacgaccagagcgccctgcaggccgtgcagtag

SEQ ID NO: 272255 - DNA, 528 bp, Artificial Sequence
  derived and/or modified sequence
atgctgctggcccagatcaacagagacagccagggcatgaccgagttccccggcggcggcatggaggcccagcacgtgaccctgtgcctgaccgaggccgtgaccgtggccgacggcgacaacctggagaacatggagggcgtgagcctgcaggccgtgaccctggccgacggcagcaccgcctacatccagcacaacagcaaggacgccaagctgatcgacggccaggtgatccagctggaggacggcagcgccgcctacgtgcagcacgtgcccatccccaagagcaccggcgacagcctgagactggaggacggccaggccgtgcagctggaggacggcaccaccgccttcatccaccacaccagcaaggacagctacgaccagagcgccctgcaggccgtgcagctggaggacggcaccaccgcctacatccaccacgccgtgcaggtgccccagagcgacaccatcctggccatccaggccgacggcaccgtggccggcctgcacaccggcgacgccacctag

SEQ ID NO: 272256 - DNA, 255 bp, Artificial Sequence
  derived and/or modified sequence
atgcttctcgcccagatcaatcgcgactctcaggggatgaccgaattcccagggggcgggatggaggcacagcacgttaccctgtgtctcactgaagctgtcaccgtggcagacggcgataacttggaaaatatggagggcgttagcctgcaggctgtgacccttgccgatggttctacagcgtacattcagcacaattccaaagacgcaaagctcatcgacggccaggtgatccagctcgaggatgggagctag

SEQ ID NO: 272257 - DNA, 222 bp, Artificial Sequence
  derived and/or modified sequence
atgctacttgcgcagataaatcgagactcccagggaatgactgagtttcccggcggaggcatggaagcacagcatgttactctgtgcttgaccgaggccgttaccgtggctgatggcgataatcttgagaacatggaaggtgtatcccttcaagcagtgactctcgccgacggaagcaccgcctatattcagcataactcgaaagacgctaaacttatttag

SEQ ID NO: 272258 - DNA, 573 bp, Artificial Sequence
  derived and/or modified sequence
atgctcctcgcacaaattaatcgggattcccaaggcatgactgaattccctgggggtggcatggaagcccagcatgtgactctttgtctcacagaggcagtgaccgtggctgatggggataatcttgagaatatggagggggtgtccctacaggctgtgacactggcagacggatccaccgcctacatccaacataattctaaggacgcaaaactgatcgacgggcaggtgatccagctagaggacggctccgctgcgtacgtgcagcatgtccctatacccaaaagtaccggtgacagcctcagactggaggacggccaagcagtccagttagaggacgggactaccgcatttatacatcatacatccaaggatagttatgatcagtctgcgctgcaagcggtgcagctcgaggacggaaccactgcctatatccatcacgcagttcaggtgcctcagagtgacactatcctggcgattcaggcagatggcactgttgccggactacatacaggagatgcaacaatcgaccctgatacaatctctgccctggagcagtatgcggctaaatag

SEQ ID NO: 272259 - DNA, 411 bp, Artificial Sequence
  derived and/or modified sequence
atgcttttagcccagatcaatagagactcgcaggggatgacggaatttcctgggggtggcatggaggcgcagcacgtgaccctctgtctcaccgaagccgtcaccgttgcggatggcgataatctcgaaaatatggagggagtgtccctccaggccgttaccctcgctgacggcagtacagcctacatccagcacaatagcaaggacgccaagctgatagacggtcaggtgattcagctcgaagacggctcagccgcttatgtccagcacgtgccgatcccaaaatccacaggagatagcctgcgcctggaagatggccaggcggtgcagctcgaggacgggaccaccgcattcatccatcacacatcaaaggattcctacgaccagagcgcactacaggccgtccagtag

SEQ ID NO: 272260 - DNA, 528 bp, Artificial Sequence
  derived and/or modified sequence
atgctcctagcacagattaaccgtgatagccagggcatgacggaattcccggggggcgggatggaggcacagcatgttaccctctgtttaacagaggccgttacagtggctgatggcgacaacttggagaacatggaaggggtcagtctgcaggcagttaccctggcagatggatctactgcctatattcagcacaactccaaagatgccaaactgatagatgggcaggttatccagctagaagatggaagcgccgcttatgtgcagcacgtccccattcccaagtctaccggagattctctgaggctcgaggacggtcaggccgttcaactagaggatggcactacagcatttattcaccacactagcaaggattcctatgaccagtcggccctgcaggccgtgcagttggaggatggaactacagcgtacattcaccacgccgtacaagtgcctcaaagcgacacaatactagcaatacaagcagatggcaccgtggctggcctgcatactggcgatgccacatag

SEQ ID NO: 272261 - DNA, 255 bp, Artificial Sequence
  derived and/or modified sequence
atgctgctggcccagatcaacagagacagccagggcatgacagagttccctgggggcggcatggaggcccagcacgtgaccctgtgcctgacagaagctgtgacagtggctgatggagacaacctggagaacatggagggcgtgtccctgcaggccgtgaccctggctgatggcagcacagcctacatccagcacaacagcaaggatgccaagctgattgatggccaggtgatccagctggaggatggcagctag

SEQ ID NO: 272262 - DNA, 222 bp, Artificial Sequence
  derived and/or modified sequence
atgctgctggcccagatcaacagagacagccagggcatgacagagttccctgggggcggcatggaggcccagcacgtgaccctgtgcctgacagaagctgtgacagtggctgatggagacaacctggagaacatggagggcgtgtccctgcaggccgtgaccctggctgatggcagcacagcctacatccagcacaacagcaaggatgccaagctgatctag

SEQ ID NO: 272263 - DNA, 573 bp, Artificial Sequence
  derived and/or modified sequence
atgctgctggcccagatcaacagagacagccagggcatgacagagttccctgggggcggcatggaggcccagcacgtgaccctgtgcctgacagaagctgtgacagtggctgatggagacaacctggagaacatggagggcgtgtccctgcaggccgtgaccctggctgatggcagcacagcctacatccagcacaacagcaaggatgccaagctgattgatggccaggtgatccagctggaggatggcagcgctgcctacgtgcagcacgtgcccatccccaagagcactggagacagcctgcggctggaggatggccaggccgtgcagctggaggatggcaccacagccttcatccaccacaccagcaaggacagctatgaccagagcgccctgcaggccgtgcagctggaggatggcaccacagcctacatccaccacgctgtgcaggtgccccagagcgacaccatcctggccatccaggctgatggcaccgtggccggcctgcacactggagatgccaccatcgaccctgacaccatcagcgccctggagcagtatgctgccaagtag

SEQ ID NO: 272264 - DNA, 411 bp, Artificial Sequence
  derived and/or modified sequence
atgctgctggcccagatcaacagagacagccagggcatgacagagttccctgggggcggcatggaggcccagcacgtgaccctgtgcctgacagaagctgtgacagtggctgatggagacaacctggagaacatggagggcgtgtccctgcaggccgtgaccctggctgatggcagcacagcctacatccagcacaacagcaaggatgccaagctgattgatggccaggtgatccagctggaggatggcagcgctgcctacgtgcagcacgtgcccatccccaagagcactggagacagcctgcggctggaggatggccaggccgtgcagctggaggatggcaccacagccttcatccaccacaccagcaaggacagctatgaccagagcgccctgcaggccgtgcagtag

SEQ ID NO: 272265 - DNA, 528 bp, Artificial Sequence
  derived and/or modified sequence
atgctgctggcccagatcaacagagacagccagggcatgacagagttccctgggggcggcatggaggcccagcacgtgaccctgtgcctgacagaagctgtgacagtggctgatggagacaacctggagaacatggagggcgtgtccctgcaggccgtgaccctggctgatggcagcacagcctacatccagcacaacagcaaggatgccaagctgattgatggccaggtgatccagctggaggatggcagcgctgcctacgtgcagcacgtgcccatccccaagagcactggagacagcctgcggctggaggatggccaggccgtgcagctggaggatggcaccacagccttcatccaccacaccagcaaggacagctatgaccagagcgccctgcaggccgtgcagctggaggatggcaccacagcctacatccaccacgctgtgcaggtgccccagagcgacaccatcctggccatccaggctgatggcaccgtggccggcctgcacactggagatgccacctag

SEQ ID NO: 272266 - DNA, 255 bp, Artificial Sequence
  derived and/or modified sequence
atgctgctggcccagatcaaccgggacagccagggcatgaccgagtttcctggcggcggcatggaagcccagcacgtgactttgtgcctcaccgaagccgtcactgtcgctgacggagacaatctggagaacatggagggcgtgtcacttcaggccgttaccctggctgacggctcgacggcctacatacagcacaattcaaaggacgctaagctcattgatggacaggtgatccagctggaggatggctcttag

SEQ ID NO: 272267 - DNA, 222 bp, Artificial Sequence
  derived and/or modified sequence
atgctgctggcccagatcaaccgggacagccagggcatgaccgagttcccaggcggcggaatggaggcccagcacgtcacactgtgcctcactgaagccgtgaccgttgcggatggagataatctggaaaatatggagggcgtaagtctgcaggcggtaactctggccgacggtagcacagcatatatccagcataattcaaaggatgctaaactcatctag

SEQ ID NO: 272268 - DNA, 573 bp, Artificial Sequence
  derived and/or modified sequence
atgctgctggcccagatcaaccgggacagccagggcatgaccgagtttccgggtggcggcatggaagcccaacacgtcactctgtgcttaactgaggccgtgactgtggcagatggagataacctcgagaatatggagggagtctcactacaagccgttaccctggcggatggatccacagcttatatccaacacaattcgaaggatgccaagttgatcgacggacaggttatccagctggaggacggcagtgcggcgtatgttcaacacgttcccatccctaagtctactggggattcgctgagactagaagatggtcaggctgtgcagctggaagacgggaccacagcgtttatccaccacacctccaaagattcctacgaccagtccgctctccaagccgtgcagctcgaggatggcactacggcatacatccaccatgcggtccaggtacctcaatccgatacaatcttagctatccaggctgatggaaccgttgctggtctgcataccggagatgcgaccatcgatcctgacaccatttctgccctggaacagtatgccgctaagtag

SEQ ID NO: 272269 - DNA, 411 bp, Artificial Sequence
  derived and/or modified sequence
atgctgctggcccagatcaaccgggacagccagggcatgaccgagttccctggcggtgggatggaagcacagcatgtcactctgtgtctgaccgaagccgtaacagtcgctgatggtgataatctggaaaatatggagggggtttcccttcaggccgttacactggccgacggttccacggcttatatccagcacaacagtaaggatgccaagctcatcgatgggcaggttatacagctagaagatggctcagccgcctatgtgcagcacgtgcctatccccaagtctacaggtgactccctgcgtcttgaagacggtcaggcagtgcagctggaggacggaaccacagcctttatacatcataccagcaaggactcctatgatcagagtgcactgcaggccgttcagtag

SEQ ID NO: 272270 - DNA, 528 bp, Artificial Sequence
  derived and/or modified sequence
atgctgctggcccagatcaaccgggacagccagggcatgaccgagttccccggcggcggaatggaggcccaacacgttactctttgcttaaccgaagccgttactgtcgcagatggtgataatttagaaaatatggaaggagtgagtctgcaagctgtgaccttagccgacgggtctactgcatatattcaacataacagcaaggacgctaaactcatagacggccaggttatccaactggaggacggctccgccgcatacgtgcaacatgtcccgatccctaagagtacaggggattctctgagacttgaggatggtcaggcagtgcagctcgaagatggtactacagcctttatccaccacacctccaaggactcatatgatcaatccgccctgcaggctgtgcaactggaggacggaacaacagcttacatccatcacgccgtgcaggtgccacaatctgatacaatcctagcgatccaagccgacggcaccgtagccggattacacaccggagatgccacctag

SEQ ID NO: 272271 - DNA, 255 bp, Artificial Sequence
  derived and/or modified sequence
atgttgttagctcagattaatagagacagtcagggtatgaccgagttcccagggggtggcatggaggcacaacatgtgaccctctgcctgaccgaggcagtgacagttgctgatggagacaacctggaaaatatggagggggttagccttcaggccgtgaccttggccgacggtagcacggcatacattcagcataacagtaaggacgcaaagctgatcgatggacaggtcattcagttggaagacgggagttag

SEQ ID NO: 272272 - DNA, 222 bp, Artificial Sequence
  derived and/or modified sequence
atgctgctggcccagattaatcgtgatagccagggcatgacggagtttcccggtggtggcatggaggcacagcatgtaaccctgtgcctcactgaggcagtgacagtggcggacggggacaatctggaaaacatggagggagtgtctctgcaagctgtcaccttggcagatggctcaaccgcatacatccagcacaacagcaaggacgccaaactgatctag

SEQ ID NO: 272273 - DNA, 573 bp, Artificial Sequence
  derived and/or modified sequence
atgttactggctcagatcaatcgggattcacagggaatgactgagtttccgggtggaggcatggaggcccaacacgtcactctgtgcttgaccgaggctgtgacagtggctgatggggacaacctcgaaaatatggagggtgtcagcctccaggctgttaccctcgctgacggatccaccgcatacatccagcataactccaaggatgccaaactcatcgacggccaggtgatccagctagaggacggatccgcagcatacgtgcagcacgtccctatacccaagagtactggggatagcttgaggctggaggacgggcaggctgtccagctggaggacggaacgaccgcgttcattcaccatacatccaaggattcttacgaccaatccgccctccaggctgtccagctggaggacggtaccacggcctacatccaccacgctgtgcaagtgccccagtctgacaccatcctcgccatccaagctgatgggacagtggcaggcctccacaccggcgacgcgaccattgatcccgacacgatcagcgctctggaacaatacgccgcaaaatag

SEQ ID NO: 272274 - DNA, 411 bp, Artificial Sequence
  derived and/or modified sequence
atgctgctcgcccagatcaacagggattcccagggtatgaccgagttccctggtggcggaatggaagcacagcatgtaacgctgtgcctaaccgaagcagtcacagtcgccgatggagataacctggaaaatatggagggcgtgagcctccaggccgtgactctcgctgacggctccacagcatacattcagcacaattctaaagacgccaagctgatcgacggccaggtcatccagctggaggatggctccgccgcttacgtgcagcacgtccccatccctaagtccacgggcgattccttgcggctggaagatggacaagccgtgcaactggaggacggcacgaccgccttcattcaccataccagtaaggattcttatgatcagagcgcacttcaagcagtccagtag

SEQ ID NO: 272275 - DNA, 528 bp, Artificial Sequence
  derived and/or modified sequence
atgctgttggcccagataaaccgggatagtcaaggaatgacggaattccccggtggcggaatggaggcgcagcatgtcacactctgtcttacagaagctgtgaccgtggcagatggcgacaatctcgaaaacatggaaggagtaagcctgcaggccgtgacccttgctgatggctccactgcatatattcaacataattccaaggatgcaaagctgatagacggccaagttatccagctggaagacggatcagcagcttacgtgcagcacgtgccaattcccaaaagcaccggtgactccctacgcctcgaagacggacaagcagtacagctcgaagatggtacgactgcattcatccaccatactagcaaagatagctacgaccagtcagcattacaagcagttcagctcgaggatggcacaacagcctacatccaccatgcggtccaagtcccccaatccgataccattctcgccatccaggccgatggcacagtggcaggactgcataccggagacgctacctag

SEQ ID NO: 272276 - DNA, 551 bp, Artificial Sequence
  derived and/or modified sequence
aaaaaaaggttactgaggtctaacatcggatattagaaatttacaattttatcctcccttttctccagttttggccaaaagagtgaacaaattcttataagtctctttgaaacgtattattgtggaacgcgaactagtttttattccttccccttttgctttggacatttgttttttccacataataacgaagttaaaaagaggaaagaagaataccattgccagcccattatttgtttaaaatcagcgtcagcctttgctttggaagtgtctaaatcagctgatataatcaagtagaagatgttgttagcccaaataaatcgagattctcagggaatgacagagtttcctggaggagggatggaggcgcaacatgttacgctgtgcttgacagaggcagtcaccgtggcagatggtgacaacttagaaaatatggaaggcgtaagcttgcaagcagtaacacttgcagatggttctactgcttacatacaacacaattctaaagatgcaaaactcatagatggccaggtcattcagttggaagatggttc

SEQ ID NO: 272277 - DNA, 265 bp, Artificial Sequence
  derived and/or modified sequence
cagaagatacttgtgttttcctgtagttgacaaaaaacggtagaagatgttgttagcccaaataaatcgagattctcagggaatgacagagtttcctggaggagggatggaggcgcaacatgttacgctgtgcttgacagaggcagtcaccgtggcagatggtgacaacttagaaaatatggaaggcgtaagcttgcaagcagtaacacttgcagatggttctactgcttacatacaacacaattctaaagatgcaaaactcata

SEQ ID NO: 272278 - DNA, 644 bp, Artificial Sequence
  derived and/or modified sequence
ggccggacggctgtttcctgtcctggtgcatggtggtcggacgaaggaattgttggaaaattttctcggagaagatgttgttagcccaaataaatcgagattctcagggaatgacagagtttcctggaggagggatggaggcgcaacatgttacgctgtgcttgacagaggcagtcaccgtggcagatggtgacaacttagaaaatatggaaggcgtaagcttgcaagcagtaacacttgcagatggttctactgcttacatacaacacaattctaaagatgcaaaactcatagatggccaggtcattcagttggaagatggttctgcggcctatgttcaacatgtacccatacctaaaagtacaggggacagtttgcgtctagaggatggtcaagcagtacagttagaagatggtaccacagcatttattcaccacacctccaaagatagttatgaccagagtgcattacaggcggttcagctggaagatggtaccacagcttatatccaccatgcagtgcaagtcccgcagtctgacaccatcttggcaattcaggctgatgggacagtggcaggtctgcacactggggatgctacaattgaccctgacaccatcagtgctttggaacagtatgcagcaaag

SEQ ID NO: 272279 - DNA, 555 bp, Artificial Sequence
  derived and/or modified sequence
accgcatggcgatgcccgggagactggagaagctcaggcaggcttggaagccaatccccggcatacagcagctctcgggaatgcagagccctagagcaagaccaagggcctcggccgacactgagagcctccagggagaggtagaagatgttgttagcccaaataaatcgagattctcagggaatgacagagtttcctggaggagggatggaggcgcaacatgttacgctgtgcttgacagaggcagtcaccgtggcagatggtgacaacttagaaaatatggaaggcgtaagcttgcaagcagtaacacttgcagatggttctactgcttacatacaacacaattctaaagatgcaaaactcatagatggccaggtcattcagttggaagatggttctgcggcctatgttcaacatgtacccatacctaaaagtacaggggacagtttgcgtctagaggatggtcaagcagtacagttagaagatggtaccacagcatttattcaccacacctccaaagatagttatgaccagagtgcattacaggcggttcag

SEQ ID NO: 272280 - DNA, 575 bp, Artificial Sequence
  derived and/or modified sequence
cctggtgcatggtggtcggacgaaggaattgttggaaaattttctcggagatgttgttagcccaaataaatcgagattctcagggaatgacagagtttcctggaggagggatggaggcgcaacatgttacgctgtgcttgacagaggcagtcaccgtggcagatggtgacaacttagaaaatatggaaggcgtaagcttgcaagcagtaacacttgcagatggttctactgcttacatacaacacaattctaaagatgcaaaactcatagatggccaggtcattcagttggaagatggttctgcggcctatgttcaacatgtacccatacctaaaagtacaggggacagtttgcgtctagaggatggtcaagcagtacagttagaagatggtaccacagcatttattcaccacacctccaaagatagttatgaccagagtgcattacaggcggttcagctggaagatggtaccacagcttatatccaccatgcagtgcaagtcccgcagtctgacaccatcttggcaattcaggctgatgggacagtggcaggtctgcacactggggatgctaca

SEQ ID NO: 272281 - DNA, 1745 bp, Artificial Sequence
  derived and/or modified sequence
tcccgcaccaggactctgcgcccgccagctccgcagggctccacctccctcgccgggactggtgaccctgcgaccccgcgacccctgcgcgtccagactactgcagctgcggacaggcatgttgttgggactggcggccatggagctgaaggtgtgggtggatggcatccagcgtgtggtctgtggggtctcagagcagaccacctgccaggaagtggtcatcgcactagcccaagcaataggccagactggccgctttgtgcttgtgcagcggcttcgggagaaggagcggcagttgctgccacaagagtgtccagtgggcgcccaggccacctgcggacagtttgccagcgatgtccagtttgtcctgaggcgcacagggcccagcctagctgggaggccctcctcagacagctgtccacccccggaacgctgcctaattcgtgccagcctccctgtaaagccacgggctgcgctgggctgtgagccccgcaaaacactgacccccgagccagcccccagcctctcacgccctgggcctgcggcccctgtgacacccacaccaggctgctgcacagacctgcggggcctggagctcagggtgcagaggaatgctgaggagctgggccatgaggccttctgggagcaagagctgcgccgggagcaggcccgggagcgagagggacaggcacgcctgcaggcactaagtgcggccactgctgagcatgccgcccggctgcaggccctggacgctcaggcccgtgccctggaggctgagctgcagctggcagcggaggcccctgggcccccctcacctatggcatctgccactgagcgcctgcaccaggacctggctgttcaggagcggcagagtgcggaggtgcagggcagcctggctctggtgagccgggccctggaggcagcagagcgagccttgcaggctcaggctcaggagctggaggagctgaaccgagagctccgtcagtgcaacctgcagcagttcatccagcagaccggggctgcgctgccaccgcccccacggcctgacaggggccctcctggcactcaggtcggagtggttctggggggaggctgggaggtgaggacctggcccagccccactccaagctgacttcccaacccacagggccctctgcctccagccagagaggagtccctcctgggcgctccctctgagtcccatgctggtgcccagcctaggccccgagggtatgtctgtgccccacctccccctggggcaccgggccctcctgtggctgcagccacctcagcctgtgtcctcccgcagtggcccccatgacgcagaactcctggaggtagcagcagctcctgccccagagtggtgtcctctggcagcccagccccaggctctgtgacagcctagtgagggctgcaagaccatcctgcccggaccacagaaggagagttggcggtcacagagggctcctctgccaggcagtgggaagccctgggtttggcctcaggagctgggggtgcagtgggggactgccctagtccttgccaggtcgccagcaccctggagaagcatggggcgtagccagctcggaacttgccaggccccaaaggccacgactgcctgttggggacaggagatgcatggacagtgtgctcaagctgtgggcatgtgcttgcctgcgggagaggtccttcactgtgtgtacacagcaagagcatgtgtgtgccacttcccctaccccaacgtg

SEQ ID NO: 272282 - DNA, 1554 bp, Artificial Sequence
  derived and/or modified sequence
ggggagggggcagtgtcctccgagccaggacaggcatgttgttgggactggcggccatggagctgaaggtgtgggtggatggcatccagcgtgtggtctgtggggtctcagagcagaccacctgccaggaagtggtcatcgcactagcccaagcaataggccagactggccgctttgtgcttgtgcagcggcttcgggagaaggagcggcagttgctgccacaagagtgtccagtgggcgcccaggccacctgcggacagtttgccagcgatgtccagtttgtcctgaggcgcacagggcccagcctagctgggaggccctcctcagacagctgtccacccccggaacgctgcctaattcgtgccagcctccctgtaaagccacgggctgcgctgggctgtgagccccgcaaaacactgacccccgagccagcccccagcctctcacgccctgggcctgcggcccctgtgacacccacaccaggctgctgcacagacctgcggggcctggagctcagggtgcagaggaatgctgaggagctgggccatgaggccttctgggagcaagagctgcgccgggagcaggcccgggagcgagagggacaggcacgcctgcaggcactaagtgcggccactgctgagcatgccgcccggctgcaggccctggacgctcaggcccgtgccctggaggctgagctgcagctggcagcggaggcccctgggcccccctcacctatggcatctgccactgagcgcctgcaccaggacctggctgttcaggagcggcagagtgcggaggtgcagggcagcctggctctggtgagccgggccctggaggcagcagagcgagccttgcaggctcaggctcaggagctggaggagctgaaccgagagctccgtcagtgcaacctgcagcagttcatccagcagaccggggctgcgctgccaccgcccccacggcctgacaggggccctcctggcactcagggccctctgcctccagccagagaggagtccctcctgggcgctccctctgagtcccatgctggtgcccagcctaggccccgaggtggcccccatgacgcagaactcctggaggtagcagcagctcctgccccagagtggtgtcctctggcagcccagccccaggctctgtgacagcctagtgagggctgcaagaccatcctgcccggaccacagaaggagagttggcggtcacagagggctcctctgccaggcagtgggaagccctgggtttggcctcaggagctgggggtgcagtgggggactgccctagtccttgccaggtcgccagcaccctggagaagcatggggcgtagccagctcggaacttgccaggccccaaaggccacgactgcctgttggggacaggagatgcatggacagtgtgctcaagctgtgggcatgtgcttgcctgcgggagaggtccttcactgtgtgtacacagcaagagcatgtgtgtgccacttcccctaccccaacgtgaaaacctcaataaactgcccgaagcagcttgaaaaaaaaaaaaaaaaaa

SEQ ID NO: 272283 - DNA, 1164 bp, Artificial Sequence
  derived and/or modified sequence
cgccggagcgggtctccaggctggcgagcgcccaggacaggcatgttgttgggactggcggccatggagctgaaggtgtgggtggatggcatccagcgtgtggtctgtggggtctcagagcagaccacctgccaggaagtggtcatcgcactagcccaagcaataggccagactggccgctttgtgcttgtgcagcggcttcgggagaaggagcggcagttgctgccacaagagtgtccagtgggcgcccaggccacctgcggacagtttgccagcgatgtccagtttgtcctgaggcgcacagggcccagcctagctgggaggccctcctcagacagctgtccacccccggaacgctgcctaattcgtgccagcctccctgtaaagccacgggctgcgctgggctgtgagccccgcaaaacactgacccccgagccagcccccagcctctcacgccctgggcctgcggcccctgtgacacccacaccaggctgctgcacagacctgcggggcctggagctcagggtgcagaggaatgctgaggagctgggccatgaggccttctgggagcaagagctgcgccgggagcaggcccgggagcgagagggacaggcacgcctgcaggcactaagtgcggccactgctgagcatgccgcccggctgcaggccctggacgctcaggcccgtgccctggaggctgagctgcagctggcagcggaggcccctgggcccccctcacctatggcatctgccactgagcgcctgcaccaggacctggctgttcaggagcggcagagtgcggaggtgcagggcagcctggctctggtgagccgggccctggaggcagcagagcgagccttgcaggctcaggctcaggagctggaggagctgaaccgagagctccgtcagtgcaacctgcagcagttcatccagcagaccggggctgcgctgccaccgcccccacggcctgacaggggccctcctggcactcagggccctctgcctccagccagagaggagtccctcctgggcgctccctctgagtcccatgctggtgcccagcctaggccccgaggtggcccccatgacgcagaactcctggaggtagcagcagctcctgccccagagtggtgtcctctggcagcccagccccaggctctgtga

SEQ ID NO: 272284 - DNA, 1928 bp, Artificial Sequence
  derived and/or modified sequence
ccggtacttgggagcgcggggcgcgcctcgagccggccggacgccgactccaactggggagagttttccgcgatgcccggacggagagcgggggcggcgccgcacctgcgcccgccctgcggaacggggacgccctggctcccgccaggctggggtcgcggcgcgggcttcggtgcccgcggcggggaccgggactttcggggcgagcgcagcgattaggcggcagcggcggggctccccgggctggcgggggctgctcagacccggagtctgctccatctgcagggtcgaggtctgggttgcgaccccgagcgcctctgcggcctgagcaggtcggggtggggcgttcccatgccggcggccgcggggcctggcgtgcgggcgcctccgcgccgcccggggagggggcagtgtcctccgagccaggacaggcatgttgttgggactggcggccatggagctgaaggtgtgggtggatggcatccagcgtgtggtctgtggggtctcagagcagaccacctgccaggaagtggtcatcgcactagcccaagcaataggccagactggccgctttgtgcttgtgcagcggcttcgggagaaggagcggcagttgctgccacaagagtgtccagtgggcgcccaggccacctgcggacagtttgccagcgatgtccagtttgtcctgaggcgcacagggcccagcctagctgggaggccctcctcagacagctgtccacccccggaacgctgcctaattcgtgccagcctccctgtaaagccacgggctgcgctgggctgtgagccccgcaaaacactgacccccgagccagcccccagcctctcacgccctgggcctgcggcccctgtgacacccacaccaggctgctgcacagacctgcggggcctggagctcagggtgcagaggaatgctgaggagctgggccatgaggccttctgggagcaagagctgcgccgggagcaggcccgggagcgagagggacaggcacgcctgcaggcactaagtgcggccactgctgagcatgccgcccggctgcaggccctggacgctcaggcccgtgccctggaggctgagctgcagctggcagcggaggcccctgggcccccctcacctatggcatctgccactgagcgcctgcaccaggacctggctgttcaggagcggcagagtgcggaggtgcagggcagcctggctctggtgagccgggccctggaggcagcagagcgagccttgcaggctcaggctcaggagctggaggagctgaaccgagagctccgtcagtgcaacctgcagcagttcatccagcagaccggggctgcgctgccaccgcccccacggcctgacaggggccctcctggcactcagggccctctgcctccagccagagaggagtccctcctgggcgctccctctgagtcccatgctggtgcccagcctaggccccgaggtggcccccatgacgcagaactcctggaggtagcagcagctcctgccccagagtggtgtcctctggcagcccagccccaggctctgtgacagcctagtgagggctgcaagaccatcctgcccggaccacagaaggagagttggcggtcacagagggctcctctgccaggcagtgggaagccctgggtttggcctcaggagctgggggtgcagtgggggactgccctagtccttgccaggtcgccagcaccctggagaagcatggggcgtagccagctcggaacttgccaggccccaaaggccacgactgcctgttggggacaggagatgcatggacagtgtgctcaagctgtgggcatgtgcttgcctgcgggagaggtccttcactgtgtgtacacagcaagagcatgtgtgtgccacttcccctaccccaacgtgaaaacctcaataaactgcccgaagc

SEQ ID NO: 272285 - DNA, 1450 bp, Artificial Sequence
  derived and/or modified sequence
ggggagggggcagtgtcctccgagccaggacaggcatgttgttgggactggcggccatggagctgaaggtgtgggtggatggcatccagcgtgtggtctgtggggtctcagagcagaccacctgccaggaagtggtcatcgcactagcccaagcaataggccagactggccgctttgtgcttgtgcagcggcttcgggagaaggagcggcagttgctgccacaagagtgtccagtgggcgcccaggccacctgcggacagtttgccagcgatgtccagtttgtcctgaggcgcacagggcccagcctagctgggaggccctcctcagacagctgtccacccccggaacgctgcctaattcgtgccagcctccctgtaaagccacgggctgcgctgggctgtgagccccgcaaaacactgacccccgagccagcccccagcctctcacgccctgggcctgcggcccctgtgacacccacaccaggctgctgcacagacctgcggggcctggagctcagggtgcagaggaatgctgaggagctgggccatgaggccttctgggagcaagagctgcgccgggagcaggcccgggagcgagagggacaggcacgcctgcaggcactaagtgcggccactgctgagcatgccgcccggctgcaggccctggacgctcaggcccgtgccctggaggctgagctgcagctggcagcggaggcccctgggcccccctcacctatggcatctgccactgagcgcctgcaccaggacctggctgttcaggagcggcagagtgcggaggtgcagggcagcctggctctggtgagccgggccctggaggcagcagagcgagccttgcaggctcaggctcaggagctggaggagctgaaccgagagctccgtcagtgcaacctgcagcagttcatccagcagaccggggctgcgctgccaccgcccccacggcctgacaggggccctcctggcactcagtggcccccatgacgcagaactcctggaggtagcagcagctcctgccccagagtggtgtcctctggcagcccagccccaggctctgtgacagcctagtgagggctgcaagaccatcctgcccggaccacagaaggagagttggcggtcacagagggctcctctgccaggcagtgggaagccctgggtttggcctcaggagctgggggtgcagtgggggactgccctagtccttgccaggtcgccagcaccctggagaagcatggggcgtagccagctcggaacttgccaggccccaaaggccacgactgcctgttggggacaggagatgcatggacagtgtgctcaagctgtgggcatgtgcttgcctgcgggagaggtccttcactgtgtgtacacagcaagagcatgtgtgtgccacttcccctaccccaacgtgaaaacctcaataaactgcccgaagcagc

SEQ ID NO: 272286 - protein, 252 aa, Artificial Sequence
  derived and/or modified sequence
MVASMRLAYQELQIDRKKEEKKLQNLEGKKREQAERLGMGLVSRSSVSHSVLSEMQVIEQETPVSAKSSRSQLDLFDDVGTFASGPPKYKDNPFSLGESFGSRWDTDAAWGMDRVEEKEPEVTISSIRPISERATNRREVESRSSGLESSEARQKFAGAKAISSDMFFGREVDAEYEARSRLQQLSGSSAISSSDLFGDMDGAHGAGSVSLGNVLPTADIAQFKQGVKSVAGKMAVLANGVMNSLQDRYGSY

SEQ ID NO: 272287 - DNA, 2362 bp, Artificial Sequence
  derived and/or modified sequence
ctacacgtgatgggcgcccaccgagtgccagcaccgcctcctccagctccgccaagtaggtgggatccactactttgcagaggaggaagccgttcaggcctccctctgtgcactttgcaaaagcctctgcccttccatctcgaatcccttggcgccgatcacacttcctctgcctggaaacctggagccgtctctcgcgagacgtcctccgccctgtagaaggccgtttcggttcttcgtgcgcggtagccgccccacttgcgggattccaaggcctcatcgagtgcgggtatctggctgtggattcgccgccgtcctgctggacgcctggaggctcgaaccccgccgcccccctaccccaggctttactcccaccccggcttccgcccactgtgctgcccttcctcggacctgggctgtcgggagagctggagatgttcacccttcctcaaaaggacttcagggctcccaccacctgtctgggccccacctgcatgcaggacctgggcagtagccatggggaagatctggaaggagaatgctccagaaaactggaccagaagctgccagagctccgtggagtgggtgatcctgccatgatctcctctgatacctcctacctgtcctctagaggaagaatgattaaatggttctgggattcagctgaggagggctacaggacctaccacatggatgagtatgatgaggacaagaaccccagtggcatcattaacttgggcaccagtgagaacaaactctgctttgacctgctgtcctggcggctgagtcagcgcgacatgcagagggtggagccatccctgctgcagtatgctgactggaggggacatctgttcctccgggaggaagtggccaagttcctgtctttctactgcaagagcccagtacccctcagaccagagaatgtggttgtcctgaatggtggtgcctcgctcttctctgctctggccacggtgctgtgtgaggccggggaggctttcctgatccccaccccttactatggcgctatcacacagcacgtgtgtctctatggcaacatccggctggcctatgtctacctggacagtgaggtcactgggctagacacacgccccttccagctcacagtggagaagctggagatggccctgagagaagctcactctgagggtgtgaaggtcaaaggcctcatcctcatcagcccccagaaccctctgggtgatgtatactcccctgaagagctacaggagtacctggtatttgccaagaggcacaggctgcatgtgattgtggatgaggtctacatgctgtccgtgtttgagaagtctgttgggtaccgcagtgtcctaagcctggaaaggctccctgacccccagaggacccatgtgatgtgggcaaccagcaaggacttcgggatgtctgggctccgctttggcacgctgtacacagaaaaccaggatgtggccactgccgtggcttccctctgccgctaccacggcctcagtggcttggtccagtaccagatggcacagctgctccgggaccgtgactggatcaaccaggtgtacctgccggaaaaccatgcccggctcaaggctgcccacacctatgtctcagaagagcttagggcattggggatccccttcttgagtcgtggggctggcttcttcatctgggttgacttgagaaagtacctgcccaagggcacctttgaggaggaaatgctgctctggcgccgctttttggacaacaaggtgctgctgtcctttggcaaggccttcgagtgtaaagagcctggttggtttcgctttgtcttctcagaccaggtccaccggctttgcctggggatgcagagggtccagcaggtgcttgcaggcaaatcccaagtggcagaagacccccgtccctctcagagccaggagccaagtgaccaacgcaggtgagctggtcattgtctcgtggccagagggcccagcagccactgtggacctggggcgttctggggctgcagaagactgactgtggatgtgccatttgccaggaaggtatctaacttggctttgtgcctgaagaactgtttcttgtctttcgctgtagcagtgggaaactccttaagctgtggttcagcctgggccctccctctctcctattaaacaaaactaggagagtccatatgtctccattgtgagttatttagaatggaggagtcgtgactgcttctaaccagagcctcagcccccctgaggatgtgaaaagaaaacaaacaacttgtaccttctttctgatatcaccgtcattcctctttctttgtcaccaaggaaacgagtcaaaggaacagcacatacaggagagtttgtagaaaaat

SEQ ID NO: 272288 - DNA, 987 bp, Artificial Sequence
  derived and/or modified sequence
aggtgggatccactactttgcagaggaggaagccgttcaggcctccctctgtgcactttgcaaaagcctctgcccttccatctcgaatcccttggcgccgatcacacttcctctgcctggaaacctggagccgtctctcgcgagacgtcctccgccctgtagaaggccgtttcggttcttcgtgcgcggtagccgccccacttgcgggattccaaggcctcatcgagtgcgggtatctggctgtggattcgccgccgtcctgctggacgcctggaggctcgaaccccgccgcccccctaccccaggctttactcccaccccggcttccgcccactgtgctgcccttcctcggacctgggctgtcgggagagctggagatgttcacccttcctcaaaaggacttcagggctcccaccacctgtctgggccccacctgcatgcaggacctgggcagtagccatggggaagatctggaaggagaatgctccagaaaactggaccagaagctgccagagctccgtggagtgggtgatcctgccatgatctcctctgatacctcctacctgtcctctagaggaagaatgattaaatggttctgggattcagctgaggagggctacaggacctaccacatggatgagtatgatgaggacaagaaccccagtggcatcattaacttgggcaccagtgagaacaaactctgctttgacctgctgtcctggcggcctccgggaggaagtggccaagttcctgtctttctactgcaagagcccagtacccctcagaccagagaatgtggttgtcctgaatggtggtgcctcgctcttctctgctctggccacggtgctgtgtgaggccggggaggctttcctgatccccaccccttactatggcgctatcacacagcacgtgtgtctctatggcaacatccggctggcctatgtctacctggacagtgaggtaagagtcttgacttcctaggtggaa

SEQ ID NO: 272289 - protein, 895 aa, Artificial Sequence
  derived and/or modified sequence
MWRYRSWDVPQIPSEAPQTQKAITKSGLQHLAPPPPTPGAPCSESERQIRSTVDWSESATYGEHIWFETNVSGDFCYVGEQYCVARMLQKSVSRRKCAACKIVVHTPCIEQLEKINFRCKPSFRESGSRNVREPTFVRHHWVHRRRQDGKCRHCGKGFQQKFTFHSKEIVAISCSWCKQAYHSKVSCFMLQQIEEPCSLGVHAAVVIPPTWILRARRPQNTLKASKKKKRASFKRKSSKKGPEEGRWRPFIIRPTPSPLMKPLLVFVNPKSGGNQGAKIIQSFLWYLNPRQVFDLSQGGPKEALEMYRKVHNLRILACGGDGTVGWILSTLDQLRLKPPPPVAILPLGTGNDLARTLNWGGGYTDEPVSKILSHVEEGNVVQLDRWDLHAEPNPEAGPEDRDEGATDRLPLDVFNNYFSLGFDAHVTLEFHESREANPEKFNSRFRNKMFYAGTAFSDFLMGSSKDLAKHIRVVCDGMDLTPKIQDLKPQCVVFLNIPRYCAGTMPWGHPGEHHDFEPQRHDDGYLEVIGFTMTSLAALQVGGHGERLTQCREVVLTTSKAIPVQVDGEPCKLAASRIRIALRNQATMVQKAKRRSAAPLHSDQQPVPEQLRIQVSRVSMHDYEALHYDKEQLKEASVPLGTVVVPGDSDLELCRAHIERLQQEPDGAGAKSPTCQKLSPKWCFLDATTASRFYRIDRAQEHLNYVTEIAQDEIYILDPELLGASARPDLPTPTSPLPTSPCSPTPRSLQGDAAPPQGEELIEAAKRNDFCKLQELHRAGGDLMHRDEQSRTLLHHAVSTGSKDVVRYLLDHAPPEILDAVEENGETCLHQAAALGQRTICHYIVEAGASLMKTDQQGDTPRQRAEKAQDTELAAYLENRQHYQMIQREDQETAV

SEQ ID NO: 272290 - DNA, 2688 bp, Artificial Sequence
  derived and/or modified sequence
atgtggagatacagaagctgggacgtgccccagatccccagcgaggccccccagacccagaaggccatcaccaagagcggcctgcagcacctggccccccccccccccacccccggcgccccctgcagcgagagcgagagacagatcagaagcaccgtggactggagcgagagcgccacctacggcgagcacatctggttcgagaccaacgtgagcggcgacttctgctacgtgggcgagcagtactgcgtggccagaatgctgcagaagagcgtgagcagaagaaagtgcgccgcctgcaagatcgtggtgcacaccccctgcatcgagcagctggagaagatcaacttcagatgcaagcccagcttcagagagagcggcagcagaaacgtgagagagcccaccttcgtgagacaccactgggtgcacagaagaagacaggacggcaagtgcagacactgcggcaagggcttccagcagaagttcaccttccacagcaaggagatcgtggccatcagctgcagctggtgcaagcaggcctaccacagcaaggtgagctgcttcatgctgcagcagatcgaggagccctgcagcctgggcgtgcacgccgccgtggtgatcccccccacctggatcctgagagccagaagaccccagaacaccctgaaggccagcaagaagaagaagagagccagcttcaagagaaagagcagcaagaagggccccgaggagggcagatggagacccttcatcatcagacccacccccagccccctgatgaagcccctgctggtgttcgtgaaccccaagagcggcggcaaccagggcgccaagatcatccagagcttcctgtggtacctgaaccccagacaggtgttcgacctgagccagggcggccccaaggaggccctggagatgtacagaaaggtgcacaacctgagaatcctggcctgcggcggcgacggcaccgtgggctggatcctgagcaccctggaccagctgagactgaagccccccccccccgtggccatcctgcccctgggcaccggcaacgacctggccagaaccctgaactggggcggcggctacaccgacgagcccgtgagcaagatcctgagccacgtggaggagggcaacgtggtgcagctggacagatgggacctgcacgccgagcccaaccccgaggccggccccgaggacagagacgagggcgccaccgacagactgcccctggacgtgttcaacaactacttcagcctgggcttcgacgcccacgtgaccctggagttccacgagagcagagaggccaaccccgagaagttcaacagcagattcagaaacaagatgttctacgccggcaccgccttcagcgacttcctgatgggcagcagcaaggacctggccaagcacatcagagtggtgtgcgacggcatggacctgacccccaagatccaggacctgaagccccagtgcgtggtgttcctgaacatccccagatactgcgccggcaccatgccctggggccaccccggcgagcaccacgacttcgagccccagagacacgacgacggctacctggaggtgatcggcttcaccatgaccagcctggccgccctgcaggtgggcggccacggcgagagactgacccagtgcagagaggtggtgctgaccaccagcaaggccatccccgtgcaggtggacggcgagccctgcaagctggccgccagcagaatcagaatcgccctgagaaaccaggccaccatggtgcagaaggccaagagaagaagcgccgcccccctgcacagcgaccagcagcccgtgcccgagcagctgagaatccaggtgagcagagtgagcatgcacgactacgaggccctgcactacgacaaggagcagctgaaggaggccagcgtgcccctgggcaccgtggtggtgcccggcgacagcgacctggagctgtgcagagcccacatcgagagactgcagcaggagcccgacggcgccggcgccaagagccccacctgccagaagctgagccccaagtggtgcttcctggacgccaccaccgccagcagattctacagaatcgacagagcccaggagcacctgaactacgtgaccgagatcgcccaggacgagatctacatcctggaccccgagctgctgggcgccagcgccagacccgacctgcccacccccaccagccccctgcccaccagcccctgcagccccacccccagaagcctgcagggcgacgccgcccccccccagggcgaggagctgatcgaggccgccaagagaaacgacttctgcaagctgcaggagctgcacagagccggcggcgacctgatgcacagagacgagcagagcagaaccctgctgcaccacgccgtgagcaccggcagcaaggacgtggtgagatacctgctggaccacgccccccccgagatcctggacgccgtggaggagaacggcgagacctgcctgcaccaggccgccgccctgggccagagaaccatctgccactacatcgtggaggccggcgccagcctgatgaagaccgaccagcagggcgacacccccagacagagagccgagaaggcccaggacaccgagctggccgcctacctggagaacagacagcactaccagatgatccagagagaggaccaggagaccgccgtgtag

SEQ ID NO: 272291 - DNA, 3385 bp, Artificial Sequence
  derived and/or modified sequence
gccgggggaagctgcaatgaatcctcagctctgggcccagtggaggcgctggggacggaagaaggggagcggccggggtcactgaggcagatgtggcgctaccgctcctgggacgtgccacagatcccatcagaggcaccccagacacagaaagccatcaccaagtcgggcctccagcacctggccccccctccgcccacccctggggccccgtgcagcgagtcagagcggcagatccggagtacagtggactggagcgagtcagcgacatatggggagcacatctggttcgagaccaacgtgtccggggacttctgctacgttggggagcagtactgtgtagccaggatgctgcagaagtcagtgtctcgaagaaagtgcgcagcctgcaagattgtggtgcacacgccctgcatcgagcagctggagaagataaatttccgctgtaagccgtccttccgtgaatcaggctccaggaatgtccgcgagccaacctttgtacggcaccactgggtacacagacgacgccaggacggcaagtgtcggcactgtgggaagggattccagcagaagttcaccttccacagcaaggagattgtggccatcagctgctcgtggtgcaagcaggcataccacagcaaggtgtcctgcttcatgctgcagcagatcgaggagccgtgctcgctgggggtccacgcagccgtggtcatcccgcccacctggatcctccgcgcccggaggccccagaatactctgaaagcaagcaagaagaagaagagggcatccttcaagaggaagtccagcaagaaagggcctgaggagggccgctggagacccttcatcatcaggcccaccccctccccgctcatgaagcccctgctggtgtttgtgaaccccaagagtgggggcaaccagggtgcaaagatcatccagtctttcctctggtatctcaatccccgacaagtcttcgacctgagccagggagggcccaaggaggcgctggagatgtaccgcaaagtgcacaacctgcggatcctggcgtgcgggggcgacggcacggtgggctggatcctctccaccctggaccagctacgcctgaagccgccaccccctgttgccatcctgcccctgggtactggcaacgacttggcccgaaccctcaactggggtgggggctacacagatgagcctgtgtccaagatcctctcccacgtggaggaggggaacgtggtacagctggaccgctgggacctccacgctgagcccaaccccgaggcagggcctgaggaccgagatgaaggcgccaccgaccggttgcccctggatgtcttcaacaactacttcagcctgggctttgacgcccacgtcaccctggagttccacgagtctcgagaggccaacccagagaaattcaacagccgctttcggaataagatgttctacgccgggacagctttctctgacttcctgatgggcagctccaaggacctggccaagcacatccgagtggtgtgtgatggaatggacttgactcccaagatccaggacctgaaaccccagtgtgttgttttcctgaacatccccaggtactgtgcgggcaccatgccctggggccaccctggggagcaccacgactttgagccccagcggcatgacgacggctacctcgaggtcattggcttcaccatgacgtcgttggccgcgctgcaggtgggcggacacggcgagcggctgacgcagtgtcgcgaggtggtgctcaccacatccaaggccatcccggtgcaggtggatggcgagccctgcaagcttgcagcctcacgcatccgcatcgccctgcgcaaccaggccaccatggtgcagaaggccaagcggcggagcgccgcccccctgcacagcgaccagcagccggtgccagagcagttgcgcatccaggtgagtcgcgtcagcatgcacgactatgaggccctgcactacgacaaggagcagctcaaggaggcctctgtgccgctgggcactgtggtggtcccaggagacagtgacctagagctctgccgtgcccacattgagagactccagcaggagcccgatggtgctggagccaagtccccgacatgccagaaactgtcccccaagtggtgcttcctggacgccaccactgccagccgcttctacaggatcgaccgagcccaggagcacctcaactatgtgactgagatcgcacaggatgagatttatatcctggaccctgagctgctgggggcatcggcccggcctgacctcccaacccccacttcccctctccccacctcaccctgctcacccacgccccggtcactgcaaggggatgctgcaccccctcaaggtgaagagctgattgaggctgccaagaggaacgacttctgtaagctccaggagctgcaccgagctgggggcgacctcatgcaccgagacgagcagagtcgcacgctcctgcaccacgcagtcagcactggcagcaaggatgtggtccgctacctgctggaccacgcccccccagagatccttgatgcggtggaggaaaacggggagacctgtttgcaccaagcagcggccctgggccagcgcaccatctgccactacatcgtggaggccggggcctcgctcatgaagacagaccagcagggcgacactccccggcagcgggctgagaaggctcaggacaccgagctggccgcctacctggagaaccggcagcactaccagatgatccagcgggaggaccaggagacggctgtgtagcgggccgcccacgggcagcaggagggacaatgcggccaggggacgagcgccttccttgcccacctcactgccacattccagtgggacggccacggggggacctaggccccagggaaagagccccatgccgccccctaaggagccgcccagacctagggctggactcaggagctgggggggcctcacctgttcccctgaggaccccgccggacccggaggctcacagggaacaagacacggctgggttggatatgcctttgccggggttctggggcagggcgctccctggccgcagcagatgccctcccaggagtggaggggctggagagggggaggccttcgggaagaggcttcctgggccccctggtcttcggccgggtccccagcccccgctcctgccccaccccacctcctccgggcttcctcccggaaactcagcgcctgctgcacttgcctgccctgccttgcttggcacccgctccggcgaccctccccgctcccctgtcatttcatcgcggactgtgcggcctgggggtggggggcgggactctcacggtgacatgtttacagctgggtgtgactcagtaaagtggatttttttttcttt

SEQ ID NO: 272292 - DNA, 2688 bp, Artificial Sequence
  derived and/or modified sequence
atgtggaggtaccggtcatgggacgtcccccagatcccttcggaggcccctcaaacgcaaaaagccattactaaaagcgggctccagcatcttgcgcctcctccaccaacaccaggagccccatgctccgaaagtgaaagacagatcagatcaacggtcgactggtcagagagcgctacgtacggggagcacatttggttcgagacaaacgtgtcaggcgatttctgttatgtgggggaacagtactgtgttgcccgaatgttacaaaagagtgtcagcaggcgcaaatgcgcagcttgtaagatcgtggtgcacactccttgcatcgagcagttggagaagataaactttcggtgtaagcctagtttcagagagtccgggtcccgcaacgttagagaacctacatttgtgagacaccactgggttcacagacggcgtcaggatgggaaatgtcgccactgcggtaagggatttcaacagaaattcacttttcactcaaaggaaatcgtggctatatcttgcagttggtgcaagcaggcatatcactcaaaggtcagctgtttcatgcttcagcagatcgaggagccctgcagccttggagtgcatgcagctgtcgtaatccctccaacatggattctgagggctagaagaccccagaacacactgaaagcgtccaaaaaaaaaaaaagggccagtttcaagcgcaagagtagcaagaagggaccggaggaaggtcggtggcgaccatttattatccgacctacaccttcacctctcatgaagcccctgctggtgttcgtgaacccgaagtcggggggcaatcaaggcgccaaaataattcagagttttctgtggtaccttaacccacgtcaagttttcgacttgtcgcagggaggacccaaagaagcccttgaaatgtaccgaaaagtccataacttgcgcatcctcgcttgtggaggcgacgggacagtgggttggatcctgtcaaccctggaccagcttaggttaaagcctccacctcccgtggcaatcttacccttagggaccgggaacgatctggcaagaaccctcaactggggaggtggatatacagacgagcccgtctccaaaatcctttctcacgtggaggagggaaacgtagtgcagttggatcgctgggacttgcacgcagaaccgaatcctgaagctgggccggaggatcgggacgaaggagccaccgaccggttacctttagatgtttttaacaactatttctcgctcggttttgacgcccacgtgacactggaatttcatgaaagtagagaagccaacccagagaaatttaatagccgtttcagaaacaaaatgttttacgcgggtaccgctttttccgacttcctgatgggatcatctaaagatctggccaaacacattcgagtagtgtgcgacggtatggatctaaccccaaagatacaagatctaaaaccccagtgtgtggtgttcttaaatataccccgctactgtgctggtacaatgccatgggggcacccaggcgaacaccacgactttgagccccagcggcacgatgacggctatcttgaggtgatcggtttcaccatgactagtctggccgccctgcaggtggggggacacggcgagcggcttacgcaatgcagagaggtcgtgctgaccaccagcaaggccatccccgtgcaggttgacggggaaccatgcaaactcgccgccagtcgcatcaggatagctctgcgcaaccaagctacaatggtgcagaaggcaaaaaggaggagtgccgctccattacatagtgatcagcagcccgtgccagaacagctgcgcatacaggtttcccgcgtttctatgcacgactacgaggccctgcattacgacaaagagcagctcaaggaggcatctgttccccttggcaccgtggtggtcccaggggactcggacctggaactgtgtagagcgcatattgagcggctgcagcaagagcctgatggagcaggcgctaagtctcctacttgccagaagctctctccaaagtggtgttttctggatgcaactactgcatctaggttctatcggatagaccgagcacaggagcatttgaactacgtcacagaaatcgcgcaagacgagatttacatcctggacccggaactgctcggcgcctctgcaaggccggacctgcctacccccacctctcccctgccaacctcaccgtgctcccccactccacggagcctccaaggagacgccgctccaccacagggcgaagagctgattgaggcagccaagaggaatgatttctgtaagctgcaagaactgcatcgggctggtggcgacctaatgcatcgggatgaacagtcccgaacgctccttcatcacgccgtgtcgacgggatccaaggacgtggtcagatacttactcgaccacgctccacccgagatcttggatgctgtggaagaaaatggcgaaacgtgtctgcatcaggccgccgcactaggacagaggaccatctgccactatatcgtagaggctggcgcatctttgatgaagacggaccagcagggtgacactcccagacagcgagcagagaaagcccaggatactgagctagcggcatacctagagaaccgacagcattaccagatgattcagcgggaggaccaagaaacagctgtctag

SEQ ID NO: 272293 - DNA, 2688 bp, Artificial Sequence
  derived and/or modified sequence
atgtggagataccgctcctgggatgtgccccagatccccagcgaggccccccagacccagaaggccatcaccaagagcggcctgcagcacctggcccctcctccacccacccctggggccccctgcagcgagagcgagcggcagatccgcagcacagtggactggagcgagagcgccacctatggagagcacatctggtttgagaccaacgtgtctggggacttctgctacgtgggggagcagtactgtgtggccaggatgctgcagaagtctgtgtccaggaggaaatgtgccgcctgcaagatcgtggtgcacaccccctgcatcgagcagctggagaagatcaacttccgctgcaagcccagcttccgggagagcggcagcagaaatgtgcgggagcccacctttgtgcgccaccactgggtgcacagaagacggcaggacggcaagtgccgccactgtgggaagggcttccagcagaagttcaccttccacagcaaggagatcgtggccatcagctgctcctggtgcaagcaggcctaccacagcaaggtgtcctgcttcatgctgcagcagatcgaggagccctgcagcctgggcgtgcatgctgctgtggtgatcccccccacctggatcctgcgggcccggcggccccagaacaccctgaaggccagcaagaagaagaagagggccagcttcaagaggaagagcagcaagaagggccctgaggagggccgctggaggcccttcatcatccggcccacccccagccccctgatgaagcccctgctggtgtttgtgaaccccaagagcggcggcaaccagggcgccaagatcatccagagcttcctgtggtacctgaacccccggcaggtgtttgacctgagccagggcggccccaaggaggccctggagatgtacaggaaggtgcacaacctgcgcatcctggcctgtggaggagatggcaccgtgggctggatcctgagcaccctggaccagctgcggctgaagcccccacctcctgtggccatcctgcccctgggcactggaaatgacctggcccggaccctgaactggggcggcggctacacagatgagcctgtgtccaagatcctgagccacgtggaggagggcaatgtggtgcagctggaccgctgggacctgcacgccgagcccaaccctgaggccggcccagaagatagagatgagggcgccacagaccggctgcccctggatgtgttcaacaactacttcagcctgggctttgatgcccacgtgaccctggagttccacgagagccgggaggccaaccctgagaagttcaacagccgcttcaggaacaagatgttttatgccggcacagccttcagtgacttcctgatgggcagcagcaaggacctggccaagcacatccgggtggtgtgtgatggcatggacctgacccccaagatccaggacctgaagccccagtgtgtggtgttcctgaacatcccccgctactgtgccggcaccatgccctggggccaccctggagagcaccacgactttgagccccagagacatgatgatggctacctggaggtgattggcttcaccatgaccagcctggccgccctgcaggtgggcggccacggggagcggctgacccagtgccgggaggtggtgctgaccaccagcaaggccatccctgtgcaggtggatggagagccctgcaagctggccgccagccgcatccgcatcgccctgaggaaccaggccaccatggtgcagaaggccaagagaagatctgctgcccccctgcacagcgaccagcagcctgtgcctgagcagctgcgcatccaggtgtcccgggtgtccatgcatgactatgaggccctgcactatgacaaggagcagctgaaggaggcctctgtgcccctgggcaccgtggtggtgcctggggacagcgacctggagctgtgccgggcccacatcgagcggctgcagcaggagccagatggagctggggccaagagccccacctgccagaagctgagccccaagtggtgcttcctggatgccaccacagccagccgcttctacagaattgaccgggcccaggagcacctgaactacgtgacagaaattgcccaggatgagatctacatcctggaccctgagctgctgggcgccagcgcccggccagacctgcccacccccaccagccccctgcccaccagcccctgcagccccacccccaggagcctgcagggagatgctgccccaccccagggcgaggagctgattgaggccgccaagagaaatgacttctgcaagctgcaggagctgcacagagctggaggagacctgatgcacagagatgagcagagcaggaccctgctgcaccacgctgtgtccacaggcagcaaggatgtggtgcgctacctgctggaccacgcccctcctgagatcctggatgctgtggaggagaatggagagacctgcctgcaccaggccgccgccctgggccagaggaccatctgccactacatcgtggaggccggggccagcctgatgaagacagaccagcagggcgacaccccccggcagagagctgagaaggcccaggacacagagctggccgcctacctggagaaccggcagcactaccagatgatccagcgggaggaccaggagacagctgtgtag

SEQ ID NO: 272294 - DNA, 2688 bp, Artificial Sequence
  derived and/or modified sequence
atgtggcggtaccggagctgggacgtgccccagatccccagcgaggcccctcagacccaaaaggctatcacaaagtctggccttcagcatttagctcccccaccaccaacaccaggggctccatgttccgaatctgagcggcagatacgctctaccgtcgactggtctgaatcagccacctacggagagcatatatggttcgagacaaacgtctccggagatttttgctacgttggtgagcagtactgtgtggccaggatgctccaaaaatctgtaagtaggaggaaatgcgccgcctgcaagatcgtggtacacaccccctgcatcgagcagctggagaagataaactttaggtgcaagccttcatttcgggaaagcggcagcaggaatgtgcgagagcctacctttgtgcgccatcattgggttcacagaaggaggcaggatgggaaatgccggcactgcggaaagggattccagcagaaattcactttccattcgaaagaaatcgttgcaatttcatgtagttggtgcaagcaggcctatcacagcaaggtcagctgtttcatgctccagcaaatcgaggagccctgcagcctgggagtccacgctgcggtggtcattcctccgacttggatcctacgcgcccggaggcctcagaacacattgaaagcgtctaagaaaaagaagagagcctcctttaagcgaaagagctccaaaaaaggcccagaagagggaagatggcggccatttataattagacccacgccgtcgcctctgatgaagcctctcctggtattcgtaaacccaaagagcggtggcaaccagggggctaagattatccagtctttcctttggtacctgaacccgagacaggttttcgacctttctcagggtggcccgaaggaggctcttgaaatgtataggaaagtgcacaacctgaggatccttgcctgcggcggagacggaacggtaggctggattctttctactctcgatcagctgaggctcaagccacccccacccgtcgcaattttacccctcggcactggcaatgatcttgctcggaccctcaactggggtggcggatacaccgacgagccagtctctaagatcctgtctcacgtggaggagggaaatgttgtgcagttggatcgttgggatctgcatgccgagcccaacccggaagctggaccggaggatcgcgatgaaggcgccacagaccgtctgcctttagacgtcttcaacaactattttagtctcggatttgacgctcacgtaaccctggagttccacgagtcccgtgaggccaaccccgaaaagtttaactccagatttcggaacaaaatgttttatgcaggaaccgccttcagtgattttctgatggggtccagcaaggatctcgcgaagcatatccgcgtggtatgtgacggcatggatcttacaccaaagatccaggatcttaagccacaatgtgtggtttttttgaacataccccgatattgtgcgggtactatgccatggggccaccccggagaacaccacgattttgaaccccaacgccatgatgatggctaccttgaggtgatcgggtttactatgacttccctcgccgcactccaggtcggtggacacggggaacgattgacgcaatgtagggaggtcgtgcttacgacatctaaggccatccccgttcaggtggatggagagccctgcaagctcgcggcatctcggattaggattgcccttagaaaccaggctactatggttcagaaggcgaagaggcggagcgcggccccactgcactccgaccaacagcccgtcccagagcagctgagaatccaagtgtccagagtctccatgcacgactatgaggcgctgcactatgacaaagagcagctgaaagaggcgtctgtgcctctgggcacggtagtagtgccaggcgacagcgacctggaattgtgtagagcgcacatcgagcgcctacagcaagagcctgacggtgcaggcgctaagagcccaacttgtcagaagctgtctcctaaatggtgctttttagatgctaccaccgccagccgtttttaccgtattgatagagcgcaagaacatcttaactacgtaaccgagatcgctcaagatgaaatctatatcctcgacccagagttgttaggggcatccgccagacctgacctgcccactcccacttcccccctgccaacgagtccctgctctcccacccctcgctcactccaaggggacgcagctccgccacagggcgaggagctgatcgaagccgctaagagaaatgacttttgcaaacttcaagaactccatcgcgccggaggggatctgatgcacagggatgaacaaagccggacactgctacaccacgccgtgtcaactggttccaaagatgtggtgaggtatctgctggatcatgccccaccagagatccttgacgctgtggaagaaaacggcgagacatgtctccaccaggccgcagccctcgggcaacgaactatctgccactatatcgtggaggcgggtgctagcctgatgaaaaccgaccaacagggggacaccccgcgccagagggccgagaaggcgcaggacactgagctagcagcttacctggagaatcgccaacattatcagatgatccagagggaggaccaggaaactgccgtgtag

SEQ ID NO: 272295 - DNA, 2688 bp, Artificial Sequence
  derived and/or modified sequence
atgtggcggtatagaagttgggacgtgccacagattccctccgaggcacctcagactcagaaggctattaccaagagtggtcttcaacatctagcccctccccctccgacccctggagccccttgctccgaaagcgaacggcagattcgcagtacagtggactggtccgagtctgccacatatggggagcacatttggtttgaaaccaatgtaagcggtgacttttgctacgtgggagaacaatactgtgttgccagaatgttgcagaagtctgtgagtcgtcgcaagtgtgctgcctgcaagattgttgtgcacacgccctgcattgagcagctggaaaaaatcaacttcagatgcaagccctcgtttcgcgagagcgggagcaggaatgtccgagagccaacgttcgtaaggcaccattgggtccatcgtcgtaggcaggatggtaaatgtaggcattgtggaaaggggtttcagcaaaaatttaccttccatagtaaggagattgttgccatcagttgcagctggtgcaagcaggcctaccactctaaggtctcatgctttatgctccagcagatcgaagagccctgctctctgggcgttcacgcagctgtggtaataccaccaacctggatccttagagctcgtagaccgcagaatactctgaaggcgagcaaaaagaaaaaacgggcaagctttaagcggaaaagcagcaaaaagggcccagaggaggggagatggagacccttcatcattaggcctacaccctcccctttaatgaaacctctgttggtttttgtgaacccaaaatcaggtggaaaccagggcgcaaaaatcatccagtcttttttatggtatttgaacccacgccaggtgttcgatctttcccaaggagggcctaaagaagccctcgaaatgtaccggaaagtacataacctgagaatccttgcttgtggcggtgacgggaccgtcggttggattctgtctaccctggatcagctacggctcaaaccacctcctccggttgcaatcctgccgctgggtaccggcaatgatcttgccagaactctgaactggggaggcggatacactgacgagccagtttcaaaaatcctgagtcatgtagaagaaggtaatgtggtacagctcgatagatgggacctgcatgcagaacctaacccagaagccggacccgaggatcgggacgagggggcaactgataggctgcccctggatgtgttcaataactacttctctctcggtttcgatgcacacgtcaccttggagttccacgagtccagggaggccaaccccgagaagttcaattcaaggtttcgcaacaagatgttctacgctggaaccgcttttagcgacttcctgatgggctcttctaaggaccttgccaagcacatacgagtggtgtgcgatggcatggatctcacaccaaagattcaggacttgaaaccacagtgcgtggtgtttcttaacatcccacggtattgtgcgggtacgatgccttggggccaccccggagaacatcacgacttcgagccacagagacatgacgacggttatctagaggtcattgggttcactatgacctctctggccgcactgcaggtgggaggtcacggcgaacgattgactcaatgccgcgaagtggttctaaccacttccaaagccattccagttcaggtggacggagaaccatgcaagctggccgctagccggatccgcatcgccctacgcaatcaagctaccatggttcagaaagccaagcgcaggagcgcagcgcctcttcacagcgaccaacagcctgtccctgagcaactccggatccaggtttctcgcgtttctatgcatgactatgaggcattgcactacgataaggagcagctgaaggaagcaagtgtgcctctgggcacagtcgtggtgccaggtgacagcgacctggagctgtgcagggctcacattgaaagactgcagcaggaacctgacggggctggcgcaaagtccccgacctgccaaaagctctcgccgaaatggtgtttcttggatgccactacggccagcagattctacagaatcgatcgtgcgcaggaacacctgaactacgtcacagaaattgctcaggacgaaatctacatactagaccccgaactgctcggagcctccgccaggcctgacttacccacaccaacatctccactgcctacatctccatgttcacccaccccccgttccctacaaggtgacgcagctccccctcagggagaagaactcattgaagccgcaaagcggaacgacttctgcaagctgcaggagctacacagggcagggggtgacctgatgcaccgggacgaacagtcccgaaccctacttcaccacgccgtgtccaccgggtccaaagatgtagttagatatcttctggatcacgctcctccagaaatcctcgacgcggtagaagaaaacggtgagacctgtctgcatcaggccgcagcacttggccagcgtacaatttgtcactatatcgttgaggcaggcgctagcctgatgaaaactgatcagcagggcgatacccctcgtcagcgagcagagaaggctcaagatactgagctagctgcttatctcgaaaacaggcagcactatcagatgatacagagggaagatcaggaaactgccgtatag

SEQ ID NO: 272296 - protein, 1647 aa, Artificial Sequence
  derived and/or modified sequence
MVQKKKFCPRLLDYLVIVGARHPSSDSVAQTPELLRRYPLEDHTEFPLPPDVVFFCQPEGCLSVRQRRMSLRDDTSFVFTLTDKDTGVTRYGICVNFYRSFQKRISKEKGEGGAGSRGKEGTHATCASEEGGTESSESGSSLQPLSADSTPDVNQSPRGKRRAKAGSRSRNSTLTSLCVLSHYPFFSTFRECLYTLKRLVDCCSERLLGKKLGIPRGVQRDTMWRIFTGSLLVEEKSSALLHDLREIEAWIYRLLRSPVPVSGQKRVDIEVLPQELQPALTFALPDPSRFTLVDFPLHLPLELLGVDACLQVLTCILLEHKVVLQSRDYNALSMSVMAFVAMIYPLEYMFPVIPLLPTCMASAEQLLLAPTPYIIGVPASFFLYKLDFKMPDDVWLVDLDSNRVIAPTNAEVLPILPEPESLELKKHLKQALASMSLNTQPILNLEKFHEGQEIPLLLGRPSNDLQSTPSTEFNPLIYGNDVDSVDVATRVAMVRFFNSANVLQGFQMHTRTLRLFPRPVVAFQAGSFLASRPRQTPFAEKLARTQAVEYFGEWILNPTNYAFQRIHNNMFDPALIGDKPKWYAHQLQPIHYRVYDSNSQLAEALSVPPERDSDSEPTDDSGSDSMDYDDSSSSYSSLGDFVSEMMKCDINGDTPNVDPLTHAALGDASEVEIDELQNQKEAEEPGPDSENSQENPPLRSSSSTTASSSPSTVIHGANSEPADSTEMDDKAAVGVSKPLPSVPPSIGKSNVDRRQAEIGEGSVRRRIYDNPYFEPQYGFPPEEDEDEQGESYTPRFSQHVSGNRAQKLLRPNSLRLASDSDAESDSRASSPNSTVSNTSTEGFGGIMSFASSLYRNHSTSFSLSNLTLPTKGAREKATPFPSLKVFGLNTLMEIVTEAGPGSGEGNRRALVDQKSSVIKHSPTVKREPPSPQGRSSNSSENQQFLKEVVHSVLDGQGVGWLNMKKVRRLLESEQLRVFVLSKLNRMVQSEDDARQDIIPDVEISRKVYKGMLDLLKCTVLSLEQSYAHAGLGGMASIFGLLEIAQTHYYSKEPDKRKRSPTESVNTPVGKDPGLAGRGDPKAMAQLRVPQLGPRAPSATGKGPKELDTRSLKEENFIASIELWNKHQEVKKQKALEKQRPEVIKPVFDLGETEEKKSQISADSGVSLTSSSQRTDQDSVIGVSPAVMIRSSSQDSEVSTVVSNSSGETLGADSDLSSNAGDGPGGEGSVHLASSRGTLSDSEIETNSATSTIFGKAHSLKPSIKEKLAGSPIRTSEDVSQRVYLYEGLLGRDKGSMWDQLEDAAMETFSISKERSTLWDQMQFWEDAFLDAVMLEREGMGMDQGPQEMIDRYLSLGEHDRKRLEDDEDRLLATLLHNLISYMLLMKVNKNDIRKKVRRLMGKSHIGLVYSQQINEVLDQLANLNGRDLSIWSSGSRHMKKQTFVVHAGTDTNGDIFFMEVCDDCVVLRSNIGTVYERWWYEKLINMTYCPKTKVLCLWRRNGSETQLNKFYTKKCRELYYCVKDSMERAAARQQSIKPGPELGGEFPVQDLKTGEGGLLQVTLEGINLKFMHNQVFIELNHIKKCNTVRGVFVLEEFVPEIKEVVSHKYKTPMAHEICYSVLCLFSYVAAVHSSEEDLRTPPRPVSS

SEQ ID NO: 272297 - DNA, 4944 bp, Artificial Sequence
  derived and/or modified sequence
atggtccaaaagaagaagttctgtccgagattgctggactatctcgtgatcgtgggagcccgccatccaagcagtgactccgtggcccagacaccagaactgctgcgccgttatccgcttgaagatcatactgagttccctctccctcccgacgtggtgttcttttgtcaacccgagggatgtctctccgttcggcagcggagaatgagtctgcgcgatgataccagctttgtctttaccctcacggacaaggatacaggcgtaacccgctatggcatctgcgtgaatttctaccgctccttccagaaaaggatctcaaaagagaaaggagaggggggagctggcagccggggcaaagaaggtacacatgctacttgtgcgtccgaagagggaggcactgagtctagtgagtcagggagcagcctgcagcctctgtccgctgatagtactcctgatgttaaccagtctccccgggggaaacgaagggctaaagccggcagtcgcagtcggaacagcacattaacctccctgtgtgtcctgtctcactacccgttcttctcaacattcagagagtgtttgtacacattgaaacggcttgtggactgctgctcagagaggctgctgggaaaaaaactggggattccacggggcgtccaacgggacactatgtggagaatattcacaggctcccttcttgtcgaagaaaagtcgtcagctctgctccatgatctccgagagatcgaagcttggatttacagactgttacgtagtccagtgcctgtgtctggccagaaacgggtggacatcgaagtcctgccccaggagcttcagcccgccttgacatttgctctaccagatccaagcaggtttacactggtcgatttccctttacacttgccccttgaattactgggagtcgacgcgtgcctgcaggtcctgacttgcattctcttggaacataaagttgtgctccagtcacgggattacaacgccttgtccatgtccgtgatggccttcgtggcaatgatatatccactggagtacatgtttccggtgatcccattattaccaacctgcatggcctctgcggagcagcttctactagccccgaccccttatatcataggagttcctgctagcttttttctgtataaactggattttaagatgcctgatgatgtgtggttggtcgaccttgattcaaatagagtaattgctcctaccaatgctgaggtgctgccaatcttgcccgaacctgaatcattagagctaaaaaagcatctgaaacaggccttggctagtatgtctttgaatactcagccaatcttaaatctcgaaaaatttcacgagggtcaggaaattccacttctgctgggacgtccgagcaatgatctccagagtacaccctcaactgagttcaatccgctgatatatggaaacgacgtggactcagtcgatgtcgcaactagagttgcaatggtccgctttttcaactccgcgaatgtcttacaggggtttcaaatgcacacaaggacactgaggctcttccccagacctgtggtagctttccaggccgggtcattcttggccagccgacctagacagacaccttttgccgagaaactggctagaacacaagcggtggaatactttggtgagtggatcctgaaccctacgaattacgccttccagcgcatacataacaacatgtttgatcccgccctaattggggataaacccaaatggtatgcacatcagctgcaacctatccactaccgggtgtacgacagcaatagccagctcgcagaagctttaagcgtgccacctgagcgagatagtgactcagagcctacagatgatagcggaagcgactccatggactatgatgattcctcgtcaagttacagcagcctgggcgatttcgtgtccgagatgatgaagtgtgatattaacggcgacacgcctaacgttgatccgttaactcatgcggctttgggcgatgcctctgaggttgaaatcgatgaactacaaaaccagaaagaggccgaggagcctgggccagattccgagaacagccaggaaaatccacccctgcgaagcagtagtagcactacagcctcaagctctccaagcaccgtgatccacggggcaaatagtgaacccgcagactccacagaaatggatgataaggccgccgtaggggtgtctaaacccctcccatcggtgcctccatccataggtaagagcaacgttgatcgtcgccaggccgaaatcggggaagggtctgtgcgacggaggatctatgataatccttattttgagccacaatatggatttccgcccgaggaagatgaggatgagcagggcgaatcatatacacccagattttcccaacacgtgtctggcaaccgggctcagaaacttctcagaccgaattcgctgcgtctggcatccgatagtgacgccgagtccgactctcgggcctcatcccccaactcgacagtaagcaatactagcaccgagggcttcggtggcatcatgagctttgccagcagcctctacagaaaccactccacgagcttcagcctctcaaatctgactcttcccacgaagggggcacgagaaaaagccacccccttcccaagcctgaaggttttcggcctgaacacccttatggaaatcgtgaccgaagctggccccggatcaggagagggaaataggcgcgccttggttgaccagaagtcttcagtgattaagcacagtccgaccgttaaacgtgagccccccagcccacagggtaggagttctaactcgtccgagaatcagcagttcctcaaggaagtcgtacactccgtgctggacgggcaaggggtgggatggttaaacatgaagaaggtgcggaggttgttggagtcagagcaactgagggtctttgtgctgtcaaaactcaatcgcatggtccaaagtgaagacgacgcccgtcaggatattatccctgacgtggagatttctcgcaaagtttacaagggtatgctcgacctgcttaaatgtaccgtgctttccctggagcagtcctatgcccatgccggcctcggcgggatggcgtctattttcggcctgctcgaaatcgcccagacccactattattccaaagagccggataaaagaaagcgtagtcctaccgaaagcgttaatactcctgtaggcaaggatcctgggcttgcgggtagaggggatcctaaagccatggcgcaactgcgggtccctcaactgggccctcgtgcgcctagcgccacgggcaaaggtcccaaggagctagacacaaggtccttgaaggaagaaaactttatagcctcaattgagctgtggaacaaacatcaagaggtgaagaagcagaaggcgctcgagaaacaacggcccgaggtaattaagccggtgttcgacctgggggagaccgaagagaaaaagagccagataagtgcagattctggagtcagtctcacgagcagttctcagcgtactgaccaagactcggttattggcgtcagccccgctgttatgattcggtcatccagccaggactccgaagtctctactgtggtttcaaattccagtggggagactctgggcgctgactcagacctgagcagtaacgctggcgatgggccgggaggggagggttcagtgcatctggcctcgagtagggggaccctttcagactccgagatcgagacaaattccgctactagcacaattttcggaaaggctcactcgctgaagccaagcattaaggagaagctcgccggatcaccaattagaacatcggaggacgtttcccagagggtgtacctttacgagggtcttcttggaagagataagggatcaatgtgggaccagctggaagacgctgccatggagacctttagcatttctaaggaacgaagcactctctgggaccagatgcaattctgggaggacgcctttctggacgcagtgatgctggaacgcgaggggatgggcatggaccaggggccacaggagatgatagatagatatctgtccctgggggaacacgaccggaagaggctcgaggatgacgaagaccgccttctggcgacactgctccacaatctgatcagctatatgctgctgatgaaggtgaataaaaacgatattagaaaaaaagtgagacgtctcatgggcaagagccacatcggactcgtctactcgcagcagattaatgaggtcctggatcagcttgcaaacctgaacgggcgcgatttgtctatctggtctagtggctccagacacatgaaaaaacaaacgttcgtggtccacgcgggcacggataccaacggggacatattcttcatggaagtgtgtgacgattgtgtggtacttcgctctaacatcggcaccgtgtacgaaaggtggtggtacgaaaaactgatcaacatgacctattgtcctaagacaaaagtgctttgcctttggagaaggaatgggagcgagacccagctcaataagttctatacgaagaagtgccgtgagctatactactgtgttaaagattctatggaacgcgcggcggctaggcagcagtcgattaagccgggcccagaactcggaggcgagttccctgtgcaggatttaaagaccggagagggcggactgctgcaggtaacgctggagggcatcaacctgaagttcatgcacaaccaagtgttcatcgagctgaaccacataaagaagtgcaatactgtcagaggtgtgtttgtgcttgaggaattcgtccctgagattaaagaggtcgttagccataagtacaagacccccatggcacatgagatttgttatagtgtgctctgtttattttcttacgttgccgctgtgcatagctccgaggaggacctcaggacaccaccgaggccggtcagttcatag

SEQ ID NO: 272298 - DNA, 4944 bp, Artificial Sequence
  derived and/or modified sequence
atggtgcagaagaagaagttctgcccccggctgctggactacctggtgattgtgggcgcccggcaccccagcagtgacagcgtggcccagaccccagagctgctgcggcgctaccccctggaggaccacacagagttccccctgcccccagatgtggtgttcttctgccagcctgagggctgcctgtctgtgcggcagaggaggatgagcctgagagatgacaccagctttgtgttcaccctgacagacaaggacaccggggtgaccaggtatggcatctgtgtgaacttctaccgctccttccagaagaggatcagcaaggagaagggggagggcggggccggcagccggggcaaggagggcacccacgccacctgtgccagcgaggagggcggcacagagagcagcgagagcggcagcagcctgcagcccctgtctgctgacagcaccccagatgtgaaccagagcccccggggcaagagaagagccaaggccggcagccgcagcaggaacagcaccctgaccagcctgtgtgtgctgagccactaccccttcttcagcaccttcagagaatgtctgtacaccctgaagaggctggtggactgctgcagcgagcggctgctgggcaagaagctgggcatcccccggggcgtgcagagggacaccatgtggaggatcttcaccggcagcctgctggtggaggagaagagcagcgccctgctgcatgacctgcgggagattgaggcctggatctaccgcctgctgcggagccctgtgcctgtgtctggccagaagagggtggacatcgaggtgctgccccaggagctgcagcctgccctgacctttgccctgcctgaccccagccgcttcaccctggtggacttccccctgcacctgcccctggagctgctgggcgtggatgcctgcctgcaggtgctgacctgcatcctgctggagcacaaggtggtgctgcagagccgggactacaatgccctgtccatgtctgtgatggcctttgtggccatgatctaccccctggagtacatgtttcctgtgatccccctgctgcccacctgcatggccagcgctgagcagctgctgctggcccccaccccctacatcattggagtgcctgccagcttcttcctgtacaagctggacttcaagatgccagatgatgtgtggctggtggacctggacagcaacagagtgattgcccccaccaatgctgaggtgctgcccatcctgcctgagcctgagagcctggagctgaagaagcacctgaagcaggccctggcctccatgagcctgaacacccagcccatcctgaacctggagaagttccacgagggccaggagatccccctgctgctgggccggcccagcaatgacctgcagagcacccccagcacagagttcaaccccctcatctatggaaatgatgtggacagcgtggatgtggccaccagggtggccatggtgcgcttcttcaacagcgccaacgtgctgcagggcttccagatgcacaccaggaccctgcggctcttccccaggcctgtggtggccttccaggccggcagcttcctggccagccggccccggcagaccccatttgctgagaagctggcccggacccaggccgtggagtactttggagagtggatcctgaaccccaccaactatgccttccagaggatccacaacaacatgtttgatcctgccctgattggagacaagcccaagtggtacgcccaccagctgcagcccatccactacagagtgtatgacagcaacagccagctggccgaggccctgtctgtgcccccagagcgggacagcgacagcgagcccacagatgattctggcagtgacagcatggactatgatgacagcagcagcagctacagcagcctgggggactttgtgtctgagatgatgaagtgtgacatcaatggagacacccccaacgtggaccccctgacccatgctgccctgggagatgccagcgaggtggagattgatgagctgcagaaccagaaggaggccgaggagcccggcccagattctgagaacagccaggagaacccccccctgcggagcagcagcagcaccacagccagcagcagccccagcaccgtcatccatggagccaacagcgagcctgctgacagcacagagatggatgacaaggctgctgtgggcgtgtccaagcccctgcccagcgtgcccccatccatcggcaagagcaatgtggaccggcggcaggccgagatcggggagggctctgtgagaagacgcatctatgacaacccctactttgagccccagtatggcttccccccagaagaagatgaagatgagcagggcgagagctacaccccccgcttcagccagcacgtgtctggcaacagagcccagaagctgctgcggcccaacagcctgcggctggccagtgacagtgatgctgagagtgacagccgggccagcagccccaacagcacagtgagcaacaccagcacagagggctttggaggcatcatgagctttgccagcagcctgtacagaaaccacagcaccagcttcagcctgagcaacctgaccctgcccaccaagggggcccgggagaaggccacccccttccccagcctgaaggtgtttggcctgaacaccctgatggagatcgtgacagaggccggccctggcagcggggagggcaacagaagagccctggtggaccagaagagcagcgtcatcaagcacagccccaccgtgaagcgggagccccccagcccccagggccgcagcagcaacagcagcgagaaccagcagttcctgaaggaggtggtgcacagcgtgctggatggccagggcgtgggctggctgaacatgaagaaggtgcggcggctgctggagagcgagcagctgcgggtgtttgtgctgagcaagctgaacaggatggtgcagagtgaagatgatgcccggcaggacatcatcccagatgtggagatcagcaggaaggtgtacaagggcatgctggacctgctgaagtgcaccgtgctgagcctggagcagagctatgcccatgctggcctgggcggcatggccagcatcttcggcctgctggagatcgcccagacccactactacagcaaggagccagacaagaggaagaggagccccacagaatctgtgaacacccctgtgggcaaggaccccggcctggccggccgcggggaccccaaggccatggcccagctgcgggtgccccagctgggcccccgggcccccagcgccaccgggaagggccccaaggagctggacaccaggagcctgaaggaggagaacttcatcgccagcattgagctgtggaacaagcaccaggaggtgaagaagcagaaggccctggagaagcagaggcctgaggtgatcaagcctgtgtttgacctgggggagacagaggagaagaagagccagatctctgctgacagcggcgtgtccctgaccagcagcagccagaggacagaccaggacagcgtcatcggcgtgtccccagctgtgatgatccgcagcagcagccaggacagcgaggtgtccacagtggtgagcaacagcagtggagagaccctgggcgctgacagcgacctgagcagcaatgctggagatggccctggaggagagggctctgtgcacctggccagcagccggggcaccctgagtgacagcgagattgagaccaacagcgccaccagcaccatctttgggaaggcccacagcctgaagcccagcatcaaggagaagctggccggcagccccatccgcaccagtgaagatgtgtcccagagggtgtacctgtatgagggcctgctgggccgggacaagggctccatgtgggaccagctggaggatgctgccatggagaccttcagcatcagcaaggagaggagcaccctgtgggaccagatgcagttctgggaggatgccttcctggatgctgtgatgctggagcgggagggcatgggcatggaccagggcccccaggagatgattgaccgctacctgagcctgggggagcatgacaggaagaggctggaggatgatgaagatcggctgctggccaccctgctgcacaacctgatctcctacatgctgctgatgaaggtgaacaagaatgacatcaggaagaaggtgcggcggctgatgggcaagagccacatcggcctggtgtacagccagcagatcaatgaggtgctggaccagctggccaacctgaatggccgggacctgagcatctggagcagcggcagccgccacatgaagaagcagacctttgtggtgcatgctggaacagacaccaacggggacatcttcttcatggaggtgtgtgatgactgtgtggtgctgcggagcaacattggaacagtgtatgagcgctggtggtatgagaagctgatcaacatgacctactgccccaagaccaaggtgctgtgcctgtggaggagaaatggaagtgagacccagctgaacaagttctacaccaagaagtgccgggagctgtactactgtgtgaaggacagcatggagagagctgctgcccggcagcagagcatcaagccaggccctgagctgggcggggagttccctgtgcaggacctgaagacaggagagggcggcctgctgcaggtgaccctggagggcatcaacctgaagttcatgcacaaccaggtgttcatcgagctgaaccacatcaagaagtgcaacacagtgcggggcgtgtttgtgctggaggagtttgtgcctgagatcaaggaggtggtgagccacaagtacaagacccccatggcccacgagatctgctacagcgtgctgtgcctcttctcctatgtggccgctgtgcacagcagcgaggaggacctgcggaccccacccaggcctgtgagcagctag

SEQ ID NO: 272299 - DNA, 5990 bp, Artificial Sequence
  derived and/or modified sequence
cccgctgcccaggattggtaggctccaccgctcggcagccggcttccctgctcggacgccgagcaccgccaaagcgcacttcgattttcagaattcctcctgggaatgctgactccttgcttggtgccctgatgcttctctgagataaactgatgaattggaaccatggtgcaaaagaagaagttctgtcctcggttacttgactatctagtgatcgtaggggccaggcacccgagcagtgatagcgtggcccagactcctgaattgctacggcgataccccttggaggatcacactgagtttcccctgcccccagatgtagtgttcttctgccagcccgagggctgcctgagcgtgcggcagcggcgcatgagccttcgggatgatacctcttttgtcttcaccctcactgacaaggacactggagtcacgcgatatggcatctgtgttaacttctaccgctccttccaaaagcgaatctctaaggagaagggggaaggtggggcagggtcccgtgggaaggaaggaacccatgccacctgtgcctcagaagagggtggcactgagagctcagagagtggctcatccctgcagcctctcagtgctgactctacccctgatgtgaaccagtctcctcggggcaaacgccgggccaaggcggggagccgctcccgcaacagtactctcacgtccctgtgcgtgctcagccactaccctttcttctccaccttccgagagtgtttgtatactctcaagcgcctggtggactgctgtagtgagcgccttctgggcaagaaactgggcatccctcgaggcgtacaaagggacaccatgtggcggatctttactggatcgctgctggtagaggagaagtcaagtgcccttctgcatgaccttcgagagattgaggcctggatctatcgattgctgcgctccccagtacccgtctctgggcagaagcgagtagacatcgaggtcctaccccaagagctccagccagctctgacctttgctcttccagacccatctcgattcaccctagtggatttcccactgcaccttcccttggaacttctaggtgtggacgcctgtctccaggtgctaacctgcattctgttagagcacaaggtggtgctacagtcccgagactacaatgcactctccatgtctgtgatggcattcgtggcaatgatctacccactggagtatatgtttcctgtcatcccgctgctacccacctgcatggcatcagcagagcagctgctgttggctccaaccccgtacatcattggggttcctgccagcttcttcctctacaaactggacttcaaaatgcctgatgatgtatggctagtggatctggacagcaatagggtgattgcccccaccaatgcagaagtgctgcctatcctgccagaaccagaatcactagagctgaaaaagcatttaaagcaggccttggccagcatgagtctcaacacccagcccatcctcaatctggagaaatttcatgagggccaggagatcccccttctcttgggaaggccttctaatgacctgcagtccacaccgtccactgaattcaacccactcatctatggcaatgatgtggattctgtggatgttgcaaccagggttgccatggtacggttcttcaattccgccaacgtgctgcagggatttcagatgcacacgcgtaccctgcgcctctttcctcggcctgtggtagcttttcaagctggctcctttctagcctcacgtccccggcagactccttttgccgagaaattggccaggactcaggctgtggagtactttggggaatggatccttaaccccaccaactatgcctttcagcgaattcacaacaatatgtttgatccagccctgattggtgacaagccaaagtggtatgctcatcagctgcagcctatccactatcgcgtctatgacagcaattcccagctggctgaggccctgagtgtaccaccagagcgggactctgactccgaacctactgatgatagtggcagtgatagtatggattatgacgattcaagctcttcttactcctcccttggtgactttgtcagtgaaatgatgaaatgtgacattaatggtgatactcccaatgtggaccctctgacacatgcagcactgggggatgccagcgaggtggagattgacgagctgcagaatcagaaggaagcagaagagcctggcccagacagtgagaactctcaggaaaaccccccactgcgctccagctctagcaccacagccagcagcagccccagcactgtcatccacggagccaactctgaacctgctgactctacggagatggatgataaggcagcagtaggcgtctccaagcccctcccttccgtgcctcccagcattggcaaatcgaacgtggacagacgtcaggcagaaattggagaggggtcagtgcgccggcgaatctatgacaatccatacttcgagccccaatatggctttccccctgaggaagatgaggatgagcagggggaaagttacactccccgattcagccaacatgtcagtggcaatcgggctcaaaagctgctgcggcccaacagcttgagactggcaagtgactcagatgcagagtcagactctcgggcaagctctcccaactccaccgtctccaacaccagcaccgagggcttcgggggcatcatgtcttttgccagcagcctctatcggaaccacagtaccagcttcagtctttcaaacctcacactgcccaccaaaggtgcccgagagaaggccacgcccttccccagtctgaaagtatttgggctaaatactctaatggagattgttactgaagccggccccgggagtggtgaaggaaacaggagggcgttagtggatcagaagtcatctgtcattaaacacagcccaacagtgaaaagagaacctccatcaccccagggtcgatccagcaattctagtgagaaccagcagttcctgaaggaggtggtgcacagcgtgctggacggccagggagttggctggctcaacatgaaaaaggtgcgccggctgctggagagcgagcagctgcgagtctttgtcctgagcaagctgaaccgcatggtgcagtcagaggacgatgcccggcaggacatcatcccggatgtggagatcagtcggaaggtgtacaagggaatgttagacctcctcaagtgtacagtcctcagcttggagcagtcctatgcccacgcgggtctgggtggcatggccagcatctttgggcttttggagattgcccagacccactactatagtaaagaaccagacaagcggaagagaagtccaacagaaagtgtaaataccccagttggcaaggatcctggcctagctgggcggggggacccaaaggctatggcacaactgagagttccacaactgggacctcgggcaccaagtgccacaggaaagggtcctaaggaactggacaccagaagtttaaaggaagaaaattttatagcatctattgaattgtggaacaagcaccaggaagtgaaaaagcaaaaagctttggaaaaacagaggcctgaagtaatcaaacctgtctttgaccttggtgagacagaggagaaaaagtcccagatcagcgcagacagtggtgtgagcctgacgtctagttcccagaggactgatcaagactctgtcatcggcgtgagtccagctgttatgatccgcagctcaagtcaggattctgaagttagcaccgtggtgagtaatagctctggagagacccttggagctgacagtgacttgagcagcaatgcaggtgatggaccaggtggcgagggcagtgttcacctggcaagctctcggggcactttgtctgatagtgaaattgagaccaactctgccacaagcaccatctttggtaaagcccacagcttgaagccaagcataaaggagaagctggcaggcagccccattcgtacttctgaagatgtgagccagcgagtctatctctatgagggactcctaggaagggacaaaggatccatgtgggaccagttagaggatgcagctatggagaccttttctataagcaaagagcgttctactttatgggaccaaatgcaattctgggaagatgccttcttagatgctgtgatgttggagagagaagggatgggtatggaccagggtccccaggaaatgatcgacaggtacctgtcccttggagaacatgaccggaagcgcctggaagatgatgaagatcgcttgttggccacacttctgcacaacctcatctcctacatgctgctgatgaaggtaaataagaatgacatccgcaagaaggtgaggcgcctaatgggaaagtcgcacattgggcttgtgtacagccagcaaatcaatgaggtgcttgatcagctggcgaacctgaatggacgcgatctctctatctggtccagtggcagccggcacatgaagaagcagacatttgtggtacatgcagggacagatacaaacggagatatctttttcatggaggtgtgcgatgactgtgtggtgttgcgtagtaacatcggaacagtgtatgagcgctggtggtacgagaagctcatcaacatgacctactgtcccaagacgaaggtgttgtgcttgtggcgtagaaatggctctgagacccagctcaacaagttctatactaaaaagtgtcgggagctgtactactgtgtgaaggacagcatggagcgcgctgccgcccgacagcaaagcatcaaacccggacctgaattgggtggcgagttccctgtgcaggacctgaagactggtgagggtggcctgctgcaggtgaccctggaagggatcaacctcaaattcatgcacaatcaggttttcatagagctgaatcacattaaaaagtgcaatacagttcgaggcgtctttgtcctggaggaatttgttcctgaaattaaagaagtggtgagccacaagtacaagacaccaatggcccacgaaatctgctactccgtattatgtctcttctcgtacgtggctgcagttcatagcagtgaggaagatctcagaaccccgccccggcctgtctctagctgatggagaggggctacgcagctgccccagcccagggcacgcccctggccccttgctgttcccaagtgcacgatgctgctgtgactgaggagtggatgatgctcgtgtgtcctctgcaagccccctgctgtggcttggttggttaccggttatgtgtccctctgagtgtgtcttgagcgtgtccaccttctccctctccactcccagaagaccaaactgccttcccctcagggctcaagaatgtgtacagtctgtggggccggtgtgaacccactattttgtgtccttgagacatttgtgttgtggttccttgtccttgtccctggcgttataactgtccactgcaagagtctggctctcccttctctgtgacccggcatgactgggcgcctggagcagtttcactctgtgaggagtgagggaaccctggggctcaccctctcagaggaagggcacagagaggaagggaagaattggggggcagccggagtgagtggcagcctccctgcttccttctgcattcccaagccggcagctactgcccagggcccgcagtgttggctgctgcctgccacagcctctgtgactgcagtggagcggcgaattccctgtggcctgccatgccttcggcatcagaggatggagtggtcgaggctagtggagtcccagggaccgctggctgctctgcctgagcatcagggagggggcaggaaagaccaagctgggtttgcacatctgtctgcaggctgtctctccaggcacggggtgtcaggagggagagacagcctgggtatgggcaagaaatgactgtaaatatttcagccccacattatttatagaaaatgtacagttgtgtgaatgtgaaataaatgtcctcaactccc

SEQ ID NO: 272300 - DNA, 4944 bp, Artificial Sequence
  derived and/or modified sequence
atggtgcagaagaagaagttctgcccccggctgctggactacctggtcattgttggggcccgccatccatcctcggattcagtcgcacagaccccagagctgcttagacgataccctcttgaagaccatactgagtttccccttcctcccgatgtggtgttcttctgtcagccagagggatgcttgtcagttaggcagagaaggatgtctctgagagatgataccagcttcgtttttaccctgaccgacaaggacaccggagttacaaggtatgggatctgtgtcaacttttaccgtagttttcagaaaaggattagtaaggagaaaggggaggggggtgccggtagtcgcggaaaagaggggactcatgcaacctgcgcatctgaagagggtggcacggagtcttcagagagcggcagtagcttgcagcccttgtctgcagacagtactccagatgtgaatcaatcccctaggggaaagcgcagagcaaaggcgggctctagatccaggaattccaccctgaccagcctatgcgtcttgagccactatccctttttctcaacatttcgagaatgcctatataccttgaagcgactggtggactgctgctctgagaggttactcggcaaaaagttgggcatacccagaggggtgcagagggatactatgtggagaatatttaccgggagcctgttagtggaagagaagtccagtgccctcctgcacgatctcagagaaattgaagcttggatctaccgcctgctgaggtcacctgtgcccgtaagcggacagaagcgtgtggatatagaggtcctgccgcaggaactccagccggccttaacttttgccctgcccgatccgtcccggtttacgctggtcgattttccgctccatctccccttagaattgttaggtgttgacgcctgtctgcaagtactgacctgtattctgctggaacataaggttgtattacagagtcgcgattataacgcactgagcatgtctgtgatggccttcgtcgctatgatctacccattggaatacatgttcccggttatacctcttctgccaacttgcatggcgtctgccgaacagctgcttctggcacccaccccatatattatcggggtcccggcaagtttcttcctctacaagctggactttaagatgccagacgacgtttggcttgtggacctggacagtaatagggtcattgcgcctactaatgcggaagtcctgccgatcctgcccgaacctgaatccctggagctgaagaagcatctgaagcaggccctggcaagtatgagtctgaatacacagcccattcttaacctggagaaatttcacgaaggccaagagatacctttgctcttgggacggccctccaatgacctgcagtctacaccgagcacggagtttaatcccctgatttatggaaatgacgtcgattctgtggacgtagccacccgggtggcaatggtccgcttcttcaactccgcaaatgtcttgcaagggttccagatgcacacacgtacactgcggttgttccctaggcctgtagtggcttttcaagctggatcttttctggcctctagaccaagacagacccccttcgcagaaaaactagctagaactcaggcagttgaatattttggcgaatggatcttgaacccaactaattatgcattccagaggatccacaacaatatgtttgaccccgcgttaattggagataagccaaaatggtatgcacaccaattgcagcctatccactaccgagtctacgattccaactctcaactggctgaggccttgagtgtacctccagaaagagactcggattccgaacctactgacgactctggctcagattccatggactacgatgacagttccagttcatattcttctttaggcgatttcgtgagtgagatgatgaagtgtgatatcaacggtgatactcctaacgtggacccgctgactcacgctgcactgggcgatgcgtcagaggtagaaatcgacgaactgcagaaccagaaagaggcggaggagcccggcccagactccgagaacagccaggagaatccaccgcttcgtagcagctctagtactacagcttcttcctcaccaagcacggttatccacggagctaattctgaaccggctgactctacagagatggatgacaaagctgccgtcggcgtgagcaagccgttgccgtctgttcctccttctattggtaagagtaacgtggaccggagacaggcggaaatcggagaagggagcgtgaggcgtaggatttacgacaacccctacttcgaacctcagtacggctttccccctgaagaagacgaagacgagcagggtgagagctatactccccgcttcagtcaacacgtatccggaaaccgggcacagaaactgcttagaccaaacagcctgagactcgcaagcgactccgacgccgaaagtgactcaagggctagcagcccaaattctacagtaagcaatacaagtaccgagggctttggtggaataatgtccttcgcgagctctctgtaccgcaaccattcaaccagcttctctctgtcgaacctgactctgccaacgaagggtgcccgggagaaagctactccatttcccagcttaaaggtgtttgggcttaatactctcatggagattgtgaccgaggccggaccaggttcaggggaagggaatcggagagctctggtggaccaaaagagctcagtgattaaacacagcccaactgtgaagagagagcctccatccccccagggccgctcatccaactcaagtgagaaccaacagttcctcaaagaggtggtgcacagcgtgctcgatgggcaaggcgttgggtggctcaatatgaagaaggtgaggagactgttggagtcagagcagctccgcgtgttcgtcctgtctaagctaaataggatggtgcaatctgaggatgacgcgcggcaggacatcattcctgacgtagagatctccaggaaagtgtataaaggaatgctggacctactcaaatgtacggtgcttagcctggagcaatcatacgcacatgccgggctggggggcatggcctcgatctttggattgctcgaaatagctcaaacccactattattcgaaggaaccagataaaaggaagcggtcccccacagaatcagtgaacaccccagtcggaaaggatccaggcctggctggtaggggagacccgaaagccatggcacagctgcgggtccctcagctgggaccccgagctcccagtgctacaggaaaaggacctaaggaactggacacacgttccctcaaggaagaaaattttattgcttcaatcgaattgtggaacaagcaccaagaggttaagaaacaaaaggccctcgaaaaacagagacccgaggtgattaagcctgtctttgacctgggtgagacagaagagaagaagtcccagatcagtgctgacagcggcgtatcccttacatcctcctctcagcggactgaccaggacagcgttatcggagtctccccagctgtcatgatacgcagctcaagtcaggatagcgaagtttcaactgtcgtttccaattcatccggcgaaacactcggcgccgactctgatttatcctctaatgcgggggatggccccgggggcgaaggatcagttcacttagcatcttctaggggtacgctaagcgactcggaaatcgagacaaactctgcaacatccacgatctttggaaaagcacattctctcaagccaagcatcaaggagaagctggcgggatctcctattcgcacatccgaggatgtgtcccagcgggtgtacttatacgaaggcctgctaggccgcgataaagggtctatgtgggatcagctggaagatgccgcgatggagacattttccatctcgaaagagcggtccactctctgggaccagatgcagttctgggaggatgcatttcttgatgctgtcatgctagaacgcgaaggcatgggtatggaccagggcccccaagagatgatcgaccgctatctgtcactgggcgaacacgacagaaagcgtttagaagacgacgaggaccgccttctggccaccttgctgcataacctgatctcttatatgctgcttatgaaagtgaataaaaacgatatccgaaaaaaggttaggagacttatgggaaaaagtcatatcggcctggtgtacagtcaacaaattaatgaagtcctggaccagctagctaatttgaacggtagggatttgtctatatggtcctctggaagtcggcatatgaaaaaacagacctttgtcgtgcacgcaggtactgataccaacggggacattttctttatggaggtgtgtgacgactgtgtcgtccttcggtctaacatcggcacagtctacgagcgctggtggtacgaaaagttgataaacatgacttattgccctaaaacaaaagtgctgtgcctgtggcgcagaaacgggtctgaaacacaattgaataaattctataccaaaaagtgtcgggagttgtactactgcgttaaagacagcatggaaagggccgcagcacgacaacagtccatcaaaccaggtcccgagctggggggggagtttccagtgcaggatctcaagactggggagggtgggctgcttcaagtgactcttgaaggtattaacctgaagtttatgcacaatcaggtgttcatcgaactgaaccacattaagaagtgtaatacagtccgcggagtttttgtcctagaggagtttgtcccggagatcaaggaggttgtgtcacataagtacaagacccctatggcccatgaaatatgttattccgtcctgtgtctgttctcatatgtggcggcagtgcatagctcagaggaagacctgagaactccaccacgtccagtaagctcatag

SEQ ID NO: 272301 - DNA, 4944 bp, Artificial Sequence
  derived and/or modified sequence
atggttcaaaagaagaagttctgtcccagacttcttgattacctcgtgattgtgggcgctaggcacccatcctcagattccgtggcccagacccctgaactgttacgcagatacccactcgaagatcacaccgagtttccactgccccctgacgtcgtctttttctgccagccagagggctgtctgagtgtgcgccagcgcaggatgtcactgcgtgatgatacttcattcgtgttcacactgactgataaggacactggcgtcactaggtatggtatttgtgtgaatttctacagatccttccagaagcggatctcaaaggaaaagggcgagggcggtgccggttctagaggcaaagaaggcacacatgcaacatgtgctagcgaagaggggggtaccgagtcttctgagtccggtagctccctgcaaccattgtctgccgacagcacacctgacgtgaatcagtctcccagaggcaaacgtagggccaaagccggaagtcgcagtagaaatagcaccctgacttccctatgtgttctgtcacactacccttttttctccacattccgtgagtgcctgtataccttaaaaagacttgtcgactgctgctccgagcgtctgctaggcaaaaaactcggcatcccacgaggggtgcagcgggataccatgtggcggatctttaccgggagtttgctcgtcgaggaaaaaagctctgctctgctgcacgacctgcgcgagatcgaggcatggatctacagattactgcggtcaccagttcccgtgtccgggcagaagagggtggatatcgaggtacttccccaggagttacagcccgctctgacattcgcgctaccagacccctccaggtttacactggtggactttcctctgcacctccccttagagctgttgggagtagacgcttgcctccaggtcttaacttgcatactcctagaacataaagtcgtgctgcagtcccgggactacaatgccctatctatgtccgtgatggcgtttgtcgccatgatttatcccctggaatatatgttccccgtgatcccactgctcccgacatgtatggctagtgccgagcaattactgctggctccaacaccttatattattggagtaccagcgtcttttttcctgtataagctggattttaagatgcccgacgatgtgtggttggtcgatcttgactcaaacagagttattgcacccacgaacgccgaagtccttccaatcctacctgagccggagtcactcgagctcaagaagcatttgaaacaggctttagcgagtatgtcactgaacacccagcctatcctgaacctggaaaagtttcacgaaggtcaggagatccctctgctgctggggcgaccctctaatgacctgcagtccacccctagcaccgagtttaaccccctgatatacggcaatgacgtagacagtgtggatgttgcaaccagagtcgctatggtcagatttttcaacagtgcaaatgtgctacaggggttccagatgcataccagaactcttagactattccctaggcctgtggtggcattccaggcgggatcgttcctggcgtcacgtcccaggcaaacccctttcgccgaaaaattggcaaggactcaggctgtagagtacttcggggaatggatcctgaatcctacaaactacgcttttcagagaatccacaataatatgttcgacccagcactcatcggggataaacctaagtggtatgctcatcagctgcagccaattcactatcgagtatatgactccaacagccagctcgccgaggccctatccgtgccgccagaacgcgactccgatagtgaaccaacagacgacagcggctcagacagcatggactacgacgacagctcctcatcttatagctcacttggggacttcgtcagcgaaatgatgaaatgcgacatcaacggagacactccaaacgttgatcccctcacccacgcagccctcggggatgccagcgaagtcgagatcgacgaactccagaatcagaaagaagcagaagaaccaggccctgacagcgagaactcccaggagaatccaccactgagaagcagctcatcaacaactgctagcagcagtcctagcacagtgattcatggggcaaatagtgaacctgcagattcaactgaaatggatgataaggctgcagttggcgtgagcaagcccctccccagcgtccccccaagcatcggtaaaagtaatgtcgataggcggcaggccgagatcggagagggctcggtgagacggaggatctatgataacccttacttcgagcctcagtacggctttccccctgaggaagatgaggacgagcagggcgagtcctacaccccacgattctcccagcatgtttctggcaatagggcgcaaaagttgctaaggcccaattcactgcgtttggcctccgactctgatgcagagagtgactccagggcgtcatctcccaactcaacagtgtccaacacctctaccgagggcttcggtggcattatgtcattcgcgagcagtttgtacagaaaccactcaacatcattttctctgtctaacctgaccttgccaaccaagggcgctcgtgaaaaggctacgcctttcccctccctcaaagtgttcggactaaatacgctgatggagattgtgactgaagccggtccgggttcaggcgagggcaaccgcagagcccttgtggatcagaaatcgagcgtgattaaacactcaccgacagtgaagagagaaccgccaagcccccaggggaggagcagcaacagtagcgaaaatcaacagttcttgaaggaggtcgttcatagcgtgctggatgggcagggagtgggatggctgaatatgaaaaaagttaggcggttattagagagcgagcagctcagagtgttcgttctatcgaaactgaacaggatggttcaatcagaggacgacgcccgacaagatatcattccagatgtggagattagtcgcaaagtctataaggggatgctggatttgctgaagtgtacagtcctgtccctagaacagtcatacgcacatgctgggctcggaggaatggcatctatttttggcctgcttgagattgcccagacacattattactccaaggagcccgacaaaaggaaaagatctccaactgaatctgtgaacacgccagtcggaaaggatcctggcctcgccggtagaggagatccaaaggcgatggcacaactgcgcgttccacaactgggaccacgtgcccctagcgccacagggaaaggtcccaaggagttagacacacgcagcctcaaagaagaaaactttatcgctagcattgagttgtggaacaaacatcaagaggttaagaaacaaaaggctctggaaaagcagcggcctgaagtgataaagcccgttttcgacctgggggagacagaggagaagaagtctcagatctccgccgattccggcgtcagtctgacatcttcttcacagcggaccgatcaggattccgtcatcggagtgtctcctgccgtgatgatcaggtcctcctcacaggactcggaggtgagcacggtcgtgtcaaatagcagcggagagacacttggagcggattccgacttatcctctaatgcaggggatggtccagggggagaaggcagtgtccacctggcgtcctccagagggacactaagcgactcagaaatagaaacaaatagcgcaacctcgaccatcttcggcaaagcccactctctgaagcccagcatcaaggagaagctggccggaagtccaattagaacaagcgaagacgttagccaaagggtctatctctacgagggtctcctcgggagggacaagggaagtatgtgggaccagttagaagacgctgctatggaaactttcagcatttccaaggaacgatcaacactgtgggaccagatgcagttctgggaggatgctttcctcgatgctgtcatgttggagcgtgaaggaatgggcatggaccagggccctcaggagatgatagaccgctacctatccctgggcgagcatgatagaaagcgcttagaagacgacgaggaccgcctgttggctaccctccttcacaatcttatcagctacatgctcctaatgaaggttaataagaacgacattcgaaaaaaagtacgcaggcttatgggaaagagtcatattggcctggtgtatagccaacagatcaatgaggtgcttgatcagctggccaatctgaacgggagagatctctccatctggtcctctggatcccgccatatgaagaagcagactttcgtggtgcatgcgggaaccgacactaatggcgacatctttttcatggaagtgtgtgatgactgcgtggtcctgcggagcaacatcggaaccgtgtacgagcgctggtggtacgagaagctcattaatatgacctactgccccaagaccaaggttctgtgcttgtggaggcggaatggaagtgaaactcagctaaataaattttacaccaagaagtgccgagaactgtactactgcgttaaggactccatggagcgggctgctgctaggcagcagtcgataaaaccgggtcctgagctgggcggagagtttcctgtacaggatttgaagacaggcgagggcggtctcttgcaggtcacgcttgaaggcattaatctgaagttcatgcacaaccaggttttcatagagctgaaccacatcaaaaaatgtaacacagtccgcggagtttttgtgctggaggagttcgttccagagattaaagaggtggtcagccacaaatacaagacccctatggcacacgaaatttgttattcagtattatgtctcttttcctatgtggccgctgttcattcatcagaggaggatctcagaacaccgccacgcccagtcagctcctag

SEQ ID NO: 272302 - DNA, 4944 bp, Artificial Sequence
  derived and/or modified sequence
atggtgcagaagaagaagttctgccccagactgctggactacctggtgatcgtgggcgccagacaccccagcagcgacagcgtggcccagacccccgagctgctgagaagataccccctggaggaccacaccgagttccccctgccccccgacgtggtgttcttctgccagcccgagggctgcctgagcgtgagacagagaagaatgagcctgagagacgacaccagcttcgtgttcaccctgaccgacaaggacaccggcgtgaccagatacggcatctgcgtgaacttctacagaagcttccagaagagaatcagcaaggagaagggcgagggcggcgccggcagcagaggcaaggagggcacccacgccacctgcgccagcgaggagggcggcaccgagagcagcgagagcggcagcagcctgcagcccctgagcgccgacagcacccccgacgtgaaccagagccccagaggcaagagaagagccaaggccggcagcagaagcagaaacagcaccctgaccagcctgtgcgtgctgagccactaccccttcttcagcaccttcagagagtgcctgtacaccctgaagagactggtggactgctgcagcgagagactgctgggcaagaagctgggcatccccagaggcgtgcagagagacaccatgtggagaatcttcaccggcagcctgctggtggaggagaagagcagcgccctgctgcacgacctgagagagatcgaggcctggatctacagactgctgagaagccccgtgcccgtgagcggccagaagagagtggacatcgaggtgctgccccaggagctgcagcccgccctgaccttcgccctgcccgaccccagcagattcaccctggtggacttccccctgcacctgcccctggagctgctgggcgtggacgcctgcctgcaggtgctgacctgcatcctgctggagcacaaggtggtgctgcagagcagagactacaacgccctgagcatgagcgtgatggccttcgtggccatgatctaccccctggagtacatgttccccgtgatccccctgctgcccacctgcatggccagcgccgagcagctgctgctggcccccaccccctacatcatcggcgtgcccgccagcttcttcctgtacaagctggacttcaagatgcccgacgacgtgtggctggtggacctggacagcaacagagtgatcgcccccaccaacgccgaggtgctgcccatcctgcccgagcccgagagcctggagctgaagaagcacctgaagcaggccctggccagcatgagcctgaacacccagcccatcctgaacctggagaagttccacgagggccaggagatccccctgctgctgggcagacccagcaacgacctgcagagcacccccagcaccgagttcaaccccctgatctacggcaacgacgtggacagcgtggacgtggccaccagagtggccatggtgagattcttcaacagcgccaacgtgctgcagggcttccagatgcacaccagaaccctgagactgttccccagacccgtggtggccttccaggccggcagcttcctggccagcagacccagacagacccccttcgccgagaagctggccagaacccaggccgtggagtacttcggcgagtggatcctgaaccccaccaactacgccttccagagaatccacaacaacatgttcgaccccgccctgatcggcgacaagcccaagtggtacgcccaccagctgcagcccatccactacagagtgtacgacagcaacagccagctggccgaggccctgagcgtgccccccgagagagacagcgacagcgagcccaccgacgacagcggcagcgacagcatggactacgacgacagcagcagcagctacagcagcctgggcgacttcgtgagcgagatgatgaagtgcgacatcaacggcgacacccccaacgtggaccccctgacccacgccgccctgggcgacgccagcgaggtggagatcgacgagctgcagaaccagaaggaggccgaggagcccggccccgacagcgagaacagccaggagaacccccccctgagaagcagcagcagcaccaccgccagcagcagccccagcaccgtgatccacggcgccaacagcgagcccgccgacagcaccgagatggacgacaaggccgccgtgggcgtgagcaagcccctgcccagcgtgccccccagcatcggcaagagcaacgtggacagaagacaggccgagatcggcgagggcagcgtgagaagaagaatctacgacaacccctacttcgagccccagtacggcttcccccccgaggaggacgaggacgagcagggcgagagctacacccccagattcagccagcacgtgagcggcaacagagcccagaagctgctgagacccaacagcctgagactggccagcgacagcgacgccgagagcgacagcagagccagcagccccaacagcaccgtgagcaacaccagcaccgagggcttcggcggcatcatgagcttcgccagcagcctgtacagaaaccacagcaccagcttcagcctgagcaacctgaccctgcccaccaagggcgccagagagaaggccacccccttccccagcctgaaggtgttcggcctgaacaccctgatggagatcgtgaccgaggccggccccggcagcggcgagggcaacagaagagccctggtggaccagaagagcagcgtgatcaagcacagccccaccgtgaagagagagccccccagcccccagggcagaagcagcaacagcagcgagaaccagcagttcctgaaggaggtggtgcacagcgtgctggacggccagggcgtgggctggctgaacatgaagaaggtgagaagactgctggagagcgagcagctgagagtgttcgtgctgagcaagctgaacagaatggtgcagagcgaggacgacgccagacaggacatcatccccgacgtggagatcagcagaaaggtgtacaagggcatgctggacctgctgaagtgcaccgtgctgagcctggagcagagctacgcccacgccggcctgggcggcatggccagcatcttcggcctgctggagatcgcccagacccactactacagcaaggagcccgacaagagaaagagaagccccaccgagagcgtgaacacccccgtgggcaaggaccccggcctggccggcagaggcgaccccaaggccatggcccagctgagagtgccccagctgggccccagagcccccagcgccaccggcaagggccccaaggagctggacaccagaagcctgaaggaggagaacttcatcgccagcatcgagctgtggaacaagcaccaggaggtgaagaagcagaaggccctggagaagcagagacccgaggtgatcaagcccgtgttcgacctgggcgagaccgaggagaagaagagccagatcagcgccgacagcggcgtgagcctgaccagcagcagccagagaaccgaccaggacagcgtgatcggcgtgagccccgccgtgatgatcagaagcagcagccaggacagcgaggtgagcaccgtggtgagcaacagcagcggcgagaccctgggcgccgacagcgacctgagcagcaacgccggcgacggccccggcggcgagggcagcgtgcacctggccagcagcagaggcaccctgagcgacagcgagatcgagaccaacagcgccaccagcaccatcttcggcaaggcccacagcctgaagcccagcatcaaggagaagctggccggcagccccatcagaaccagcgaggacgtgagccagagagtgtacctgtacgagggcctgctgggcagagacaagggcagcatgtgggaccagctggaggacgccgccatggagaccttcagcatcagcaaggagagaagcaccctgtgggaccagatgcagttctgggaggacgccttcctggacgccgtgatgctggagagagagggcatgggcatggaccagggcccccaggagatgatcgacagatacctgagcctgggcgagcacgacagaaagagactggaggacgacgaggacagactgctggccaccctgctgcacaacctgatcagctacatgctgctgatgaaggtgaacaagaacgacatcagaaagaaggtgagaagactgatgggcaagagccacatcggcctggtgtacagccagcagatcaacgaggtgctggaccagctggccaacctgaacggcagagacctgagcatctggagcagcggcagcagacacatgaagaagcagaccttcgtggtgcacgccggcaccgacaccaacggcgacatcttcttcatggaggtgtgcgacgactgcgtggtgctgagaagcaacatcggcaccgtgtacgagagatggtggtacgagaagctgatcaacatgacctactgccccaagaccaaggtgctgtgcctgtggagaagaaacggcagcgagacccagctgaacaagttctacaccaagaagtgcagagagctgtactactgcgtgaaggacagcatggagagagccgccgccagacagcagagcatcaagcccggccccgagctgggcggcgagttccccgtgcaggacctgaagaccggcgagggcggcctgctgcaggtgaccctggagggcatcaacctgaagttcatgcacaaccaggtgttcatcgagctgaaccacatcaagaagtgcaacaccgtgagaggcgtgttcgtgctggaggagttcgtgcccgagatcaaggaggtggtgagccacaagtacaagacccccatggcccacgagatctgctacagcgtgctgtgcctgttcagctacgtggccgccgtgcacagcagcgaggaggacctgagaaccccccccagacccgtgagcagctag

SEQ ID NO: 272303 - protein, 1608 aa, Artificial Sequence
  derived and/or modified sequence
MVQKKKFCPRLLDYLVIVGARHPSSDSVAQTPELLRRYPLEDHTEFPLPPDVVFFCQPEGCLSVRQRRMSLRDDTSFVFTLTDKDTGVTRYGICVNFYRSFQKRISKEKGEGGAGSRGKEGTHATCASEEGGTESSESGSSLQPLSADSTPDVNQSPRGKRRAKAGSRSRNSTLTSLCVLSHYPFFSTFRECLYTLKRLVDCCSERLLGKKLGIPRGVQRDTMWRIFTGSLLVEEKSSALLHDLREIEAWIYRLLRSPVPVSGQKRVDIEVLPQELQPALTFALPDPSRFTLVDFPLHLPLELLGVDACLQVLTCILLEHKVVLQSRDYNALSMSVMAFVAMIYPLEYMFPVIPLLPTCMASAEQLLLAPTPYIIGVPASFFLYKLDFKMPDDVWLVDLDSNRVIAPTNAEVLPILPEPESLELKKHLKQALASMSLNTQPILNLEKFHEGQEIPLLLGRPSNDLQSTPSTEFNPLIYGNDVDSVDVATRVAMVRFFNSANVLQGFQMHTRTLRLFPRPVVAFQAGSFLASRPRQTPFAEKLARTQAVEYFGEWILNPTNYAFQRIHNNMFDPALIGDKPKWYAHQLQPIHYRVYDSNSQLAEALSVPPERDSDSEPTDDSGSDSMDYDDSSSSYSSLGDFVSEMMKCDINGDTPNVDPLTHAALGDASEVEIDELQNQKEAEEPGPDSENSQENPPLRSSSSTTASSSPSTVIHGANSEPADSTEMDDKAAVGVSKPLPSVPPSIGKSNVDRRQAEIGEGSVRRRIYDNPYFEPQYGFPPEEDEDEQGESYTPRFSQHVSGNRAQKLLRPNSLRLASDSDAESDSRASSPNSTVSNTSTEGFGGIMSFASSLYRNHSTSFSLSNLTLPTKGAREKATPFPSLKVFGLNTLMEIVTEAGPGSGEGNRRALVDQKSSVIKHSPTVKREPPSPQGRSSNSSENQQFLKEVVHSVLDGQGVGWLNMKKVRRLLESEQLRVFVLSKLNRMVQSEDDARQDIIPDVEISRKVYKGMLDLLKCTVLSLEQSYAHAGLGGMASIFGLLEIAQTHYYSKEPDKRKRSPTESVNTPVGKDPGLAGRGDPKAMAQLRVPQLGPRAPSATGKGPKELDTRSLKEENFIASIGPEVIKPVFDLGETEEKKSQISADSGVSLTSSSQRTDQDSVIGVSPAVMIRSSSQDSEVSTVVSNSSGETLGADSDLSSNAGDGPGGEGSVHLASSRGTLSDSEIETNSATSTIFGKAHSLKPSIKEKLAGSPIRTSEDVSQRVYLYEGLLGKERSTLWDQMQFWEDAFLDAVMLEREGMGMDQGPQEMIDRYLSLGEHDRKRLEDDEDRLLATLLHNLISYMLLMKVNKNDIRKKVRRLMGKSHIGLVYSQQINEVLDQLANLNGRDLSIWSSGSRHMKKQTFVVHAGTDTNGDIFFMEVCDDCVVLRSNIGTVYERWWYEKLINMTYCPKTKVLCLWRRNGSETQLNKFYTKKCRELYYCVKDSMERAAARQQSIKPGPELGGEFPVQDLKTGEGGLLQVTLEGINLKFMHNQVFIELNHIKKCNTVRGVFVLEEFVPEIKEVVSHKYKTPMAHEICYSVLCLFSYVAAVHSSEEDLRTPPRPVSS

SEQ ID NO: 272304 - DNA, 4827 bp, Artificial Sequence
  derived and/or modified sequence
atggttcaaaagaagaaattctgcccaaggctgctcgattacttagtgattgtgggtgcccgtcatccttctagcgattcggttgcccagacaccagagctgttaagacgctatccccttgaggaccacaccgaattccctctgccgcctgacgtcgtctttttctgccagcccgaaggttgtctgagtgtccgccagaggaggatgtcgctgcgcgatgacacatctttcgtgttcacactgacagacaaagatacaggcgtgacaagatacgggatttgtgtcaatttctaccgcagtttccagaaacgcattagtaaggaaaagggagagggaggtgccggaagcaggggtaaagagggaactcatgcaacgtgcgctagtgaagagggaggcaccgagtcttcggagtctggcagctcactgcaacccctgagtgccgattccactcctgatgtaaaccagtcgccccgaggcaaaaggcgtgcaaaggcagggtctcgcagccgcaatagtaccctaaccagcctctgtgttttgtctcactatcccttcttcagcacctttagggagtgcctgtacaccctaaagcgactggtggactgctgctccgagcgactccttggtaaaaagctcgggataccccgcggtgttcaacgcgacaccatgtggcggattttcaccggcagtctgttggtcgaggagaagtcgagtgccctgctgcacgatcttcgggaaatcgaggcatggatctaccggctcttacggagccccgtgcccgtgtcagggcagaaaagggttgacatcgaagttctgccacaagagctgcagcctgctctgacctttgctttgccagatcctagcaggttcacgctcgttgattttcccctgcatctgcctttggagcttctgggcgtggacgcctgccttcaggtgctgacttgtattctcctagagcataaggttgttctccaatcacgcgactataatgccttgagcatgtccgtgatggctttcgtggcaatgatttaccccctggagtacatgttcccggtgatcccacttctgccgacgtgcatggccagcgccgaacaactgctgctggcccccaccccctacattattggggtccccgctagcttcttcctgtataagctcgatttcaagatgccagacgatgtgtggctggtggacctcgattcaaatcgggtgattgcccccacaaacgctgaagtgttgccaatcctgccagagcctgagagcctggaactcaaaaaacacttgaaacaggctctggcgtctatgtcacttaatactcagccaatactcaatttggagaagttccacgaaggccaagagattccattactcttgggccgcccgagcaacgatctccagtctaccccttcaacagaatttaacccgctcatctacggtaatgacgttgacagcgtagatgtggccacacgtgtagctatggtgcggttttttaactccgctaacgtgctgcaaggcttccagatgcacactagaactttaaggctgttcccgcgccccgtggtcgcattccaagcgggcagttttttggcctcccgcccgcggcagactccttttgcagagaagctggctaggactcaggccgtagagtattttggggagtggattttgaatcctaccaactacgctttccagaggatccacaataacatgtttgacccggctctcatcggagacaagccaaaatggtatgcccaccagctgcaaccaatccattacagagtgtacgatagcaactcccagctcgccgaagctttatcggtccctcctgagagagattccgacagtgaacccaccgatgattctgggtctgattccatggactacgatgactcctcatcgagttactccagtctcggggactttgtcagcgaaatgatgaaatgcgacatcaacggtgacacgccaaatgtggaccccctgactcacgctgcactcggagatgctagcgaggtggaaattgatgaactccagaatcagaaagaagccgaagaacctgggccggacagcgaaaacagtcaagagaacccacctctgcggtcttccagttctactacagcttcatctagccccagcacggtgatccacggcgcaaacagtgaacctgcagactctacagaaatggacgacaaagccgcggtaggtgtctcaaaacccttgccttccgtgcccccctccatcgggaaatccaatgtggatcgcaggcaggctgagatcggtgaggggtcagtgaggcgcagaatctacgataacccatattttgagccccagtatggattcccaccagaggaagacgaagacgaacagggggaaagctatactccacgattcagccagcatgtgagtgggaacagagcccagaaattgctaagacctaactccttgaggctggcatcagacagcgacgctgaatcagatagccgggctagcagtcccaacagtacagtgagtaacaccagtacggaaggcttcgggggaattatgtcattcgctagctcactgtatcgcaaccatagtacttctttcagcttgagtaatctgaccctgccaactaagggagcaagggagaaggccaccccatttcccagcctgaaagtctttggactgaatacacttatggagattgtcacagaagcgggccctggttcaggcgaaggaaaccggagagctctggtggaccagaaaagctccgtcattaagcactctccaaccgtgaagcgcgagcccccatctccacagggaagaagctcaaattcctccgaaaaccagcagttccttaaagaggtggtacatagcgtgctcgacggccagggggtaggctggctcaacatgaaaaaagtgcgacgcctgctcgaatcagagcagttgagggtatttgttttaagcaaactcaacaggatggtgcaatccgaggatgatgcaaggcaggatataattcccgacgttgagatatcccgcaaggtgtacaaggggatgctcgacctcctgaaatgcacagtgctgtctctggaacagagctacgcccacgcagggctaggtggtatggcgtcaatcttcggcctgctcgaaattgcccagactcactattactcaaaggaaccagacaaacggaagagatctcctaccgaatcagtcaatacgccagtgggcaaggaccccggactggccggaaggggcgatcccaaggctatggctcagcttcgcgttccccagctgggtcctagagccccatctgcgacagggaaggggccgaaagaactggatactcgaagtctcaaggaggagaactttatcgcatctattgggcccgaggtcatcaaaccagtgtttgacctaggtgagaccgaagaaaagaaaagccagattagcgccgactcgggcgtcagcctgacatctagcagccagaggaccgatcaggacagtgtgattggtgtctcacccgccgttatgattagaagcagcagccaggactctgaggtgtcaaccgtggtatcaaacagctccggtgaaactttaggggctgactctgacctgtctagcaatgcaggtgacggcccaggaggtgaaggatcggtgcatctggctagttctaggggcacactgagcgattcagagatagaaaccaactcagctacgagcaccatcttcggcaaggcccattcattgaagccctctatcaaagagaaactagcagggtctcccatccgaaccagcgaagacgtgtcacagcgtgtatacttatatgaggggttactgggcaaggagcggagcacgctgtgggatcagatgcagttctgggaggacgccttcctagacgcagtgatgctggagcgggagggcatggggatggatcaagggccccaggagatgatcgaccggtatcttagcttgggagagcacgaccgtaaaaggttggaggatgacgaagacaggctgctggccactcttcttcataatctgatcagctacatgcttctgatgaaggtcaataaaaatgacattaggaagaaagtgagacggctcatgggtaagtctcacatcggactggtctatagccagcagattaatgaagtgctggatcagcttgctaacctcaatgggcgggaccttagtatttggagctcagggagccggcacatgaagaaacagacatttgtggtccacgccggtactgataccaatggcgacatcttttttatggaggtttgcgacgactgtgttgtcctgcggtcgaacatcgggactgtctatgaaagatggtggtacgagaaacttatcaacatgacttattgccctaagactaaagtattgtgcctgtggaggagaaatggtagtgagacacagctcaataagttttatactaagaaatgtagggaactctattactgtgtgaaagactctatggagcgggctgctgcaagacaacagagcatcaaacccggccctgaactagggggagaatttcccgttcaagatcttaagacgggcgagggagggctcttacaggtcactctggaaggcattaacttgaagtttatgcacaatcaggttttcatcgagctcaaccacattaagaagtgcaacaccgtccgcggagtgtttgtgctagaggagtttgtgcctgagataaaggaggtagtgtcccacaaatataagactcccatggcgcatgagatctgttattctgtcctgtgcctctttagctatgtggcggccgtacattcctctgaagaggatctgagaacccctccaaggcctgtatcgagttag

SEQ ID NO: 272305 - DNA, 4827 bp, Artificial Sequence
  derived and/or modified sequence
atggtgcagaagaagaagttctgcccccggctgctggactacctggtgattgtgggcgcccggcaccccagcagtgacagcgtggcccagaccccagagctgctgcggcgctaccccctggaggaccacacagagttccccctgcccccagatgtggtgttcttctgccagcctgagggctgcctgtctgtgcggcagaggaggatgagcctgagagatgacaccagctttgtgttcaccctgacagacaaggacaccggggtgaccaggtatggcatctgtgtgaacttctaccgctccttccagaagaggatcagcaaggagaagggggagggcggggccggcagccggggcaaggagggcacccacgccacctgtgccagcgaggagggcggcacagagagcagcgagagcggcagcagcctgcagcccctgtctgctgacagcaccccagatgtgaaccagagcccccggggcaagagaagagccaaggccggcagccgcagcaggaacagcaccctgaccagcctgtgtgtgctgagccactaccccttcttcagcaccttcagagaatgtctgtacaccctgaagaggctggtggactgctgcagcgagcggctgctgggcaagaagctgggcatcccccggggcgtgcagagggacaccatgtggaggatcttcaccggcagcctgctggtggaggagaagagcagcgccctgctgcatgacctgcgggagattgaggcctggatctaccgcctgctgcggagccctgtgcctgtgtctggccagaagagggtggacatcgaggtgctgccccaggagctgcagcctgccctgacctttgccctgcctgaccccagccgcttcaccctggtggacttccccctgcacctgcccctggagctgctgggcgtggatgcctgcctgcaggtgctgacctgcatcctgctggagcacaaggtggtgctgcagagccgggactacaatgccctgtccatgtctgtgatggcctttgtggccatgatctaccccctggagtacatgtttcctgtgatccccctgctgcccacctgcatggccagcgctgagcagctgctgctggcccccaccccctacatcattggagtgcctgccagcttcttcctgtacaagctggacttcaagatgccagatgatgtgtggctggtggacctggacagcaacagagtgattgcccccaccaatgctgaggtgctgcccatcctgcctgagcctgagagcctggagctgaagaagcacctgaagcaggccctggcctccatgagcctgaacacccagcccatcctgaacctggagaagttccacgagggccaggagatccccctgctgctgggccggcccagcaatgacctgcagagcacccccagcacagagttcaaccccctcatctatggaaatgatgtggacagcgtggatgtggccaccagggtggccatggtgcgcttcttcaacagcgccaacgtgctgcagggcttccagatgcacaccaggaccctgcggctcttccccaggcctgtggtggccttccaggccggcagcttcctggccagccggccccggcagaccccatttgctgagaagctggcccggacccaggccgtggagtactttggagagtggatcctgaaccccaccaactatgccttccagaggatccacaacaacatgtttgatcctgccctgattggagacaagcccaagtggtacgcccaccagctgcagcccatccactacagagtgtatgacagcaacagccagctggccgaggccctgtctgtgcccccagagcgggacagcgacagcgagcccacagatgattctggcagtgacagcatggactatgatgacagcagcagcagctacagcagcctgggggactttgtgtctgagatgatgaagtgtgacatcaatggagacacccccaacgtggaccccctgacccatgctgccctgggagatgccagcgaggtggagattgatgagctgcagaaccagaaggaggccgaggagcccggcccagattctgagaacagccaggagaacccccccctgcggagcagcagcagcaccacagccagcagcagccccagcaccgtcatccatggagccaacagcgagcctgctgacagcacagagatggatgacaaggctgctgtgggcgtgtccaagcccctgcccagcgtgcccccatccatcggcaagagcaatgtggaccggcggcaggccgagatcggggagggctctgtgagaagacgcatctatgacaacccctactttgagccccagtatggcttccccccagaagaagatgaagatgagcagggcgagagctacaccccccgcttcagccagcacgtgtctggcaacagagcccagaagctgctgcggcccaacagcctgcggctggccagtgacagtgatgctgagagtgacagccgggccagcagccccaacagcacagtgagcaacaccagcacagagggctttggaggcatcatgagctttgccagcagcctgtacagaaaccacagcaccagcttcagcctgagcaacctgaccctgcccaccaagggggcccgggagaaggccacccccttccccagcctgaaggtgtttggcctgaacaccctgatggagatcgtgacagaggccggccctggcagcggggagggcaacagaagagccctggtggaccagaagagcagcgtcatcaagcacagccccaccgtgaagcgggagccccccagcccccagggccgcagcagcaacagcagcgagaaccagcagttcctgaaggaggtggtgcacagcgtgctggatggccagggcgtgggctggctgaacatgaagaaggtgcggcggctgctggagagcgagcagctgcgggtgtttgtgctgagcaagctgaacaggatggtgcagagtgaagatgatgcccggcaggacatcatcccagatgtggagatcagcaggaaggtgtacaagggcatgctggacctgctgaagtgcaccgtgctgagcctggagcagagctatgcccatgctggcctgggcggcatggccagcatcttcggcctgctggagatcgcccagacccactactacagcaaggagccagacaagaggaagaggagccccacagaatctgtgaacacccctgtgggcaaggaccccggcctggccggccgcggggaccccaaggccatggcccagctgcgggtgccccagctgggcccccgggcccccagcgccaccgggaagggccccaaggagctggacaccaggagcctgaaggaggagaacttcatcgccagcatcggccctgaggtgatcaagcctgtgtttgacctgggggagacagaggagaagaagagccagatctctgctgacagcggcgtgtccctgaccagcagcagccagaggacagaccaggacagcgtcatcggcgtgtccccagctgtgatgatccgcagcagcagccaggacagcgaggtgtccacagtggtgagcaacagcagtggagagaccctgggcgctgacagcgacctgagcagcaatgctggagatggccctggaggagagggctctgtgcacctggccagcagccggggcaccctgagtgacagcgagattgagaccaacagcgccaccagcaccatctttgggaaggcccacagcctgaagcccagcatcaaggagaagctggccggcagccccatccgcaccagtgaagatgtgtcccagagggtgtacctgtatgagggcctgctgggcaaggagaggagcaccctgtgggaccagatgcagttctgggaggatgccttcctggatgctgtgatgctggagcgggagggcatgggcatggaccagggcccccaggagatgattgaccgctacctgagcctgggggagcatgacaggaagaggctggaggatgatgaggaccggctgctggccaccctgctgcacaacctgatctcctacatgctgctgatgaaggtgaacaagaatgacatcaggaagaaggtgcggcggctgatgggcaagagccacatcggcctggtgtacagccagcagatcaatgaggtgctggaccagctggccaacctgaatggccgggacctgagcatctggagcagcggcagccgccacatgaagaagcagacctttgtggtgcacgccggcacagacaccaatggagacatcttcttcatggaggtgtgtgatgactgtgtggtgctgcggagcaacatcggcaccgtgtatgagcgctggtggtatgagaagctgatcaacatgacctactgccccaagaccaaggtgctgtgcctgtggaggagaaatggcagcgagacccagctgaacaagttctacaccaagaagtgccgggagctgtactactgtgtgaaggacagcatggagagagctgctgcccggcagcagagcatcaagccaggccctgagctgggcggggagttccctgtgcaggacctgaagacaggagagggcggcctgctgcaggtgaccctggagggcatcaacctgaagttcatgcacaaccaggtgttcatcgagctgaaccacatcaagaagtgcaacacagtgcggggcgtgtttgtgctggaggagtttgtgcctgagatcaaggaggtggtgagccacaagtacaagacccccatggcccacgagatctgctacagcgtgctgtgcctcttctcctatgtggccgctgtgcacagcagcgaggaggacctgcggaccccacccaggcctgtgagcagctag

SEQ ID NO: 272306 - DNA, 5873 bp, Artificial Sequence
  derived and/or modified sequence
cccgctgcccaggattggtaggctccaccgctcggcagccggcttccctgctcggacgccgagcaccgccaaagcgcacttcgattttcagaattcctcctgggaatgctgactccttgcttggtgccctgatgcttctctgagataaactgatgaattggaaccatggtgcaaaagaagaagttctgtcctcggttacttgactatctagtgatcgtaggggccaggcacccgagcagtgatagcgtggcccagactcctgaattgctacggcgataccccttggaggatcacactgagtttcccctgcccccagatgtagtgttcttctgccagcccgagggctgcctgagcgtgcggcagcggcgcatgagccttcgggatgatacctcttttgtcttcaccctcactgacaaggacactggagtcacgcgatatggcatctgtgttaacttctaccgctccttccaaaagcgaatctctaaggagaagggggaaggtggggcagggtcccgtgggaaggaaggaacccatgccacctgtgcctcagaagagggtggcactgagagctcagagagtggctcatccctgcagcctctcagtgctgactctacccctgatgtgaaccagtctcctcggggcaaacgccgggccaaggcggggagccgctcccgcaacagtactctcacgtccctgtgcgtgctcagccactaccctttcttctccaccttccgagagtgtttgtatactctcaagcgcctggtggactgctgtagtgagcgccttctgggcaagaaactgggcatccctcgaggcgtacaaagggacaccatgtggcggatctttactggatcgctgctggtagaggagaagtcaagtgcccttctgcatgaccttcgagagattgaggcctggatctatcgattgctgcgctccccagtacccgtctctgggcagaagcgagtagacatcgaggtcctaccccaagagctccagccagctctgacctttgctcttccagacccatctcgattcaccctagtggatttcccactgcaccttcccttggaacttctaggtgtggacgcctgtctccaggtgctaacctgcattctgttagagcacaaggtggtgctacagtcccgagactacaatgcactctccatgtctgtgatggcattcgtggcaatgatctacccactggagtatatgtttcctgtcatcccgctgctacccacctgcatggcatcagcagagcagctgctgttggctccaaccccgtacatcattggggttcctgccagcttcttcctctacaaactggacttcaaaatgcctgatgatgtatggctagtggatctggacagcaatagggtgattgcccccaccaatgcagaagtgctgcctatcctgccagaaccagaatcactagagctgaaaaagcatttaaagcaggccttggccagcatgagtctcaacacccagcccatcctcaatctggagaaatttcatgagggccaggagatcccccttctcttgggaaggccttctaatgacctgcagtccacaccgtccactgaattcaacccactcatctatggcaatgatgtggattctgtggatgttgcaaccagggttgccatggtacggttcttcaattccgccaacgtgctgcagggatttcagatgcacacgcgtaccctgcgcctctttcctcggcctgtggtagcttttcaagctggctcctttctagcctcacgtccccggcagactccttttgccgagaaattggccaggactcaggctgtggagtactttggggaatggatccttaaccccaccaactatgcctttcagcgaattcacaacaatatgtttgatccagccctgattggtgacaagccaaagtggtatgctcatcagctgcagcctatccactatcgcgtctatgacagcaattcccagctggctgaggccctgagtgtaccaccagagcgggactctgactccgaacctactgatgatagtggcagtgatagtatggattatgacgattcaagctcttcttactcctcccttggtgactttgtcagtgaaatgatgaaatgtgacattaatggtgatactcccaatgtggaccctctgacacatgcagcactgggggatgccagcgaggtggagattgacgagctgcagaatcagaaggaagcagaagagcctggcccagacagtgagaactctcaggaaaaccccccactgcgctccagctctagcaccacagccagcagcagccccagcactgtcatccacggagccaactctgaacctgctgactctacggagatggatgataaggcagcagtaggcgtctccaagcccctcccttccgtgcctcccagcattggcaaatcgaacgtggacagacgtcaggcagaaattggagaggggtcagtgcgccggcgaatctatgacaatccatacttcgagccccaatatggctttccccctgaggaagatgaggatgagcagggggaaagttacactccccgattcagccaacatgtcagtggcaatcgggctcaaaagctgctgcggcccaacagcttgagactggcaagtgactcagatgcagagtcagactctcgggcaagctctcccaactccaccgtctccaacaccagcaccgagggcttcgggggcatcatgtcttttgccagcagcctctatcggaaccacagtaccagcttcagtctttcaaacctcacactgcccaccaaaggtgcccgagagaaggccacgcccttccccagtctgaaagtatttgggctaaatactctaatggagattgttactgaagccggccccgggagtggtgaaggaaacaggagggcgttagtggatcagaagtcatctgtcattaaacacagcccaacagtgaaaagagaacctccatcaccccagggtcgatccagcaattctagtgagaaccagcagttcctgaaggaggtggtgcacagcgtgctggacggccagggagttggctggctcaacatgaaaaaggtgcgccggctgctggagagcgagcagctgcgagtctttgtcctgagcaagctgaaccgcatggtgcagtcagaggacgatgcccggcaggacatcatcccggatgtggagatcagtcggaaggtgtacaagggaatgttagacctcctcaagtgtacagtcctcagcttggagcagtcctatgcccacgcgggtctgggtggcatggccagcatctttgggcttttggagattgcccagacccactactatagtaaagaaccagacaagcggaagagaagtccaacagaaagtgtaaataccccagttggcaaggatcctggcctagctgggcggggggacccaaaggctatggcacaactgagagttccacaactgggacctcgggcaccaagtgccacaggaaagggtcctaaggaactggacaccagaagtttaaaggaagaaaattttatagcatctattgggcctgaagtaatcaaacctgtctttgaccttggtgagacagaggagaaaaagtcccagatcagcgcagacagtggtgtgagcctgacgtctagttcccagaggactgatcaagactctgtcatcggcgtgagtccagctgttatgatccgcagctcaagtcaggattctgaagttagcaccgtggtgagtaatagctctggagagacccttggagctgacagtgacttgagcagcaatgcaggtgatggaccaggtggcgagggcagtgttcacctggcaagctctcggggcactttgtctgatagtgaaattgagaccaactctgccacaagcaccatctttggtaaagcccacagcttgaagccaagcataaaggagaagctggcaggcagccccattcgtacttctgaagatgtgagccagcgagtctatctctatgagggactcctaggcaaagagcgttctactttatgggaccaaatgcaattctgggaagatgccttcttagatgctgtgatgttggagagagaagggatgggtatggaccagggtccccaggaaatgatcgacaggtacctgtcccttggagaacatgaccggaagcgcctggaagatgatgaagatcgcttgttggccacacttctgcacaacctcatctcctacatgctgctgatgaaggtaaataagaatgacatccgcaagaaggtgaggcgcctaatgggaaagtcgcacattgggcttgtgtacagccagcaaatcaatgaggtgcttgatcagctggcgaacctgaatggacgcgatctctctatctggtccagtggcagccggcacatgaagaagcagacatttgtggtacatgcagggacagatacaaacggagatatctttttcatggaggtgtgcgatgactgtgtggtgttgcgtagtaacatcggaacagtgtatgagcgctggtggtacgagaagctcatcaacatgacctactgtcccaagacgaaggtgttgtgcttgtggcgtagaaatggctctgagacccagctcaacaagttctatactaaaaagtgtcgggagctgtactactgtgtgaaggacagcatggagcgcgctgccgcccgacagcaaagcatcaaacccggacctgaattgggtggcgagttccctgtgcaggacctgaagactggtgagggtggcctgctgcaggtgaccctggaagggatcaacctcaaattcatgcacaatcaggttttcatagagctgaatcacattaaaaagtgcaatacagttcgaggcgtctttgtcctggaggaatttgttcctgaaattaaagaagtggtgagccacaagtacaagacaccaatggcccacgaaatctgctactccgtattatgtctcttctcgtacgtggctgcagttcatagcagtgaggaagatctcagaaccccgccccggcctgtctctagctgatggagaggggctacgcagctgccccagcccagggcacgcccctggccccttgctgttcccaagtgcacgatgctgctgtgactgaggagtggatgatgctcgtgtgtcctctgcaagccccctgctgtggcttggttggttaccggttatgtgtccctctgagtgtgtcttgagcgtgtccaccttctccctctccactcccagaagaccaaactgccttcccctcagggctcaagaatgtgtacagtctgtggggccggtgtgaacccactattttgtgtccttgagacatttgtgttgtggttccttgtccttgtccctggcgttataactgtccactgcaagagtctggctctcccttctctgtgacccggcatgactgggcgcctggagcagtttcactctgtgaggagtgagggaaccctggggctcaccctctcagaggaagggcacagagaggaagggaagaattggggggcagccggagtgagtggcagcctccctgcttccttctgcattcccaagccggcagctactgcccagggcccgcagtgttggctgctgcctgccacagcctctgtgactgcagtggagcggcgaattccctgtggcctgccatgccttcggcatcagaggatggagtggtcgaggctagtggagtcccagggaccgctggctgctctgcctgagcatcagggagggggcaggaaagaccaagctgggtttgcacatctgtctgcaggctgtctctccaggcacggggtgtcaggagggagagacagcctgggtatgggcaagaaatgactgtaaatatttcagccccacattatttatagaaaatgtacagttgtgtgaatgtgaaataaatgtcctcaactccc

SEQ ID NO: 272307 - DNA, 4827 bp, Artificial Sequence
  derived and/or modified sequence
atggtgcagaagaagaagttctgcccccggctgctggactacctggtgatcgtgggcgcaaggcacccttccagcgattctgtcgcccagacccctgagctgctccgacgatatcctctggaggaccatactgagttccccctgccccctgacgttgtatttttttgccaaccagaggggtgcctctcagtgcggcaaaggcggatgtcactccgggacgatacgagcttcgtgttcactctcaccgataaggacacaggcgtgactagatacggcatttgtgtgaatttttatcgatccttccagaagcgcatcagcaaagaaaaaggagagggcggcgcgggctctaggggtaaggagggaacacatgccacttgtgcctcagaagaaggaggcaccgaaagctctgaatccgggtccagcctccagccactgtccgcagattcgacacctgacgtcaaccagagcccccgagggaaacgccgggctaaggctggttcgaggagccgcaactccactctcacctcactgtgcgtcctctcccattatcccttcttttccacatttagagagtgtctctacactctgaagaggctcgttgactgttgttcggagcggctgcttggaaaaaagcttggcatccccaggggagtgcagagagataccatgtggaggatcttcaccggtagcctcttagttgaggaaaaaagctcagccttgctacacgatcttcgagaaatcgaggcttggatttaccggctgttaagatctccagtgccagtgagcgggcagaagcgggtcgatattgaggtgcttcctcaggagctccagcctgcactaacatttgctctaccagaccccagccgatttaccctagtggatttccccctccatctgccactggagctgctcggagtggacgcctgcctgcaggtgctcacgtgtatcctcctggaacacaaggtggtcttgcaatcaagagactacaacgctttatccatgtcagttatggcgttcgttgctatgatttatccactggagtacatgttccccgtgatcccattgctgcctacctgcatggccagcgctgaacagttgttgttagctccaaccccatatattattggagtgccagcttccttctttctgtacaaactagacttcaaaatgccggatgatgtatggctggttgacctggactcgaacagagtgatagcccccaccaacgccgaagtgctacctattttgccagaacctgagagtctggaactaaaaaagcacctgaagcaggctctggcaagcatgtccctaaacactcagcccatacttaatctagaaaagtttcacgaaggacaggaaattcccctcctgcttgggaggccgagtaatgacctgcaatctaccccgtccactgagttcaatcccttgatttatggaaacgacgtagactccgtcgatgttgcgaccagggtagctatggtcaggttcttcaatagcgccaacgtgctgcagggttttcagatgcacacacgtactttgcgtttgttcccaagacctgtggtggctttccaagcgggcagctttctagccagtaggccccgccagacgccattcgctgagaaattggcccgcacacaggctgtggaatacttcggcgagtggattttaaaccccaccaactatgcctttcagagaatccacaataatatgttcgaccccgctctgattggagacaaacctaaatggtacgctcaccaactccagccaatccattacagggtgtacgatagcaacagccagctagcagaggcactgtcggtgccacctgagcgtgacagcgactcagagcctacagatgattcaggctcggactcaatggactatgacgattccagcagctcttatagcagtctaggggattttgtctctgagatgatgaaatgcgacatcaatggggacacgcccaacgttgacccacttactcatgccgcactgggagatgctagtgaggtggaaatcgacgagctgcagaaccagaaggaggctgaggagccgggacctgactctgagaattcccaggagaatcctccgcttcgctccagttctagcacaaccgcctcaagctcacccagcactgtgattcatggagctaactcagagcctgccgatagtacagaaatggatgacaaggccgctgtgggtgtaagtaaaccgttgccttctgtccccccctccatcgggaaaagcaacgtggaccggcggcaggccgaaatcggtgagggctctgtccggaggagaatctatgataatccgtatttcgagccccaatacggcttccccccagaagaagatgaggatgagcagggagaatcttacacaccccggttcagccagcacgtttcaggtaatcgcgcgcaaaaactgctgcgcccaaattcccttcgactcgccagcgattctgacgccgaaagcgattctcgtgcgagctcgccgaacagtacggtctcgaacaccagcaccgaagggtttggaggaattatgtcctttgcctcgtctctgtatagaaatcactccacttcgtttagcctttctaatctaacactgcctaccaagggtgctcgggaaaaggccacaccgtttccttctctcaaagtgttcgggttaaacacacttatggagatcgtcaccgaggctggccctggatctggtgagggaaacagacgcgctttggtggatcaaaagtcaagtgtgataaagcattcccccacagtaaagagggaaccccccagcccacaagggaggtcttccaatagcagcgagaatcagcagtttcttaaagaggtggtgcactccgttctggatggccagggcgtgggctggttaaatatgaaaaaggtgcgaaggttgcttgagagcgaacagttgcgcgtattcgtgctgagtaagctgaaccggatggtacagagcgaagatgacgcaagacaggacattatcccagatgtggagatttctaggaaagtgtataagggaatgctggatttgctgaagtgcaccgttcttagccttgaacagagctatgctcacgctggcctggggggcatggcctctatcttcgggctgctggaaatagcccaaacccattactactccaaagaacccgataagagaaagaggagcccaacagagagcgtcaacacgccagtcggtaaggaccccgggctcgccggaaggggagaccccaaggcgatggcacagctgcgtgttccgcagctagggccacgcgctccatccgcaaccggaaaaggccctaaagaacttgacacacggagtctaaaagaggaaaatttcattgcgtcgattggcccagaggtcataaaaccagtgtttgacttgggagaaactgaggagaagaagtctcaaatcagcgccgacagtggagtgtccctgacttcaagctcccagagaacagaccaagatagcgtgatcggcgtgagcccagccgttatgatcagatccagttctcaggattctgaggtgtccaccgtggtatcaaacagcagcggcgagacactaggagccgatagcgacctgagcagtaacgccggggatggaccggggggcgaagggagtgtgcatctcgcatcaagtcggggcacactgagcgattcagagattgaaacaaatagcgctacctccactattttcggtaaagcacactctctgaaaccgtcaatcaaagagaagttagcaggcagtccaatacgcacgtcggaagatgtgtcccaacgggtgtatctatatgaaggacttttaggtaaggaaagatcaacgctgtgggaccagatgcagttttgggaagatgcgtttctggatgccgtgatgttggagagggagggcatggggatggaccagggcccccaagagatgatagacagatatctctcacttggagaacatgaccgcaagcggctggaggatgacgaggacagacttctagctactctgctccacaatcttatctcttacatgctgctcatgaaagttaacaagaatgacatacgcaaaaaggtgcggagattgatgggtaaaagccacatcgggttggtgtacagccaacagattaacgaggtgcttgaccagctggcgaacctcaacggcagagatctcagcatatggagctctggctcaaggcacatgaaaaagcagaccttcgtcgtgcatgctgggactgacaccaacggggatatcttcttcatggaagtgtgcgatgattgcgtagtccttagatcaaacattggcacggtctatgaaagatggtggtatgaaaagcttatcaacatgacctattgtcctaaaaccaaggtgctgtgcttatggaggagaaatggtagcgagacccaattaaacaaattctatacaaagaaatgtagggaattgtactactgcgtgaaggattctatggagcgagctgctgcgcgtcaacagagcattaagcccggaccagaacttggtggagagttccctgtccaggacctcaaaactggggagggaggacttttacaagtaaccctggaagggattaatctaaagttcatgcataatcaggtgtttatagaactgaatcacatcaaaaagtgtaataccgtgaggggtgtttttgtgctggaggaatttgtgcccgagattaaagaagtggtcagtcataagtacaaaacacctatggctcacgaaatctgttattcagtgttgtgcttgttttcatatgtggctgctgtgcactcaagcgaagaggatctccggactccccctagacctgtaagcagttag

SEQ ID NO: 272308 - DNA, 4827 bp, Artificial Sequence
  derived and/or modified sequence
atggtacaaaagaaaaagttttgcccgaggctcttggactatctcgtaatcgtgggagctagacatccctctagtgatagtgtcgcgcagaccccagaattgctgcgcagatacccgctggaggaccacacagagtttcccctgccacctgacgtggtctttttctgtcaacctgagggctgcttatccgtaagacaaaggaggatgagtctccgcgatgacacatcttttgtttttacactgacggataaggacactggagtcacaagatatggaatctgtgtgaacttctaccgatcttttcagaagcgcattagcaaggagaaaggtgagggaggtgccggtagcagagggaaggagggtacccatgcaacttgcgcctccgaagaaggagggactgaaagtagtgagtctggcagttctctgcaaccactctctgcagattccactcccgacgtcaatcagtcaccacgaggcaaacgcagggcgaaggcagggagccgctctcgaaattctacactgacctccctgtgcgtcctcagccattaccccttttttagtacatttcgggagtgcctttataccctaaagcgcttagtggattgctgttccgagaggctgctcgggaaaaaacttggcatccctcgtggagtgcagagagacaccatgtggcggatttttacgggctcgctcctggtcgaggaaaaatcatccgctctgcttcacgatctgcgcgaaattgaagcctggatataccgcctactgagatccccagtgcctgtgtccggtcagaagagggtggacattgaggtgctccctcaggagctacagccagcacttacttttgctttgcctgatccttcacggtttactctcgtggattttccgctgcacctgccgctggaactgctgggagtggacgcctgcctgcaggtactgacctgcattcttctggagcataaagtagtgctgcagagtagggattataacgccctgtccatgagcgtgatggcattcgtggccatgatatacccacttgagtacatgtttccggtgattccattactgcctacctgtatggccagcgctgaacagttactactcgcgcctactccatacattataggagtgccggcaagcttcttcctatacaagttagactttaagatgccagatgacgtctggctcgtagatttggacagcaatcgggtcattgcacctacaaacgccgaagtgctccccattttgccggagcccgaatctctcgagctgaagaagcatctcaagcaggccctcgcctctatgagccttaacactcagcccatcctgaatctagagaaatttcatgagggtcaagaaatcccattattgctggggaggccttccaacgacctgcaatccactccttcaactgagtttaaccctctcatttatggaaatgacgtggactccgtagatgtggccacacgggtggcgatggtacgctttttcaactccgccaacgttctgcaaggttttcagatgcacactcggactctaaggctgtttccacgcccagtcgtcgctttccaggccggatcattcctggcctcccggcctcggcagacacccttcgccgagaaactggcgaggacccaggcagttgaatacttcggggaatggattctgaatcctacaaactacgcctttcaaagaatacataacaatatgtttgatccagcgctgattggcgacaagccaaagtggtatgcgcaccaacttcaaccaattcactatcgtgtctacgactccaactcccagctggcggaggcactatccgtcccccctgaaagagactctgactccgaacccactgacgactcaggctcagattctatggactatgatgattccagttcatcttactcctcccttggagatttcgtgtccgagatgatgaagtgtgacatcaacggtgacacccctaacgtcgaccctcttactcacgccgctctaggagatgcatctgaagtggagatcgacgaactgcagaaccaaaaggaggcggaagagcccggacccgactctgagaactcccaggagaaccccccattacgatccagttccagtaccactgcatcatctagtccttccacagtaatccacggcgctaattcagagcctgcagactcaaccgagatggacgacaaggccgctgtgggagtctcgaagcccttgccttctgtcccgccatccattggcaagtccaatgttgaccgcagacaagccgagatcggagagggctctgtgcgaagacgaatttatgacaatccatattttgagccacaatacggcttccctcccgaggaggacgaggatgaacagggtgaatcatatactccacgtttctcccagcatgtatccgggaatcgggcacaaaagttattgagacctaatagtctccgcctagccagtgacagcgatgccgagagcgactctagagccagctctccgaacagtacagtctccaacacttctactgaaggcttcggcggaattatgagttttgcctccagcctctaccggaaccacagtacttccttctcgctatctaacttgaccctccccacaaagggtgccagggaaaaagctaccccatttccaagcctgaaagtgtttggcctgaacacactgatggaaattgtgacggaagcagggcctgggtccggagagggtaaccgtcgagcactggtcgatcagaagtcttccgtgatcaaacactcccccactgtgaaaagagaacctccaagtccgcagggaagatcatctaacagcagcgaaaaccagcagtttctaaaagaggtggtacactctgtcctggacggacaaggcgtcggctggttaaatatgaaaaaggttagaaggctcctcgaaagtgagcagctccgggtgttcgtgctatctaaactcaatcgtatggttcagagtgaggacgatgcgagacaagacattattccagacgtcgaaatctcgcgaaaagtatacaagggtatgctcgacctgctgaagtgcacagttttatctctagagcagtcttacgcccacgccggactcggtggcatggcaagcattttcggcctgttagaaattgcgcagacccactactacagtaaggaacctgataagcgtaaacggtcccctactgagagtgttaatactcccgttggaaaggaccccggtttagcaggccgtggggatcccaaagccatggcgcagttacgcgtgccccagttggggcctcgggcaccctcagcaacagggaaaggcccaaaagagctggacaccaggtcactcaaagaggagaatttcattgcatcaatcgggccagaggtaattaagcctgtttttgacctcggagagacagaggaaaagaaaagtcagatttccgccgattccggtgtctcattgacatcatcgagccagcggactgatcaagacagcgtgatcggagtgtcgcccgcagtgatgatccgctcaagctcccaggacagtgaggtgtccacagtggtgtctaatagctcaggagagacgttgggcgcagactcggacttgagtagcaacgccggagatggacccggaggcgaagggtccgttcacttggccagttcgcgtggaacactgtccgatagtgaaatagaaaccaacagcgctacgagtactatattcggcaaggcccattctctgaagccatcaatcaaagagaagctggccggatcacccatcagaacaagtgaagacgtgtcacagcgagtgtatctgtacgaaggattgctcggtaaagagcggtctactctgtgggaccagatgcagttttgggaggatgctttcctggatgcagtgatgcttgagcgagaggggatgggaatggatcagggcccacaggagatgatcgatagatacctctctctgggcgagcacgatcgcaaaagattagaggatgatgaagacagacttctggccacactcctccacaaccttatatcatacatgcttcttatgaaggtgaataagaacgatatcaggaagaaggtgcgcagactgatgggcaagtcacacatcggactggtctattcccagcaaataaatgaggttctggatcaattagctaacttgaacgggcgtgacctttccatttggtcctcggggtcaagacatatgaaaaaacaaacatttgtcgtacacgctggaaccgacactaacggtgatatcttttttatggaggtctgtgatgattgtgtcgttttgagatcaaacattggaacagtgtacgagcgttggtggtacgagaagttgataaatatgacctactgccccaaaaccaaggtgctgtgcctttggcgaaggaacggcagcgagactcagctgaataaattctatacaaagaagtgcagagagctttattattgtgtaaaagacagtatggagagggccgctgcccgacaacaaagtattaagccgggtcccgaacttggaggagagtttcctgtgcaggatcttaagaccggcgaaggtgggctgttacaggtgacgctggaaggtattaacctgaaatttatgcataatcaagttttcattgaactcaaccacatcaaaaagtgtaataccgtacggggtgtgttcgtgctggaagagttcgttcccgagattaaggaagttgtctcccataagtataagacaccgatggcacacgagatctgttatagtgtgttatgtcttttcagctatgtggcggcagttcacagctctgaagaggacctaaggacccctccacgccctgtgagctcctag

SEQ ID NO: 272309 - DNA, 4827 bp, Artificial Sequence
  derived and/or modified sequence
atggtgcagaagaagaagttctgccccagactgctggactacctggtgatcgtgggcgccagacaccccagcagcgacagcgtggcccagacccccgagctgctgagaagataccccctggaggaccacaccgagttccccctgccccccgacgtggtgttcttctgccagcccgagggctgcctgagcgtgagacagagaagaatgagcctgagagacgacaccagcttcgtgttcaccctgaccgacaaggacaccggcgtgaccagatacggcatctgcgtgaacttctacagaagcttccagaagagaatcagcaaggagaagggcgagggcggcgccggcagcagaggcaaggagggcacccacgccacctgcgccagcgaggagggcggcaccgagagcagcgagagcggcagcagcctgcagcccctgagcgccgacagcacccccgacgtgaaccagagccccagaggcaagagaagagccaaggccggcagcagaagcagaaacagcaccctgaccagcctgtgcgtgctgagccactaccccttcttcagcaccttcagagagtgcctgtacaccctgaagagactggtggactgctgcagcgagagactgctgggcaagaagctgggcatccccagaggcgtgcagagagacaccatgtggagaatcttcaccggcagcctgctggtggaggagaagagcagcgccctgctgcacgacctgagagagatcgaggcctggatctacagactgctgagaagccccgtgcccgtgagcggccagaagagagtggacatcgaggtgctgccccaggagctgcagcccgccctgaccttcgccctgcccgaccccagcagattcaccctggtggacttccccctgcacctgcccctggagctgctgggcgtggacgcctgcctgcaggtgctgacctgcatcctgctggagcacaaggtggtgctgcagagcagagactacaacgccctgagcatgagcgtgatggccttcgtggccatgatctaccccctggagtacatgttccccgtgatccccctgctgcccacctgcatggccagcgccgagcagctgctgctggcccccaccccctacatcatcggcgtgcccgccagcttcttcctgtacaagctggacttcaagatgcccgacgacgtgtggctggtggacctggacagcaacagagtgatcgcccccaccaacgccgaggtgctgcccatcctgcccgagcccgagagcctggagctgaagaagcacctgaagcaggccctggccagcatgagcctgaacacccagcccatcctgaacctggagaagttccacgagggccaggagatccccctgctgctgggcagacccagcaacgacctgcagagcacccccagcaccgagttcaaccccctgatctacggcaacgacgtggacagcgtggacgtggccaccagagtggccatggtgagattcttcaacagcgccaacgtgctgcagggcttccagatgcacaccagaaccctgagactgttccccagacccgtggtggccttccaggccggcagcttcctggccagcagacccagacagacccccttcgccgagaagctggccagaacccaggccgtggagtacttcggcgagtggatcctgaaccccaccaactacgccttccagagaatccacaacaacatgttcgaccccgccctgatcggcgacaagcccaagtggtacgcccaccagctgcagcccatccactacagagtgtacgacagcaacagccagctggccgaggccctgagcgtgccccccgagagagacagcgacagcgagcccaccgacgacagcggcagcgacagcatggactacgacgacagcagcagcagctacagcagcctgggcgacttcgtgagcgagatgatgaagtgcgacatcaacggcgacacccccaacgtggaccccctgacccacgccgccctgggcgacgccagcgaggtggagatcgacgagctgcagaaccagaaggaggccgaggagcccggccccgacagcgagaacagccaggagaacccccccctgagaagcagcagcagcaccaccgccagcagcagccccagcaccgtgatccacggcgccaacagcgagcccgccgacagcaccgagatggacgacaaggccgccgtgggcgtgagcaagcccctgcccagcgtgccccccagcatcggcaagagcaacgtggacagaagacaggccgagatcggcgagggcagcgtgagaagaagaatctacgacaacccctacttcgagccccagtacggcttcccccccgaggaggacgaggacgagcagggcgagagctacacccccagattcagccagcacgtgagcggcaacagagcccagaagctgctgagacccaacagcctgagactggccagcgacagcgacgccgagagcgacagcagagccagcagccccaacagcaccgtgagcaacaccagcaccgagggcttcggcggcatcatgagcttcgccagcagcctgtacagaaaccacagcaccagcttcagcctgagcaacctgaccctgcccaccaagggcgccagagagaaggccacccccttccccagcctgaaggtgttcggcctgaacaccctgatggagatcgtgaccgaggccggccccggcagcggcgagggcaacagaagagccctggtggaccagaagagcagcgtgatcaagcacagccccaccgtgaagagagagccccccagcccccagggcagaagcagcaacagcagcgagaaccagcagttcctgaaggaggtggtgcacagcgtgctggacggccagggcgtgggctggctgaacatgaagaaggtgagaagactgctggagagcgagcagctgagagtgttcgtgctgagcaagctgaacagaatggtgcagagcgaggacgacgccagacaggacatcatccccgacgtggagatcagcagaaaggtgtacaagggcatgctggacctgctgaagtgcaccgtgctgagcctggagcagagctacgcccacgccggcctgggcggcatggccagcatcttcggcctgctggagatcgcccagacccactactacagcaaggagcccgacaagagaaagagaagccccaccgagagcgtgaacacccccgtgggcaaggaccccggcctggccggcagaggcgaccccaaggccatggcccagctgagagtgccccagctgggccccagagcccccagcgccaccggcaagggccccaaggagctggacaccagaagcctgaaggaggagaacttcatcgccagcatcggccccgaggtgatcaagcccgtgttcgacctgggcgagaccgaggagaagaagagccagatcagcgccgacagcggcgtgagcctgaccagcagcagccagagaaccgaccaggacagcgtgatcggcgtgagccccgccgtgatgatcagaagcagcagccaggacagcgaggtgagcaccgtggtgagcaacagcagcggcgagaccctgggcgccgacagcgacctgagcagcaacgccggcgacggccccggcggcgagggcagcgtgcacctggccagcagcagaggcaccctgagcgacagcgagatcgagaccaacagcgccaccagcaccatcttcggcaaggcccacagcctgaagcccagcatcaaggagaagctggccggcagccccatcagaaccagcgaggacgtgagccagagagtgtacctgtacgagggcctgctgggcaaggagagaagcaccctgtgggaccagatgcagttctgggaggacgccttcctggacgccgtgatgctggagagagagggcatgggcatggaccagggcccccaggagatgatcgacagatacctgagcctgggcgagcacgacagaaagagactggaggacgacgaggacagactgctggccaccctgctgcacaacctgatcagctacatgctgctgatgaaggtgaacaagaacgacatcagaaagaaggtgagaagactgatgggcaagagccacatcggcctggtgtacagccagcagatcaacgaggtgctggaccagctggccaacctgaacggcagagacctgagcatctggagcagcggcagcagacacatgaagaagcagaccttcgtggtgcacgccggcaccgacaccaacggcgacatcttcttcatggaggtgtgcgacgactgcgtggtgctgagaagcaacatcggcaccgtgtacgagagatggtggtacgagaagctgatcaacatgacctactgccccaagaccaaggtgctgtgcctgtggagaagaaacggcagcgagacccagctgaacaagttctacaccaagaagtgcagagagctgtactactgcgtgaaggacagcatggagagagccgccgccagacagcagagcatcaagcccggccccgagctgggcggcgagttccccgtgcaggacctgaagaccggcgagggcggcctgctgcaggtgaccctggagggcatcaacctgaagttcatgcacaaccaggtgttcatcgagctgaaccacatcaagaagtgcaacaccgtgagaggcgtgttcgtgctggaggagttcgtgcccgagatcaaggaggtggtgagccacaagtacaagacccccatggcccacgagatctgctacagcgtgctgtgcctgttcagctacgtggccgccgtgcacagcagcgaggaggacctgagaaccccccccagacccgtgagcagctag

SEQ ID NO: 272310 - protein, 1588 aa, Artificial Sequence
  derived and/or modified sequence
MVQKKKFCPRLLDYLVIVGARHPSSDSVAQTPELLRRYPLEDHTEFPLPPDVVFFCQPEGCLSVRQRRMSLRDDTSFVFTLTDKDTGVTRYGICVNFYRSFQKRISKEKGEGGAGSRGKEGTHATCASEEGGTESSESGSSLQPLSADSTPDVNQSPRGKRRAKAGSRSRNSTLTSLCVLSHYPFFSTFRECLYTLKRLVDCCSERLLGKKLGIPRGVQRDTMWRIFTGSLLVEEKSSALLHDLREIEAWIYRLLRSPVPVSGQKRVDIEVLPQELQPALTFALPDPSRFTLVDFPLHLPLELLGVDACLQVLTCILLEHKVVLQSRDYNALSMSVMAFVAMIYPLEYMFPVIPLLPTCMASAEQLLLAPTPYIIGVPASFFLYKLDFKMPDDVWLVDLDSNRVIAPTNAEVLPILPEPESLELKKHLKQALASMSLNTQPILNLEKFHEGQEIPLLLGRPSNDLQSTPSTEFNPLIYGNDVDSVDVATRVAMVRFFNSANVLQGFQMHTRTLRLFPRPVVAFQAGSFLASRPRQTPFAEKLARTQAVEYFGEWILNPTNYAFQRIHNNMFDPALIGDKPKWYAHQLQPIHYRVYDSNSQLAEALSVPPERDSDSEPTDDSGSDSMDYDDSSSSYSSLGDFVSEMMKCDINGDTPNVDPLTHAALGDASEVEIDELQNQKEAEEPGPDSENSQENPPLRSSSSTTASSSPSTVIHGANSEPADSTEMDDKAAVGVSKPLPSVPPSIGKSNVDRRQAEIGEGSVRRRIYDNPYFEPQYGFPPEEDEDEQGESYTPRFSQHVSGNRAQKLLRPNSLRLASDSDAESDSRASSPNSTVSNTSTEGFGGIMSFASSLYRNHSTSFSLSNLTLPTKGAREKATPFPSLKGNRRALVDQKSSVIKHSPTVKREPPSPQGRSSNSSENQQFLKEVVHSVLDGQGVGWLNMKKVRRLLESEQLRVFVLSKLNRMVQSEDDARQDIIPDVEISRKVYKGMLDLLKCTVLSLEQSYAHAGLGGMASIFGLLEIAQTHYYSKEPDKRKRSPTESVNTPVGKDPGLAGRGDPKAMAQLRVPQLGPRAPSATGKGPKELDTRSLKEENFIASIGPEVIKPVFDLGETEEKKSQISADSGVSLTSSSQRTDQDSVIGVSPAVMIRSSSQDSEVSTVVSNSSGETLGADSDLSSNAGDGPGGEGSVHLASSRGTLSDSEIETNSATSTIFGKAHSLKPSIKEKLAGSPIRTSEDVSQRVYLYEGLLGKERSTLWDQMQFWEDAFLDAVMLEREGMGMDQGPQEMIDRYLSLGEHDRKRLEDDEDRLLATLLHNLISYMLLMKVNKNDIRKKVRRLMGKSHIGLVYSQQINEVLDQLANLNGRDLSIWSSGSRHMKKQTFVVHAGTDTNGDIFFMEVCDDCVVLRSNIGTVYERWWYEKLINMTYCPKTKVLCLWRRNGSETQLNKFYTKKCRELYYCVKDSMERAAARQQSIKPGPELGGEFPVQDLKTGEGGLLQVTLEGINLKFMHNQVFIELNHIKKCNTVRGVFVLEEFVPEIKEVVSHKYKTPMAHEICYSVLCLFSYVAAVHSSEEDLRTPPRPVSS

SEQ ID NO: 272311 - DNA, 4767 bp, Artificial Sequence
  derived and/or modified sequence
atggtgcagaaaaaaaagttttgtcctcggctgctagactaccttgttatcgtcggagctcggcatcctagctcagacagcgtcgcccagacacccgaacttcttcgaaggtatccccttgaggaccatacggagttcccactgccgcccgacgtggtgtttttctgtcagccggagggatgccttagcgttagacaaagacgcatgtccctgagggatgataccagttttgtgtttacgctgacagataaagacaccggagttacccgatacggcatttgtgtcaacttctaccgttcatttcagaaaaggatctcaaaagaaaaaggggaggggggtgctggaagcagagggaaagagggcacacatgctacgtgtgcctcagaagaaggaggcacggagtcctcggaatcaggctcttcgcttcagcccttgagcgccgatagcactcctgatgtcaatcaatccccgagagggaaacgacgggcgaaggccggatcccggtcaagaaattccacccttacgagcctgtgtgtgctctcacactacccctttttctccacttttcgcgaatgcctgtatacgctcaagcggctggtggactgctgttctgagcgtctgctcggcaaaaagttaggtattcccaggggcgtccaacgcgatactatgtggcgcatttttacagggagcctgctcgtggaagagaagtcctcggcactgctgcacgatctccgagagattgaagcatggatctatcgcctgctccgctcacctgtccccgttagtggccagaaacgcgtagacatcgaagtgctcccccaggagctgcagcctgcgctgacattcgctctgcccgatccttcacggttcacactggtcgacttccctctgcacctcccactggagctactcggtgtggatgcttgtctacaggtcttgacctgcatcctgctggagcacaaggtggtccttcagagccgtgattacaacgcattgagtatgtcagttatggcgttcgtggcgatgatctacccattagagtatatgtttccagtgattccgctgttacctacctgcatggcatctgccgagcagctactcctcgcaccgaccccctacataattggggtgccagccagcttttttctctacaagcttgattttaaaatgcccgacgacgtctggctcgtggatttggactctaaccgagtgattgcccctactaacgctgaggttctgccgattctgccggagccagagtctctcgaactcaagaagcacctgaagcaggcattagctagcatgagtctgaatacccaaccaatcttaaacctcgagaagttccacgagggacaggaaatacccctcttgctgggacggccatctaatgatctacaatcaaccccttctacagaattcaatccgttaatctatggtaatgacgtggattctgtggatgtggccacacgggtagccatggtaaggtttttcaactctgctaatgtgctccagggatttcagatgcatacacgtactctgcgcctcttcccccgtcccgtggtggcttttcaggccggaagtttcctagcctctcggccccgtcagaccccatttgcggagaaactggcccgtactcaagccgttgagtactttggagagtggatcttaaatccaacaaactatgcctttcaacggatccataacaatatgttcgaccccgcccttatcggcgacaagccaaagtggtacgcccatcagttgcagcccatccactacagggtttatgattccaacagtcaactggctgaagcattaagtgttccgcccgagagagactcggattccgaaccgaccgatgactctggatcagacagtatggactatgacgattcgtcctcttcctactcatccctaggggatttcgtatccgagatgatgaaatgtgacatcaacggagacacgccgaatgtggacccgcttactcatgctgctctgggcgatgcgtccgaggtagaaatcgatgaactccagaaccagaaggaagcagaggagcctggaccagattccgagaactctcaggaaaaccccccactccggagcagcagtagtacaacggcctccagctctccgtcaacggtcattcacggggccaattcagagcctgcggacagcacggagatggacgacaaggctgccgtgggagtgtcgaaacccctcccttcggtccccccttcgattggcaagagcaacgtggaccgccgccaggccgaaataggcgaggggtcagtgcggcgccggatctacgacaatccctatttcgaaccacaatacgggtttcctcctgaggaggatgaggatgaacagggtgaatcctacactcccaggttttcacaacacgtgagcggcaaccgggctcaaaagctgctaagaccgaacagtcttagattagcttccgactctgacgcggagagtgatagtagagcatcctcccctaattccaccgtgagcaatactagcacagagggtttcggcggaattatgtccttcgcttccagcctgtacaggaaccatagcacctccttttctttatcaaatctcaccttgccaactaagggggctagagagaaagctacacccttcccctccctgaaggggaatcgtcgggccttggttgaccagaaatcaagtgtgataaaacattcaccaaccgtgaaacgggagcctccaagcccccagggacggagctccaattccagcgagaaccagcagttcctgaaggaagtcgtgcatagcgttctggatggacagggagtgggctggcttaatatgaagaaggtacgacggcttcttgaaagtgagcaactgagagtgtttgtattatcaaagctgaatcgcatggtgcagtcggaggacgacgcccggcaagatattatacctgatgtcgagatcagtcggaaagtgtataaaggcatgctggacctgctaaaatgcactgtactgtcacttgagcagagctatgcgcatgctggcttgggagggatggccagcatttttggacttctggagatcgcccaaacgcattactacagcaaggaaccagacaagcgcaagcgtagccctaccgagtctgtcaacacgcccgttggaaaagaccccggattggccgggcggggtgaccctaaggcaatggcacagctgcgggtaccacagctcgggccgagggccccgtcagctactgggaaaggtcccaaggaacttgacactcggtccttgaaagaggaaaattttatcgcttccataggtccggaggtgatcaagccagtgtttgatctcggtgagactgaggagaagaaaagtcagatctctgctgattcaggagtctccctgacttcttcctcacagcgcaccgatcaggacagtgtcatcggcgtgagtccagctgttatgatccgttcaagcagtcaggacagcgaagtgagtacagtcgtcagtaatagcagcggggaaaccctcggggctgactctgacctgtcttcaaacgcgggcgacggccccggtggggaaggcagtgtccatcttgcttcaagccggggtacattaagtgacagtgagatcgagacgaattctgcaacctctactattttcggcaaagcccactcacttaaaccatcgataaaagagaaattagcaggctcccccatccgtacctccgaggatgtctcacagcgggtatacctgtacgagggtctgctgggaaaggagcgcagcaccctttgggaccagatgcagttctgggaggatgcgtttctggacgccgttatgttggaacgcgagggaatgggcatggaccagggacctcaagaaatgattgacagatacctgtctctcggagagcatgatcgcaaaaggctcgaagacgacgaggatcgcctcctagccactctcctgcacaatttaatttcttatatgctgctgatgaaagtcaataagaatgacatccgcaaaaaagttcgtaggttaatgggtaaaagtcacataggactagtctatagtcagcagatcaacgaggtcctcgaccaactggctaacttaaacgggagggatttaagcatatggagctctgggagccgtcatatgaagaaacagacattcgtagtgcacgctgggacagataccaatggtgacatctttttcatggaagtgtgcgacgactgtgtggtcttgagaagcaatattgggactgtctatgaacgttggtggtatgagaaacttatcaatatgacctattgcccaaagacaaaagtcttatgtctttggcggcgcaatgggagcgagacacagctaaataagttctatactaagaaatgtagagagctgtactactgcgtgaaggactctatggagagggcggctgcccgacagcagagcatcaaacccggtcctgagctcggcggggagtttcccgtgcaagacctgaagacaggagaaggcggactcctacaagttacattggaggggattaatctgaagtttatgcacaatcaggtgtttatcgagctcaaccacattaagaaatgcaatacggtccgcggcgtatttgtgctggaggagttcgtccctgaaatcaaggaagtcgtgtctcacaaatacaagacccccatggcccacgagatatgctacagcgtgctgtgtctcttttcctacgtggcagccgtacatagctctgaagaggacctgagaacgcctcccaggccggtgtcttcgtag

SEQ ID NO: 272312 - DNA, 4767 bp, Artificial Sequence
  derived and/or modified sequence
atggtgcagaagaagaagttctgcccccggctgctggactacctggtgattgtgggcgcccggcaccccagcagtgacagcgtggcccagaccccagagctgctgcggcgctaccccctggaggaccacacagagttccccctgcccccagatgtggtgttcttctgccagcctgagggctgcctgtctgtgcggcagaggaggatgagcctgagagatgacaccagctttgtgttcaccctgacagacaaggacaccggggtgaccaggtatggcatctgtgtgaacttctaccgctccttccagaagaggatcagcaaggagaagggggagggcggggccggcagccggggcaaggagggcacccacgccacctgtgccagcgaggagggcggcacagagagcagcgagagcggcagcagcctgcagcccctgtctgctgacagcaccccagatgtgaaccagagcccccggggcaagagaagagccaaggccggcagccgcagcaggaacagcaccctgaccagcctgtgtgtgctgagccactaccccttcttcagcaccttcagagaatgtctgtacaccctgaagaggctggtggactgctgcagcgagcggctgctgggcaagaagctgggcatcccccggggcgtgcagagggacaccatgtggaggatcttcaccggcagcctgctggtggaggagaagagcagcgccctgctgcatgacctgcgggagattgaggcctggatctaccgcctgctgcggagccctgtgcctgtgtctggccagaagagggtggacatcgaggtgctgccccaggagctgcagcctgccctgacctttgccctgcctgaccccagccgcttcaccctggtggacttccccctgcacctgcccctggagctgctgggcgtggatgcctgcctgcaggtgctgacctgcatcctgctggagcacaaggtggtgctgcagagccgggactacaatgccctgtccatgtctgtgatggcctttgtggccatgatctaccccctggagtacatgtttcctgtgatccccctgctgcccacctgcatggccagcgctgagcagctgctgctggcccccaccccctacatcattggagtgcctgccagcttcttcctgtacaagctggacttcaagatgccagatgatgtgtggctggtggacctggacagcaacagagtgattgcccccaccaatgctgaggtgctgcccatcctgcctgagcctgagagcctggagctgaagaagcacctgaagcaggccctggcctccatgagcctgaacacccagcccatcctgaacctggagaagttccacgagggccaggagatccccctgctgctgggccggcccagcaatgacctgcagagcacccccagcacagagttcaaccccctcatctatggaaatgatgtggacagcgtggatgtggccaccagggtggccatggtgcgcttcttcaacagcgccaacgtgctgcagggcttccagatgcacaccaggaccctgcggctcttccccaggcctgtggtggccttccaggccggcagcttcctggccagccggccccggcagaccccatttgctgagaagctggcccggacccaggccgtggagtactttggagagtggatcctgaaccccaccaactatgccttccagaggatccacaacaacatgtttgatcctgccctgattggagacaagcccaagtggtacgcccaccagctgcagcccatccactacagagtgtatgacagcaacagccagctggccgaggccctgtctgtgcccccagagcgggacagcgacagcgagcccacagatgattctggcagtgacagcatggactatgatgacagcagcagcagctacagcagcctgggggactttgtgtctgagatgatgaagtgtgacatcaatggagacacccccaacgtggaccccctgacccatgctgccctgggagatgccagcgaggtggagattgatgagctgcagaaccagaaggaggccgaggagcccggcccagattctgagaacagccaggagaacccccccctgcggagcagcagcagcaccacagccagcagcagccccagcaccgtcatccatggagccaacagcgagcctgctgacagcacagagatggatgacaaggctgctgtgggcgtgtccaagcccctgcccagcgtgcccccatccatcggcaagagcaatgtggaccggcggcaggccgagatcggggagggctctgtgagaagacgcatctatgacaacccctactttgagccccagtatggcttccccccagaagaagatgaagatgagcagggcgagagctacaccccccgcttcagccagcacgtgtctggcaacagagcccagaagctgctgcggcccaacagcctgcggctggccagtgacagtgatgctgagagtgacagccgggccagcagccccaacagcacagtgagcaacaccagcacagagggctttggaggcatcatgagctttgccagcagcctgtacagaaaccacagcaccagcttcagcctgagcaacctgaccctgcccaccaagggggcccgggagaaggccacccccttccccagcctgaagggcaacagaagagccctggtggaccagaagagcagcgtcatcaagcacagccccaccgtgaagcgggagccccccagcccccagggccgcagcagcaacagcagcgagaaccagcagttcctgaaggaggtggtgcacagcgtgctggatggccagggcgtgggctggctgaacatgaagaaggtgcggcggctgctggagagcgagcagctgcgggtgtttgtgctgagcaagctgaacaggatggtgcagagtgaagatgatgcccggcaggacatcatcccagatgtggagatcagcaggaaggtgtacaagggcatgctggacctgctgaagtgcaccgtgctgagcctggagcagagctatgcccatgctggcctgggcggcatggccagcatcttcggcctgctggagatcgcccagacccactactacagcaaggagccagacaagaggaagaggagccccacagaatctgtgaacacccctgtgggcaaggaccccggcctggccggccgcggggaccccaaggccatggcccagctgcgggtgccccagctgggcccccgggcccccagcgccaccgggaagggccccaaggagctggacaccaggagcctgaaggaggagaacttcatcgccagcatcggccctgaggtgatcaagcctgtgtttgacctgggggagacagaggagaagaagagccagatctctgctgacagcggcgtgtccctgaccagcagcagccagaggacagaccaggacagcgtcatcggcgtgtccccagctgtgatgatccgcagcagcagccaggacagcgaggtgtccacagtggtgagcaacagcagtggagagaccctgggcgctgacagcgacctgagcagcaatgctggagatggccctggaggagagggctctgtgcacctggccagcagccggggcaccctgagtgacagcgagattgagaccaacagcgccaccagcaccatctttgggaaggcccacagcctgaagcccagcatcaaggagaagctggccggcagccccatccgcaccagtgaagatgtgtcccagagggtgtacctgtatgagggcctgctgggcaaggagaggagcaccctgtgggaccagatgcagttctgggaggatgccttcctggatgctgtgatgctggagcgggagggcatgggcatggaccagggcccccaggagatgattgaccgctacctgagcctgggggagcatgacaggaagaggctggaggatgatgaggaccggctgctggccaccctgctgcacaacctgatctcctacatgctgctgatgaaggtgaacaagaatgacatcaggaagaaggtgcggcggctgatgggcaagagccacatcggcctggtgtacagccagcagatcaatgaggtgctggaccagctggccaacctgaatggccgggacctgagcatctggagcagcggcagccgccacatgaagaagcagacctttgtggtgcacgccggcacagacaccaatggagacatcttcttcatggaggtgtgtgatgactgtgtggtgctgcggagcaacatcggcaccgtgtatgagcgctggtggtatgagaagctgatcaacatgacctactgccccaagaccaaggtgctgtgcctgtggaggagaaatggcagcgagacccagctgaacaagttctacaccaagaagtgccgggagctgtactactgtgtgaaggacagcatggagagagctgctgcccggcagcagagcatcaagccaggccctgagctgggcggggagttccctgtgcaggacctgaagacaggagagggcggcctgctgcaggtgaccctggagggcatcaacctgaagttcatgcacaaccaggtgttcatcgagctgaaccacatcaagaagtgcaacacagtgcggggcgtgtttgtgctggaggagtttgtgcctgagatcaaggaggtggtgagccacaagtacaagacccccatggcccacgagatctgctacagcgtgctgtgcctcttctcctatgtggccgctgtgcacagcagcgaggaggacctgcggaccccacccaggcctgtgagcagctag

SEQ ID NO: 272313 - DNA, 6005 bp, Artificial Sequence
  derived and/or modified sequence
gatttcagcgctaaggcgtcggcggtgcacctcacgtgcatgtgtagcatgccttggtttttcctttggcatctgaaaaaggcacaacctgaaagacctagaacccagtgtcggtccccaggccctttgggacaggaagagaagagccgtgtggccgcggggaggatgtcctgaggcggggctgtcctcgcggactgactggactccatctcccagcgggcgccgcggcgcggccacgcccccccactccccgcgcgcgcccggtggagacttcgattttcagaattcctcctgggaatgctgactccttgcttggtgccctgatgcttctctgagataaactgatgaattggaaccatggtgcaaaagaagaagttctgtcctcggttacttgactatctagtgatcgtaggggccaggcacccgagcagtgatagcgtggcccagactcctgaattgctacggcgataccccttggaggatcacactgagtttcccctgcccccagatgtagtgttcttctgccagcccgagggctgcctgagcgtgcggcagcggcgcatgagccttcgggatgatacctcttttgtcttcaccctcactgacaaggacactggagtcacgcgatatggcatctgtgttaacttctaccgctccttccaaaagcgaatctctaaggagaagggggaaggtggggcagggtcccgtgggaaggaaggaacccatgccacctgtgcctcagaagagggtggcactgagagctcagagagtggctcatccctgcagcctctcagtgctgactctacccctgatgtgaaccagtctcctcggggcaaacgccgggccaaggcggggagccgctcccgcaacagtactctcacgtccctgtgcgtgctcagccactaccctttcttctccaccttccgagagtgtttgtatactctcaagcgcctggtggactgctgtagtgagcgccttctgggcaagaaactgggcatccctcgaggcgtacaaagggacaccatgtggcggatctttactggatcgctgctggtagaggagaagtcaagtgcccttctgcatgaccttcgagagattgaggcctggatctatcgattgctgcgctccccagtacccgtctctgggcagaagcgagtagacatcgaggtcctaccccaagagctccagccagctctgacctttgctcttccagacccatctcgattcaccctagtggatttcccactgcaccttcccttggaacttctaggtgtggacgcctgtctccaggtgctaacctgcattctgttagagcacaaggtggtgctacagtcccgagactacaatgcactctccatgtctgtgatggcattcgtggcaatgatctacccactggagtatatgtttcctgtcatcccgctgctacccacctgcatggcatcagcagagcagctgctgttggctccaaccccgtacatcattggggttcctgccagcttcttcctctacaaactggacttcaaaatgcctgatgatgtatggctagtggatctggacagcaatagggtgattgcccccaccaatgcagaagtgctgcctatcctgccagaaccagaatcactagagctgaaaaagcatttaaagcaggccttggccagcatgagtctcaacacccagcccatcctcaatctggagaaatttcatgagggccaggagatcccccttctcttgggaaggccttctaatgacctgcagtccacaccgtccactgaattcaacccactcatctatggcaatgatgtggattctgtggatgttgcaaccagggttgccatggtacggttcttcaattccgccaacgtgctgcagggatttcagatgcacacgcgtaccctgcgcctctttcctcggcctgtggtagcttttcaagctggctcctttctagcctcacgtccccggcagactccttttgccgagaaattggccaggactcaggctgtggagtactttggggaatggatccttaaccccaccaactatgcctttcagcgaattcacaacaatatgtttgatccagccctgattggtgacaagccaaagtggtatgctcatcagctgcagcctatccactatcgcgtctatgacagcaattcccagctggctgaggccctgagtgtaccaccagagcgggactctgactccgaacctactgatgatagtggcagtgatagtatggattatgacgattcaagctcttcttactcctcccttggtgactttgtcagtgaaatgatgaaatgtgacattaatggtgatactcccaatgtggaccctctgacacatgcagcactgggggatgccagcgaggtggagattgacgagctgcagaatcagaaggaagcagaagagcctggcccagacagtgagaactctcaggaaaaccccccactgcgctccagctctagcaccacagccagcagcagccccagcactgtcatccacggagccaactctgaacctgctgactctacggagatggatgataaggcagcagtaggcgtctccaagcccctcccttccgtgcctcccagcattggcaaatcgaacgtggacagacgtcaggcagaaattggagaggggtcagtgcgccggcgaatctatgacaatccatacttcgagccccaatatggctttccccctgaggaagatgaggatgagcagggggaaagttacactccccgattcagccaacatgtcagtggcaatcgggctcaaaagctgctgcggcccaacagcttgagactggcaagtgactcagatgcagagtcagactctcgggcaagctctcccaactccaccgtctccaacaccagcaccgagggcttcgggggcatcatgtcttttgccagcagcctctatcggaaccacagtaccagcttcagtctttcaaacctcacactgcccaccaaaggtgcccgagagaaggccacgcccttccccagtctgaaaggaaacaggagggcgttagtggatcagaagtcatctgtcattaaacacagcccaacagtgaaaagagaacctccatcaccccagggtcgatccagcaattctagtgagaaccagcagttcctgaaggaggtggtgcacagcgtgctggacggccagggagttggctggctcaacatgaaaaaggtgcgccggctgctggagagcgagcagctgcgagtctttgtcctgagcaagctgaaccgcatggtgcagtcagaggacgatgcccggcaggacatcatcccggatgtggagatcagtcggaaggtgtacaagggaatgttagacctcctcaagtgtacagtcctcagcttggagcagtcctatgcccacgcgggtctgggtggcatggccagcatctttgggcttttggagattgcccagacccactactatagtaaagaaccagacaagcggaagagaagtccaacagaaagtgtaaataccccagttggcaaggatcctggcctagctgggcggggggacccaaaggctatggcacaactgagagttccacaactgggacctcgggcaccaagtgccacaggaaagggtcctaaggaactggacaccagaagtttaaaggaagaaaattttatagcatctattgggcctgaagtaatcaaacctgtctttgaccttggtgagacagaggagaaaaagtcccagatcagcgcagacagtggtgtgagcctgacgtctagttcccagaggactgatcaagactctgtcatcggcgtgagtccagctgttatgatccgcagctcaagtcaggattctgaagttagcaccgtggtgagtaatagctctggagagacccttggagctgacagtgacttgagcagcaatgcaggtgatggaccaggtggcgagggcagtgttcacctggcaagctctcggggcactttgtctgatagtgaaattgagaccaactctgccacaagcaccatctttggtaaagcccacagcttgaagccaagcataaaggagaagctggcaggcagccccattcgtacttctgaagatgtgagccagcgagtctatctctatgagggactcctaggcaaagagcgttctactttatgggaccaaatgcaattctgggaagatgccttcttagatgctgtgatgttggagagagaagggatgggtatggaccagggtccccaggaaatgatcgacaggtacctgtcccttggagaacatgaccggaagcgcctggaagatgatgaagatcgcttgttggccacacttctgcacaacctcatctcctacatgctgctgatgaaggtaaataagaatgacatccgcaagaaggtgaggcgcctaatgggaaagtcgcacattgggcttgtgtacagccagcaaatcaatgaggtgcttgatcagctggcgaacctgaatggacgcgatctctctatctggtccagtggcagccggcacatgaagaagcagacatttgtggtacatgcagggacagatacaaacggagatatctttttcatggaggtgtgcgatgactgtgtggtgttgcgtagtaacatcggaacagtgtatgagcgctggtggtacgagaagctcatcaacatgacctactgtcccaagacgaaggtgttgtgcttgtggcgtagaaatggctctgagacccagctcaacaagttctatactaaaaagtgtcgggagctgtactactgtgtgaaggacagcatggagcgcgctgccgcccgacagcaaagcatcaaacccggacctgaattgggtggcgagttccctgtgcaggacctgaagactggtgagggtggcctgctgcaggtgaccctggaagggatcaacctcaaattcatgcacaatcaggttttcatagagctgaatcacattaaaaagtgcaatacagttcgaggcgtctttgtcctggaggaatttgttcctgaaattaaagaagtggtgagccacaagtacaagacaccaatggcccacgaaatctgctactccgtattatgtctcttctcgtacgtggctgcagttcatagcagtgaggaagatctcagaaccccgccccggcctgtctctagctgatggagaggggctacgcagctgccccagcccagggcacgcccctggccccttgctgttcccaagtgcacgatgctgctgtgactgaggagtggatgatgctcgtgtgtcctctgcaagccccctgctgtggcttggttggttaccggttatgtgtccctctgagtgtgtcttgagcgtgtccaccttctccctctccactcccagaagaccaaactgccttcccctcagggctcaagaatgtgtacagtctgtggggccggtgtgaacccactattttgtgtccttgagacatttgtgttgtggttccttgtccttgtccctggcgttataactgtccactgcaagagtctggctctcccttctctgtgacccggcatgactgggcgcctggagcagtttcactctgtgaggagtgagggaaccctggggctcaccctctcagaggaagggcacagagaggaagggaagaattggggggcagccggagtgagtggcagcctccctgcttccttctgcattcccaagccggcagctactgcccagggcccgcagtgttggctgctgcctgccacagcctctgtgactgcagtggagcggcgaattccctgtggcctgccatgccttcggcatcagaggatggagtggtcgaggctagtggagtcccagggaccgctggctgctctgcctgagcatcagggagggggcaggaaagaccaagctgggtttgcacatctgtctgcaggctgtctctccaggcacggggtgtcaggagggagagacagcctgggtatgggcaagaaatgactgtaaatatttcagccccacattatttatagaaaatgtacagttgtgtgaatgtgaaataaatgtcctcaactccc

SEQ ID NO: 272314 - DNA, 4767 bp, Artificial Sequence
  derived and/or modified sequence
atggtgcagaagaagaagttctgcccccggctgctggactacctggttatcgtaggggctagacatccctcctccgacagcgtggcccagactccggagttgttaaggaggtaccccttagaggatcacactgagtttccactccccccagatgtggtgtttttctgtcagccagagggatgcctttctgtccggcagaggcgcatgagccttcgggatgatactagcttcgtcttcactctgacggataaagacactggcgtgaccagatacgggatctgcgtcaatttctatagaagcttccaaaagaggatctctaaggagaaaggggaaggtggagcggggagtagagggaaggagggcacccacgccacttgtgcatctgaagaaggtggcacggagagttcagagtctggttcctctctacagcccctttctgctgattccactccagatgtcaaccagagtcctagggggaaacgaagagcaaaagccggcagccgttcccgaaacagcacactgacatctctctgtgtgctttcccactatcctttttttagcacgtttcgtgaatgcctgtatacactgaagcgtcttgtggattgttgtagtgagagactcctgggcaagaaattaggcataccgcgaggagtacagagagatacaatgtggagaatcttcaccggcagcttattggtcgaggaaaagtccagcgccctgttgcacgatctgagagaaattgaggcatggatctaccgcctgctgcggagcccagtgccagtttctgggcaaaaaagggtcgacattgaggttttgccccaggaactgcagccagctctcacgtttgcgctaccagatccttcaaggtttaccctggttgattttcctctgcacttgccacttgaactcctgggggtggatgcctgtctgcaggtccttacctgcattttgctcgaacacaaagtcgtcctacagtctagagactacaacgctctgagcatgagcgttatggctttcgtggcaatgatctatcctctggagtatatgtttcctgtgataccactgctgcctacctgcatggcttctgccgagcaactcctgctggctcccactccttacatcattggggtaccagcatccttcttcctttacaagctagatttcaaaatgcctgacgacgtgtggctcgtggacctagactctaatagggtgatagcccctacaaatgctgaggtgctcccaatcctgcctgaaccagaatcactcgagctgaagaaacacctgaagcaggctctggccagtatgagccttaacacacagccgatcctcaatctggagaaattccacgaagggcaggaaattcccttactccttgggaggccctctaacgatctgcagtcaactccaagtaccgaattcaatccactaatatacgggaacgacgttgattccgtcgacgtggcaacaagggtggccatggttcgattcttcaattctgcaaacgttctgcaaggatttcagatgcatactagaactttgcgactctttcctcgtcccgtcgtggcgttccaggcagggtcttttctggcgtcccgcccccgccagacaccctttgcagagaagcttgctaggactcaagcggtagaatatttcggtgagtggatcctgaaccccacaaactacgcctttcaacggatccacaataatatgtttgacccagcactcattggcgacaagcccaaatggtatgctcaccagcttcagcccattcattatcgcgtgtatgacagcaattcacagctcgcagaggcattgtctgtgcctccagagagggattccgactccgaacccacggatgatagtggcagtgattccatggactacgatgactcctccagctcctattctagccttggggacttcgtttccgagatgatgaaatgcgacattaatggcgacacgccaaacgttgacccacttactcacgccgcactgggggacgcgtcagaggtggagatagacgagctgcagaaccagaaggaggcagaagagcccggtccagacagcgagaactcccaggagaatcccccccttcggagtagctcctccactaccgctagctccagtccatccacagtgattcatggggccaactcagagcctgcagactccaccgaaatggacgacaaagcagccgtcggagtttcgaagccacttcccagtgtgcctccttctatagggaaaagcaacgtcgaccgaaggcaggcagagataggagaggggtctgtcagacgtcgtatttacgacaatccatattttgaacctcaatacgggttcccccccgaggaggatgaagatgagcagggggagtcttacaccccacggttttctcagcacgtgagtggcaaccgcgctcagaagttgctccgccccaattcattacggctcgcaagcgacagtgacgcagaatctgatagtagggcttctagccctaattcgacagtctccaacacttccactgaggggttcggcggcatcatgagcttcgctagtagtctataccgaaaccacagcacctcctttagtctttcaaacctcactctgcccacaaaaggtgcccgagagaaagcaaccccttttcctagcctgaagggcaatagacgagctctcgtagaccagaagtccagtgtgatcaaacattcacctaccgtcaagcgcgagcctccatcaccccagggtcgaagttcaaacagtagcgaaaaccagcagtttctcaaagaggtcgtgcactctgtactcgatggtcaaggggtggggtggctcaacatgaaaaaagtccgccgcttgttggagtcagaacagctcagggtgttcgtactttccaagctgaatcgtatggttcaatcagaagatgatgcacggcaggacataatccccgatgttgagatcagccggaaggtttacaagggaatgctggacctcctgaaatgcaccgtgttatcactagagcaatcctatgcacatgcggggctcggcggcatggcctcaatcttcgggctactggagatcgcccagactcattactacagcaaagagcctgataaacgcaaacggtcacccacggagtctgtcaacactccagtaggcaaggatccaggactggccggccgtggcgatccaaaggccatggcccagttacgggtgcctcagctcggtccccgagccccaagcgccaccggaaagggccctaaggaacttgacacgaggtctttgaaggaagagaacttcattgcaagtatcgggcctgaagttatcaagccggtgtttgacctgggtgagaccgaagaaaagaagtcacagatcagcgcagacagcggtgtgtccctgacctccagtagccagagaacggatcaggacagcgttattggggtctcacctgccgtgatgataagatcgtccagtcaggactctgaggtgtctactgtggtctccaatagctcgggtgaaactcttggcgctgatagcgatttgtcctccaacgctggggatggtccaggaggggagggcagcgtgcacctggcttcatcaaggggcaccctgtccgactccgaaattgagacaaactctgctacgagcaccatctttggcaaggcccacagcctaaagcccagtatcaaagagaaactagcaggttccccaattcgtacttccgaagacgtttctcaacgggtctatctgtatgaggggctgctaggcaaggagcgatcgactctgtgggatcagatgcaattctgggaggacgccttcttggatgctgtaatgctagagagggaagggatggggatggatcagggcccccaggaaatgattgatcgatacctcagcctgggggaacacgatagaaagcggcttgaagatgacgaggacagattgctcgctacgcttctgcacaatctgatctcttatatgctgttaatgaaagtgaataaaaatgatattagaaaaaaagtccgcaggttaatgggtaaatcacacattggactcgtgtactcacagcagatcaatgaagttcttgatcagcttgctaacctgaatggtcgtgatctcagcatttggagtagcggaagtagacacatgaagaagcagaccttcgtggttcatgccggaaccgatactaacggcgatatcttcttcatggaggtgtgcgacgactgcgtagtgttgagatccaacataggcactgtgtatgaacgctggtggtacgagaagcttataaacatgacctactgccctaagaccaaagtgctgtgcctgtggagaagaaacggtagcgagacccagcttaacaagttttatacaaaaaagtgtagggagctgtactactgcgtgaaggacagcatggaacgcgctgccgctcgacaacaatctatcaaacccggaccagagctcggaggagaattccccgtacaagacctcaaaactggagaaggcggtctgctgcaagtgacgcttgaggggattaaccttaaatttatgcataaccaagtatttatcgaattaaatcacattaagaagtgcaataccgtgcggggagtttttgtcttagaggagttcgtgcccgagattaaagaggtggtgagccacaagtacaagactccaatggcgcacgagatctgttactctgtcctgtgcctgttctcctatgtcgcagccgtgcatagctccgaggaggatctgcgaaccccaccacgacccgttagctcctag

SEQ ID NO: 272315 - DNA, 4767 bp, Artificial Sequence
  derived and/or modified sequence
atggttcagaagaaaaaattctgcccacggcttttggattacctggtgatagtcggtgcgagacacccatcaagcgactctgttgcccagactcccgaactcctgaggagatatccattggaagaccacacagagtttcccctgccaccggacgtggtctttttttgtcagcccgaggggtgcttaagcgtgaggcagaggcggatgagcctgcgggatgacacctctttcgtctttactttaaccgacaaagacacgggtgttacaaggtacggaatatgcgtgaatttttatcggtcttttcaaaagcgcatcagcaaggaaaaaggagaaggcggtgcagggtctagaggtaaagagggcacccacgctacatgcgcgtctgaggaaggcggtaccgaaagctcggagtccggctcaagcttgcagccactctctgccgatagcacccctgacgtgaatcaaagccctcgtgggaaacgaagggcaaaagccggaagtcgaagcagaaacagtaccctcacctctctgtgcgttcttagtcattatccattcttttctacattccgtgaatgtttatataccttaaaacgcctggttgactgttgctcagaaaggctcctgggcaagaagctgggaattcctaggggagtacagcgagatacgatgtggcgaatcttcaccgggagccttctagtagaggaaaagagtagcgccctacttcacgacctgagggagatagaggcatggatctatcgcctgcttcgtagtcctgtccccgtgtccggccagaaacgtgtcgatatcgaagtgctgccccaggagctccagcccgcactcaccttcgccctgccagacccctctcgatttacactagttgacttcccactgcacttgccattagagcttctcggcgtagacgcttgtctccaagtcctgacctgcatcttactcgagcacaaagtcgtccttcaaagtcgggattacaatgctctcagtatgtccgtcatggcattcgtggctatgatctaccctcttgagtacatgttccccgtaatacccttgctgccaacatgcatggctagcgcagagcagctgctgttggccccaaccccctatatcatcggggtacctgcatccttctttctttacaaactggacttcaaaatgcctgacgatgtatggttagttgacctggactccaaccgtgtgattgcccctacaaatgcagaggtgcttcccatattaccagagcccgagagcttagagctgaagaagcacctgaagcaggctctggcttctatgtcgctgaacacccagccaatcttgaacctggagaagtttcatgaaggtcaagagatccctctgttgctgggcagacccagtaatgacctgcagagtaccccttccacggaattcaaccccctcatttatggaaatgacgtcgactccgtggacgttgctactcgagtcgctatggttcgtttttttaatagcgccaatgtgttgcagggattccaaatgcacaccaggacccttcgcctgttcccgaggcctgttgtggctttccaggccggttcttttctggcttcgagacctcgccaaaccccctttgcagaaaagttggcccgaacgcaggcggtggagtactttggagagtggatcctgaaccctactaactatgctttccaaaggattcataataatatgtttgacccagctttgataggagataagcctaagtggtatgcccaccagttgcaacccatccactatcgcgtctacgactccaactcacagctcgccgaggcactctctgttccaccagagagggatagtgattccgagcctaccgatgactctggcagtgactccatggactacgacgattcaagctctagttattcttccctgggagatttcgtcagtgagatgatgaagtgcgacatcaatggtgatactcccaacgtcgacccactcacacacgctgcattgggagacgccagcgaagtagagattgatgagttgcagaatcagaaggaagctgaagaaccgggacccgattccgaaaatagtcaagagaaccccccactgaggagcagctcctctacaacagccagcagctctcctagtaccgtcattcacggtgcaaattccgagcccgcagactctactgagatggacgacaaagctgccgtgggggtttcaaagccactcccctccgtccctccctcaatcggaaagtctaatgtggaccggaggcaggccgagatcggcgaggggagtgtcaggaggcggatctatgacaacccgtatttcgaaccgcagtacggctttcccccagaagaggacgaggacgaacagggggagtcatacaccccacggttttctcagcacgtgagcggcaatagggctcagaaactcctgcgaccaaacagcctgcgacttgcatcggattcagacgcggagagcgatagtagagccagtagtccgaatagcaccgtttctaacaccagcacagaaggatttgggggaatcatgtcattcgctagcagtctttataggaatcattctaccagctttagcctgtccaacctgaccctaccaacgaagggggcacgggaaaaagccactccctttccgagtcttaaagggaatagaagggcccttgtggaccagaagagctccgtgatcaagcactctcctacagtgaagcgggagccaccctctccccaggggagaagcagcaatagttcagagaaccaacagttcctgaaggaggtcgtccatagcgtcttggacggacagggcgttggctggctgaacatgaagaaggtccgccgactgctagaatctgaacagctgcgggtattcgttctgtctaagctgaaccgtatggtgcaaagcgaggacgatgcacggcaggatatcatccctgacgtagagatcagcagaaaggtatacaaaggcatgctggacctgttaaaatgtacagttctgagtcttgagcagtcctacgcccacgctgggctggggggaatggcctcgatatttggcctactcgaaatcgcccagacccattattacagcaaggaacctgacaagaggaagagaagcccgactgaaagcgtaaataccccagtgggcaaggatcccggactggcaggtcgcggagaccctaaagctatggcacagctaagggtaccacagctcggccctagggcaccctccgcaacgggcaagggaccgaaagagctcgacacaagatccctcaaggaagagaattttatagcctcaatcggacctgaagtcatcaagcccgtctttgatctaggagagactgaagaaaagaaatctcaaatcagcgcagattccggggtttccttgacgtcgagcagtcagcgcacagaccaggacagtgtgatcggggtttccccggcagtcatgatccggtcaagtagtcaagacagtgaggtgtccacagtggtgagcaattcttcgggggaaaccctgggcgcagattccgatctttcctctaatgcaggggatggcccaggtggggaagggagcgtgcatctggcgtccagtagggggaccttgagtgactctgagattgagacgaattcagccacttccactatttttggtaaggcccactctctgaagccttcgatcaaagaaaaattagcaggctctcctatccgcacatccgaagatgtcagtcaaagagtctacctttacgaaggcctgctgggaaaggagcgctctacgttgtgggatcagatgcaattctgggaggacgctttcttggacgccgtaatgctggaacgtgagggcatgggcatggatcagggacctcaggagatgatcgatcgatacctatcgctgggggagcacgacagaaagaggctagaggacgatgaagacagactactggcgacactgctgcacaatctaatttcttatatgctgctaatgaaggtcaataagaatgacatccggaaaaaggtaagacggctcatgggtaagagtcacatcggcctggtttatagtcagcagataaatgaagtactggaccagctcgcaaatttaaacggccgagatctcagcatctggtcatctggcagccgccatatgaaaaagcagacttttgtggtccacgcagggacagacacaaatggggatatattttttatggaggtgtgcgatgactgtgtcgtgcttcgaagcaacatcgggacagtgtatgagcgctggtggtatgaaaaactaatcaacatgacctattgtccaaagacaaaagttctctgtttgtggcgacgcaacggatcagagacacagctcaataagttctatactaagaagtgcagagaactgtattattgtgttaaggattcaatggagagagctgccgctcggcaacagtctataaagccaggtccagagcttgggggagaatttcctgtgcaggacctcaagacaggggaaggcggtttgctgcaggtcaccctggaaggaatcaacttgaaatttatgcataaccaggtatttatagagctcaatcatatcaaaaagtgcaacactgtgcgaggcgttttcgtcctggaggagttcgttccggaaatcaaggaggttgtcagccacaaatacaaaaccccaatggctcacgagatttgctacagcgtcctgtgtctgttttcctacgtggctgctgtccactccagtgaagaggatctaaggacaccaccaagacctgtaagcagctag

SEQ ID NO: 272316 - DNA, 4767 bp, Artificial Sequence
  derived and/or modified sequence
atggtgcagaagaagaagttctgccccagactgctggactacctggtgatcgtgggcgccagacaccccagcagcgacagcgtggcccagacccccgagctgctgagaagataccccctggaggaccacaccgagttccccctgccccccgacgtggtgttcttctgccagcccgagggctgcctgagcgtgagacagagaagaatgagcctgagagacgacaccagcttcgtgttcaccctgaccgacaaggacaccggcgtgaccagatacggcatctgcgtgaacttctacagaagcttccagaagagaatcagcaaggagaagggcgagggcggcgccggcagcagaggcaaggagggcacccacgccacctgcgccagcgaggagggcggcaccgagagcagcgagagcggcagcagcctgcagcccctgagcgccgacagcacccccgacgtgaaccagagccccagaggcaagagaagagccaaggccggcagcagaagcagaaacagcaccctgaccagcctgtgcgtgctgagccactaccccttcttcagcaccttcagagagtgcctgtacaccctgaagagactggtggactgctgcagcgagagactgctgggcaagaagctgggcatccccagaggcgtgcagagagacaccatgtggagaatcttcaccggcagcctgctggtggaggagaagagcagcgccctgctgcacgacctgagagagatcgaggcctggatctacagactgctgagaagccccgtgcccgtgagcggccagaagagagtggacatcgaggtgctgccccaggagctgcagcccgccctgaccttcgccctgcccgaccccagcagattcaccctggtggacttccccctgcacctgcccctggagctgctgggcgtggacgcctgcctgcaggtgctgacctgcatcctgctggagcacaaggtggtgctgcagagcagagactacaacgccctgagcatgagcgtgatggccttcgtggccatgatctaccccctggagtacatgttccccgtgatccccctgctgcccacctgcatggccagcgccgagcagctgctgctggcccccaccccctacatcatcggcgtgcccgccagcttcttcctgtacaagctggacttcaagatgcccgacgacgtgtggctggtggacctggacagcaacagagtgatcgcccccaccaacgccgaggtgctgcccatcctgcccgagcccgagagcctggagctgaagaagcacctgaagcaggccctggccagcatgagcctgaacacccagcccatcctgaacctggagaagttccacgagggccaggagatccccctgctgctgggcagacccagcaacgacctgcagagcacccccagcaccgagttcaaccccctgatctacggcaacgacgtggacagcgtggacgtggccaccagagtggccatggtgagattcttcaacagcgccaacgtgctgcagggcttccagatgcacaccagaaccctgagactgttccccagacccgtggtggccttccaggccggcagcttcctggccagcagacccagacagacccccttcgccgagaagctggccagaacccaggccgtggagtacttcggcgagtggatcctgaaccccaccaactacgccttccagagaatccacaacaacatgttcgaccccgccctgatcggcgacaagcccaagtggtacgcccaccagctgcagcccatccactacagagtgtacgacagcaacagccagctggccgaggccctgagcgtgccccccgagagagacagcgacagcgagcccaccgacgacagcggcagcgacagcatggactacgacgacagcagcagcagctacagcagcctgggcgacttcgtgagcgagatgatgaagtgcgacatcaacggcgacacccccaacgtggaccccctgacccacgccgccctgggcgacgccagcgaggtggagatcgacgagctgcagaaccagaaggaggccgaggagcccggccccgacagcgagaacagccaggagaacccccccctgagaagcagcagcagcaccaccgccagcagcagccccagcaccgtgatccacggcgccaacagcgagcccgccgacagcaccgagatggacgacaaggccgccgtgggcgtgagcaagcccctgcccagcgtgccccccagcatcggcaagagcaacgtggacagaagacaggccgagatcggcgagggcagcgtgagaagaagaatctacgacaacccctacttcgagccccagtacggcttcccccccgaggaggacgaggacgagcagggcgagagctacacccccagattcagccagcacgtgagcggcaacagagcccagaagctgctgagacccaacagcctgagactggccagcgacagcgacgccgagagcgacagcagagccagcagccccaacagcaccgtgagcaacaccagcaccgagggcttcggcggcatcatgagcttcgccagcagcctgtacagaaaccacagcaccagcttcagcctgagcaacctgaccctgcccaccaagggcgccagagagaaggccacccccttccccagcctgaagggcaacagaagagccctggtggaccagaagagcagcgtgatcaagcacagccccaccgtgaagagagagccccccagcccccagggcagaagcagcaacagcagcgagaaccagcagttcctgaaggaggtggtgcacagcgtgctggacggccagggcgtgggctggctgaacatgaagaaggtgagaagactgctggagagcgagcagctgagagtgttcgtgctgagcaagctgaacagaatggtgcagagcgaggacgacgccagacaggacatcatccccgacgtggagatcagcagaaaggtgtacaagggcatgctggacctgctgaagtgcaccgtgctgagcctggagcagagctacgcccacgccggcctgggcggcatggccagcatcttcggcctgctggagatcgcccagacccactactacagcaaggagcccgacaagagaaagagaagccccaccgagagcgtgaacacccccgtgggcaaggaccccggcctggccggcagaggcgaccccaaggccatggcccagctgagagtgccccagctgggccccagagcccccagcgccaccggcaagggccccaaggagctggacaccagaagcctgaaggaggagaacttcatcgccagcatcggccccgaggtgatcaagcccgtgttcgacctgggcgagaccgaggagaagaagagccagatcagcgccgacagcggcgtgagcctgaccagcagcagccagagaaccgaccaggacagcgtgatcggcgtgagccccgccgtgatgatcagaagcagcagccaggacagcgaggtgagcaccgtggtgagcaacagcagcggcgagaccctgggcgccgacagcgacctgagcagcaacgccggcgacggccccggcggcgagggcagcgtgcacctggccagcagcagaggcaccctgagcgacagcgagatcgagaccaacagcgccaccagcaccatcttcggcaaggcccacagcctgaagcccagcatcaaggagaagctggccggcagccccatcagaaccagcgaggacgtgagccagagagtgtacctgtacgagggcctgctgggcaaggagagaagcaccctgtgggaccagatgcagttctgggaggacgccttcctggacgccgtgatgctggagagagagggcatgggcatggaccagggcccccaggagatgatcgacagatacctgagcctgggcgagcacgacagaaagagactggaggacgacgaggacagactgctggccaccctgctgcacaacctgatcagctacatgctgctgatgaaggtgaacaagaacgacatcagaaagaaggtgagaagactgatgggcaagagccacatcggcctggtgtacagccagcagatcaacgaggtgctggaccagctggccaacctgaacggcagagacctgagcatctggagcagcggcagcagacacatgaagaagcagaccttcgtggtgcacgccggcaccgacaccaacggcgacatcttcttcatggaggtgtgcgacgactgcgtggtgctgagaagcaacatcggcaccgtgtacgagagatggtggtacgagaagctgatcaacatgacctactgccccaagaccaaggtgctgtgcctgtggagaagaaacggcagcgagacccagctgaacaagttctacaccaagaagtgcagagagctgtactactgcgtgaaggacagcatggagagagccgccgccagacagcagagcatcaagcccggccccgagctgggcggcgagttccccgtgcaggacctgaagaccggcgagggcggcctgctgcaggtgaccctggagggcatcaacctgaagttcatgcacaaccaggtgttcatcgagctgaaccacatcaagaagtgcaacaccgtgagaggcgtgttcgtgctggaggagttcgtgcccgagatcaaggaggtggtgagccacaagtacaagacccccatggcccacgagatctgctacagcgtgctgtgcctgttcagctacgtggccgccgtgcacagcagcgaggaggacctgagaaccccccccagacccgtgagcagctag

SEQ ID NO: 272317 - protein, 1565 aa, Artificial Sequence
  derived and/or modified sequence
MVQKKKFCPRLLDYLVIVGARHPSSDSVAQTPELLRRYPLEDHTEFPLPPDVVFFCQPEGCLSVRQRRMSLRDDTSFVFTLTDKDTGVTRYGICVNFYRSFQKRISKEKGEGGAGSRGKEGTHATCASEEGGTESSESGSSLQPLSADSTPDVNQSPRGKRRAKAGSRSRNSTLTSLCVLSHYPFFSTFRECLYTLKRLVDCCSERLLGKKLGIPRGVQRDTMWRIFTGSLLVEEKSSALLHDLREIEAWIYRLLRSPVPVSGQKRVDIEVLPQELQPALTFALPDPSRFTLVDFPLHLPLELLGVDACLQVLTCILLEHKVVLQSRDYNALSMSVMAFVAMIYPLEYMFPVIPLLPTCMASAEQLLLAPTPYIIGVPASFFLYKLDFKMPDDVWLVDLDSNRVIAPTNAEVLPILPEPESLELKKHLKQALASMSLNTQPILNLEKFHEGQEIPLLLGRPSNDLQSTPSTEFNPLIYGNDVDSVDVATRVAMVRFFNSANVLQGFQMHTRTLRLFPRPVVAFQAGSFLASRPRQTPFAEKLARTQAVEYFGEWILNPTNYAFQRIHNNMFDPALIGDKPKWYAHQLQPIHYRVYDSNSQLAEALSVPPERDSDSEPTDDSGSDSMDYDDSSSSYSSLGDFVSEMMKCDINGDTPNVDPLTHAALGDASEVEIDELQNQKEAEEPGPDSENSQENPPLRSSSSTTASSSPSTVIHGANSEPADSTEMDDKAAVGVSKPLPSVPPSIGKSNVDRRQAEIGEGAQKLLRPNSLRLASDSDAESDSRASSPNSTVSNTSTEGFGGIMSFASSLYRNHSTSFSLSNLTLPTKGAREKATPFPSLKVFGLNTLMEIVTEAGPGSGEGNRRALVDQKSSVIKHSPTVKREPPSPQGRSSNSSENQQFLKEVVHSVLDGQGVGWLNMKKVRRLLESEQLRVFVLSKLNRMVQSEDDARQDIIPDVEISRKVYKGMLDLLKCTVLSLEQSYAHAGLGGMASIFGLLEIAQTHYYSKEPDKRKRSPTESVNTPVGKDPGLAGRGDPKAMAQLRVPQLGPRAPSATGKGPKELDTRSLKEENFIASIGPEVIKPVFDLGETEEKKSQISADSGVSLTSSSQRTDQDSVIGVSPAVMIRSSSQDSEVSTVVSNSSGETLGADSDLSSNAGDGPGGEGSVHLASSRGTLSDSEIETNSATSTIFGKAHSLKPSIKEKLAGSPIRTSEDVSQRVYLYEGLLGKERSTLWDQMQFWEDAFLDAVMLEREGMGMDQGPQEMIDRYLSLGEHDRKRLEDDEDRLLATLLHNLISYMLLMKVNKNDIRKKVRRLMGKSHIGLVYSQQINEVLDQLANLNGRDLSIWSSGSRHMKKQTFVVHAGTDTNGDIFFMEVCDDCVVLRSNIGTVYERWWYEKLINMTYCPKTKVLCLWRRNGSETQLNKFYTKKCRELYYCVKDSMERAAARQQSIKPGPELGGEFPVQDLKTGEGGLLQVTLEGINLKFMHNQVFIELNHIKKCNTVRGVFVLEEFVPEIKEVVSHKYKTPMAHEICYSVLCLFSYVAAVHSSEEDLRTPPRPVSS

SEQ ID NO: 272318 - DNA, 4698 bp, Artificial Sequence
  derived and/or modified sequence
atggtgcagaaaaaaaagttttgtccacgcttgctcgattacctcgtgatcgtcggagcccggcaccctagttcagacagcgttgctcagacgccagagttgttgcgtcgctaccctctggaagaccataccgaattccccttacctcctgatgtggtcttcttctgccagcctgaaggctgcctcagtgtgagacagaggcgcatgtcgttaagggatgacacctcgttcgtgttcaccctgacagataaggataccggggtgacccgatatgggatctgcgtgaacttctacaggtccttccagaagcgcatttccaaggagaagggtgaaggcggagctggtagccgtggcaaggaaggtacgcatgcgacttgtgcctccgaggagggcggaaccgaatcatccgagtccggatctagcctccagcctctgagcgcagattcaaccccagatgtaaaccaaagcccgagaggtaaacgccgggctaaggcaggctcccgatcacgcaattctacccttacatctctgtgcgtacttagccattatccattttttagtacattccgagaatgcctttacacccttaagaggctggtagattgctgctccgagcgcctgctaggtaaaaagctaggcatcccgcgcggggttcagagggataccatgtggcggatttttacggggagtctgctagtggaggagaaaagctctgccttgctgcacgatctcagggaaattgaggcttggatctatagactgttaagatcccccgttcccgtcagtggacagaagagggtggacatcgaggtgctgccacaggaattgcagcctgctctgacattcgcccttcccgatcccagtagatttacgctagtggactttcctcttcacctgccccttgaactgctaggagtagacgcctgcctccaggtcctaacctgcattctattggagcataaggtcgtcctacagtcgcgggactacaacgcactttctatgagtgtgatggcttttgtggccatgatctacccactcgagtatatgttccctgtcataccgctcctgcctacctgtatggcctctgctgaacagctattgttggcacctaccccgtacataattggtgtcccagcttcattcttcctgtacaagctagacttcaagatgcctgacgacgtatggttagtggacctggattcaaacagagtgatcgcccctaccaacgccgaggttctccctatcctgcctgagccagagtctctcgagctgaaaaagcacctgaaacaggctctggcctcaatgagtctgaatacccagcctatcttgaacttagaaaagttccacgaaggtcaggagattcctctcttgctcggccggcctagcaacgatttacagagtaccccatcgaccgagtttaatcccctgatttatggtaatgacgtggattctgtggatgtagctacccgtgtcgctatggtacggttttttaactctgcaaacgtccttcagggttttcaaatgcatactcggacactcaggctgttccctagacccgtggttgccttccaagctggaagtttcctggcctcccggcctaggcaaacgccttttgctgaaaagctagcccgcacccaggccgttgagtattttggcgaatggattctgaaccctaccaactacgccttccaaaggatccacaataatatgtttgatcctgcattgatcggagataagcccaagtggtacgcgcatcagcttcaacccatccattatcgcgtctatgactcaaattcacagctcgccgaggcgctgtctgtacccccagagagagatagcgattcagagcctacagacgacagcggcagcgattctatggattacgatgactcctccagctcttactccagcttaggcgacttcgtaagtgagatgatgaagtgtgacattaatggggacactccaaacgttgatcctttaacgcatgccgctctgggcgacgcttctgaggtcgagatcgatgaactgcagaaccagaaggaagccgaggagcccggacccgactcagagaactcccaggagaaccctcccctgcgctcttcatcatctactacggcctcgtcaagtccctctacagtgatccacggcgctaatagtgaacccgcagacagcacagaaatggacgataaggccgctgtgggtgtatctaagccattgccctcagtacccccctcgatcggaaagagtaacgtggacagaaggcaggcggagatcggagagggcgcgcaaaagttgttgaggccaaattcactgcgtctggcttctgactccgatgcagagtccgatagccgcgcctcctcacccaactctacagtctccaatacttctacagaaggtttcggtgggatcatgagcttcgcaagctcgctctatcgaaatcacagcactagcttttcactttcaaatctcacactgccgacaaagggggctagagagaaagcaaccccctttcctagtctgaaagtgttcggacttaacacacttatggagatcgtcacagaagccggcccgggctccggggagggtaaccggcgggccctggtcgatcaaaagagttctgtgattaaacacagtcctacagtgaagagggagcctccatccccccagggccgttcatcaaactccagcgagaaccaacagtttcttaaagaggtcgtgcacagcgtgcttgatggccagggggtaggatggctgaacatgaagaaggtacgccgcttgctggaatcagagcagcttagggtattcgtcctgtctaagttgaacaggatggtccaatcggaggatgatgcccggcaggatattatcccggatgtggagattagtaggaaagtgtataaaggcatgctggaccttctcaagtgtacagtgctgagtttagagcagagctatgcccacgctggactcggcgggatggcctccatttttggtctgctggagatagcacagacccattactattctaaagagcccgataagaggaagagaagccctaccgagagtgtaaatacgcccgtgggcaaggacccgggtcttgccggcagaggggacccaaaagccatggcccagctcagagtcccccagctcggccctagagcaccctctgcaacggggaagggccccaaagagttggacactcgtagcctgaaagaagaaaacttcatcgccagcattggccccgaagtaattaagcccgtctttgacctcggggaaacagaagagaagaaatcgcaaatctcggcggacagcggcgtgagtctgacgtcctcttcccagcgcacggaccaagattcagttatcggcgtgtctcctgcagtgatgattcggtcctctagtcaagattccgaggtatctacggtcgtttctaatagtagcggcgaaacgctgggcgctgatagtgatctatccagtaatgctggtgatggacctggtggggaggggagcgtacacctggcttcatcacgtgggaccctctcagatagcgagatagaaacaaattcagctacgagtaccatctttggaaaggcacactcactcaagccatcaatcaaggaaaagttggcaggttccccaataagaacaagtgaagatgtctcccagcgtgtgtatctgtatgagggactgctgggtaaagaacgatcgacactctgggaccagatgcagttttgggaggatgcttttctggatgcggtgatgctggagagagaaggaatggggatggatcagggacctcaggagatgatcgaccgttatctgagtctcggggagcatgatcgaaagcggttggaggacgacgaagatagactgctggcaacgctgctgcataatctgatctcttacatgttattgatgaaggttaataaaaatgatatcagaaagaaagttcgccggctgatggggaagtcccatatcgggcttgtctacagccagcagatcaatgaagtattggaccagctcgccaatctaaatgggagggatcttagcatttggagcagcggtagtcgtcacatgaagaagcagacatttgttgtacatgctgggactgataccaacggggacatcttctttatggaagtgtgcgacgattgcgtcgtattacgtagtaacattggtaccgtgtatgagcggtggtggtacgagaagctgattaacatgacctactgccctaagactaaggtgctgtgcttgtggagacgcaacggtagtgaaactcagctgaataaattttacactaagaagtgtagagagctgtactactgcgtgaaagattccatggagcgtgccgcagctcgacagcagtctattaagccaggacccgagctgggtggcgagtttcccgtgcaggacctcaaaacaggcgaaggcggactgctccaagttaccctcgaggggataaacctgaagtttatgcataatcaagtctttatagaacttaaccacatcaagaaatgcaatacagtgaggggggtctttgtcttagaggaattcgtgcccgaaattaaggaagtggtcagccataaatataaaactcctatggcacacgaaatttgttactccgtactgtgccttttctcgtacgtcgccgcggtccactcatctgaagaggatcttcggacgccacctcgccctgtatcttcgtag

SEQ ID NO: 272319 - DNA, 4698 bp, Artificial Sequence
  derived and/or modified sequence
atggtgcagaagaagaagttctgcccccggctgctggactacctggtgattgtgggcgcccggcaccccagcagtgacagcgtggcccagaccccagagctgctgcggcgctaccccctggaggaccacacagagttccccctgcccccagatgtggtgttcttctgccagcctgagggctgcctgtctgtgcggcagaggaggatgagcctgagagatgacaccagctttgtgttcaccctgacagacaaggacaccggggtgaccaggtatggcatctgtgtgaacttctaccgctccttccagaagaggatcagcaaggagaagggggagggcggggccggcagccggggcaaggagggcacccacgccacctgtgccagcgaggagggcggcacagagagcagcgagagcggcagcagcctgcagcccctgtctgctgacagcaccccagatgtgaaccagagcccccggggcaagagaagagccaaggccggcagccgcagcaggaacagcaccctgaccagcctgtgtgtgctgagccactaccccttcttcagcaccttcagagaatgtctgtacaccctgaagaggctggtggactgctgcagcgagcggctgctgggcaagaagctgggcatcccccggggcgtgcagagggacaccatgtggaggatcttcaccggcagcctgctggtggaggagaagagcagcgccctgctgcatgacctgcgggagattgaggcctggatctaccgcctgctgcggagccctgtgcctgtgtctggccagaagagggtggacatcgaggtgctgccccaggagctgcagcctgccctgacctttgccctgcctgaccccagccgcttcaccctggtggacttccccctgcacctgcccctggagctgctgggcgtggatgcctgcctgcaggtgctgacctgcatcctgctggagcacaaggtggtgctgcagagccgggactacaatgccctgtccatgtctgtgatggcctttgtggccatgatctaccccctggagtacatgtttcctgtgatccccctgctgcccacctgcatggccagcgctgagcagctgctgctggcccccaccccctacatcattggagtgcctgccagcttcttcctgtacaagctggacttcaagatgccagatgatgtgtggctggtggacctggacagcaacagagtgattgcccccaccaatgctgaggtgctgcccatcctgcctgagcctgagagcctggagctgaagaagcacctgaagcaggccctggcctccatgagcctgaacacccagcccatcctgaacctggagaagttccacgagggccaggagatccccctgctgctgggccggcccagcaatgacctgcagagcacccccagcacagagttcaaccccctcatctatggaaatgatgtggacagcgtggatgtggccaccagggtggccatggtgcgcttcttcaacagcgccaacgtgctgcagggcttccagatgcacaccaggaccctgcggctcttccccaggcctgtggtggccttccaggccggcagcttcctggccagccggccccggcagaccccatttgctgagaagctggcccggacccaggccgtggagtactttggagagtggatcctgaaccccaccaactatgccttccagaggatccacaacaacatgtttgatcctgccctgattggagacaagcccaagtggtacgcccaccagctgcagcccatccactacagagtgtatgacagcaacagccagctggccgaggccctgtctgtgcccccagagcgggacagcgacagcgagcccacagatgattctggcagtgacagcatggactatgatgacagcagcagcagctacagcagcctgggggactttgtgtctgagatgatgaagtgtgacatcaatggagacacccccaacgtggaccccctgacccatgctgccctgggagatgccagcgaggtggagattgatgagctgcagaaccagaaggaggccgaggagcccggcccagattctgagaacagccaggagaacccccccctgcggagcagcagcagcaccacagccagcagcagccccagcaccgtcatccatggagccaacagcgagcctgctgacagcacagagatggatgacaaggctgctgtgggcgtgtccaagcccctgcccagcgtgcccccatccatcggcaagagcaatgtggaccggcggcaggccgagatcggggagggcgcccagaagctgctgcggcccaacagcctgcggctggccagtgacagtgatgctgagagtgacagccgggccagcagccccaacagcacagtgagcaacaccagcacagagggctttggaggcatcatgagctttgccagcagcctgtacagaaaccacagcaccagcttcagcctgagcaacctgaccctgcccaccaagggggcccgggagaaggccacccccttccccagcctgaaggtgtttggcctgaacaccctgatggagatcgtgacagaagctggccctggcagcggggagggcaacagaagagccctggtggaccagaagagcagcgtcatcaagcacagccccaccgtgaagcgggagccccccagcccccagggccgcagcagcaacagcagcgagaaccagcagttcctgaaggaggtggtgcacagcgtgctggatggccagggcgtgggctggctgaacatgaagaaggtgcggcggctgctggagagcgagcagctgcgggtgtttgtgctgagcaagctgaacaggatggtgcagagtgaagatgatgcccggcaggacatcatcccagatgtggagatcagcaggaaggtgtacaagggcatgctggacctgctgaagtgcaccgtgctgagcctggagcagagctatgcccacgccggcctgggcggcatggccagcatcttcggcctgctggagatcgcccagacccactactacagcaaggagccagacaagaggaagaggagccccacagagagcgtgaacacccctgtgggcaaggaccccggcctggccggccgcggggaccccaaggccatggcccagctgcgggtgccccagctgggcccccgggcccccagcgccaccgggaagggccccaaggagctggacaccaggagcctgaaggaggagaacttcatcgccagcatcggccctgaggtgatcaagcctgtgtttgacctgggggagacagaggagaagaagagccagatctctgctgacagcggcgtgtccctgaccagcagcagccagaggacagaccaggacagcgtgattggagtgtccccagctgtgatgatccgcagcagcagccaggacagcgaggtgtccacagtggtgagcaacagcagcggggagaccctgggcgctgacagcgacctgagcagcaatgctggagatggccctggaggagagggctctgtgcacctggccagcagccggggcaccctgagtgacagcgagattgagaccaacagcgccaccagcaccatctttgggaaggcccacagcctgaagcccagcatcaaggagaagctggccggcagccccatccgcaccagtgaagatgtgtcccagagggtgtacctgtatgagggcctgctgggcaaggagaggagcaccctgtgggaccagatgcagttctgggaggatgccttcctggatgctgtgatgctggagcgggagggcatgggcatggaccagggcccccaggagatgattgaccgctacctgagcctgggggagcatgacaggaagaggctggaggatgatgaagatcggctgctggccaccctgctgcacaacctgatctcctacatgctgctgatgaaggtgaacaagaatgacatcaggaagaaggtgcggcggctgatgggcaagagccacatcggcctggtgtacagccagcagatcaatgaggtgctggaccagctggccaacctgaatggccgggacctgagcatctggagcagcggcagccgccacatgaagaagcagacctttgtggtgcatgctggaacagacaccaacggggacatcttcttcatggaggtgtgtgatgactgtgtggtgctgcggagcaacattggaacagtgtatgagcgctggtggtatgagaagctgatcaacatgacctactgccccaagaccaaggtgctgtgcctgtggaggagaaatggaagtgagacccagctgaacaagttctacaccaagaagtgccgggagctgtactactgtgtgaaggacagcatggagagagctgctgcccggcagcagagcatcaagccaggccctgagctgggcggggagttccctgtgcaggacctgaagacaggagagggcggcctgctgcaggtgaccctggagggcatcaacctgaagttcatgcacaaccaggtgttcatcgagctgaaccacatcaagaagtgcaacacagtgcggggcgtgtttgtgctggaggagtttgtgcctgagatcaaggaggtggtgagccacaagtacaagacccccatggcccacgagatctgctacagcgtgctgtgcctcttctcctatgtggccgctgtgcacagcagcgaggaggacctgcggaccccacccaggcctgtgagcagctag

SEQ ID NO: 272320 - DNA, 5744 bp, Artificial Sequence
  derived and/or modified sequence
cccgctgcccaggattggtaggctccaccgctcggcagccggcttccctgctcggacgccgagcaccgccaaagcgcacttcgattttcagaattcctcctgggaatgctgactccttgcttggtgccctgatgcttctctgagataaactgatgaattggaaccatggtgcaaaagaagaagttctgtcctcggttacttgactatctagtgatcgtaggggccaggcacccgagcagtgatagcgtggcccagactcctgaattgctacggcgataccccttggaggatcacactgagtttcccctgcccccagatgtagtgttcttctgccagcccgagggctgcctgagcgtgcggcagcggcgcatgagccttcgggatgatacctcttttgtcttcaccctcactgacaaggacactggagtcacgcgatatggcatctgtgttaacttctaccgctccttccaaaagcgaatctctaaggagaagggggaaggtggggcagggtcccgtgggaaggaaggaacccatgccacctgtgcctcagaagagggtggcactgagagctcagagagtggctcatccctgcagcctctcagtgctgactctacccctgatgtgaaccagtctcctcggggcaaacgccgggccaaggcggggagccgctcccgcaacagtactctcacgtccctgtgcgtgctcagccactaccctttcttctccaccttccgagagtgtttgtatactctcaagcgcctggtggactgctgtagtgagcgccttctgggcaagaaactgggcatccctcgaggcgtacaaagggacaccatgtggcggatctttactggatcgctgctggtagaggagaagtcaagtgcccttctgcatgaccttcgagagattgaggcctggatctatcgattgctgcgctccccagtacccgtctctgggcagaagcgagtagacatcgaggtcctaccccaagagctccagccagctctgacctttgctcttccagacccatctcgattcaccctagtggatttcccactgcaccttcccttggaacttctaggtgtggacgcctgtctccaggtgctaacctgcattctgttagagcacaaggtggtgctacagtcccgagactacaatgcactctccatgtctgtgatggcattcgtggcaatgatctacccactggagtatatgtttcctgtcatcccgctgctacccacctgcatggcatcagcagagcagctgctgttggctccaaccccgtacatcattggggttcctgccagcttcttcctctacaaactggacttcaaaatgcctgatgatgtatggctagtggatctggacagcaatagggtgattgcccccaccaatgcagaagtgctgcctatcctgccagaaccagaatcactagagctgaaaaagcatttaaagcaggccttggccagcatgagtctcaacacccagcccatcctcaatctggagaaatttcatgagggccaggagatcccccttctcttgggaaggccttctaatgacctgcagtccacaccgtccactgaattcaacccactcatctatggcaatgatgtggattctgtggatgttgcaaccagggttgccatggtacggttcttcaattccgccaacgtgctgcagggatttcagatgcacacgcgtaccctgcgcctctttcctcggcctgtggtagcttttcaagctggctcctttctagcctcacgtccccggcagactccttttgccgagaaattggccaggactcaggctgtggagtactttggggaatggatccttaaccccaccaactatgcctttcagcgaattcacaacaatatgtttgatccagccctgattggtgacaagccaaagtggtatgctcatcagctgcagcctatccactatcgcgtctatgacagcaattcccagctggctgaggccctgagtgtaccaccagagcgggactctgactccgaacctactgatgatagtggcagtgatagtatggattatgacgattcaagctcttcttactcctcccttggtgactttgtcagtgaaatgatgaaatgtgacattaatggtgatactcccaatgtggaccctctgacacatgcagcactgggggatgccagcgaggtggagattgacgagctgcagaatcagaaggaagcagaagagcctggcccagacagtgagaactctcaggaaaaccccccactgcgctccagctctagcaccacagccagcagcagccccagcactgtcatccacggagccaactctgaacctgctgactctacggagatggatgataaggcagcagtaggcgtctccaagcccctcccttccgtgcctcccagcattggcaaatcgaacgtggacagacgtcaggcagaaattggagagggggctcaaaagctgctgcggcccaacagcttgagactggcaagtgactcagatgcagagtcagactctcgggcaagctctcccaactccaccgtctccaacaccagcaccgagggcttcgggggcatcatgtcttttgccagcagcctctatcggaaccacagtaccagcttcagtctttcaaacctcacactgcccaccaaaggtgcccgagagaaggccacgcccttccccagtctgaaagtatttgggctaaatactctaatggagattgttactgaagccggccccgggagtggtgaaggaaacaggagggcgttagtggatcagaagtcatctgtcattaaacacagcccaacagtgaaaagagaacctccatcaccccagggtcgatccagcaattctagtgagaaccagcagttcctgaaggaggtggtgcacagcgtgctggacggccagggagttggctggctcaacatgaaaaaggtgcgccggctgctggagagcgagcagctgcgagtctttgtcctgagcaagctgaaccgcatggtgcagtcagaggacgatgcccggcaggacatcatcccggatgtggagatcagtcggaaggtgtacaagggaatgttagacctcctcaagtgtacagtcctcagcttggagcagtcctatgcccacgcgggtctgggtggcatggccagcatctttgggcttttggagattgcccagacccactactatagtaaagaaccagacaagcggaagagaagtccaacagaaagtgtaaataccccagttggcaaggatcctggcctagctgggcggggggacccaaaggctatggcacaactgagagttccacaactgggacctcgggcaccaagtgccacaggaaagggtcctaaggaactggacaccagaagtttaaaggaagaaaattttatagcatctattgggcctgaagtaatcaaacctgtctttgaccttggtgagacagaggagaaaaagtcccagatcagcgcagacagtggtgtgagcctgacgtctagttcccagaggactgatcaagactctgtcatcggcgtgagtccagctgttatgatccgcagctcaagtcaggattctgaagttagcaccgtggtgagtaatagctctggagagacccttggagctgacagtgacttgagcagcaatgcaggtgatggaccaggtggcgagggcagtgttcacctggcaagctctcggggcactttgtctgatagtgaaattgagaccaactctgccacaagcaccatctttggtaaagcccacagcttgaagccaagcataaaggagaagctggcaggcagccccattcgtacttctgaagatgtgagccagcgagtctatctctatgagggactcctaggcaaagagcgttctactttatgggaccaaatgcaattctgggaagatgccttcttagatgctgtgatgttggagagagaagggatgggtatggaccagggtccccaggaaatgatcgacaggtacctgtcccttggagaacatgaccggaagcgcctggaagatgatgaagatcgcttgttggccacacttctgcacaacctcatctcctacatgctgctgatgaaggtaaataagaatgacatccgcaagaaggtgaggcgcctaatgggaaagtcgcacattgggcttgtgtacagccagcaaatcaatgaggtgcttgatcagctggcgaacctgaatggacgcgatctctctatctggtccagtggcagccggcacatgaagaagcagacatttgtggtacatgcagggacagatacaaacggagatatctttttcatggaggtgtgcgatgactgtgtggtgttgcgtagtaacatcggaacagtgtatgagcgctggtggtacgagaagctcatcaacatgacctactgtcccaagacgaaggtgttgtgcttgtggcgtagaaatggctctgagacccagctcaacaagttctatactaaaaagtgtcgggagctgtactactgtgtgaaggacagcatggagcgcgctgccgcccgacagcaaagcatcaaacccggacctgaattgggtggcgagttccctgtgcaggacctgaagactggtgagggtggcctgctgcaggtgaccctggaagggatcaacctcaaattcatgcacaatcaggttttcatagagctgaatcacattaaaaagtgcaatacagttcgaggcgtctttgtcctggaggaatttgttcctgaaattaaagaagtggtgagccacaagtacaagacaccaatggcccacgaaatctgctactccgtattatgtctcttctcgtacgtggctgcagttcatagcagtgaggaagatctcagaaccccgccccggcctgtctctagctgatggagaggggctacgcagctgccccagcccagggcacgcccctggccccttgctgttcccaagtgcacgatgctgctgtgactgaggagtggatgatgctcgtgtgtcctctgcaagccccctgctgtggcttggttggttaccggttatgtgtccctctgagtgtgtcttgagcgtgtccaccttctccctctccactcccagaagaccaaactgccttcccctcagggctcaagaatgtgtacagtctgtggggccggtgtgaacccactattttgtgtccttgagacatttgtgttgtggttccttgtccttgtccctggcgttataactgtccactgcaagagtctggctctcccttctctgtgacccggcatgactgggcgcctggagcagtttcactctgtgaggagtgagggaaccctggggctcaccctctcagaggaagggcacagagaggaagggaagaattggggggcagccggagtgagtggcagcctccctgcttccttctgcattcccaagccggcagctactgcccagggcccgcagtgttggctgctgcctgccacagcctctgtgactgcagtggagcggcgaattccctgtggcctgccatgccttcggcatcagaggatggagtggtcgaggctagtggagtcccagggaccgctggctgctctgcctgagcatcagggagggggcaggaaagaccaagctgggtttgcacatctgtctgcaggctgtctctccaggcacggggtgtcaggagggagagacagcctgggtatgggcaagaaatgactgtaaatatttcagccccacattatttatagaaaatgtacagttgtgtgaatgtgaaataaatgtcctcaactccc

SEQ ID NO: 272321 - DNA, 4698 bp, Artificial Sequence
  derived and/or modified sequence
atggtgcagaagaagaagttctgcccccggctgctggactacctggttatcgttggagcgcggcacccaagctctgattccgtggcccagacccccgagctcctgcgcagatatcccctcgaagaccatacagagttccccctgccacctgatgtggttttcttctgccagcccgaaggatgtctcagcgttcggcagcggcggatgagcctgcgcgacgacacttctttcgtgttcactctcactgacaaagacaccggcgttactagatatggcatctgcgttaacttttataggtctttccaaaagcggatttctaaggaaaaaggcgaaggtggagctggttctaggggtaaagaaggcactcacgcgacctgtgccagcgaagagggtggtaccgagagtagcgagagcggaagcagccttcagcccctctctgcagattccaccccagacgtgaatcagtcaccacgggggaagcgccgtgccaaagctgggagccgttcccgcaactctacgttgaccagcctctgcgtgctcagtcactaccccttcttttccacattcagagagtgtttgtacaccctgaagagactagtggactgctgctctgaacgcctgttaggcaagaagctgggcatcccccgtggcgtgcagcgggacaccatgtggcggatattcacaggatcccttttggtggaagaaaaatcctctgcattgctgcacgacctgagggagatcgaggcatggatttatcgattactgcgctcccctgtgccggtgtccggccagaagagggtggatattgaggtgctcccccaggaactgcagcctgcccttacatttgccttacccgatccctcgagatttactttagtggacttcccactgcacctgccattggaactgctgggggtggacgcttgcctgcaggttctgacctgcatcttactggaacataaagtcgtcctccagtctcgagattacaatgcactctccatgtctgtcatggcgtttgtcgccatgatttatccccttgaatacatgttccccgtcataccccttctccccacctgtatggcgagcgccgagcagctgctgctcgccccgaccccgtacatcattggagtgccagctagcttcttcctgtacaaactcgactttaaaatgcccgacgacgtgtggctcgtggacttagattcaaatagagtgatcgctcctactaatgctgaggttctccctatccttcccgaaccggagtccttggagctcaagaaacacctcaagcaggcactggctagtatgagtttgaacacgcaacccatcctcaacctggagaagtttcacgagggccaagaaatacccttattgctgggccgaccatccaacgatttgcaatccacgccgagcaccgagttcaatcccctaatctatggaaatgacgtggacagcgtagatgtggccacaagagttgccatggtgaggttctttaattcagctaatgtgttgcaggggtttcagatgcacacgcgcactctgcggctcttcccaagaccggtggtggcatttcaggctggctcgttcctggcgtccagaccccgtcagactccttttgcggaaaagctggcccggacccaggctgtggaatactttggtgagtggatcctgaaccccaccaattatgcctttcagagaattcataacaacatgtttgaccccgcccttattggcgataaacctaagtggtacgcccatcaattacagccaatccactatagagtctacgacagcaattcccagctggctgaggccctctcagtcccacccgagagggactctgacagcgagccaactgacgactcaggtagtgacagtatggactatgacgactcttccagctcctacagttcgttgggtgatttcgtaagcgagatgatgaaatgtgacattaatggtgatacacctaacgttgatccattgacacacgcggcattgggggatgccagtgaggtggagatcgatgaacttcagaaccagaaggaagcagaagagccgggtccagattcggagaactctcaggagaaccctccactccgcagctcctcctccaccactgcttcaagcagtcccagtaccgtgattcacggagccaacagtgaacctgccgactctactgagatggacgataaggcagctgtgggggttagtaagcctttgccttcagtaccccctagcattggaaaaagcaacgttgataggaggcaagcggaaatcggagagggtgcccaaaaactgctgcggcccaattcactgcgccttgcaagtgatagcgacgcggaatctgactctagggccagtagtcctaattctaccgtgagtaacaccagcacagaaggctttggcggcattatgtctttcgcttcaagtctatataggaaccacagtacttccttcagtctgtctaacctgacacttcccactaaaggagcacgagaaaaggcaacgccctttccttcattgaaggtgttcggcttgaataccctgatggagatagtgacggaggccggccctggatctggcgaagggaaccgaagggccctcgttgatcaaaagtcctcggtgattaaacactcccccaccgtcaagagagagccaccatccccacaaggtcgcagtagtaattcaagcgaaaatcagcagttcctaaaagaggtagtccacagtgtgctagatggccaaggagtagggtggctaaacatgaaaaaggtgaggcgcttgctggagagtgagcagctgagagttttcgtactgagtaagctcaacagaatggtgcagagtgaggatgatgctcggcaggatatcattccagatgtcgaaattagtaggaaagtttacaagggaatgttggacctcctcaagtgtactgtgctctctctagagcaatcatatgctcacgcaggtctcggcggcatggcaagcatctttggccttctcgagattgcacaaacacattactatagcaaagaaccggacaagcggaagcgctccccaactgaatcagtcaatacgcccgtcgggaaggaccctggccttgccggcaggggtgaccctaaggccatggctcagctacgagtacctcagctaggtccaagggccccctctgcaaccggaaagggcccaaaagagttagacacgcggtcccttaaagaggaaaatttcatcgccagtattggtccagaagtcattaagcctgtcttcgatctcggggagaccgaagagaaaaaatctcagatctccgccgatagcggagtcagtctcacatctagttcacagcggaccgatcaggactcagtgataggggtcagtccagcagtcatgatccgcagctcctcgcaggattctgaagtctcgacagtcgtcagtaactcctcgggagagaccctaggtgcagattctgacctctcttctaacgctggagatggaccagggggagagggtagtgtgcacctggcctctagtaggggaacattgagcgatagcgagatagagacgaattccgccacctctacaattttcggaaaagcacactctctgaaaccttccataaaagaaaaacttgccggaagccctattcggactagcgaggatgtctctcagcgcgtgtatttatacgaagggttactcggtaaagaacgatccacactatgggaccagatgcaattctgggaggacgcttttctcgacgccgtcatgcttgaacgcgagggaatggggatggatcagggaccacaggagatgattgatcggtacttgagcctgggcgagcatgatagaaagaggctggaagacgacgaggataggttgctagccaccctcttgcacaatctgatttcctatatgctgttgatgaaagtcaacaagaatgatatccgcaagaaggtgcgacggctgatgggtaagtcccatatcggattggtgtattctcagcagatcaacgaggttctggatcagctggccaacctgaacggtagagacctctccatatggagctccggcagtcgccacatgaaaaagcaaacgttcgtggttcacgccggtacggatacgaatggcgatattttttttatggaagtttgcgacgactgcgtagtcttaagatcaaacattggcacagtgtatgagcgttggtggtatgagaaactgattaacatgacgtactgtccaaaaactaaggtgctgtgcctctggagaagaaacgggtcagagacgcagctgaacaagttttacacaaagaaatgtagagagctatactactgcgtgaaggatagcatggagcgagcagcagcaaggcagcagtctatcaaacccggaccagagctgggtggcgaatttccagtacaggacctgaaaaccggtgagggtggcctcctgcaggtcaccttagaggggattaatctaaagttcatgcacaaccaagtattcatagagcttaaccatatcaaaaagtgtaacactgtcagaggagtgtttgtgctcgaggagtttgtacccgaaattaaagaggtggtgagtcataagtataaaacccccatggcccacgaaatctgttactcagtgctgtgcctctttagctatgtggccgccgttcattcgagcgaagaggatttacggaccccgcctcggcccgtcagcagctag

SEQ ID NO: 272322 - DNA, 4698 bp, Artificial Sequence
  derived and/or modified sequence
atggtccagaagaagaagttctgccccagattgttggactacctggtgatcgtcggcgcacgccatccgagtagcgacagcgtggcccagacacccgagctgttaaggaggtacccgcttgaggaccataccgagttccctctcccccctgatgtggtctttttctgtcagcctgaagggtgtctgagtgttaggcaaaggcgtatgagtcttagagacgacacatcctttgtttttaccctgactgacaaggatacaggggtaacacgctatggcatttgtgtgaatttttacaggagctttcagaagcggatctccaaggagaaaggagaaggtggcgctggtagccgcggtaaggaggggacccacgcaacatgcgctagtgaggaagggggaaccgagagctcggaaagcggctcctcactgcagccactctctgctgacagcaccccggacgtgaatcagtctccccgtggtaagcgacgggctaaggccggttccagaagtagaaattcaaccctgaccagcctgtgcgttctttctcattaccctttcttctccaccttcagagagtgtctgtataccttaaagcggcttgtggactgttgctccgagcggctgttgggcaagaaacttggaattccacgaggcgtgcagagggacacgatgtggagaatcttcaccggatctctgctagtggaagaaaaatcatctgccctacttcatgacctcagggagatcgaagcttggatctacaggctacttcggtctccagtacctgtgagtggacagaagagagtcgacatcgaggtacttcctcaggagctccagcctgccctgacatttgccttgcctgacccttcaagattcactctcgttgattttcctctgcatttgccgctcgaactgctgggtgtggacgcctgcctgcaggtgctgacatgcatcctgctggagcacaaggttgtgctccagtccagggattacaatgccctatccatgagcgttatggctttcgtggccatgatctatccccttgagtacatgtttcctgttatccctctgctgcctacttgcatggccagcgccgaacagcttcttttggcacccaccccatacatcataggtgtgccggctagcttcttcctctataagctggacttcaagatgccagatgatgtctggttggtcgacctcgactctaatcgggtcattgcacctacaaatgcggaggtcctcccgatactcccggaacccgaatcactagagttaaaaaagcatctgaagcaggcccttgcatccatgtctctcaacacccagccaattctgaacctcgagaaattccatgaaggtcaagaaattccactgctattgggcaggccttctaacgacttgcagagcacccctagcactgaatttaatcccctcatttacggcaatgatgtagactcagttgacgtggcaacacgagtggccatggtccgcttcttcaactccgcaaacgtcctccaagggtttcagatgcacactcgtaccctgagactattcccccgaccagttgtagcctttcaggcgggtagcttcctggctagcaggccacgccagaccccttttgcggagaaacttgcacggacccaggccgtggaatacttcggggagtggatcttaaacccaacaaactacgctttccaacggatccacaacaatatgttcgatccggctctgatcggcgacaagcctaagtggtacgctcaccagttacagccgatccactatagggtatatgacagtaacagccagttggccgaggcgcttagcgtgccacccgagagagacagcgactctgagcccacagacgactccgggtccgatagcatggattacgatgattcaagcagcagctatagcagcctcggcgatttcgtgtccgaaatgatgaagtgtgatataaatggggatacaccaaatgttgatccgctcactcacgcggcactcggcgatgcttccgaggtggaaatcgatgaactccaaaaccagaaagaagctgaagaaccaggccctgatagtgagaattcacaagagaatccaccactcagatcctcaagctcaacaacggcaagctcttcaccctccaccgtcattcacggagctaacagcgagcctgccgactctaccgaaatggatgataaagccgctgtgggggtgtctaaaccgctgccgtctgttcctccatctatcgggaagtctaatgtggaccggaggcaggcagagattggcgagggggctcagaaactgctgagacctaattctctgcggctggcatctgattccgatgccgaatctgacagtcgggctagctctcccaacagcacggtatccaacacaagcacagagggctttggaggtatcatgtcgtttgcaagctccttatatcgcaatcattccacaagctttagcctcagtaatttaacactccctactaaaggtgctagagagaaagctaccccctttccatctctgaaggtgtttggattgaataccctgatggaaatcgtcactgaggcgggacccggaagcggggaaggtaatagacgggcactagtggaccagaagtcctccgtgataaaacattcccctacagttaagagagagccaccttctcctcagggcaggagttctaacagcagcgaaaatcagcaattcttaaaggaagtcgtccatagtgtactagacggccagggcgtcggttggctgaatatgaagaaggtacggagattactggagtcagagcagctcagagtcttcgtccttagcaaactcaatcggatggtgcagagcgaggatgacgcccgtcaggacattatcccagacgtggagatctcaagaaaggtgtataaaggcatgttggatctgctgaaatgtactgtcctgtctctggagcagagctacgcccacgccggtctgggtggcatggctagcattttcggcctgctggaaattgcacaaacacactactatagcaaagagccagataagcgtaaaaggagccctacagagtcggtcaatacacctgtcgggaaagatcccggtctggctggccgaggagaccctaaggctatggcacagctgcgtgtgccccagcttggccctagggctccgagtgcgactggcaaaggaccgaaagaactagatacccgtagcctgaaagaagagaacttcatcgcctccatcggtcctgaagtgatcaaacctgtattcgacctcggcgagactgaagaaaaaaaatctcaaatttcagccgactctggcgtatctctcacctcaagtagccagcggacagatcaggactcagtgatcggcgtaagtcctgcagttatgatccggtcatcttcccaggactctgaagtatctaccgtcgtgagcaattctagcggtgaaacactcggagccgatagtgacttatcttccaatgcgggtgacggccctggtggagagggctctgtccacctcgcgtcttcccgcggaacactgtcggattctgagattgagaccaactcagccacctccactatcttcggcaaagcccattccctgaaaccctccataaaagaaaagctggctggcagcccaatccgcactagtgaagacgtgagccagcgagtatacctgtatgagggcttgctgggaaaagaaagaagcacactgtgggatcagatgcagttttgggaggacgctttcctggatgcggtgatgctggagcgggagggcatgggcatggatcaggggcctcaggagatgattgatcggtatttgagtcttggtgagcacgaccgcaaacgactcgaagatgatgaagatcgcctgctggctactttgttgcacaacctgatttcatacatgctcttgatgaaagtgaataagaatgacattcggaaaaaagtgcgcagattgatgggtaaatctcatatcggccttgtgtattcccagcagattaacgaggtgctggatcagctggcaaatcttaatggaagagacctgagtatctggtcatcaggttcccggcacatgaaaaagcaaacatttgttgtccacgctggtacggacactaacggcgatatttttttcatggaggtgtgcgacgattgcgtagtcctgcgaagcaatatcgggaccgtttacgaacgatggtggtatgaaaagctcattaacatgacttattgccccaaaaccaaggtgctgtgcttgtggaggcggaatggctcagaaacacagctaaacaagttctacaccaaaaaatgtcgggagttatactattgcgtgaaggacagcatggagagagccgctgctcgccagcagtccattaaacccggacctgagcttggaggagagtttcctgtccaggacctcaagaccggagaaggaggactgctgcaagtaacactggagggaataaacttgaagttcatgcacaatcaggtttttattgagctcaatcacatcaaaaagtgcaacactgtgcgcggagtcttcgtcctcgaggagtttgttcctgaaattaaagaagtggtgtcgcacaaatataagacccctatggcacacgagatctgctacagtgtcctatgcctcttttcctacgtggccgctgtacacagctctgaagaagatttaaggacaccacctcgccctgtttccagctag

SEQ ID NO: 272323 - DNA, 4698 bp, Artificial Sequence
  derived and/or modified sequence
atggtgcagaagaagaagttctgccccagactgctggactacctggtgatcgtgggcgccagacaccccagcagcgacagcgtggcccagacccccgagctgctgagaagataccccctggaggaccacaccgagttccccctgccccccgacgtggtgttcttctgccagcccgagggctgcctgagcgtgagacagagaagaatgagcctgagagacgacaccagcttcgtgttcaccctgaccgacaaggacaccggcgtgaccagatacggcatctgcgtgaacttctacagaagcttccagaagagaatcagcaaggagaagggcgagggcggcgccggcagcagaggcaaggagggcacccacgccacctgcgccagcgaggagggcggcaccgagagcagcgagagcggcagcagcctgcagcccctgagcgccgacagcacccccgacgtgaaccagagccccagaggcaagagaagagccaaggccggcagcagaagcagaaacagcaccctgaccagcctgtgcgtgctgagccactaccccttcttcagcaccttcagagagtgcctgtacaccctgaagagactggtggactgctgcagcgagagactgctgggcaagaagctgggcatccccagaggcgtgcagagagacaccatgtggagaatcttcaccggcagcctgctggtggaggagaagagcagcgccctgctgcacgacctgagagagatcgaggcctggatctacagactgctgagaagccccgtgcccgtgagcggccagaagagagtggacatcgaggtgctgccccaggagctgcagcccgccctgaccttcgccctgcccgaccccagcagattcaccctggtggacttccccctgcacctgcccctggagctgctgggcgtggacgcctgcctgcaggtgctgacctgcatcctgctggagcacaaggtggtgctgcagagcagagactacaacgccctgagcatgagcgtgatggccttcgtggccatgatctaccccctggagtacatgttccccgtgatccccctgctgcccacctgcatggccagcgccgagcagctgctgctggcccccaccccctacatcatcggcgtgcccgccagcttcttcctgtacaagctggacttcaagatgcccgacgacgtgtggctggtggacctggacagcaacagagtgatcgcccccaccaacgccgaggtgctgcccatcctgcccgagcccgagagcctggagctgaagaagcacctgaagcaggccctggccagcatgagcctgaacacccagcccatcctgaacctggagaagttccacgagggccaggagatccccctgctgctgggcagacccagcaacgacctgcagagcacccccagcaccgagttcaaccccctgatctacggcaacgacgtggacagcgtggacgtggccaccagagtggccatggtgagattcttcaacagcgccaacgtgctgcagggcttccagatgcacaccagaaccctgagactgttccccagacccgtggtggccttccaggccggcagcttcctggccagcagacccagacagacccccttcgccgagaagctggccagaacccaggccgtggagtacttcggcgagtggatcctgaaccccaccaactacgccttccagagaatccacaacaacatgttcgaccccgccctgatcggcgacaagcccaagtggtacgcccaccagctgcagcccatccactacagagtgtacgacagcaacagccagctggccgaggccctgagcgtgccccccgagagagacagcgacagcgagcccaccgacgacagcggcagcgacagcatggactacgacgacagcagcagcagctacagcagcctgggcgacttcgtgagcgagatgatgaagtgcgacatcaacggcgacacccccaacgtggaccccctgacccacgccgccctgggcgacgccagcgaggtggagatcgacgagctgcagaaccagaaggaggccgaggagcccggccccgacagcgagaacagccaggagaacccccccctgagaagcagcagcagcaccaccgccagcagcagccccagcaccgtgatccacggcgccaacagcgagcccgccgacagcaccgagatggacgacaaggccgccgtgggcgtgagcaagcccctgcccagcgtgccccccagcatcggcaagagcaacgtggacagaagacaggccgagatcggcgagggcgcccagaagctgctgagacccaacagcctgagactggccagcgacagcgacgccgagagcgacagcagagccagcagccccaacagcaccgtgagcaacaccagcaccgagggcttcggcggcatcatgagcttcgccagcagcctgtacagaaaccacagcaccagcttcagcctgagcaacctgaccctgcccaccaagggcgccagagagaaggccacccccttccccagcctgaaggtgttcggcctgaacaccctgatggagatcgtgaccgaggccggccccggcagcggcgagggcaacagaagagccctggtggaccagaagagcagcgtgatcaagcacagccccaccgtgaagagagagccccccagcccccagggcagaagcagcaacagcagcgagaaccagcagttcctgaaggaggtggtgcacagcgtgctggacggccagggcgtgggctggctgaacatgaagaaggtgagaagactgctggagagcgagcagctgagagtgttcgtgctgagcaagctgaacagaatggtgcagagcgaggacgacgccagacaggacatcatccccgacgtggagatcagcagaaaggtgtacaagggcatgctggacctgctgaagtgcaccgtgctgagcctggagcagagctacgcccacgccggcctgggcggcatggccagcatcttcggcctgctggagatcgcccagacccactactacagcaaggagcccgacaagagaaagagaagccccaccgagagcgtgaacacccccgtgggcaaggaccccggcctggccggcagaggcgaccccaaggccatggcccagctgagagtgccccagctgggccccagagcccccagcgccaccggcaagggccccaaggagctggacaccagaagcctgaaggaggagaacttcatcgccagcatcggccccgaggtgatcaagcccgtgttcgacctgggcgagaccgaggagaagaagagccagatcagcgccgacagcggcgtgagcctgaccagcagcagccagagaaccgaccaggacagcgtgatcggcgtgagccccgccgtgatgatcagaagcagcagccaggacagcgaggtgagcaccgtggtgagcaacagcagcggcgagaccctgggcgccgacagcgacctgagcagcaacgccggcgacggccccggcggcgagggcagcgtgcacctggccagcagcagaggcaccctgagcgacagcgagatcgagaccaacagcgccaccagcaccatcttcggcaaggcccacagcctgaagcccagcatcaaggagaagctggccggcagccccatcagaaccagcgaggacgtgagccagagagtgtacctgtacgagggcctgctgggcaaggagagaagcaccctgtgggaccagatgcagttctgggaggacgccttcctggacgccgtgatgctggagagagagggcatgggcatggaccagggcccccaggagatgatcgacagatacctgagcctgggcgagcacgacagaaagagactggaggacgacgaggacagactgctggccaccctgctgcacaacctgatcagctacatgctgctgatgaaggtgaacaagaacgacatcagaaagaaggtgagaagactgatgggcaagagccacatcggcctggtgtacagccagcagatcaacgaggtgctggaccagctggccaacctgaacggcagagacctgagcatctggagcagcggcagcagacacatgaagaagcagaccttcgtggtgcacgccggcaccgacaccaacggcgacatcttcttcatggaggtgtgcgacgactgcgtggtgctgagaagcaacatcggcaccgtgtacgagagatggtggtacgagaagctgatcaacatgacctactgccccaagaccaaggtgctgtgcctgtggagaagaaacggcagcgagacccagctgaacaagttctacaccaagaagtgcagagagctgtactactgcgtgaaggacagcatggagagagccgccgccagacagcagagcatcaagcccggccccgagctgggcggcgagttccccgtgcaggacctgaagaccggcgagggcggcctgctgcaggtgaccctggagggcatcaacctgaagttcatgcacaaccaggtgttcatcgagctgaaccacatcaagaagtgcaacaccgtgagaggcgtgttcgtgctggaggagttcgtgcccgagatcaaggaggtggtgagccacaagtacaagacccccatggcccacgagatctgctacagcgtgctgtgcctgttcagctacgtggccgccgtgcacagcagcgaggaggacctgagaaccccccccagacccgtgagcagctag

SEQ ID NO: 272324 - protein, 1545 aa, Artificial Sequence
  derived and/or modified sequence
MVQKKKFCPRLLDYLVIVGARHPSSDSVAQTPELLRRYPLEDHTEFPLPPDVVFFCQPEGCLSVRQRRMSLRDDTSFVFTLTDKDTGVTRYGICVNFYRSFQKRISKEKGEGGAGSRGKEGTHATCASEEGGTESSESGSSLQPLSADSTPDVNQSPRGKRRAKAGSRSRNSTLTSLCVLSHYPFFSTFRECLYTLKRLVDCCSERLLGKKLGIPRGVQRDTMWRIFTGSLLVEEKSSALLHDLREIEAWIYRLLRSPVPVSGQKRVDIEVLPQELQPALTFALPDPSRFTLVDFPLHLPLELLGVDACLQVLTCILLEHKVVLQSRDYNALSMSVMAFVAMIYPLEYMFPVIPLLPTCMASAEQLLLAPTPYIIGVPASFFLYKLDFKMPDDVWLVDLDSNRVIAPTNAEVLPILPEPESLELKKHLKQALASMSLNTQPILNLEKFHEGQEIPLLLGRPSNDLQSTPSTEFNPLIYGNDVDSVDVATRVAMVRFFNSANVLQGFQMHTRTLRLFPRPVVAFQAGSFLASRPRQTPFAEKLARTQAVEYFGEWILNPTNYAFQRIHNNMFDPALIGDKPKWYAHQLQPIHYRVYDSNSQLAEALSVPPERDSDSEPTDDSGSDSMDYDDSSSSYSSLGDFVSEMMKCDINGDTPNVDPLTHAALGDASEVEIDELQNQKEAEEPGPDSENSQENPPLRSSSSTTASSSPSTVIHGANSEPADSTEMDDKAAVGVSKPLPSVPPSIGKSNVDRRQAEIGEGAQKLLRPNSLRLASDSDAESDSRASSPNSTVSNTSTEGFGGIMSFASSLYRNHSTSFSLSNLTLPTKGAREKATPFPSLKGNRRALVDQKSSVIKHSPTVKREPPSPQGRSSNSSENQQFLKEVVHSVLDGQGVGWLNMKKVRRLLESEQLRVFVLSKLNRMVQSEDDARQDIIPDVEISRKVYKGMLDLLKCTVLSLEQSYAHAGLGGMASIFGLLEIAQTHYYSKEPDKRKRSPTESVNTPVGKDPGLAGRGDPKAMAQLRVPQLGPRAPSATGKGPKELDTRSLKEENFIASIGPEVIKPVFDLGETEEKKSQISADSGVSLTSSSQRTDQDSVIGVSPAVMIRSSSQDSEVSTVVSNSSGETLGADSDLSSNAGDGPGGEGSVHLASSRGTLSDSEIETNSATSTIFGKAHSLKPSIKEKLAGSPIRTSEDVSQRVYLYEGLLGKERSTLWDQMQFWEDAFLDAVMLEREGMGMDQGPQEMIDRYLSLGEHDRKRLEDDEDRLLATLLHNLISYMLLMKVNKNDIRKKVRRLMGKSHIGLVYSQQINEVLDQLANLNGRDLSIWSSGSRHMKKQTFVVHAGTDTNGDIFFMEVCDDCVVLRSNIGTVYERWWYEKLINMTYCPKTKVLCLWRRNGSETQLNKFYTKKCRELYYCVKDSMERAAARQQSIKPGPELGGEFPVQDLKTGEGGLLQVTLEGINLKFMHNQVFIELNHIKKCNTVRGVFVLEEFVPEIKEVVSHKYKTPMAHEICYSVLCLFSYVAAVHSSEEDLRTPPRPVSS

SEQ ID NO: 272325 - DNA, 4638 bp, Artificial Sequence
  derived and/or modified sequence
atggttcaaaagaaaaagttttgccccaggctgctggattatctggtcatcgtgggggccaggcatccttcctccgattctgtggctcaaactcccgagctcctgagacgctaccccctggaagaccataccgagtttccccttcccccggatgttgtatttttctgtcagcctgagggatgtctaagcgttaggcaacggcgtatgagtctccgggatgacacttcatttgtgtttacgctgacagataaggacacgggagttaccagatacggcatctgtgtgaatttttatagaagtttccagaagagaatttcaaaagagaaaggggagggtggggcagggtccaggggtaaagaaggaacccatgcgacatgtgcgtccgaggagggaggtactgagtcttcagaatctgggtcatccctacaaccactgtcagctgactctacccccgatgtcaaccagtcccccagagggaaacgcagagcaaaggccggttcaagatccaggaacagcacattgacatccttatgtgtgctgtcccattatccgttcttctctaccttcagagaatgcttgtacacactgaaacggctggtggattgctgtagtgaacggctgctgggtaagaaactgggtatcccccgaggcgtgcagcgagacacgatgtggagaatttttactggatccctcttggtggaggaaaaatcttctgcgctgctacacgatctcagagagatcgaagcgtggatctacaggctcttgaggtctcctgtcccggtgtccggccagaaacgggtggacatcgaggtcctgccgcaggagctgcaacctgctcttaccttcgctttgccagacccaagccgcttcacacttgtggacttcccactgcacctgcctcttgagctgctgggggttgatgcctgtcttcaggtgctaacctgtatcctcctcgaacataaggtagtcttgcagtcacgcgattataacgcactgtccatgagcgtcatggccttcgtggcgatgatatatccccttgagtatatgtttcccgtgatacctctgttgccaacatgtatggcaagcgcggagcagttgttgcttgccccaaccccttatatcattggcgttcccgcctcatttttcttgtataagctggacttcaaaatgccggatgacgtttggctggttgacttggacagcaatcgagttattgcccctacaaatgccgaggtgcttccaatactgccggaacctgagagtctggagcttaagaaacacctgaagcaggccctcgctagtatgagcctcaatacacagccaattctaaatctggaaaaatttcatgaaggacaggagatcccgctcctcctcggccggccctccaacgacctccagagcacgccttcaacagagttcaatccactaatttacggcaatgatgttgattctgtggacgttgccacccgggtggccatggtgcggttcttcaactctgccaacgtgttacaaggatttcaaatgcatacccgaaccctccgactattccccagacctgtggtcgcattccaggctggatcttttctcgctagcagaccaagacagaccccgtttgctgagaaacttgcccgcacccaggctgtcgagtatttcggcgaatggatccttaatcctaccaactacgcctttcagaggatccataataatatgtttgacccagccctaattggcgacaaaccaaagtggtacgcccatcagctccaaccgatccactaccgcgtgtacgactccaacagccaactggctgaagccctatcagtacctccggaacgtgacagtgactctgagcccacagatgacagcggaagtgattcaatggactatgatgattcttcgagctcatacagctcacttggggattttgtgagcgaaatgatgaagtgtgatatcaatggagatactccaaacgtggatcccttaacacacgccgcactgggcgacgcttccgaggtggagattgatgaattgcagaaccagaaggaggctgaggagccagggcccgactcagagaactcccaagaaaatcccccacttcgatcgagcagctctactaccgcatccagttcccctagcaccgtaatccacggagcgaattcagagccagccgattccacggagatggacgacaaggccgccgtgggagtgtcgaagccacttccctctgtaccaccatccatcgggaaatctaacgtagatcggaggcaggctgaaattggggagggagcccagaagctcttgaggccgaatagcctgagactggcgtccgactccgatgccgaatccgattctcgagctagctcacccaactccaccgtatcaaacacatcgacagagggctttggtgggattatgagttttgcttcttcactgtatcgtaatcattctacgagcttttctctttccaatttgacccttcctaccaaaggtgcacgcgaaaaagcaacaccgttcccctctctcaaaggaaatcgcagggctctggtggaccagaagagtagcgtgatcaagcattcacctacagtaaagcgtgaacccccaagccctcaggggaggtcctccaactcaagcgagaaccaacagttcctcaaggaggttgtccattccgtcctggatgggcagggcgtcggctggctcaatatgaagaaagtgcggcgcctgctagagtctgaacaactgagagtcttcgtgcttagtaaattaaatcgcatggtgcaaagcgaggacgacgctcgccaggacattattcccgacgtggaaatcagtcgcaaggtctacaaagggatgttagatctattaaagtgtactgtgttgtcactagaacaatcttacgcacacgcaggtttaggggggatggcaagcatcttcgggctactggagattgcacagactcattactattctaaggagcccgacaagagaaagaggagtccaacagagtccgtgaacaccccagtgggcaaggacccgggcctggccgggaggggcgaccctaaagcaatggcccagctccgggtcccccagttgggccctcgggccccaagcgctacagggaaagggcctaaggagttagatacccgctcactcaaagaggaaaatttcatcgcaagcattgggcctgaggtcattaagccagtctttgaccttggcgagacggaagaaaaaaaaagccagatttctgcagattccggcgtttcattgaccagttcttcccagcggacagatcaggacagtgtaatcggcgtctcacccgctgtcatgattcggagcagctcccaggactctgaggtgagcacagtagtgtctaatagcagtggtgaaaccctgggtgccgatagcgatttatccagtaatgccggcgacgggcctggaggagagggatccgttcacctggcatcctctcgtggtacactctccgattcagaaatcgaaaccaattccgcaacatccactatcttcggcaaggcacactccctgaaaccctcgattaaggagaaactagctggaagtcccatcagaacatctgaggacgtctcgcagagggtgtatttatatgagggcttgctaggcaaagagcggtcgactttgtgggaccagatgcagttctgggaagacgccttcttagacgccgtcatgctcgaacgtgaggggatgggcatggatcaaggcccgcaggagatgattgacagatacctgtcattgggggaacatgacaggaagcggctggaagacgatgaagatcggcttttggctaccttacttcacaatcttatttcctatatgctgctcatgaaagtcaataaaaatgatatccggaagaaagttcggcggttaatggggaaaagccacatcggactggtttactcccagcaaattaatgaagttctggaccaactggcaaatctgaatgggcgggacctgagcatttggagctcaggatccaggcacatgaaaaagcagacatttgttgtgcacgctggaacggacactaatggcgatatcttctttatggaggtgtgcgatgactgcgtggtcctacgaagtaacatcgggaccgtttacgaaagatggtggtacgagaagcttatcaatatgacctactgccctaagacaaaagttctgtgcctctggcgaaggaacggttctgagactcagctgaataaattctacactaaaaaatgccgcgagctctattactgcgttaaagactctatggagagagccgccgctcgccagcagagtatcaagccaggacccgaactaggaggtgagttccccgtccaagatctgaagacaggagaagggggcctcctacaagtcacattggagggaatcaatctcaagtttatgcataaccaggtgttcattgagctgaatcacatcaaaaaatgtaatacagtgaggggggtatttgtcctggaggagtttgtgcccgaaatcaaagaggtggtgtcacacaagtataagacccccatggctcatgagatctgttactcggtgctgtgtctgttttcttatgtggcagcagtgcactcttctgaagaggacctcaggaccccccctcggcccgtttcctcctag

SEQ ID NO: 272326 - DNA, 4638 bp, Artificial Sequence
  derived and/or modified sequence
atggtgcagaagaagaagttctgcccccggctgctggactacctggtgattgtgggcgcccggcaccccagcagtgacagcgtggcccagaccccagagctgctgcggcgctaccccctggaggaccacacagagttccccctgcccccagatgtggtgttcttctgccagcctgagggctgcctgtctgtgcggcagaggaggatgagcctgagagatgacaccagctttgtgttcaccctgacagacaaggacaccggggtgaccaggtatggcatctgtgtgaacttctaccgctccttccagaagaggatcagcaaggagaagggggagggcggggccggcagccggggcaaggagggcacccacgccacctgtgccagcgaggagggcggcacagagagcagcgagagcggcagcagcctgcagcccctgtctgctgacagcaccccagatgtgaaccagagcccccggggcaagagaagagccaaggccggcagccgcagcaggaacagcaccctgaccagcctgtgtgtgctgagccactaccccttcttcagcaccttcagagaatgtctgtacaccctgaagaggctggtggactgctgcagcgagcggctgctgggcaagaagctgggcatcccccggggcgtgcagagggacaccatgtggaggatcttcaccggcagcctgctggtggaggagaagagcagcgccctgctgcatgacctgcgggagattgaggcctggatctaccgcctgctgcggagccctgtgcctgtgtctggccagaagagggtggacatcgaggtgctgccccaggagctgcagcctgccctgacctttgccctgcctgaccccagccgcttcaccctggtggacttccccctgcacctgcccctggagctgctgggcgtggatgcctgcctgcaggtgctgacctgcatcctgctggagcacaaggtggtgctgcagagccgggactacaatgccctgtccatgtctgtgatggcctttgtggccatgatctaccccctggagtacatgtttcctgtgatccccctgctgcccacctgcatggccagcgctgagcagctgctgctggcccccaccccctacatcattggagtgcctgccagcttcttcctgtacaagctggacttcaagatgccagatgatgtgtggctggtggacctggacagcaacagagtgattgcccccaccaatgctgaggtgctgcccatcctgcctgagcctgagagcctggagctgaagaagcacctgaagcaggccctggcctccatgagcctgaacacccagcccatcctgaacctggagaagttccacgagggccaggagatccccctgctgctgggccggcccagcaatgacctgcagagcacccccagcacagagttcaaccccctcatctatggaaatgatgtggacagcgtggatgtggccaccagggtggccatggtgcgcttcttcaacagcgccaacgtgctgcagggcttccagatgcacaccaggaccctgcggctcttccccaggcctgtggtggccttccaggccggcagcttcctggccagccggccccggcagaccccatttgctgagaagctggcccggacccaggccgtggagtactttggagagtggatcctgaaccccaccaactatgccttccagaggatccacaacaacatgtttgatcctgccctgattggagacaagcccaagtggtacgcccaccagctgcagcccatccactacagagtgtatgacagcaacagccagctggccgaggccctgtctgtgcccccagagcgggacagcgacagcgagcccacagatgattctggcagtgacagcatggactatgatgacagcagcagcagctacagcagcctgggggactttgtgtctgagatgatgaagtgtgacatcaatggagacacccccaacgtggaccccctgacccatgctgccctgggagatgccagcgaggtggagattgatgagctgcagaaccagaaggaggccgaggagcccggcccagattctgagaacagccaggagaacccccccctgcggagcagcagcagcaccacagccagcagcagccccagcaccgtcatccatggagccaacagcgagcctgctgacagcacagagatggatgacaaggctgctgtgggcgtgtccaagcccctgcccagcgtgcccccatccatcggcaagagcaatgtggaccggcggcaggccgagatcggggagggcgcccagaagctgctgcggcccaacagcctgcggctggccagtgacagtgatgctgagagtgacagccgggccagcagccccaacagcacagtgagcaacaccagcacagagggctttggaggcatcatgagctttgccagcagcctgtacagaaaccacagcaccagcttcagcctgagcaacctgaccctgcccaccaagggggcccgggagaaggccacccccttccccagcctgaagggcaacagaagagccctggtggaccagaagagcagcgtcatcaagcacagccccaccgtgaagcgggagccccccagcccccagggccgcagcagcaacagcagcgagaaccagcagttcctgaaggaggtggtgcacagcgtgctggatggccagggcgtgggctggctgaacatgaagaaggtgcggcggctgctggagagcgagcagctgcgggtgtttgtgctgagcaagctgaacaggatggtgcagagtgaagatgatgcccggcaggacatcatcccagatgtggagatcagcaggaaggtgtacaagggcatgctggacctgctgaagtgcaccgtgctgagcctggagcagagctatgcccacgccggcctgggcggcatggccagcatcttcggcctgctggagatcgcccagacccactactacagcaaggagccagacaagaggaagaggagccccacagagagcgtgaacacccctgtgggcaaggaccccggcctggccggccgcggggaccccaaggccatggcccagctgcgggtgccccagctgggcccccgggcccccagcgccaccgggaagggccccaaggagctggacaccaggagcctgaaggaggagaacttcatcgccagcatcggccctgaggtgatcaagcctgtgtttgacctgggggagacagaggagaagaagagccagatctctgctgacagcggcgtgtccctgaccagcagcagccagaggacagaccaggacagcgtgattggagtgtccccagctgtgatgatccgcagcagcagccaggacagcgaggtgtccacagtggtgagcaacagcagcggggagaccctgggcgctgacagcgacctgagcagcaatgctggagatggccctggaggagagggctctgtgcacctggccagcagccggggcaccctgagtgacagcgagattgagaccaacagcgccaccagcaccatctttgggaaggcccacagcctgaagcccagcatcaaggagaagctggccggcagccccatccgcaccagtgaagatgtgtcccagagggtgtacctgtatgagggcctgctgggcaaggagaggagcaccctgtgggaccagatgcagttctgggaggatgccttcctggatgctgtgatgctggagcgggagggcatgggcatggaccagggcccccaggagatgattgaccgctacctgagcctgggggagcatgacaggaagaggctggaggatgatgaagatcggctgctggccaccctgctgcacaacctgatctcctacatgctgctgatgaaggtgaacaagaatgacatcaggaagaaggtgcggcggctgatgggcaagagccacatcggcctggtgtacagccagcagatcaatgaggtgctggaccagctggccaacctgaatggccgggacctgagcatctggagcagcggcagccgccacatgaagaagcagacctttgtggtgcatgctggaacagacaccaacggggacatcttcttcatggaggtgtgtgatgactgtgtggtgctgcggagcaacattggaacagtgtatgagcgctggtggtatgagaagctgatcaacatgacctactgccccaagaccaaggtgctgtgcctgtggaggagaaatggaagtgagacccagctgaacaagttctacaccaagaagtgccgggagctgtactactgtgtgaaggacagcatggagagagctgctgcccggcagcagagcatcaagccaggccctgagctgggcggggagttccctgtgcaggacctgaagacaggagagggcggcctgctgcaggtgaccctggagggcatcaacctgaagttcatgcacaaccaggtgttcatcgagctgaaccacatcaagaagtgcaacacagtgcggggcgtgtttgtgctggaggagtttgtgcctgagatcaaggaggtggtgagccacaagtacaagacccccatggcccacgagatctgctacagcgtgctgtgcctcttctcctatgtggccgctgtgcacagcagcgaggaggacctgcggaccccacccaggcctgtgagcagctag

SEQ ID NO: 272327 - DNA, 5684 bp, Artificial Sequence
  derived and/or modified sequence
cccgctgcccaggattggtaggctccaccgctcggcagccggcttccctgctcggacgccgagcaccgccaaagcgcacttcgattttcagaattcctcctgggaatgctgactccttgcttggtgccctgatgcttctctgagataaactgatgaattggaaccatggtgcaaaagaagaagttctgtcctcggttacttgactatctagtgatcgtaggggccaggcacccgagcagtgatagcgtggcccagactcctgaattgctacggcgataccccttggaggatcacactgagtttcccctgcccccagatgtagtgttcttctgccagcccgagggctgcctgagcgtgcggcagcggcgcatgagccttcgggatgatacctcttttgtcttcaccctcactgacaaggacactggagtcacgcgatatggcatctgtgttaacttctaccgctccttccaaaagcgaatctctaaggagaagggggaaggtggggcagggtcccgtgggaaggaaggaacccatgccacctgtgcctcagaagagggtggcactgagagctcagagagtggctcatccctgcagcctctcagtgctgactctacccctgatgtgaaccagtctcctcggggcaaacgccgggccaaggcggggagccgctcccgcaacagtactctcacgtccctgtgcgtgctcagccactaccctttcttctccaccttccgagagtgtttgtatactctcaagcgcctggtggactgctgtagtgagcgccttctgggcaagaaactgggcatccctcgaggcgtacaaagggacaccatgtggcggatctttactggatcgctgctggtagaggagaagtcaagtgcccttctgcatgaccttcgagagattgaggcctggatctatcgattgctgcgctccccagtacccgtctctgggcagaagcgagtagacatcgaggtcctaccccaagagctccagccagctctgacctttgctcttccagacccatctcgattcaccctagtggatttcccactgcaccttcccttggaacttctaggtgtggacgcctgtctccaggtgctaacctgcattctgttagagcacaaggtggtgctacagtcccgagactacaatgcactctccatgtctgtgatggcattcgtggcaatgatctacccactggagtatatgtttcctgtcatcccgctgctacccacctgcatggcatcagcagagcagctgctgttggctccaaccccgtacatcattggggttcctgccagcttcttcctctacaaactggacttcaaaatgcctgatgatgtatggctagtggatctggacagcaatagggtgattgcccccaccaatgcagaagtgctgcctatcctgccagaaccagaatcactagagctgaaaaagcatttaaagcaggccttggccagcatgagtctcaacacccagcccatcctcaatctggagaaatttcatgagggccaggagatcccccttctcttgggaaggccttctaatgacctgcagtccacaccgtccactgaattcaacccactcatctatggcaatgatgtggattctgtggatgttgcaaccagggttgccatggtacggttcttcaattccgccaacgtgctgcagggatttcagatgcacacgcgtaccctgcgcctctttcctcggcctgtggtagcttttcaagctggctcctttctagcctcacgtccccggcagactccttttgccgagaaattggccaggactcaggctgtggagtactttggggaatggatccttaaccccaccaactatgcctttcagcgaattcacaacaatatgtttgatccagccctgattggtgacaagccaaagtggtatgctcatcagctgcagcctatccactatcgcgtctatgacagcaattcccagctggctgaggccctgagtgtaccaccagagcgggactctgactccgaacctactgatgatagtggcagtgatagtatggattatgacgattcaagctcttcttactcctcccttggtgactttgtcagtgaaatgatgaaatgtgacattaatggtgatactcccaatgtggaccctctgacacatgcagcactgggggatgccagcgaggtggagattgacgagctgcagaatcagaaggaagcagaagagcctggcccagacagtgagaactctcaggaaaaccccccactgcgctccagctctagcaccacagccagcagcagccccagcactgtcatccacggagccaactctgaacctgctgactctacggagatggatgataaggcagcagtaggcgtctccaagcccctcccttccgtgcctcccagcattggcaaatcgaacgtggacagacgtcaggcagaaattggagagggggctcaaaagctgctgcggcccaacagcttgagactggcaagtgactcagatgcagagtcagactctcgggcaagctctcccaactccaccgtctccaacaccagcaccgagggcttcgggggcatcatgtcttttgccagcagcctctatcggaaccacagtaccagcttcagtctttcaaacctcacactgcccaccaaaggtgcccgagagaaggccacgcccttccccagtctgaaaggaaacaggagggcgttagtggatcagaagtcatctgtcattaaacacagcccaacagtgaaaagagaacctccatcaccccagggtcgatccagcaattctagtgagaaccagcagttcctgaaggaggtggtgcacagcgtgctggacggccagggagttggctggctcaacatgaaaaaggtgcgccggctgctggagagcgagcagctgcgagtctttgtcctgagcaagctgaaccgcatggtgcagtcagaggacgatgcccggcaggacatcatcccggatgtggagatcagtcggaaggtgtacaagggaatgttagacctcctcaagtgtacagtcctcagcttggagcagtcctatgcccacgcgggtctgggtggcatggccagcatctttgggcttttggagattgcccagacccactactatagtaaagaaccagacaagcggaagagaagtccaacagaaagtgtaaataccccagttggcaaggatcctggcctagctgggcggggggacccaaaggctatggcacaactgagagttccacaactgggacctcgggcaccaagtgccacaggaaagggtcctaaggaactggacaccagaagtttaaaggaagaaaattttatagcatctattgggcctgaagtaatcaaacctgtctttgaccttggtgagacagaggagaaaaagtcccagatcagcgcagacagtggtgtgagcctgacgtctagttcccagaggactgatcaagactctgtcatcggcgtgagtccagctgttatgatccgcagctcaagtcaggattctgaagttagcaccgtggtgagtaatagctctggagagacccttggagctgacagtgacttgagcagcaatgcaggtgatggaccaggtggcgagggcagtgttcacctggcaagctctcggggcactttgtctgatagtgaaattgagaccaactctgccacaagcaccatctttggtaaagcccacagcttgaagccaagcataaaggagaagctggcaggcagccccattcgtacttctgaagatgtgagccagcgagtctatctctatgagggactcctaggcaaagagcgttctactttatgggaccaaatgcaattctgggaagatgccttcttagatgctgtgatgttggagagagaagggatgggtatggaccagggtccccaggaaatgatcgacaggtacctgtcccttggagaacatgaccggaagcgcctggaagatgatgaagatcgcttgttggccacacttctgcacaacctcatctcctacatgctgctgatgaaggtaaataagaatgacatccgcaagaaggtgaggcgcctaatgggaaagtcgcacattgggcttgtgtacagccagcaaatcaatgaggtgcttgatcagctggcgaacctgaatggacgcgatctctctatctggtccagtggcagccggcacatgaagaagcagacatttgtggtacatgcagggacagatacaaacggagatatctttttcatggaggtgtgcgatgactgtgtggtgttgcgtagtaacatcggaacagtgtatgagcgctggtggtacgagaagctcatcaacatgacctactgtcccaagacgaaggtgttgtgcttgtggcgtagaaatggctctgagacccagctcaacaagttctatactaaaaagtgtcgggagctgtactactgtgtgaaggacagcatggagcgcgctgccgcccgacagcaaagcatcaaacccggacctgaattgggtggcgagttccctgtgcaggacctgaagactggtgagggtggcctgctgcaggtgaccctggaagggatcaacctcaaattcatgcacaatcaggttttcatagagctgaatcacattaaaaagtgcaatacagttcgaggcgtctttgtcctggaggaatttgttcctgaaattaaagaagtggtgagccacaagtacaagacaccaatggcccacgaaatctgctactccgtattatgtctcttctcgtacgtggctgcagttcatagcagtgaggaagatctcagaaccccgccccggcctgtctctagctgatggagaggggctacgcagctgccccagcccagggcacgcccctggccccttgctgttcccaagtgcacgatgctgctgtgactgaggagtggatgatgctcgtgtgtcctctgcaagccccctgctgtggcttggttggttaccggttatgtgtccctctgagtgtgtcttgagcgtgtccaccttctccctctccactcccagaagaccaaactgccttcccctcagggctcaagaatgtgtacagtctgtggggccggtgtgaacccactattttgtgtccttgagacatttgtgttgtggttccttgtccttgtccctggcgttataactgtccactgcaagagtctggctctcccttctctgtgacccggcatgactgggcgcctggagcagtttcactctgtgaggagtgagggaaccctggggctcaccctctcagaggaagggcacagagaggaagggaagaattggggggcagccggagtgagtggcagcctccctgcttccttctgcattcccaagccggcagctactgcccagggcccgcagtgttggctgctgcctgccacagcctctgtgactgcagtggagcggcgaattccctgtggcctgccatgccttcggcatcagaggatggagtggtcgaggctagtggagtcccagggaccgctggctgctctgcctgagcatcagggagggggcaggaaagaccaagctgggtttgcacatctgtctgcaggctgtctctccaggcacggggtgtcaggagggagagacagcctgggtatgggcaagaaatgactgtaaatatttcagccccacattatttatagaaaatgtacagttgtgtgaatgtgaaataaatgtcctcaactccc

SEQ ID NO: 272328 - DNA, 4638 bp, Artificial Sequence
  derived and/or modified sequence
atggtgcagaagaagaagttctgcccccggctgctggactacctggtgatagtcggagcccgccatccttcctccgactctgttgcacagacccccgagctgctgagacgatatcccttggaggatcacacagaattcccactgccccccgacgtcgtgtttttttgccagccagaaggctgcttaagcgtccgccagcggagaatgtctcttcgcgatgacaccagcttcgtatttactctgaccgataaagacacaggcgtcaccaggtacggcatctgcgttaacttttatagaagcttccagaaacgaatctctaaggaaaagggagaggggggcgcaggtagcagggggaaagaagggacacacgctacgtgcgcaagcgaggaaggagggacagagtcatctgagtcaggctccagtctgcaacctctcagcgctgattccacacctgatgttaatcagtctccccggggaaagcgcagggcaaaggccgggtcccggtctaggaattctactctgacctctttgtgtgtgctgagccattacccatttttctcaaccttcagagaatgtttgtataccttgaagcgcctggtcgactgctgctccgaaaggcttctcgggaaaaagttagggatcccacggggtgtacagagagacacaatgtggcgaatttttacagggtccctgctcgtggaagaaaaaagcagtgccttattacatgatctgcgcgagatcgaagcctggatatatcggttgctgcgatcgcccgtgcccgtttcagggcaaaagagagtggatatagaagtgcttccccaggagttgcaacccgcactcacttttgccctgccagacccctcaagattcacactggtggactttcccctccatttgcctctggaacttttgggggtcgacgcgtgccttcaggtacttacttgtatcctgctggaacataaggtcgtcctccagtctagggactataacgcattgagcatgtccgtgatggctttcgtggcaatgatttatcctttagaatatatgttcccagtgattcctcttctaccaacatgcatggcatctgcagagcagctcttacttgctccaactccttacatcatcggagtgccagccagcttcttcctgtacaagctggattttaaaatgccagacgatgtgtggctggttgacctcgacagcaacagggtgatcgctccaacaaatgcggaagttctgcccatcctgcccgaacccgaaagtttggaactgaagaagcatctgaaacaggccctcgcaagcatgtcccttaacactcagcctatcctgaacttagagaaatttcatgagggtcaagagatcccgctccttttaggcaggccttcaaacgatctgcagtccaccccctccaccgaattcaatccgctgatctatggcaacgacgtcgatagcgtcgacgtggcgacgcgcgtcgccatggtcagatttttcaattcagcaaacgtcttgcagggcttccagatgcatacccgcacacttcgactgtttccaaggcctgttgttgctttccaagctggcagcttcctggctagccgccctagacagacgccctttgccgaaaagttggccaggacacaggccgtcgagtatttcggagagtggatcctgaacccaactaactatgcctttcagaggattcacaataatatgtttgaccctgccctaattggggacaagcctaaatggtacgctcaccaactccagccaatccactaccgcgtttatgacagtaatagccagcttgcagaggccctgagtgtgcctcccgagcgggactcagacagtgagcctactgacgatagcggctctgatagtatggactatgacgattcttcctccagttattcctcactgggcgattttgtgtccgagatgatgaaatgtgacattaatggggatactcccaacgttgaccccttgacacacgcagctctgggtgacgctagtgaagtggagatcgatgaactgcaaaatcagaaggaggcagaggagccaggcccggactccgagaattcccaggagaaccctccgttgcgcagttccagctctactacagcctctagttcaccaagtaccgtgattcatggagctaacagcgagcccgctgactcgaccgagatggatgacaaggctgccgtcggggtgtcaaagcccctgccttccgtccctcctagtataggcaaatctaatgttgaccgccggcaggcagaaatcggagagggggcccaaaaattgttgcgccccaatagtcttagactcgcgtcggacagcgatgctgagtctgactctcgagcttctagcccaaatagcacagtgagtaacacctcaacagagggcttcgggggaattatgtccttcgcttccagtttgtacaggaaccacagcacctcgttctccctgtccaaccttactctaccgacaaaaggggctcgcgaaaaggctactccttttcccagtctcaaagggaatagaagggctctagtcgaccagaagagttccgtgatcaaacactcccccacagtgaagagggagcccccgagtccacagggtcggtcctccaattccagcgaaaaccagcagtttcttaaggaggtggttcactccgtgctcgatggccagggcgtgggttggttgaacatgaagaaggtaaggaggctgctggaaagcgagcagctgcgcgtattcgtgttgtctaaactgaacaggatggtgcaaagtgaagatgacgcgcgccaggatataattcctgacgtcgagataagcaggaaggtctacaaggggatgttagacctgctaaagtgtaccgtcctatcactggagcagtcctatgctcacgctggtctgggcggcatggcttccatctttggtctcctcgagatcgcccagacgcattattattccaaagaacccgacaaacggaagcggagcccaacagaaagtgtaaacactcctgttgggaaagatcctggcctggcaggaaggggcgatcctaaggccatggcccaactgcgggtgcctcagcttggcccccgcgcacctagtgccactggaaaagggcccaaggagcttgatacacgatccttgaaggaggaaaacttcatcgcgtcaattgggccagaggtgattaaacctgtgtttgatctgggagagacagaggaaaaaaaatcccagatttccgccgactccggcgtctctctgacctccagttcacagcgcacagatcaggactctgtgataggcgtctcaccggcggtgatgatcagatcttcttcgcaagatagcgaggtctcgacggtagtatccaactcatcgggggaaactttgggcgccgactccgatttaagtagtaacgccggcgatgggccaggtggagaggggtcagtgcacctggcatcttcacgcgggaccctatcagacagcgagatcgaaacgaactcagccacatcaacaatcttcgggaaagcccatagtctcaaaccaagtattaaggaaaaactggcaggatccccgatcaggaccagtgaggacgtaagccagcgcgtgtatttgtatgaggggctgctcggtaaggaaaggagtaccctgtgggaccagatgcagttttgggaagacgctttcctggacgctgtgatgctcgagagagaaggtatgggaatggatcaggggccccaggagatgattgaccgctacctgtcgctgggggagcatgacagaaaacgtctcgaagacgatgaggatcgtttgctagcgactttgctgcacaatctcatatcctacatgctactgatgaaggtgaacaaaaatgacataaggaagaaggtgcgccgcctgatgggaaagtcacacatcggcctggtctacagccagcagattaatgaagtcctggatcagttggccaaccttaatggcagggatctgagcatctggtcatccgggtctagacacatgaagaaacaaactttcgtcgtgcacgctggtacagatactaatggtgacatcttctttatggaagtatgcgatgattgcgttgtgttacgctctaatatcgggacagtgtacgagcgttggtggtatgagaagctgattaatatgacatactgccccaagacaaaggttttatgtctgtggcgccgtaacggttccgagactcagcttaacaaattctatacgaagaaatgccgagaactgtattattgtgtgaaagatagcatggagcgggccgccgcaagacagcaatcaattaaaccgggcccagagttggggggtgaatttccagttcaggacctcaaaactggcgagggggggctcctccaagtgacgctcgaagggatcaacttgaaattcatgcataaccaggtttttatcgaattgaaccatatcaagaaatgcaacactgtcaggggtgtgttcgttctggaggagttcgttccagaaatcaaagaggtggtgtcacacaagtacaaaactcctatggcccatgaaatttgctattctgtcctgtgtctgttcagctacgtagctgcagttcattcctcggaggaagacctccgaacgcctcctaggccggtgtccagctag

SEQ ID NO: 272329 - DNA, 4638 bp, Artificial Sequence
  derived and/or modified sequence
atggtgcagaagaaaaaattttgccccagacttctagactatcttgtcattgtgggcgcaaggcatcctagttcggatagcgttgcccagacccccgagcttttgcgcagatacccgctggaagaccatacagagttccccttacccccagatgtggttttcttctgtcagccggagggctgtctttcggtgaggcagaggagaatgtcgctcagggatgataccagcttcgtgttcacccttaccgacaaggacactggggttactcgctacggtatatgtgtgaacttttacagaagctttcaaaagcgcatctctaaggagaagggcgaaggcggagcagggtctcgtggaaaagagggaactcatgccacctgcgctagcgaagagggaggaaccgaatcttcagaatctggaagctctctacagcccctctctgctgattcaacgcccgatgttaatcagagccctcggggtaaacgacgggcaaaggcaggctcccgctcaaggaactctacattgacaagtctgtgtgttctatctcactacccgttcttttcgaccttcagggaatgcctgtacacgcttaaaaggttggtcgactgctgtagtgaaaggcttctaggtaagaaacttggaatccccagaggtgtccagagggataccatgtggcggatctttacggggtccctattggttgaggaaaagagttctgctttgttgcatgacctgcgtgagattgaggcatggatctaccggttactacgctcccccgtgcccgtttctggccaaaagcgggtggacattgaggtgctgccacaggagctccagcctgcgctcacattcgccctgcctgatcctagccggttcacacttgttgattttccactgcatttaccactagaactgctcggagtcgacgcttgtctgcaggtactgacttgcattcttctagagcacaaggtggtcctgcagtccagagattataatgccctctccatgagtgtgatggctttcgtcgcaatgatatacccactggagtacatgtttcccgtgatccccttattgccaacatgtatggctagtgcagagcaactgctgcttgcacccaccccatacatcattggcgttccggcttcattcttcctgtacaagctggatttcaaaatgcccgacgacgtgtggctggtcgacttagattctaatagggtgatagcaccaactaacgcagaggtgctgcctattcttcccgagcccgagagtttggagctgaagaagcaccttaaacaggcacttgcaagcatgagtctaaatactcaacccatcctgaaccttgagaagttccatgagggccaagagatacccctcctgctgggcaggccttctaatgacctgcaatctacccctagcacggagttcaaccccctgatatacgggaatgatgtggatagtgtggacgtggcaacccgggtcgccatggtgcggttcttcaatagcgccaacgtgctgcaaggattccaaatgcacactcggacactacgactcttcccacggcctgtagtcgctttccaagcaggctcttttctggccagccggccacgccagacacccttcgctgaaaaattggcacgcacccaggctgttgagtacttcggcgagtggatcctgaatcccacaaattatgcctttcagagaattcacaacaatatgttcgaccccgctttaattggagacaaacccaaatggtacgcccaccagctccagcctattcattatcgagtgtacgatagcaacagccaactcgccgaagcactgtctgtgccaccagagagggacagcgattcagagcccactgacgactccggttctgactctatggattacgacgattcctcttcgagctactcaagtttaggagatttcgtgtctgaaatgatgaagtgtgatatcaacggagatacaccaaatgtggatccactgacccacgccgcactgggggacgcctctgaggtggagatcgacgagcttcagaatcagaaagaggccgaggagccaggtccagacagcgaaaactctcaggagaatcctccccttagatccagctctagcaccactgctagctcctccccctctaccgtgatccacggggctaatagcgagcccgcagactccaccgagatggatgataaagccgctgtaggcgtttctaagcctcttcctagcgtgcccccttctattggcaaaagtaatgtggacagaagacaggccgaaatcggagaaggtgctcagaagctgctgagaccaaactcccttcgactggcatccgattccgatgcagaaagtgattcacgcgcttccagcccaaacagcacagtctcaaatactagcactgaggggttcggaggcattatgtccttcgcttcgtccctgtacaggaaccattccacctctttcagccttagtaaccttactctgcctacgaagggggctcgcgagaaagccacaccttttcccagccttaaggggaatcgcagggcactggtggatcaaaaatcgtccgtaatcaagcattcccctacggtgaaaagagagccaccttcacctcaaggtcggagcagcaacagctcagagaatcagcagttcctcaaggaagtggtgcattcagttttggacgggcagggggttggctggctcaacatgaaaaaggtccgacgtctgttggaatctgaacagttgcgagtgttcgtgctgtccaagttgaatcgaatggtccagagcgaggacgacgcgagacaggacattattccagatgtagaaattagccgtaaggtgtataagggcatgctggatcttctcaagtgtacagtcctttcccttgagcagtcctacgctcacgctggcctagggggaatggctagtatctttggcctgctggagattgcacaaactcactattactcaaaagagcccgacaagagaaaacggagcccaacagaatccgtcaacactcccgtgggcaaagaccccggactggctggcagaggcgatcctaaagcaatggctcaattacgggtgccacagctgggcccacgcgcacccagcgctacaggaaagggcccaaaagagctggatactcggtcattgaaggaggagaacttcatcgctagtatcggaccagaggtcatcaagccagttttcgacctgggagaaactgaagagaagaagtcacagatttcggcagactccggagtctctcttacaagctcttcacagaggaccgaccaggacagcgtcataggagttagccctgcagtaatgatcagatccagtagtcaagacagcgaggtcagcaccgtggtcagcaactccagcggcgagaccctgggcgcagactctgacctctcatccaacgctggcgacggacccggaggggaggggtcggtacatttagcaagtagcagggggactctgtcagacagtgagatcgaaacgaattcagccacttcaaccattttcggcaaggcacacagcctgaaaccgtcaataaaagaaaaacttgccggttcgccaatccggacttctgaagatgtctcccagagagtttacctctacgagggcctcctcgggaaagaaaggtctaccctctgggaccagatgcagttctgggaggatgcgttcctggatgccgtaatgctggaaagagagggcatgggcatggaccagggccctcaagaaatgatcgatcgctatctttctctgggtgagcatgacagaaagcggttagaagacgatgaagatcgattgcttgccactctgctgcataatcttatctcttacatgctgctgatgaaagttaataaaaatgacattcgaaaaaaggtgcgcaggttgatgggaaagtctcacataggtctcgtgtacagtcagcagattaacgaagtgctggatcagctcgctaacctgaacgggagagacctgtctatctggtcgagtggcagtaggcatatgaaaaagcagacctttgtggtccacgcaggcaccgacacgaacggagacattttttttatggaagtgtgtgacgactgcgttgtccttcgcagcaacattgggacagtgtacgaaagatggtggtatgagaaacttatcaacatgacctactgcccaaagactaaagttctgtgcctgtggcggaggaatgggtctgagacccaactgaacaaattctacacaaaaaaatgcagagagctatactactgtgtaaaagacagtatggagagagcagcagccaggcagcaaagtattaagccgggaccagagttaggtggcgaattcccagtgcaggatctgaagactggcgaaggaggactcctccaggttaccctcgagggcatcaatctgaaattcatgcataatcaggtcttcatcgaactgaatcatattaagaaatgtaacaccgtgcgcggagtgttcgtacttgaggaattcgttcctgagattaaagaagtggtgtctcacaagtacaaaacgcccatggctcatgagatttgctattccgtgttgtgtctgttttcctacgtggcagctgtgcatagttccgaagaagacctgaggacccctccaagacctgttagttcctag

SEQ ID NO: 272330 - DNA, 4638 bp, Artificial Sequence
  derived and/or modified sequence
atggtgcagaagaagaagttctgccccagactgctggactacctggtgatcgtgggcgccagacaccccagcagcgacagcgtggcccagacccccgagctgctgagaagataccccctggaggaccacaccgagttccccctgccccccgacgtggtgttcttctgccagcccgagggctgcctgagcgtgagacagagaagaatgagcctgagagacgacaccagcttcgtgttcaccctgaccgacaaggacaccggcgtgaccagatacggcatctgcgtgaacttctacagaagcttccagaagagaatcagcaaggagaagggcgagggcggcgccggcagcagaggcaaggagggcacccacgccacctgcgccagcgaggagggcggcaccgagagcagcgagagcggcagcagcctgcagcccctgagcgccgacagcacccccgacgtgaaccagagccccagaggcaagagaagagccaaggccggcagcagaagcagaaacagcaccctgaccagcctgtgcgtgctgagccactaccccttcttcagcaccttcagagagtgcctgtacaccctgaagagactggtggactgctgcagcgagagactgctgggcaagaagctgggcatccccagaggcgtgcagagagacaccatgtggagaatcttcaccggcagcctgctggtggaggagaagagcagcgccctgctgcacgacctgagagagatcgaggcctggatctacagactgctgagaagccccgtgcccgtgagcggccagaagagagtggacatcgaggtgctgccccaggagctgcagcccgccctgaccttcgccctgcccgaccccagcagattcaccctggtggacttccccctgcacctgcccctggagctgctgggcgtggacgcctgcctgcaggtgctgacctgcatcctgctggagcacaaggtggtgctgcagagcagagactacaacgccctgagcatgagcgtgatggccttcgtggccatgatctaccccctggagtacatgttccccgtgatccccctgctgcccacctgcatggccagcgccgagcagctgctgctggcccccaccccctacatcatcggcgtgcccgccagcttcttcctgtacaagctggacttcaagatgcccgacgacgtgtggctggtggacctggacagcaacagagtgatcgcccccaccaacgccgaggtgctgcccatcctgcccgagcccgagagcctggagctgaagaagcacctgaagcaggccctggccagcatgagcctgaacacccagcccatcctgaacctggagaagttccacgagggccaggagatccccctgctgctgggcagacccagcaacgacctgcagagcacccccagcaccgagttcaaccccctgatctacggcaacgacgtggacagcgtggacgtggccaccagagtggccatggtgagattcttcaacagcgccaacgtgctgcagggcttccagatgcacaccagaaccctgagactgttccccagacccgtggtggccttccaggccggcagcttcctggccagcagacccagacagacccccttcgccgagaagctggccagaacccaggccgtggagtacttcggcgagtggatcctgaaccccaccaactacgccttccagagaatccacaacaacatgttcgaccccgccctgatcggcgacaagcccaagtggtacgcccaccagctgcagcccatccactacagagtgtacgacagcaacagccagctggccgaggccctgagcgtgccccccgagagagacagcgacagcgagcccaccgacgacagcggcagcgacagcatggactacgacgacagcagcagcagctacagcagcctgggcgacttcgtgagcgagatgatgaagtgcgacatcaacggcgacacccccaacgtggaccccctgacccacgccgccctgggcgacgccagcgaggtggagatcgacgagctgcagaaccagaaggaggccgaggagcccggccccgacagcgagaacagccaggagaacccccccctgagaagcagcagcagcaccaccgccagcagcagccccagcaccgtgatccacggcgccaacagcgagcccgccgacagcaccgagatggacgacaaggccgccgtgggcgtgagcaagcccctgcccagcgtgccccccagcatcggcaagagcaacgtggacagaagacaggccgagatcggcgagggcgcccagaagctgctgagacccaacagcctgagactggccagcgacagcgacgccgagagcgacagcagagccagcagccccaacagcaccgtgagcaacaccagcaccgagggcttcggcggcatcatgagcttcgccagcagcctgtacagaaaccacagcaccagcttcagcctgagcaacctgaccctgcccaccaagggcgccagagagaaggccacccccttccccagcctgaagggcaacagaagagccctggtggaccagaagagcagcgtgatcaagcacagccccaccgtgaagagagagccccccagcccccagggcagaagcagcaacagcagcgagaaccagcagttcctgaaggaggtggtgcacagcgtgctggacggccagggcgtgggctggctgaacatgaagaaggtgagaagactgctggagagcgagcagctgagagtgttcgtgctgagcaagctgaacagaatggtgcagagcgaggacgacgccagacaggacatcatccccgacgtggagatcagcagaaaggtgtacaagggcatgctggacctgctgaagtgcaccgtgctgagcctggagcagagctacgcccacgccggcctgggcggcatggccagcatcttcggcctgctggagatcgcccagacccactactacagcaaggagcccgacaagagaaagagaagccccaccgagagcgtgaacacccccgtgggcaaggaccccggcctggccggcagaggcgaccccaaggccatggcccagctgagagtgccccagctgggccccagagcccccagcgccaccggcaagggccccaaggagctggacaccagaagcctgaaggaggagaacttcatcgccagcatcggccccgaggtgatcaagcccgtgttcgacctgggcgagaccgaggagaagaagagccagatcagcgccgacagcggcgtgagcctgaccagcagcagccagagaaccgaccaggacagcgtgatcggcgtgagccccgccgtgatgatcagaagcagcagccaggacagcgaggtgagcaccgtggtgagcaacagcagcggcgagaccctgggcgccgacagcgacctgagcagcaacgccggcgacggccccggcggcgagggcagcgtgcacctggccagcagcagaggcaccctgagcgacagcgagatcgagaccaacagcgccaccagcaccatcttcggcaaggcccacagcctgaagcccagcatcaaggagaagctggccggcagccccatcagaaccagcgaggacgtgagccagagagtgtacctgtacgagggcctgctgggcaaggagagaagcaccctgtgggaccagatgcagttctgggaggacgccttcctggacgccgtgatgctggagagagagggcatgggcatggaccagggcccccaggagatgatcgacagatacctgagcctgggcgagcacgacagaaagagactggaggacgacgaggacagactgctggccaccctgctgcacaacctgatcagctacatgctgctgatgaaggtgaacaagaacgacatcagaaagaaggtgagaagactgatgggcaagagccacatcggcctggtgtacagccagcagatcaacgaggtgctggaccagctggccaacctgaacggcagagacctgagcatctggagcagcggcagcagacacatgaagaagcagaccttcgtggtgcacgccggcaccgacaccaacggcgacatcttcttcatggaggtgtgcgacgactgcgtggtgctgagaagcaacatcggcaccgtgtacgagagatggtggtacgagaagctgatcaacatgacctactgccccaagaccaaggtgctgtgcctgtggagaagaaacggcagcgagacccagctgaacaagttctacaccaagaagtgcagagagctgtactactgcgtgaaggacagcatggagagagccgccgccagacagcagagcatcaagcccggccccgagctgggcggcgagttccccgtgcaggacctgaagaccggcgagggcggcctgctgcaggtgaccctggagggcatcaacctgaagttcatgcacaaccaggtgttcatcgagctgaaccacatcaagaagtgcaacaccgtgagaggcgtgttcgtgctggaggagttcgtgcccgagatcaaggaggtggtgagccacaagtacaagacccccatggcccacgagatctgctacagcgtgctgtgcctgttcagctacgtggccgccgtgcacagcagcgaggaggacctgagaaccccccccagacccgtgagcagctag

SEQ ID NO: 272331 - protein, 1541 aa, Artificial Sequence
  derived and/or modified sequence
MVQKKKFCPRLLDYLVIVGARHPSSDSVAQTPELLRRYPLEDHTEFPLPPDVVFFCQPEGCLSVRQRRMSLRDDTSFVFTLTDKDTGVTRYGICVNFYRSFQKRISKEKGEGGAGSRGKEGTHATCASEEGGTESSESGSSLQPLSADSTPDVNQSPRGKRRAKAGSRSRNSTLTSLCVLSHYPFFSTFRECLYTLKRLVDCCSERLLGKKLGIPRGVQRDTMWRIFTGSLLVEEKSSALLHDLREIEAWIYRLLRSPVPVSGQKRVDIEVLPQELQPALTFALPDPSRFTLVDFPLHLPLELLGVDACLQVLTCILLEHKVVLQSRDYNALSMSVMAFVAMIYPLEYMFPVIPLLPTCMASAEQLLLAPTPYIIGVPASFFLYKLDFKMPDDVWLVDLDSNRVIAPTNAEVLPILPEPESLELKKHLKQALASMSLNTQPILNLEKFHEGQEIPLLLGRPSNDLQSTPSTEFNPLIYGNDVDSVDVATRVAMVRFFNSANVLQGFQMHTRTLRLFPRPVVAFQAGSFLASRPRQTPFAEKLARTQAVEYFGEWILNPTNYAFQRIHNNMFDPALIGDKPKWYAHQLQPIHYRVYDSNSQLAEALSVPPERDSDSEPTDDSGSDSMDYDDSSSSYSSLGDFVSEMMKCDINGDTPNVDPLTHAALGDASEVEIDELQNQKEAEEPGPDSENSQENPPLRSSSSTTASSSPSTVIHGANSEPADSTEMDDKAAVGVSKPLPSVPPSIGKSNVDRRQAEIGEGAQKLLRPNSLRLASDSDAESDSRASSPNSTVSNTSTEGFGGIMSFASSLYRNHSTSFSLSNLTLPTKGAREKATPFPSLKGNRRALVDQKSSVIKHSPTVKREPPSPQGRSSNSSENQQFLKEVVHSVLDGQGVGWLNMKKVRRLLESEQLRVFVLSKLNRMVQSEDDARQDIIPDVEISRKVYKGMLDLLKCTVLSLEQSYAHAGLGGMASIFGLLEIAQTHYYSKEPDKRKRSPTESVNTPVGKDPGLAGRGDPKAMAQLRVPQLGPRAPSATGKGPKELDTRSLKEENFIASIGPEVIKPVFDLGETEEKKSQISADSGVSLTSSSQRTDQDSVIGVSPAVMIRSSSQDSEVSNSSGETLGADSDLSSNAGDGPGGEGSVHLASSRGTLSDSEIETNSATSTIFGKAHSLKPSIKEKLAGSPIRTSEDVSQRVYLYEGLLGKERSTLWDQMQFWEDAFLDAVMLEREGMGMDQGPQEMIDRYLSLGEHDRKRLEDDEDRLLATLLHNLISYMLLMKVNKNDIRKKVRRLMGKSHIGLVYSQQINEVLDQLANLNGRDLSIWSSGSRHMKKQTFVVHAGTDTNGDIFFMEVCDDCVVLRSNIGTVYERWWYEKLINMTYCPKTKVLCLWRRNGSETQLNKFYTKKCRELYYCVKDSMERAAARQQSIKPGPELGGEFPVQDLKTGEGGLLQVTLEGINLKFMHNQVFIELNHIKKCNTVRGVFVLEEFVPEIKEVVSHKYKTPMAHEICYSVLCLFSYVAAVHSSEEDLRTPPRPVSS

SEQ ID NO: 272332 - DNA, 4626 bp, Artificial Sequence
  derived and/or modified sequence
atggtgcagaaaaaaaaattttgcccacgactgttagattaccttgtgatcgtgggggcacggcaccccagctcagattctgtagctcagacccccgagctcctacgcaggtacccgctggaagaccacacagaatttccactgcctcctgatgttgtattcttctgtcagccagaagggtgtctgagtgtcagacagcggcggatgtcccttagggacgataccagcttcgtgttcaccctaactgacaaggacaccggcgtgacaaggtatggcatctgcgtgaatttctataggtcgtttcagaaacgaatcagtaaggagaaaggcgagggaggagctgggagtcgcggcaaggaaggaacccacgctacctgcgcttctgaagaaggagggacggagagtagtgagagcggctcctcgctgcagccactttcagcagattcgacccctgacgtcaatcagtcacctagaggtaagcgccgcgctaaggccgggtcaagatctaggaatagcacccttaccagcttatgcgtcctgtctcattacccattcttcagtacatttagagagtgtctgtatacccttaaaagattggttgattgttgtagcgagcggcttctgggcaaaaaattgggcatcccgcgcggcgtgcagcgggacaccatgtggagaatctttactggttccttgctcgtggaggaaaagtccagtgctctgctgcacgacctgcgggagatagaggcgtggatatacaggctgcttaggagccccgtgcccgtgtctggccagaagagagttgacattgaggttcttccgcaggagctgcagccagctctgacgtttgcactgcccgatcctagtaggttcactctagtagatttccccctgcacctaccactggagcttctgggagtggatgcctgcttgcaggtgctgacttgtatcctcctggagcacaaagtggtcctgcagtctcgtgactataacgctctctctatgtcagtcatggcttttgtagccatgatctatccgcttgaatacatgttcccagtgattcctctgttgcctacttgcatggcatcggccgagcagctgctactcgcgcctacaccatacattatcggcgttcctgctagtttcttcctctacaagcttgacttcaagatgcccgacgacgtctggcttgtggatcttgactctaatcgcgtgattgcccctacaaacgccgaggtgctcccaattcttcctgagccggagtccctggaactaaagaagcatctgaaacaggctctggcctcaatgtctctgaacacccagccaatcctcaatctggagaaatttcacgaagggcaggagattcccctcctcctcggcaggcctagtaatgatttgcaatccacacccagtacagagtttaaccccttaatctatggaaacgacgttgattcagttgatgtcgcaacccgtgtagctatggttaggttttttaatagcgcaaacgtgttgcaggggttccagatgcatacaaggacgctccgccttttcccccggcccgtagtggcattccaggccggatcatttctggcttccaggcccaggcagacccccttcgcggagaaactagcccgaacacaagcggttgaatacttcggcgagtggatccttaacccaacaaactatgcatttcaacggatccataacaatatgttcgacccagctctaatcggcgacaaaccgaagtggtacgcccaccagcttcagccgatacactacagagtatatgactcaaattctcagttagctgaagctctgagcgtgccacctgagagggacagtgattctgagcccacagacgactccggcagtgactcgatggattatgatgactcgagttcatcttattcttctcttggagattttgtaagcgaaatgatgaaatgtgacataaatggggacacacccaatgtcgatcctttgactcatgcagccttaggggacgccagtgaagtggagatcgacgagctccagaaccagaaggaggcagaggaaccagggcctgactctgagaattcacaggagaatccaccattgcggtcttcaagtagcacaactgcatcctcatcccccagcactgtaatccacggagccaactccgaacctgctgactccactgagatggacgacaaggccgccgttggagtatccaagcccctcccctcagtgcctccttccatagggaagagcaatgtggaccggcggcaggctgaaattggagagggcgctcagaagctgctcaggcccaattccttgcggctagcttccgactcagatgccgaatccgattcacgtgcaagctcaccaaactcaacagttagtaataccagtaccgagggattcggcgggatcatgagctttgcttcctccttgtacagaaaccacagtaccagcttctcattgtctaacctcaccctgccaacgaagggcgctagggaaaaggcaactcccttccctagcctcaaagggaacaggagagcccttgtagatcaaaagtccagtgttattaaacactctcctacagtgaaaagagagcccccgtctcctcagggacggtctagtaattctagcgaaaaccaacagtttcttaaggaagtggttcactctgtgcttgacggccagggcgtcgggtggctgaacatgaagaaagttcgtagactcctggagtctgagcagttgagagtgttcgtgcttagcaagctgaatcgcatggtgcagtccgaagacgatgcacgccaggacataattccggatgtcgagatcagcagaaaggtatataaggggatgctggatctcctgaagtgtacagtcttgtccctagagcagtcatacgcccacgcaggccttggcgggatggctagcattttcggtctacttgagattgctcaaactcactactatagcaaggaaccagacaaaagaaagcgaagcccaacagagtcggtgaatacacccgtgggtaaggatcccggattagcgggtaggggtgatcctaaggctatggcccagcttcgggtgcctcaactcggcccccgcgcaccatccgctaccgggaaggggcctaaagagctagacactcgctccctgaaggaggaaaacttcatagcctcaatcggccccgaggtcatcaagccagttttcgaccttggagaaaccgaagaaaagaagtctcaaatcagtgcagattcgggagtgtccctgacatcaagctctcagcggacagaccaggactcagtgattggtgttagtcctgctgtgatgattcgatcttcatcccaggactccgaggtgtctaacagcagcggagagacgctgggtgctgatagcgacctgtcatccaatgccggggacggccctggtggtgaaggcagcgtgcatctggcaagctcccgtggaacactttccgactctgagatcgaaactaacagcgccacgtccaccatctttggaaaagctcacagtctgaaacctagtattaaggaaaagttggctggctctcctattcgcacaagtgaggatgtaagtcaacgggtttacttgtatgaagggctcctgggcaaggaaagatccactctgtgggaccagatgcaattctgggaagacgcgtttttggacgcagttatgcttgaacgtgagggcatgggaatggaccagggcccacaggaaatgatagatcggtacctgtccctgggcgagcatgacagaaagcgccttgaagacgacgaggacaggctacttgcaactctcctgcataacctaataagctacatgctactcatgaaggtcaataagaatgatatacgtaaaaaagtcaggaggctgatgggcaaaagccacatcggtctggtttatagccagcagataaacgaggtcctcgatcagcttgcaaatttgaacggtcgcgatctgtcaatttggagttcgggctctagacacatgaaaaagcagacattcgtggtccatgctggcaccgacacaaacggggacatcttcttcatggaggtgtgcgatgactgtgtcgtcctccgttctaacataggcacggtgtatgaaagatggtggtatgaaaagttaattaacatgacctactgtcccaaaaccaaggtactatgtctgtggcgtcgcaacggtagtgaaacgcaattgaacaagttctataccaaaaaatgtcgggaactgtactattgtgtgaaagattcgatggaacgcgccgccgccagacagcagagcatcaaacctggccctgaattgggaggcgagtttcccgtgcaggacttgaaaacaggcgaaggtggtctcttgcaggttacgctggagggcattaatcttaagttcatgcacaaccaggttttcatcgaactgaatcacataaagaaatgcaatactgtgaggggagtttttgttttagaggaatttgtccctgagattaaagaggtagttagccataaatacaagacgcccatggcccacgaaatctgttattcagtgttatgtctattctcgtacgtagctgccgttcattcaagcgaagaggacctgagaaccccgcctcgacctgtcagctcatag

SEQ ID NO: 272333 - DNA, 4626 bp, Artificial Sequence
  derived and/or modified sequence
atggtgcagaagaagaagttctgcccccggctgctggactacctggtgattgtgggcgcccggcaccccagcagtgacagcgtggcccagaccccagagctgctgcggcgctaccccctggaggaccacacagagttccccctgcccccagatgtggtgttcttctgccagcctgagggctgcctgtctgtgcggcagaggaggatgagcctgagagatgacaccagctttgtgttcaccctgacagacaaggacaccggggtgaccaggtatggcatctgtgtgaacttctaccgctccttccagaagaggatcagcaaggagaagggggagggcggggccggcagccggggcaaggagggcacccacgccacctgtgccagcgaggagggcggcacagagagcagcgagagcggcagcagcctgcagcccctgtctgctgacagcaccccagatgtgaaccagagcccccggggcaagagaagagccaaggccggcagccgcagcaggaacagcaccctgaccagcctgtgtgtgctgagccactaccccttcttcagcaccttcagagaatgtctgtacaccctgaagaggctggtggactgctgcagcgagcggctgctgggcaagaagctgggcatcccccggggcgtgcagagggacaccatgtggaggatcttcaccggcagcctgctggtggaggagaagagcagcgccctgctgcatgacctgcgggagattgaggcctggatctaccgcctgctgcggagccctgtgcctgtgtctggccagaagagggtggacatcgaggtgctgccccaggagctgcagcctgccctgacctttgccctgcctgaccccagccgcttcaccctggtggacttccccctgcacctgcccctggagctgctgggcgtggatgcctgcctgcaggtgctgacctgcatcctgctggagcacaaggtggtgctgcagagccgggactacaatgccctgtccatgtctgtgatggcctttgtggccatgatctaccccctggagtacatgtttcctgtgatccccctgctgcccacctgcatggccagcgctgagcagctgctgctggcccccaccccctacatcattggagtgcctgccagcttcttcctgtacaagctggacttcaagatgccagatgatgtgtggctggtggacctggacagcaacagagtgattgcccccaccaatgctgaggtgctgcccatcctgcctgagcctgagagcctggagctgaagaagcacctgaagcaggccctggcctccatgagcctgaacacccagcccatcctgaacctggagaagttccacgagggccaggagatccccctgctgctgggccggcccagcaatgacctgcagagcacccccagcacagagttcaaccccctcatctatggaaatgatgtggacagcgtggatgtggccaccagggtggccatggtgcgcttcttcaacagcgccaacgtgctgcagggcttccagatgcacaccaggaccctgcggctcttccccaggcctgtggtggccttccaggccggcagcttcctggccagccggccccggcagaccccatttgctgagaagctggcccggacccaggccgtggagtactttggagagtggatcctgaaccccaccaactatgccttccagaggatccacaacaacatgtttgatcctgccctgattggagacaagcccaagtggtacgcccaccagctgcagcccatccactacagagtgtatgacagcaacagccagctggccgaggccctgtctgtgcccccagagcgggacagcgacagcgagcccacagatgattctggcagtgacagcatggactatgatgacagcagcagcagctacagcagcctgggggactttgtgtctgagatgatgaagtgtgacatcaatggagacacccccaacgtggaccccctgacccatgctgccctgggagatgccagcgaggtggagattgatgagctgcagaaccagaaggaggccgaggagcccggcccagattctgagaacagccaggagaacccccccctgcggagcagcagcagcaccacagccagcagcagccccagcaccgtcatccatggagccaacagcgagcctgctgacagcacagagatggatgacaaggctgctgtgggcgtgtccaagcccctgcccagcgtgcccccatccatcggcaagagcaatgtggaccggcggcaggccgagatcggggagggcgcccagaagctgctgcggcccaacagcctgcggctggccagtgacagtgatgctgagagtgacagccgggccagcagccccaacagcacagtgagcaacaccagcacagagggctttggaggcatcatgagctttgccagcagcctgtacagaaaccacagcaccagcttcagcctgagcaacctgaccctgcccaccaagggggcccgggagaaggccacccccttccccagcctgaagggcaacagaagagccctggtggaccagaagagcagcgtcatcaagcacagccccaccgtgaagcgggagccccccagcccccagggccgcagcagcaacagcagcgagaaccagcagttcctgaaggaggtggtgcacagcgtgctggatggccagggcgtgggctggctgaacatgaagaaggtgcggcggctgctggagagcgagcagctgcgggtgtttgtgctgagcaagctgaacaggatggtgcagagtgaagatgatgcccggcaggacatcatcccagatgtggagatcagcaggaaggtgtacaagggcatgctggacctgctgaagtgcaccgtgctgagcctggagcagagctatgcccacgccggcctgggcggcatggccagcatcttcggcctgctggagatcgcccagacccactactacagcaaggagccagacaagaggaagaggagccccacagagagcgtgaacacccctgtgggcaaggaccccggcctggccggccgcggggaccccaaggccatggcccagctgcgggtgccccagctgggcccccgggcccccagcgccaccgggaagggccccaaggagctggacaccaggagcctgaaggaggagaacttcatcgccagcatcggccctgaggtgatcaagcctgtgtttgacctgggggagacagaggagaagaagagccagatctctgctgacagcggcgtgtccctgaccagcagcagccagaggacagaccaggacagcgtgattggagtgtccccagctgtgatgatccgcagcagcagccaggacagcgaggtgagcaacagcagcggggagaccctgggcgctgacagcgacctgagcagcaatgctggagatggccctggaggagagggctctgtgcacctggccagcagccggggcaccctgagtgacagcgagattgagaccaacagcgccaccagcaccatctttgggaaggcccacagcctgaagcccagcatcaaggagaagctggccggcagccccatccgcaccagtgaagatgtgtcccagagggtgtacctgtatgagggcctgctgggcaaggagaggagcaccctgtgggaccagatgcagttctgggaggatgccttcctggatgctgtgatgctggagcgggagggcatgggcatggaccagggcccccaggagatgattgaccgctacctgagcctgggggagcatgacaggaagaggctggaggatgatgaagatcggctgctggccaccctgctgcacaacctgatctcctacatgctgctgatgaaggtgaacaagaatgacatcaggaagaaggtgcggcggctgatgggcaagagccacatcggcctggtgtacagccagcagatcaatgaggtgctggaccagctggccaacctgaatggccgggacctgagcatctggagcagcggcagccgccacatgaagaagcagacctttgtggtgcatgctggaacagacaccaacggggacatcttcttcatggaggtgtgtgatgactgtgtggtgctgcggagcaacattggaacagtgtatgagcgctggtggtatgagaagctgatcaacatgacctactgccccaagaccaaggtgctgtgcctgtggaggagaaatggaagtgagacccagctgaacaagttctacaccaagaagtgccgggagctgtactactgtgtgaaggacagcatggagagagctgctgcccggcagcagagcatcaagccaggccctgagctgggcggggagttccctgtgcaggacctgaagacaggagagggcggcctgctgcaggtgaccctggagggcatcaacctgaagttcatgcacaaccaggtgttcatcgagctgaaccacatcaagaagtgcaacacagtgcggggcgtgtttgtgctggaggagtttgtgcctgagatcaaggaggtggtgagccacaagtacaagacccccatggcccacgagatctgctacagcgtgctgtgcctcttctcctatgtggccgctgtgcacagcagcgaggaggacctgcggaccccacccaggcctgtgagcagctag

SEQ ID NO: 272334 - DNA, 4988 bp, Artificial Sequence
  derived and/or modified sequence
aggattggtaggctccaccgctcggcagccggcttccctgctcggacgccgagcaccgccaaagcgcacttcgattttcagaattcctcctgggaatgctgactccttgcttggtgccctgatgcttctctgagataaactgatgaattggaaccatggtgcaaaagaagaagttctgtcctcggttacttgactatctagtgatcgtaggggccaggcacccgagcagtgatagcgtggcccagactcctgaattgctacggcgataccccttggaggatcacactgagtttcccctgcccccagatgtagtgttcttctgccagcccgagggctgcctgagcgtgcggcagcggcgcatgagccttcgggatgatacctcttttgtcttcaccctcactgacaaggacactggagtcacgcgatatggcatctgtgttaacttctaccgctccttccaaaagcgaatctctaaggagaagggggaaggtggggcagggtcccgtgggaaggaaggaacccatgccacctgtgcctcagaagagggtggcactgagagctcagagagtggctcatccctgcagcctctcagtgctgactctacccctgatgtgaaccagtctcctcggggcaaacgccgggccaaggcggggagccgctcccgcaacagtactctcacgtccctgtgcgtgctcagccactaccctttcttctccaccttccgagagtgtttgtatactctcaagcgcctggtggactgctgtagtgagcgccttctgggcaagaaactgggcatccctcgaggcgtacaaagggacaccatgtggcggatctttactggatcgctgctggtagaggagaagtcaagtgcccttctgcatgaccttcgagagattgaggcctggatctatcgattgctgcgctccccagtacccgtctctgggcagaagcgagtagacatcgaggtcctaccccaagagctccagccagctctgacctttgctcttccagacccatctcgattcaccctagtggatttcccactgcaccttcccttggaacttctaggtgtggacgcctgtctccaggtgctaacctgcattctgttagagcacaaggtggtgctacagtcccgagactacaatgcactctccatgtctgtgatggcattcgtggcaatgatctacccactggagtatatgtttcctgtcatcccgctgctacccacctgcatggcatcagcagagcagctgctgttggctccaaccccgtacatcattggggttcctgccagcttcttcctctacaaactggacttcaaaatgcctgatgatgtatggctagtggatctggacagcaatagggtgattgcccccaccaatgcagaagtgctgcctatcctgccagaaccagaatcactagagctgaaaaagcatttaaagcaggccttggccagcatgagtctcaacacccagcccatcctcaatctggagaaatttcatgagggccaggagatcccccttctcttgggaaggccttctaatgacctgcagtccacaccgtccactgaattcaacccactcatctatggcaatgatgtggattctgtggatgttgcaaccagggttgccatggtacggttcttcaattccgccaacgtgctgcagggatttcagatgcacacgcgtaccctgcgcctctttcctcggcctgtggtagcttttcaagctggctcctttctagcctcacgtccccggcagactccttttgccgagaaattggccaggactcaggctgtggagtactttggggaatggatccttaaccccaccaactatgcctttcagcgaattcacaacaatatgtttgatccagccctgattggtgacaagccaaagtggtatgctcatcagctgcagcctatccactatcgcgtctatgacagcaattcccagctggctgaggccctgagtgtaccaccagagcgggactctgactccgaacctactgatgatagtggcagtgatagtatggattatgacgattcaagctcttcttactcctcccttggtgactttgtcagtgaaatgatgaaatgtgacattaatggtgatactcccaatgtggaccctctgacacatgcagcactgggggatgccagcgaggtggagattgacgagctgcagaatcagaaggaagcagaagagcctggcccagacagtgagaactctcaggaaaaccccccactgcgctccagctctagcaccacagccagcagcagccccagcactgtcatccacggagccaactctgaacctgctgactctacggagatggatgataaggcagcagtaggcgtctccaagcccctcccttccgtgcctcccagcattggcaaatcgaacgtggacagacgtcaggcagaaattggagagggggctcaaaagctgctgcggcccaacagcttgagactggcaagtgactcagatgcagagtcagactctcgggcaagctctcccaactccaccgtctccaacaccagcaccgagggcttcgggggcatcatgtcttttgccagcagcctctatcggaaccacagtaccagcttcagtctttcaaacctcacactgcccaccaaaggtgcccgagagaaggccacgcccttccccagtctgaaaggaaacaggagggcgttagtggatcagaagtcatctgtcattaaacacagcccaacagtgaaaagagaacctccatcaccccagggtcgatccagcaattctagtgagaaccagcagttcctgaaggaggtggtgcacagcgtgctggacggccagggagttggctggctcaacatgaaaaaggtgcgccggctgctggagagcgagcagctgcgagtctttgtcctgagcaagctgaaccgcatggtgcagtcagaggacgatgcccggcaggacatcatcccggatgtggagatcagtcggaaggtgtacaagggaatgttagacctcctcaagtgtacagtcctcagcttggagcagtcctatgcccacgcgggtctgggtggcatggccagcatctttgggcttttggagattgcccagacccactactatagtaaagaaccagacaagcggaagagaagtccaacagaaagtgtaaataccccagttggcaaggatcctggcctagctgggcggggggacccaaaggctatggcacaactgagagttccacaactgggacctcgggcaccaagtgccacaggaaagggtcctaaggaactggacaccagaagtttaaaggaagaaaattttatagcatctattgggcctgaagtaatcaaacctgtctttgaccttggtgagacagaggagaaaaagtcccagatcagcgcagacagtggtgtgagcctgacgtctagttcccagaggactgatcaagactctgtcatcggcgtgagtccagctgttatgatccgcagctcaagtcaggattctgaagtgagtaatagctctggagagacccttggagctgacagtgacttgagcagcaatgcaggtgatggaccaggtggcgagggcagtgttcacctggcaagctctcggggcactttgtctgatagtgaaattgagaccaactctgccacaagcaccatctttggtaaagcccacagcttgaagccaagcataaaggagaagctggcaggcagccccattcgtacttctgaagatgtgagccagcgagtctatctctatgagggactcctaggcaaagagcgttctactttatgggaccaaatgcaattctgggaagatgccttcttagatgctgtgatgttggagagagaagggatgggtatggaccagggtccccaggaaatgatcgacaggtacctgtcccttggagaacatgaccggaagcgcctggaagatgatgaagatcgcttgttggccacacttctgcacaacctcatctcctacatgctgctgatgaaggtaaataagaatgacatccgcaagaaggtgaggcgcctaatgggaaagtcgcacattgggcttgtgtacagccagcaaatcaatgaggtgcttgatcagctggcgaacctgaatggacgcgatctctctatctggtccagtggcagccggcacatgaagaagcagacatttgtggtacatgcagggacagatacaaacggagatatctttttcatggaggtgtgcgatgactgtgtggtgttgcgtagtaacatcggaacagtgtatgagcgctggtggtacgagaagctcatcaacatgacctactgtcccaagacgaaggtgttgtgcttgtggcgtagaaatggctctgagacccagctcaacaagttctatactaaaaagtgtcgggagctgtactactgtgtgaaggacagcatggagcgcgctgccgcccgacagcaaagcatcaaacccggacctgaattgggtggcgagttccctgtgcaggacctgaagactggtgagggtggcctgctgcaggtgaccctggaagggatcaacctcaaattcatgcacaatcaggttttcatagagctgaatcacattaaaaagtgcaatacagttcgaggcgtctttgtcctggaggaatttgttcctgaaattaaagaagtggtgagccacaagtacaagacaccaatggcccacgaaatctgctactccgtattatgtctcttctcgtacgtggctgcagttcatagcagtgaggaagatctcagaaccccgccccggcctgtctctagctgatggagaggggctacgcagctgccccagcccagggcacgcccctggccccttgctgttcccaagtgcacgatgctgctgtgactgaggagtggatgatgctcgtgtgtcctctgcaagccccctgctgtggcttggttggttaccggttatgtgtccctctgagtgtgtcttgagcgtgtccaccttctccctctccactcccagaag

SEQ ID NO: 272335 - DNA, 4626 bp, Artificial Sequence
  derived and/or modified sequence
atggtgcagaagaagaagttctgcccccggctgctggactacctggtcattgtaggggcccgccacccatcctccgactcagtggctcaaaccccagagctactgcgaaggtacccgctcgaggaccacactgaatttccgctcccccccgatgtcgtattcttttgccagccagagggctgcttaagcgtgcgacagcgccgtatgagcctccgggacgacacaagctttgtatttacgttaacagacaaagacaccggagtaactaggtacggaatctgcgtcaacttctaccgcagcttccaaaaaaggatctccaaagagaagggagaggggggggcaggcagcaggggcaaagaaggcacacacgccacttgtgcttcggaagaaggcggcacggaatcatcagagtctggctcgtccctgcaaccgctgtcagcagatagcactccggatgttaatcagagcccgcgggggaagcgacgggccaaagctgggtctagatctcgtaactctaccctgaccagcctgtgcgtcctgtcacattatccttttttttctacattccgcgagtgtttgtacacactcaaacggcttgtggattgctgttcagaacgattactgggcaagaagctcgggattccgcgaggcgtgcaacgcgacacgatgtggaggatcttcaccggcagcttgctcgtcgaggagaaaagcagtgcccttctgcatgatctacgcgagatcgaagcgtggatttatcggctgctgcgaagccccgtcccagtctctggtcaaaaaagagtagacatcgaagtgctgccgcaggaactgcagcctgccctgacctttgcactgcctgatccatcgaggtttacattggttgattttcctttacaccttcccttagaactgctgggcgtcgacgcctgcctccaagtgctcacctgtatcctcctcgagcataaggtggtgttgcagtcgcgcgactacaatgccctgagtatgtcagtgatggcttttgttgcaatgatctatcctctagagtatatgtttcctgttatccctctgctgcccacatgtatggcaagtgccgagcagctgttactggctccaaccccatacatcatcggagtgccggcgagtttttttttgtataagctggattttaagatgccagatgacgtgtggctggttgatctcgattcaaatcgcgtgatcgctcctacaaatgctgaggtcctccccatcctcccagaaccagaaagccttgagctcaaaaaacatctgaagcaggctctcgcctccatgtcccttaacacacagccaatactgaacctagagaagttccacgagggtcaagaaattccactgcttttaggtcgtccatccaacgacttgcagtccacaccgtccacggagtttaatccactgatttatggaaatgacgttgactctgtggatgtcgcaacgagggtggctatggtccggttctttaactctgcgaatgtgctccagggtttccagatgcacactcgcactcttagactatttccccgtcctgtagttgcctttcaggctggttcgttcctggcctccagaccccggcaaacaccctttgccgaaaaactggcaaggacccaggccgtggagtattttggcgagtggattcttaatccaacaaactacgcttttcagcggattcacaacaacatgttcgacccagctctcattggagataagcctaagtggtatgcgcatcagctgcagcctattcactatcgagtgtacgattcgaatagtcagctggccgaagcactgagcgtgcctccagagagggactcagattcggagcctaccgacgatagtgggtccgactccatggactacgacgactcaagttcatcttactcaagcctgggagattttgtttcagagatgatgaagtgtgacattaacggtgacaccccgaatgtcgacccactgacacacgccgcccttggtgacgctagcgaagtcgagattgatgagctacagaatcagaaggaggctgaggagccaggcccagactctgagaactcacaggagaacccccccctcaggagttcttcttcgacgacagcctcttcatcaccatcaacggtgatacacggagccaactctgagcctgctgatagtactgaaatggatgacaaggcagccgtcggggtaagcaaaccactacctagtgtgcccccatccataggcaaatcaaatgttgatcgaagacaggccgaaattggggagggagcacagaaactgcttcgtccaaattctttgcggctcgcctctgattccgatgccgagtcagacagtcgagccagttctcctaattccactgtgtctaatacctcaacggaggggtttggagggatcatgtcttttgccagttctttatatagaaatcatagcactagcttcagcctttctaatctgaccctccccaccaagggtgcaagagagaaggccacccctttcccttctttgaaggggaaccggagagcattggtggaccagaagtcaagcgtcatcaagcactccccaactgtgaaaagggaacccccctcgccgcagggacgctccagcaatagttccgagaatcaacagtttttgaaggaggtcgtccacagcgtgctggatggccaaggggtcgggtggctcaatatgaaaaaggtccgtcgtttacttgaaagcgagcagctgagggtgtttgtgttgtctaaattaaacagaatggtccagtccgaggacgatgctcgacaagacatcatccccgacgtggaaatctcccgaaaagtgtacaaggggatgctggatctactcaagtgcaccgttttgtcactggagcagtcctacgcacatgctggcctgggtgggatggcatctatcttcggcctgctggagattgctcagacccactattattcaaaggagcctgacaagcgcaagaggagtccaacagagtctgtgaacacaccagtgggaaaggatcctgggttggcagggaggggcgatccaaaggccatggcgcaactgcgcgtgccacagctgggaccccgtgccccctctgcgacagggaaggggcccaaagaactggatactcgctcccttaaagaagagaacttcatcgccagcattggtccagaggttatcaaacctgtctttgacctcggcgagaccgaggaaaagaaatctcagatctccgccgacagtggggttagcctgaccagtagcagccagcggactgatcaggatagcgttatcggtgtaagccccgccgtgatgattcggtctagtagccaggacagcgaggttagcaatagctcaggcgagacccttggtgctgacagtgacctgtcttccaatgctggagatggtcccggaggagagggcagcgtgcatcttgccagttcaagaggtactctgtctgatagcgagatcgaaaccaattcagccacgtccactatctttggaaaagcccactcacttaagccctccattaaggaaaaattagctgggagcccgatcagaaccagtgaggacgtaagccagcgcgtctacttgtacgaggggctgttggggaaggagcgaagtactctgtgggatcagatgcaattctgggaagatgcattcttagacgctgtcatgttggagagagaaggaatggggatggaccagggaccccaagagatgatcgatcggtacttaagcctcggtgaacacgaccggaagaggctggaggacgatgaggatagacttctggccacgctgcttcataacctgatttcctatatgctcctgatgaaggtcaataaaaacgatatccggaaaaaggtgcggaggctgatgggcaaatcacacattggcttagtgtattctcaacagatcaacgaggtgcttgatcaactcgccaacctgaatggccgggatctgtccatctggagttctgggtcaagacacatgaagaaacagaccttcgtggtgcacgctggtacagatacaaatggcgatatcttcttcatggaagtgtgtgatgattgcgtggtcctcagaagcaacatcggcaccgtctacgaaaggtggtggtatgagaaactcatcaacatgacttattgcccaaagacaaaggtgctgtgtctgtggcggcgtaatggctccgagacccaactaaacaaattttatacaaaaaaatgtagagagctatactattgcgtcaaagacagtatggagcgggctgcagctcgccagcagtccatcaagccaggacctgagctggggggagagttccccgtccaagacctcaaaacaggcgaggggggactcctccaggtgacactggaagggatcaatcttaagtttatgcataaccaggtgttcattgagctgaatcacatcaagaagtgtaacacggtgcgcggcgtgttcgttcttgaagagttcgtgcctgaaattaaggaagtggtgagccataaatacaaaactccaatggcccacgagatctgttactccgtgttatgtttgtttagctacgtggccgctgtacattcatcagaggaggatcttcggactccccctagacccgtctcctcttag

SEQ ID NO: 272336 - DNA, 4626 bp, Artificial Sequence
  derived and/or modified sequence
atggtccaaaagaagaaattctgtccccgactgttagactatctggtgatcgtgggagctcggcatccctcgtccgactcagtggcccaaacaccggagcttctgaggcgctacccacttgaggaccacactgaattcccactgccacctgacgtggtgtttttttgtcagcctgaaggttgtctgtctgtgagacagagacgcatgtcactacgcgatgataccagtttcgtttttacactcacggataaggataccggtgtgactcgttatggcatctgcgtgaacttctacagaagctttcaaaagcggatctccaaggaaaagggggaaggtggcgcaggatctcgtggaaaggaaggtactcatgccacatgtgcctctgaggagggcggaaccgagtcaagcgagtccgggtcctccctccaaccactctctgctgattccacgccagacgtcaaccagagcccaagaggaaagagacgtgctaaagccggatccaggagcaggaatagcacacttacgtccctgtgtgttctgagccattatccttttttctccacgttcagagaatgcctatatacattgaagagactggttgattgttgcagcgaacgcctgcttggcaagaaactgggcatacccaggggcgttcaacgagacaccatgtggaggatctttaccggtagcctgctggtggaggagaaatcctcggctctcttacatgacctccgcgaaatagaagcctggatctatcgactgctcaggtccccggtccctgtctccggacagaagcgggtcgacattgaggtgctgcctcaggagctgcaacctgcactgactttcgctcttcctgatccctctaggtttactctagtggattttcccttgcacctgccactggaactactgggggttgacgcttgtctccaagtgctgacatgtatcttgctggaacacaaggtggtcttgcaaagtagagactataacgcgctgtctatgagtgtcatggcgttcgtggccatgatctacccactggagtacatgtttcccgttatacctctccttccaacgtgcatggccagcgctgagcagctcctgctcgcgccaacaccatacatcattggggtgcccgcatcgttcttcctttataaactcgacttcaagatgcccgatgacgtgtggctagtggaccttgactccaaccgcgtaatcgccccaaccaatgcagaggtacttcctatcttacccgagccagaatccttggagctgaaaaagcatcttaagcaggcacttgcctccatgtctttgaacacacagcccattttgaacctggaaaagttccacgaaggccaggagatacctctgctcctcggccgaccctcgaacgacttacaaagtacgccatcaacagaattcaatccactgatctatggcaatgacgtggacagtgtggacgtggcgaccagggtcgctatggtcaggttttttaactcggcaaacgtgctgcaaggtttccagatgcacacccggactctgaggctgtttccaagacctgtcgtcgcctttcaagcaggtagctttctcgcaagccgtcctcgacaaactccctttgctgagaagttggccagaactcaggcagtggaatatttcggagagtggatcctgaatcccacaaattacgcttttcaacgaatccacaataatatgttcgatcccgctctgattggagacaagcccaaatggtatgcccaccagttgcaaccaattcattaccgcgtttacgattctaacagccaattagccgaggctctgtccgtccctcctgagcgagattcagatagcgagcccactgatgactcaggttctgatagtatggactacgacgatagctccagtagctattcctcattaggcgactttgtcagcgagatgatgaagtgtgatatcaacggggatactccaaatgttgatcccctgacgcatgccgcattgggggacgcgtccgaggtcgagatcgatgagctgcagaaccaaaaagaagctgaggaacccggaccagactccgaaaactctcaggaaaatcctcctctaaggagcagctcatcgactactgcctccagctcacctagcaccgttattcacggagccaactccgagcccgcagacagtacagagatggatgataaggccgcagtgggagtctctaagcccctaccatctgtgcctccaagcataggcaagtccaatgtggaccgtaggcaggctgagatcggggagggcgcacaaaagctgttacgtccaaatagcctacgtctcgcatcagatagcgacgcggagtctgattctagggctagcagccccaattctactgtgtcaaatacctctacagaaggattcgggggaattatgagtttcgctagctctctctaccgtaaccacagcacttccttctctctgtcaaatctcacattgccaacaaaaggcgctcgcgagaaggccaccccctttccgtcactcaaaggcaaccggagagctttggtcgaccagaagtcctctgtgatcaaacatagtccaacagttaaacgcgaacctccctcacctcagggaaggtccagcaactcgtctgagaaccagcagtttctgaaggaggtggtgcattccgtgctggacggccagggagtcgggtggcttaacatgaaaaaggtccgtcgcctgttggagtcagagcagctcagagtgttcgttctatctaagctgaacagaatggtgcagagcgaagacgatgctagacaggatatcattccagacgtagagattagccggaaagtgtacaaagggatgctcgatctgttaaaatgcaccgtactgagcctggagcagtcctacgcccatgccggtcttggtggaatggcttccatctttgggctgctggaaatcgcccagacccattactactccaaagagccagacaaacgcaaaagaagtcctacggagagtgtgaatacccccgtcgggaaagacccaggactggccggacggggtgatcccaaagcaatggcccaattgcgagtacctcagctgggacctagggccccatccgctacaggtaagggtcctaaggagctggacacaaggtctctgaaagaggaaaatttcatcgcgagcattggccctgaagtgattaaacctgtgttcgatttgggcgagaccgaggaaaaaaagagtcagatttccgccgattcgggagtgtccctcacctcttctagtcagcggaccgaccaggattcagtgattggagtcagcccagccgtcatgattaggagcagttctcaagacagcgaggtgtctaactcctcaggagagacactgggggctgattctgacttgagttctaatgccggtgacggccctgggggagaagggagcgtgcacttggcttcctcgaggggcaccctgtctgattcagaaatagagactaattcagccacatccaccatattcggcaaagcccactctttaaagcctagcatcaaggagaaattagctggaagcccaattagaacttctgaagacgtgtcccagcgcgtttatttgtatgaaggcctgctggggaaggaacggtcaacgttgtgggaccaaatgcaattctgggaagatgcattcttggacgccgtgatgctcgagcgcgagggcatggggatggatcagggcccacaggagatgattgatcggtacctgagcctaggtgaacatgatcgcaaacgcttagaggatgacgaggatcgacttctcgcaacgctgttgcataacctgatctcctacatgctgttgatgaaagtgaacaagaacgatataagaaagaaagtcagaagactcatgggcaagtcacacatcggattggtgtatagccaacagattaatgaggtgctggatcagctggccaacctgaacggacgggatttgtccatatggtcttctgggagccgacacatgaaaaagcagacattcgtcgttcacgccggtacagataccaacggggatatttttttcatggaagtgtgcgatgactgtgtggtcctgcgatctaatatcgggaccgtttacgagcgatggtggtacgagaagctgataaacatgacttattgccccaagactaaggtgttatgcctgtggcgtcggaacggatcagaaacgcaacttaataaattttacacaaaaaaatgtagagagctgtactactgcgtcaaggattcaatggagagggcagccgctcggcagcagtctattaaaccaggacccgagctcggtggtgagttccctgtgcaggatctgaaaaccggggaagggggactgcttcaggtgaccctggaaggcatcaacctaaagttcatgcacaaccaagtgtttattgagctcaatcacattaagaagtgtaacactgtgaggggggttttcgtgctggaagaattcgttcctgaaatcaaggaagtcgtaagccacaagtataagacccccatggcccacgagatatgttattcagtactatgcttattctcttatgtcgctgccgttcattctagcgaggaggatttgcgtacgcctcctcggccagtcagttcttag

SEQ ID NO: 272337 - DNA, 4626 bp, Artificial Sequence
  derived and/or modified sequence
atggtgcagaagaagaagttctgccccagactgctggactacctggtgatcgtgggcgccagacaccccagcagcgacagcgtggcccagacccccgagctgctgagaagataccccctggaggaccacaccgagttccccctgccccccgacgtggtgttcttctgccagcccgagggctgcctgagcgtgagacagagaagaatgagcctgagagacgacaccagcttcgtgttcaccctgaccgacaaggacaccggcgtgaccagatacggcatctgcgtgaacttctacagaagcttccagaagagaatcagcaaggagaagggcgagggcggcgccggcagcagaggcaaggagggcacccacgccacctgcgccagcgaggagggcggcaccgagagcagcgagagcggcagcagcctgcagcccctgagcgccgacagcacccccgacgtgaaccagagccccagaggcaagagaagagccaaggccggcagcagaagcagaaacagcaccctgaccagcctgtgcgtgctgagccactaccccttcttcagcaccttcagagagtgcctgtacaccctgaagagactggtggactgctgcagcgagagactgctgggcaagaagctgggcatccccagaggcgtgcagagagacaccatgtggagaatcttcaccggcagcctgctggtggaggagaagagcagcgccctgctgcacgacctgagagagatcgaggcctggatctacagactgctgagaagccccgtgcccgtgagcggccagaagagagtggacatcgaggtgctgccccaggagctgcagcccgccctgaccttcgccctgcccgaccccagcagattcaccctggtggacttccccctgcacctgcccctggagctgctgggcgtggacgcctgcctgcaggtgctgacctgcatcctgctggagcacaaggtggtgctgcagagcagagactacaacgccctgagcatgagcgtgatggccttcgtggccatgatctaccccctggagtacatgttccccgtgatccccctgctgcccacctgcatggccagcgccgagcagctgctgctggcccccaccccctacatcatcggcgtgcccgccagcttcttcctgtacaagctggacttcaagatgcccgacgacgtgtggctggtggacctggacagcaacagagtgatcgcccccaccaacgccgaggtgctgcccatcctgcccgagcccgagagcctggagctgaagaagcacctgaagcaggccctggccagcatgagcctgaacacccagcccatcctgaacctggagaagttccacgagggccaggagatccccctgctgctgggcagacccagcaacgacctgcagagcacccccagcaccgagttcaaccccctgatctacggcaacgacgtggacagcgtggacgtggccaccagagtggccatggtgagattcttcaacagcgccaacgtgctgcagggcttccagatgcacaccagaaccctgagactgttccccagacccgtggtggccttccaggccggcagcttcctggccagcagacccagacagacccccttcgccgagaagctggccagaacccaggccgtggagtacttcggcgagtggatcctgaaccccaccaactacgccttccagagaatccacaacaacatgttcgaccccgccctgatcggcgacaagcccaagtggtacgcccaccagctgcagcccatccactacagagtgtacgacagcaacagccagctggccgaggccctgagcgtgccccccgagagagacagcgacagcgagcccaccgacgacagcggcagcgacagcatggactacgacgacagcagcagcagctacagcagcctgggcgacttcgtgagcgagatgatgaagtgcgacatcaacggcgacacccccaacgtggaccccctgacccacgccgccctgggcgacgccagcgaggtggagatcgacgagctgcagaaccagaaggaggccgaggagcccggccccgacagcgagaacagccaggagaacccccccctgagaagcagcagcagcaccaccgccagcagcagccccagcaccgtgatccacggcgccaacagcgagcccgccgacagcaccgagatggacgacaaggccgccgtgggcgtgagcaagcccctgcccagcgtgccccccagcatcggcaagagcaacgtggacagaagacaggccgagatcggcgagggcgcccagaagctgctgagacccaacagcctgagactggccagcgacagcgacgccgagagcgacagcagagccagcagccccaacagcaccgtgagcaacaccagcaccgagggcttcggcggcatcatgagcttcgccagcagcctgtacagaaaccacagcaccagcttcagcctgagcaacctgaccctgcccaccaagggcgccagagagaaggccacccccttccccagcctgaagggcaacagaagagccctggtggaccagaagagcagcgtgatcaagcacagccccaccgtgaagagagagccccccagcccccagggcagaagcagcaacagcagcgagaaccagcagttcctgaaggaggtggtgcacagcgtgctggacggccagggcgtgggctggctgaacatgaagaaggtgagaagactgctggagagcgagcagctgagagtgttcgtgctgagcaagctgaacagaatggtgcagagcgaggacgacgccagacaggacatcatccccgacgtggagatcagcagaaaggtgtacaagggcatgctggacctgctgaagtgcaccgtgctgagcctggagcagagctacgcccacgccggcctgggcggcatggccagcatcttcggcctgctggagatcgcccagacccactactacagcaaggagcccgacaagagaaagagaagccccaccgagagcgtgaacacccccgtgggcaaggaccccggcctggccggcagaggcgaccccaaggccatggcccagctgagagtgccccagctgggccccagagcccccagcgccaccggcaagggccccaaggagctggacaccagaagcctgaaggaggagaacttcatcgccagcatcggccccgaggtgatcaagcccgtgttcgacctgggcgagaccgaggagaagaagagccagatcagcgccgacagcggcgtgagcctgaccagcagcagccagagaaccgaccaggacagcgtgatcggcgtgagccccgccgtgatgatcagaagcagcagccaggacagcgaggtgagcaacagcagcggcgagaccctgggcgccgacagcgacctgagcagcaacgccggcgacggccccggcggcgagggcagcgtgcacctggccagcagcagaggcaccctgagcgacagcgagatcgagaccaacagcgccaccagcaccatcttcggcaaggcccacagcctgaagcccagcatcaaggagaagctggccggcagccccatcagaaccagcgaggacgtgagccagagagtgtacctgtacgagggcctgctgggcaaggagagaagcaccctgtgggaccagatgcagttctgggaggacgccttcctggacgccgtgatgctggagagagagggcatgggcatggaccagggcccccaggagatgatcgacagatacctgagcctgggcgagcacgacagaaagagactggaggacgacgaggacagactgctggccaccctgctgcacaacctgatcagctacatgctgctgatgaaggtgaacaagaacgacatcagaaagaaggtgagaagactgatgggcaagagccacatcggcctggtgtacagccagcagatcaacgaggtgctggaccagctggccaacctgaacggcagagacctgagcatctggagcagcggcagcagacacatgaagaagcagaccttcgtggtgcacgccggcaccgacaccaacggcgacatcttcttcatggaggtgtgcgacgactgcgtggtgctgagaagcaacatcggcaccgtgtacgagagatggtggtacgagaagctgatcaacatgacctactgccccaagaccaaggtgctgtgcctgtggagaagaaacggcagcgagacccagctgaacaagttctacaccaagaagtgcagagagctgtactactgcgtgaaggacagcatggagagagccgccgccagacagcagagcatcaagcccggccccgagctgggcggcgagttccccgtgcaggacctgaagaccggcgagggcggcctgctgcaggtgaccctggagggcatcaacctgaagttcatgcacaaccaggtgttcatcgagctgaaccacatcaagaagtgcaacaccgtgagaggcgtgttcgtgctggaggagttcgtgcccgagatcaaggaggtggtgagccacaagtacaagacccccatggcccacgagatctgctacagcgtgctgtgcctgttcagctacgtggccgccgtgcacagcagcgaggaggacctgagaaccccccccagacccgtgagcagctag

SEQ ID NO: 272338 - protein, 1479 aa, Artificial Sequence
  derived and/or modified sequence
MVQKKKFCPRLLDYLVIVGARHPSSDSVAQTPELLRRYPLEDHTEFPLPPDVVFFCQPEGCLSVRQRRMSLRDDTSFVFTLTDKDTGVTRYGICVNFYRSFQKRISKEKGEGGAGSRGKEGTHATCASEEGGTESSESGSSLQPLSADSTPDVNQSPRGKRRAKAGSRSRNSTLTSLCVLSHYPFFSTFRECLYTLKRLVDCCSERLLGKKLGIPRGVQRDTMWRIFTGSLLVEEKSSALLHDLREIEAWIYRLLRSPVPVSGQKRVDIEVLPQELQPALTFALPDPSRFTLVDFPLHLPLELLGVDACLQVLTCILLEHKVVLQSRDYNALSMSVMAFVAMIYPLEYMFPVIPLLPTCMASAEQLLLAPTPYIIGVPASFFLYKLDFKMPDDVWLVDLDSNRVIAPTNAEVLPILPEPESLELKKHLKQALASMSLNTQPILNLEKFHEGQEIPLLLGRPSNDLQSTPSTEFNPLIYGNDVDSVDVATRVAMVRFFNSANVLQGFQMHTRTLRLFPRPVVAFQAGSFLASRPRQTPFAEKLARTQAVEYFGEWILNPTNYAFQRIHNNMFDPALIGDKPKWYAHQLQPIHYRVYDSNSQLAEALSVPPERDSDSEPTDDSGSDSMDYDDSSSSYSSLGDFVSEMMKCDINGDTPNVDPLTHAALGDASEVEIDELQNQKEAEEPGPDSENSQENPPLRSSSSTTASSSPSTVIHGANSEPADSTEMDDKAAVGVSKPLPSVPPSIGKSNVDRRQAEIGEGAQKLLRPNSLRLASDSDAESDSRASSPNSTVSNTSTEGFGGIMSFASSLYRNHSTSFSLSNLTLPTKGAREKATPFPSLKGNRRALVDQKSSVIKHSPTVKREPPSPQGRSSNSSENQQFLKEVVHSVLDGQGVGWLNMKKVRRLLESEQLRVFVLSKLNRMVQSEDDARQDIIPDVEISRKVYKGMLDLLKCTVLSLEQSYAHAGLGGMASIFGLLEIAQTHYYSKEPDKRKRSPTESVNTPVGKDPGLAGRGDPKAMAQLRVPQLGPRAPSATGKGPKELDTRSLKEENFIASIGPEVIKPVFDLGETEEKKSQISADSGVSLTSSSQRTDQDSVIGVSPAVMIRSSSQDSEVSTVVSNSSGETLGADSDLSSNAGDGPGGEGSVHLASSRGTLSDSEIETNSATSTIFGKAHSLKPSIKEKLAGSPIRTSEDVSQRVYLYEGLLGKERSTLWDQMQFWEDAFLDAVMLEREGMGMDQGPQEMIDRYLSLGEHDRKRLEDDEDRLLATLLHNLISYMLLMKVNKNDIRKKVRRLMGKSHIGLVYSQQINEVLDQLANLNGRDLSIWSSGSRHMKKQTFVVHAGTDTNGDIFFMEVCDDCVVLRSNIGTVYERWWYEKLINMTYCPKTKVLCLWRRNGSETQLNKFYTKKCRELYYCVKDSMERAAARQQSIKPGPELGGEFPVQDLKTGEGGLLQVTLEGINLKFMHNQLLRRLRW

SEQ ID NO: 272339 - protein, 1479 aa, Artificial Sequence
  derived and/or modified sequence
MVQKKKFCPRLLDYLVIVGARHPSSDSVAQTPELLRRYPLEDHTEFPLPPDVVFFCQPEGCLSVRQRRMSLRDDTSFVFTLTDKDTGVTRYGICVNFYRSFQKRISKEKGEGGAGSRGKEGTHATCASEEGGTESSESGSSLQPLSADSTPDVNQSPRGKRRAKAGSRSRNSTLTSLCVLSHYPFFSTFRECLYTLKRLVDCCSERLLGKKLGIPRGVQRDTMWRIFTGSLLVEEKSSALLHDLREIEAWIYRLLRSPVPVSGQKRVDIEVLPQELQPALTFALPDPSRFTLVDFPLHLPLELLGVDACLQVLTCILLEHKVVLQSRDYNALSMSVMAFVAMIYPLEYMFPVIPLLPTCMASAEQLLLAPTPYIIGVPASFFLYKLDFKMPDDVWLVDLDSNRVIAPTNAEVLPILPEPESLELKKHLKQALASMSLNTQPILNLEKFHEGQEIPLLLGRPSNDLQSTPSTEFNPLIYGNDVDSVDVATRVAMVRFFNSANVLQGFQMHTRTLRLFPRPVVAFQAGSFLASRPRQTPFAEKLARTQAVEYFGEWILNPTNYAFQRIHNNMFDPALIGDKPKWYAHQLQPIHYRVYDSNSQLAEALSVPPERDSDSEPTDDSGSDSMDYDDSSSSYSSLGDFVSEMMKCDINGDTPNVDPLTHAALGDASEVEIDELQNQKEAEEPGPDSENSQENPPLRSSSSTTASSSPSTVIHGANSEPADSTEMDDKAAVGVSKPLPSVPPSIGKSNVDRRQAEIGEGAQKLLRPNSLRLASDSDAESDSRASSPNSTVSNTSTEGFGGIMSFASSLYRNHSTSFSLSNLTLPTKGAREKATPFPSLKGNRRALVDQKSSVIKHSPTVKREPPSPQGRSSNSSENQQFLKEVVHSVLDGQGVGWLNMKKVRRLLESEQLRVFVLSKLNRMVQSEDDARQDIIPDVEISRKVYKGMLDLLKCTVLSLEQSYAHAGLGGMASIFGLLEIAQTHYYSKEPDKRKRSPTESVNTPVGKDPGLAGRGDPKAMAQLRVPQLGPRAPSATGKGPKELDTRSLKEENFIASIGPEVIKPVFDLGETEEKKSQISADSGVSLTSSSQRTDQDSVIGVSPAVMIRSSSQDSEVSTVVSNSSGETLGADSDLSSNAGDGPGGEGSVHLASSRGTLSDSEIETNSATSTIFGKAHSLKPSIKEKLAGSPIRTSEDVSQRVYLYEGLLGKERSTLWDQMQFWEDAFLDAVMLEREGMGMDQGPQEMIDRYLSLGEHDRKRLEDDEDRLLATLLHNLISYMLLMKVNKNDIRKKVRRLMGKSHIGLVYSQQINEVLDQLANLNGRDLSIWSSGSRHMKKQTFVVHAGTDTNGDIFFMEVCDDCVVLRSNIGTVYERWWYEKLINMTYCPKTKVLCLWRRNGSETQLNKFYTKKCRELYYCVKDSMERAAARQQSIKPGPELGGEFPVQDLKTGEGGLLQVTLEGINLKFMHNQFLKLKKW

SEQ ID NO: 272340 - DNA, 4440 bp, Artificial Sequence
  derived and/or modified sequence
atggtgcagaaaaagaaattttgccctaggcttttagactacctggttattgtcggtgccagacacccgagttccgactctgtggctcagactcccgagttactgcgaaggtaccccctggaagatcacaccgagttcccactgccacccgatgtagtctttttttgccagcctgaaggatgtctgagtgtgcggcagaggcgcatgtccctcagggatgacaccagctttgtcttcaccctgaccgacaaggacaccggggttaccaggtatgggatttgcgtgaatttctaccggtcattccagaagagaatttcaaaagaaaaaggtgaaggaggcgcaggatctagggggaaagaagggacacatgccacctgcgcctctgaggagggcgggacagagtcttcagaaagcggtagttccctccagcctttgtcagccgatagcacacccgacgtgaatcagtcaccccgcggtaagagacgcgcaaaggcgggctcccgcagcaggaacagcactcttaccagcctgtgtgtcctctctcactacccattcttctctacctttcgtgagtgtctgtacactctcaaacgcctggtggactgctgctccgagcgactgttggggaaaaaacttgggatcccaagaggtgtccaacgagacaccatgtggcgcatattcacaggatcactgctcgtagaggagaagtcgagtgcacttctgcacgacctgagggaaatcgaagcatggatatatagattgctaagatctcctgttccagtaagcggacagaaacgggttgacattgaagtgctgccccaggagctccagcccgccctgactttcgcactgcctgacccatctcggtttaccctcgtggattttccgctgcatttacccctggaactgttaggagttgacgcctgcttgcaggtgctgacttgcatcctattggagcataaggtggtcctccagtctcgggattataacgctctgagcatgagcgtgatggccttcgtagctatgatttaccccctggagtacatgtttccagtgatcccactcctgccaacatgcatggcgtcagccgaacagctgctgttggccccgactccctacattatcggcgtgcccgccagtttcttcttgtataagcttgactttaaaatgcccgacgacgtctggctcgtagatctcgactccaatcgcgtaatcgcccctacaaacgctgaagtgctaccaatcttgcccgaacctgaaagcctggaacttaaaaagcacttgaaacaggccctggctagtatgagccttaacacgcagccaatcctaaatctcgagaagttccacgagggacaggagattccactgctcctggggaggcccagcaatgatctccagtccacacctagcactgagttcaacccgttgatttacggaaatgacgtggactctgtggatgtggccacacgggtcgccatggtccggtttttcaattctgcaaatgtactacagggtttccagatgcacacacggaccctcaggctgttccccaggcccgtcgtagcattccaggccggatctttcttagcgtctcggcccagacagaccccattcgctgagaagctagcgaggacccaagcggtcgagtacttcggggagtggatactcaatcctacaaactacgcattccaaagaattcacaacaacatgttcgaccccgcacttatcggcgataagccaaaatggtacgcacatcaacttcagcctatccattatcgtgtctacgactctaacagccagctcgcggaggccctctcggtcccaccggaacgggacagtgattctgagcccactgacgatagcggctctgattcaatggattacgatgacagttcgtccagttactcctccctgggcgacttcgtgagtgagatgatgaaatgcgacatcaatggtgacactccaaatgttgatccgctgacccatgcggctctgggcgatgcttcagaggtggagatcgatgaactgcaaaatcagaaggaggcagaagagcccggaccagattcagagaatagccaagagaatcctccattgcgtagcagcagttccaccacagcctcttccagcccaagcaccgttattcacggcgctaatagcgaacccgccgacagcaccgaaatggatgacaaggcagctgtgggtgtgtctaaacccttaccttcagtcccaccaagtatcggtaagagcaacgttgaccgcagacaggctgaaattggcgagggcgctcagaagcttcttcggcccaatagcctgagactggcatctgactcagacgccgagtccgactccagggcttcatctccaaactctaccgtgtccaacacttccacagagggattcggcggcataatgagcttcgcctctagcctctatcgcaatcactccacatctttctctctttctaacttgaccctcccaacaaagggtgcccgcgaaaaagcgacaccattcccaagtcttaaaggaaatagacgggctttagtggatcagaaatcttccgtgattaagcacagccctaccgttaaacgggagcctccatccccccagggcaggagtagcaactcttctgagaatcagcagtttctcaaggaggtggtccatagcgtgctcgatggacagggggtggggtggttgaacatgaaaaaggtcaggaggctgttggaaagcgagcagctccgggtgttcgtcctttcaaagttgaacagaatggtacagtccgaagacgacgcccgacaagacataatcccagatgtggagatttcacggaaggtctataagggcatgctagatttactcaaatgtactgtactttccctggaacaatcctacgcccatgccgggcttggtggaatggcctcaattttcggtctgctggaaatcgcgcagacccactattactctaaggagcccgataagcggaaacgaagtccaacggaatcagttaatacacctgtcggtaaggatccgggcctagcagggaggggcgacccaaaagccatggcccaattaagagtgcctcagctgggaccaagagcaccatcagctaccggaaagggtcctaaagaacttgatacgagatcactgaaagaagaaaatttcattgcttccatcggcccagaagtgataaagcctgtgttcgaccttggggaaacagaggaaaaaaagtcacaaatttcagctgattcgggggtatcgctcactagctcgagtcagagaaccgaccaggacagtgtcattggcgttagcccagccgttatgattcgttccagttcacaagactccgaggtgtctactgtggtcagcaacagtagcggcgagaccctgggggctgactccgatctgtcttcaaacgctggggatggcccaggcggcgaaggctccgtccacctggccagctcccgcggcaccctgagcgactccgaaatagaaaccaatagtgctacaagcacgatcttcgggaaggcccacagtctgaaaccctctatcaaggagaagctggccggctcacccatccgtaccagcgaagacgtctcacagcgcgtatacctctacgagggccttctcggaaaagaacgctccacattgtgggaccagatgcagttctgggaagatgctttccttgatgcggtgatgttggaacgggaaggcatgggcatggaccaaggtccacaggaaatgatagacagatacttatcactaggcgagcacgatagaaagcgactcgaggacgacgaagatagactattggcaacgctgctgcacaatctgatttcgtatatgctgttgatgaaggtgaataaaaacgatatacgtaagaaggtccgcaggttgatggggaagtcccacatcggtttggtctattcccagcagataaacgaagtgctggatcagctcgccaacttaaacggtcgagacctgagcatctggagttccggaagcaggcacatgaaaaagcagacattcgtggtgcatgccgggacagataccaatggagacattttcttcatggaagtgtgcgatgattgtgtggtgttgcgctctaacattggaacagtgtatgaacgctggtggtacgagaaactgattaacatgacatactgccccaagactaaggtactgtgcctttggagacgcaatggcagcgagactcagctgaataagttttataccaaaaagtgcagagagctctactactgcgtgaaggacagcatggagcgggcggcggcgcgccagcagtctataaagccaggtcctgaactggggggagaatttcctgtgcaggatctcaaaacaggcgagggcgggctcttgcaggtgacactggagggtataaatttaaagttcatgcacaaccaactccttaggcggctgcgatggtag

SEQ ID NO: 272341 - DNA, 4440 bp, Artificial Sequence
  derived and/or modified sequence
atggtgcaaaagaaaaagttttgccccagactcctggactacctggttattgtgggtgctcggcatccatcttcagatagcgttgcgcagacgccagagctgttacggcgttacccactcgaggaccacactgagttccccctccccccagacgtcgtatttttctgtcagcccgagggttgcctaagcgtacggcagcggagaatgagcctgcgagacgacacaagcttcgtgttcactttgaccgataaggacacaggggtgacacgatatggcatctgcgtgaatttttaccgctcctttcagaagaggatttccaaagaaaaaggcgaagggggggccgggagtaggggtaaggagggaacgcacgccacgtgtgcctcagaggagggcgggacggagagttcagagagtggttcaagtctgcagcctctgagcgccgattctacacctgatgtcaaccagtctcctagagggaagcgaagagccaaagcgggctcacggagccgcaattccaccttgactagcctctgtgtcctttcacactaccctttcttctccacattcagagagtgcttgtatactctcaagcgcctagtcgactgttgtagtgagaggcttttaggcaaaaagctggggatcccaagaggggttcaaagggacactatgtggcggatcttcactggctccctgctggtggaagagaagtcctcagctctgctgcacgacttgagagaaatcgaggcttggatatatcgcttgctgagatctccagtgccagtgtccggacagaagcgcgtagacatcgaagtcctgccccaggaattacaaccagctctgacatttgccctcccagatcctagtcgatttactctcgtcgacttcccactccatctgcccttagagctcctgggagtcgacgcttgtctccaggtacttacatgcatcctgctggaacacaaagtcgttctccagagccgtgattataacgctttgagtatgagtgttatggcgtttgttgctatgatctatccactcgaatacatgttccctgtgatccctctgctgcctacttgtatggctagcgctgaacagctgcttctagcccctactccttatatcatcggtgtgcctgcgtctttcttcttgtataagcttgactttaaaatgccagatgatgtgtggctcgtagatctagattcgaatcgggtaatcgccccaacaaatgctgaggttctgcccatcctacccgaaccagagagtctggagttgaaaaaacatttgaaacaggccctcgctagtatgtccttgaatacacagcccatcttgaacctggagaagtttcacgaagggcaggaaatccctctgctgcttggaaggccttcaaacgatctgcaaagcactcccagcaccgagtttaacccattaatttacggtaacgatgttgattctgttgacgtcgccacaagggttgctatggttagattctttaatagtgccaacgtcctgcagggcttccagatgcacacacgcaccttgcgcctctttccgcgtcctgtcgtagcttttcaggccggcagctttttggcatctaggccacgacagaccccttttgcggaaaagctggctaggactcaggccgtagaatatttcggtgaatggatcctcaaccctacaaactacgctttccaacggatccacaacaatatgttcgaccccgcattaatcggcgataagcccaagtggtatgctcaccagctgcagcctattcactaccgagtctacgactcaaactcacagctcgccgaagcattatccgtgccccctgaaagagacagtgatagcgagcccaccgacgacagcggctccgatagtatggactatgatgactcgtcttcgtcttactctagcctgggtgacttcgttagcgagatgatgaagtgcgatatcaacggagatacacccaatgtcgaccctctcacgcacgctgctctgggggacgcgtctgaggttgaaattgatgagctacagaatcagaaggaggcagaggaacctggcccggatagtgagaactcccaggagaaccctccactccggtcttcttcttccacaacagcgtctagtagcccaagcaccgtgatacacggggcaaactccgagcctgctgattcaaccgagatggacgataaggcagcggtgggcgtgtcaaagccgttaccatcagtgcctcctagcattgggaagagcaacgtggatagaaggcaggccgaaatcggagaaggggctcagaaattgctgcgtcccaattccttacgcttggcctccgacagcgacgctgagagcgatagccgcgcttctagcccaaactccacagtttccaatacgtccactgagggtttcggtggtataatgtcctttgccagcagcctttacagaaaccacagtacttccttttccctgtctaacttgactctccccacaaagggagcacgcgaaaaggccactccatttccgtccctcaagggcaatcgaagagccttggtggatcaaaagtcatcagttatcaagcacagtccgacggtgaaacgggaacccccttcaccccaggggcgtagctctaattcgagcgaaaaccaacagttcctgaaagaagtggtgcatagcgtgctggacggacagggggtcgggtggctaaacatgaaaaaggtgaggagattactcgagtcagaacagctgagagtgtttgtactgtccaagttaaaccgaatggtgcaatccgaagatgacgcacgccaggacattatcccagatgtcgagatctcacgtaaagtttacaagggtatgctagaccttttgaaatgcaccgtcttaagcctcgagcaaagctacgcacacgccggactgggcggcatggcttccatctttggtctgctggagatcgctcagacccattattactcaaaagagcccgacaagaggaagaggtcacccacagagtccgtgaacactcctgtcggtaaggaccctggactggctggaaggggcgaccccaaggctatggctcaactaagagtacctcagctggggccgagggcaccctcagctaccggaaagggtccaaaggagttggatactcgtagtctgaaggaggagaacttcattgcatccatcggtcccgaggtgatcaaaccagtgttcgatctgggagaaaccgaagagaaaaaatctcagatatcagcagatagcggggtgagccttacatcaagcagtcagcgcaccgaccaagatagtgtgatcggagtgagccccgccgtcatgattcgcagtagctctcaggactcagaagtgtcgacagttgtgagcaattcctctggagaaaccttgggagcggattcggacctgtcctcgaatgctggcgacggccccgggggagagggcagcgtgcacttggctagttctcggggaacgttatccgactccgaaatagagaccaacagtgcgaccagcaccatctttggcaaggctcattccctcaaaccaagcattaaagagaagttagctggctccccaatcaggacctctgaggacgtttcccagcgggtctatctatatgaggggttgctcgggaaagagcgtagcacgctgtgggaccagatgcaattttgggaagatgcttttctggatgctgtcatgctcgagagagaggggatgggtatggaccaggggccccaagaaatgatcgataggtacctcagcctgggggaacacgatcgaaaacggctggaggacgacgaggaccgattgttggccaccctcctgcacaatcttatcagctacatgttgttgatgaaggtgaataagaatgatattcgcaagaaggtgcggcggctcatggggaaatcacacataggactggtttactcacaacagatcaacgaggtacttgaccagctcgcaaatctcaatgggagggacctgagcatatggagcagcggatctaggcacatgaaaaaacagactttcgtcgtgcacgctgggaccgataccaacggagacattttctttatggaagtgtgtgacgactgtgtggttctcaggagcaatatcggcactgtctacgagagatggtggtacgaaaaactaattaacatgacttactgtcccaaaacgaaagtgctctgtctctggagacgcaatggatcagagacgcagctcaataaattctataccaagaagtgtcgcgagctgtactactgtgtcaaagactccatggagagagcggccgcgcgccagcaatcaatcaaaccgggcccagaactcgggggcgaattccctgtgcaggacttaaagacgggcgagggtggcttgctccaggtgacactggaaggcataaacttgaaattcatgcacaatcaattcctgaaacttaaaaagtggtag

SEQ ID NO: 272342 - DNA, 4440 bp, Artificial Sequence
  derived and/or modified sequence
atggtgcagaagaagaagttctgcccccggctgctggactacctggtgattgtgggcgcccggcaccccagcagtgacagcgtggcccagaccccagagctgctgcggcgctaccccctggaggaccacacagagttccccctgcccccagatgtggtgttcttctgccagcctgagggctgcctgtctgtgcggcagaggaggatgagcctgagagatgacaccagctttgtgttcaccctgacagacaaggacaccggggtgaccaggtatggcatctgtgtgaacttctaccgctccttccagaagaggatcagcaaggagaagggggagggcggggccggcagccggggcaaggagggcacccacgccacctgtgccagcgaggagggcggcacagagagcagcgagagcggcagcagcctgcagcccctgtctgctgacagcaccccagatgtgaaccagagcccccggggcaagagaagagccaaggccggcagccgcagcaggaacagcaccctgaccagcctgtgtgtgctgagccactaccccttcttcagcaccttcagagaatgtctgtacaccctgaagaggctggtggactgctgcagcgagcggctgctgggcaagaagctgggcatcccccggggcgtgcagagggacaccatgtggaggatcttcaccggcagcctgctggtggaggagaagagcagcgccctgctgcatgacctgcgggagattgaggcctggatctaccgcctgctgcggagccctgtgcctgtgtctggccagaagagggtggacatcgaggtgctgccccaggagctgcagcctgccctgacctttgccctgcctgaccccagccgcttcaccctggtggacttccccctgcacctgcccctggagctgctgggcgtggatgcctgcctgcaggtgctgacctgcatcctgctggagcacaaggtggtgctgcagagccgggactacaatgccctgtccatgtctgtgatggcctttgtggccatgatctaccccctggagtacatgtttcctgtgatccccctgctgcccacctgcatggccagcgctgagcagctgctgctggcccccaccccctacatcattggagtgcctgccagcttcttcctgtacaagctggacttcaagatgccagatgatgtgtggctggtggacctggacagcaacagagtgattgcccccaccaatgctgaggtgctgcccatcctgcctgagcctgagagcctggagctgaagaagcacctgaagcaggccctggcctccatgagcctgaacacccagcccatcctgaacctggagaagttccacgagggccaggagatccccctgctgctgggccggcccagcaatgacctgcagagcacccccagcacagagttcaaccccctcatctatggaaatgatgtggacagcgtggatgtggccaccagggtggccatggtgcgcttcttcaacagcgccaacgtgctgcagggcttccagatgcacaccaggaccctgcggctcttccccaggcctgtggtggccttccaggccggcagcttcctggccagccggccccggcagaccccatttgctgagaagctggcccggacccaggccgtggagtactttggagagtggatcctgaaccccaccaactatgccttccagaggatccacaacaacatgtttgatcctgccctgattggagacaagcccaagtggtacgcccaccagctgcagcccatccactacagagtgtatgacagcaacagccagctggccgaggccctgtctgtgcccccagagcgggacagcgacagcgagcccacagatgattctggcagtgacagcatggactatgatgacagcagcagcagctacagcagcctgggggactttgtgtctgagatgatgaagtgtgacatcaatggagacacccccaacgtggaccccctgacccatgctgccctgggagatgccagcgaggtggagattgatgagctgcagaaccagaaggaggccgaggagcccggcccagattctgagaacagccaggagaacccccccctgcggagcagcagcagcaccacagccagcagcagccccagcaccgtcatccatggagccaacagcgagcctgctgacagcacagagatggatgacaaggctgctgtgggcgtgtccaagcccctgcccagcgtgcccccatccatcggcaagagcaatgtggaccggcggcaggccgagatcggggagggcgcccagaagctgctgcggcccaacagcctgcggctggccagtgacagtgatgctgagagtgacagccgggccagcagccccaacagcacagtgagcaacaccagcacagagggctttggaggcatcatgagctttgccagcagcctgtacagaaaccacagcaccagcttcagcctgagcaacctgaccctgcccaccaagggggcccgggagaaggccacccccttccccagcctgaagggcaacagaagagccctggtggaccagaagagcagcgtcatcaagcacagccccaccgtgaagcgggagccccccagcccccagggccgcagcagcaacagcagcgagaaccagcagttcctgaaggaggtggtgcacagcgtgctggatggccagggcgtgggctggctgaacatgaagaaggtgcggcggctgctggagagcgagcagctgcgggtgtttgtgctgagcaagctgaacaggatggtgcagagtgaagatgatgcccggcaggacatcatcccagatgtggagatcagcaggaaggtgtacaagggcatgctggacctgctgaagtgcaccgtgctgagcctggagcagagctatgcccacgccggcctgggcggcatggccagcatcttcggcctgctggagatcgcccagacccactactacagcaaggagccagacaagaggaagaggagccccacagagagcgtgaacacccctgtgggcaaggaccccggcctggccggccgcggggaccccaaggccatggcccagctgcgggtgccccagctgggcccccgggcccccagcgccaccgggaagggccccaaggagctggacaccaggagcctgaaggaggagaacttcatcgccagcatcggccctgaggtgatcaagcctgtgtttgacctgggggagacagaggagaagaagagccagatctctgctgacagcggcgtgtccctgaccagcagcagccagaggacagaccaggacagcgtgattggagtgtccccagctgtgatgatccgcagcagcagccaggacagcgaggtgtccacagtggtgagcaacagcagcggggagaccctgggcgctgacagcgacctgagcagcaatgctggagatggccctggaggagagggctctgtgcacctggccagcagccggggcaccctgagtgacagcgagattgagaccaacagcgccaccagcaccatctttgggaaggcccacagcctgaagcccagcatcaaggagaagctggccggcagccccatccgcaccagtgaagatgtgtcccagagggtgtacctgtatgagggcctgctgggcaaggagaggagcaccctgtgggaccagatgcagttctgggaggatgccttcctggatgctgtgatgctggagcgggagggcatgggcatggaccagggcccccaggagatgattgaccgctacctgagcctgggggagcatgacaggaagaggctggaggatgatgaagatcggctgctggccaccctgctgcacaacctgatctcctacatgctgctgatgaaggtgaacaagaatgacatcaggaagaaggtgcggcggctgatgggcaagagccacatcggcctggtgtacagccagcagatcaatgaggtgctggaccagctggccaacctgaatggccgggacctgagcatctggagcagcggcagccgccacatgaagaagcagacctttgtggtgcatgctggaacagacaccaacggggacatcttcttcatggaggtgtgtgatgactgtgtggtgctgcggagcaacattggaacagtgtatgagcgctggtggtatgagaagctgatcaacatgacctactgccccaagaccaaggtgctgtgcctgtggaggagaaatggaagtgagacccagctgaacaagttctacaccaagaagtgccgggagctgtactactgtgtgaaggacagcatggagagagctgctgcccggcagcagagcatcaagccaggccctgagctgggcggggagttccctgtgcaggacctgaagacaggagagggcggcctgctgcaggtgaccctggagggcatcaacctgaagttcatgcacaaccagctgctgcggcggctgcgctggtag

SEQ ID NO: 272343 - DNA, 4440 bp, Artificial Sequence
  derived and/or modified sequence
atggtgcagaagaagaagttctgcccccggctgctggactacctggtgattgtgggcgcccggcaccccagcagtgacagcgtggcccagaccccagagctgctgcggcgctaccccctggaggaccacacagagttccccctgcccccagatgtggtgttcttctgccagcctgagggctgcctgtctgtgcggcagaggaggatgagcctgagagatgacaccagctttgtgttcaccctgacagacaaggacaccggggtgaccaggtatggcatctgtgtgaacttctaccgctccttccagaagaggatcagcaaggagaagggggagggcggggccggcagccggggcaaggagggcacccacgccacctgtgccagcgaggagggcggcacagagagcagcgagagcggcagcagcctgcagcccctgtctgctgacagcaccccagatgtgaaccagagcccccggggcaagagaagagccaaggccggcagccgcagcaggaacagcaccctgaccagcctgtgtgtgctgagccactaccccttcttcagcaccttcagagaatgtctgtacaccctgaagaggctggtggactgctgcagcgagcggctgctgggcaagaagctgggcatcccccggggcgtgcagagggacaccatgtggaggatcttcaccggcagcctgctggtggaggagaagagcagcgccctgctgcatgacctgcgggagattgaggcctggatctaccgcctgctgcggagccctgtgcctgtgtctggccagaagagggtggacatcgaggtgctgccccaggagctgcagcctgccctgacctttgccctgcctgaccccagccgcttcaccctggtggacttccccctgcacctgcccctggagctgctgggcgtggatgcctgcctgcaggtgctgacctgcatcctgctggagcacaaggtggtgctgcagagccgggactacaatgccctgtccatgtctgtgatggcctttgtggccatgatctaccccctggagtacatgtttcctgtgatccccctgctgcccacctgcatggccagcgctgagcagctgctgctggcccccaccccctacatcattggagtgcctgccagcttcttcctgtacaagctggacttcaagatgccagatgatgtgtggctggtggacctggacagcaacagagtgattgcccccaccaatgctgaggtgctgcccatcctgcctgagcctgagagcctggagctgaagaagcacctgaagcaggccctggcctccatgagcctgaacacccagcccatcctgaacctggagaagttccacgagggccaggagatccccctgctgctgggccggcccagcaatgacctgcagagcacccccagcacagagttcaaccccctcatctatggaaatgatgtggacagcgtggatgtggccaccagggtggccatggtgcgcttcttcaacagcgccaacgtgctgcagggcttccagatgcacaccaggaccctgcggctcttccccaggcctgtggtggccttccaggccggcagcttcctggccagccggccccggcagaccccatttgctgagaagctggcccggacccaggccgtggagtactttggagagtggatcctgaaccccaccaactatgccttccagaggatccacaacaacatgtttgatcctgccctgattggagacaagcccaagtggtacgcccaccagctgcagcccatccactacagagtgtatgacagcaacagccagctggccgaggccctgtctgtgcccccagagcgggacagcgacagcgagcccacagatgattctggcagtgacagcatggactatgatgacagcagcagcagctacagcagcctgggggactttgtgtctgagatgatgaagtgtgacatcaatggagacacccccaacgtggaccccctgacccatgctgccctgggagatgccagcgaggtggagattgatgagctgcagaaccagaaggaggccgaggagcccggcccagattctgagaacagccaggagaacccccccctgcggagcagcagcagcaccacagccagcagcagccccagcaccgtcatccatggagccaacagcgagcctgctgacagcacagagatggatgacaaggctgctgtgggcgtgtccaagcccctgcccagcgtgcccccatccatcggcaagagcaatgtggaccggcggcaggccgagatcggggagggcgcccagaagctgctgcggcccaacagcctgcggctggccagtgacagtgatgctgagagtgacagccgggccagcagccccaacagcacagtgagcaacaccagcacagagggctttggaggcatcatgagctttgccagcagcctgtacagaaaccacagcaccagcttcagcctgagcaacctgaccctgcccaccaagggggcccgggagaaggccacccccttccccagcctgaagggcaacagaagagccctggtggaccagaagagcagcgtcatcaagcacagccccaccgtgaagcgggagccccccagcccccagggccgcagcagcaacagcagcgagaaccagcagttcctgaaggaggtggtgcacagcgtgctggatggccagggcgtgggctggctgaacatgaagaaggtgcggcggctgctggagagcgagcagctgcgggtgtttgtgctgagcaagctgaacaggatggtgcagagtgaagatgatgcccggcaggacatcatcccagatgtggagatcagcaggaaggtgtacaagggcatgctggacctgctgaagtgcaccgtgctgagcctggagcagagctatgcccacgccggcctgggcggcatggccagcatcttcggcctgctggagatcgcccagacccactactacagcaaggagccagacaagaggaagaggagccccacagagagcgtgaacacccctgtgggcaaggaccccggcctggccggccgcggggaccccaaggccatggcccagctgcgggtgccccagctgggcccccgggcccccagcgccaccgggaagggccccaaggagctggacaccaggagcctgaaggaggagaacttcatcgccagcatcggccctgaggtgatcaagcctgtgtttgacctgggggagacagaggagaagaagagccagatctctgctgacagcggcgtgtccctgaccagcagcagccagaggacagaccaggacagcgtgattggagtgtccccagctgtgatgatccgcagcagcagccaggacagcgaggtgtccacagtggtgagcaacagcagcggggagaccctgggcgctgacagcgacctgagcagcaatgctggagatggccctggaggagagggctctgtgcacctggccagcagccggggcaccctgagtgacagcgagattgagaccaacagcgccaccagcaccatctttgggaaggcccacagcctgaagcccagcatcaaggagaagctggccggcagccccatccgcaccagtgaagatgtgtcccagagggtgtacctgtatgagggcctgctgggcaaggagaggagcaccctgtgggaccagatgcagttctgggaggatgccttcctggatgctgtgatgctggagcgggagggcatgggcatggaccagggcccccaggagatgattgaccgctacctgagcctgggggagcatgacaggaagaggctggaggatgatgaagatcggctgctggccaccctgctgcacaacctgatctcctacatgctgctgatgaaggtgaacaagaatgacatcaggaagaaggtgcggcggctgatgggcaagagccacatcggcctggtgtacagccagcagatcaatgaggtgctggaccagctggccaacctgaatggccgggacctgagcatctggagcagcggcagccgccacatgaagaagcagacctttgtggtgcatgctggaacagacaccaacggggacatcttcttcatggaggtgtgtgatgactgtgtggtgctgcggagcaacattggaacagtgtatgagcgctggtggtatgagaagctgatcaacatgacctactgccccaagaccaaggtgctgtgcctgtggaggagaaatggaagtgagacccagctgaacaagttctacaccaagaagtgccgggagctgtactactgtgtgaaggacagcatggagagagctgctgcccggcagcagagcatcaagccaggccctgagctgggcggggagttccctgtgcaggacctgaagacaggagagggcggcctgctgcaggtgaccctggagggcatcaacctgaagttcatgcacaaccagttcctgaagctgaagaagtggtag

SEQ ID NO: 272344 - DNA, 4628 bp, Artificial Sequence
  derived and/or modified sequence
accgcggccgcgcgcccccctctgcccccgctgcccaggattggtaggctccaccgctcggcagccggcttccctgctcggacgccgagcaccgccaaagcgcacttcgattttcagaattcctcctgggaatgctgactccttgcttggtgccctgatgcttctctgagataaactgatgaattggaaccatggtgcaaaagaagaagttctgtcctcggttacttgactatctagtgatcgtaggggccaggcacccgagcagtgatagcgtggcccagactcctgaattgctacggcgataccccttggaggatcacactgagtttcccctgcccccagatgtagtgttcttctgccagcccgagggctgcctgagcgtgcggcagcggcgcatgagccttcgggatgatacctcttttgtcttcaccctcactgacaaggacactggagtcacgcgatatggcatctgtgttaacttctaccgctccttccaaaagcgaatctctaaggagaagggggaaggtggggcagggtcccgtgggaaggaaggaacccatgccacctgtgcctcagaagagggtggcactgagagctcagagagtggctcatccctgcagcctctcagtgctgactctacccctgatgtgaaccagtctcctcggggcaaacgccgggccaaggcggggagccgctcccgcaacagtactctcacgtccctgtgcgtgctcagccactaccctttcttctccaccttccgagagtgtttgtatactctcaagcgcctggtggactgctgtagtgagcgccttctgggcaagaaactgggcatccctcgaggcgtacaaagggacaccatgtggcggatctttactggatcgctgctggtagaggagaagtcaagtgcccttctgcatgaccttcgagagattgaggcctggatctatcgattgctgcgctccccagtacccgtctctgggcagaagcgagtagacatcgaggtcctaccccaagagctccagccagctctgacctttgctcttccagacccatctcgattcaccctagtggatttcccactgcaccttcccttggaacttctaggtgtggacgcctgtctccaggtgctaacctgcattctgttagagcacaaggtggtgctacagtcccgagactacaatgcactctccatgtctgtgatggcattcgtggcaatgatctacccactggagtatatgtttcctgtcatcccgctgctacccacctgcatggcatcagcagagcagctgctgttggctccaaccccgtacatcattggggttcctgccagcttcttcctctacaaactggacttcaaaatgcctgatgatgtatggctagtggatctggacagcaatagggtgattgcccccaccaatgcagaagtgctgcctatcctgccagaaccagaatcactagagctgaaaaagcatttaaagcaggccttggccagcatgagtctcaacacccagcccatcctcaatctggagaaatttcatgagggccaggagatcccccttctcttgggaaggccttctaatgacctgcagtccacaccgtccactgaattcaacccactcatctatggcaatgatgtggattctgtggatgttgcaaccagggttgccatggtacggttcttcaattccgccaacgtgctgcagggatttcagatgcacacgcgtaccctgcgcctctttcctcggcctgtggtagcttttcaagctggctcctttctagcctcacgtccccggcagactccttttgccgagaaattggccaggactcaggctgtggagtactttggggaatggatccttaaccccaccaactatgcctttcagcgaattcacaacaatatgtttgatccagccctgattggtgacaagccaaagtggtatgctcatcagctgcagcctatccactatcgcgtctatgacagcaattcccagctggctgaggccctgagtgtaccaccagagcgggactctgactccgaacctactgatgatagtggcagtgatagtatggattatgacgattcaagctcttcttactcctcccttggtgactttgtcagtgaaatgatgaaatgtgacattaatggtgatactcccaatgtggaccctctgacacatgcagcactgggggatgccagcgaggtggagattgacgagctgcagaatcagaaggaagcagaagagcctggcccagacagtgagaactctcaggaaaaccccccactgcgctccagctctagcaccacagccagcagcagccccagcactgtcatccacggagccaactctgaacctgctgactctacggagatggatgataaggcagcagtaggcgtctccaagcccctcccttccgtgcctcccagcattggcaaatcgaacgtggacagacgtcaggcagaaattggagagggggctcaaaagctgctgcggcccaacagcttgagactggcaagtgactcagatgcagagtcagactctcgggcaagctctcccaactccaccgtctccaacaccagcaccgagggcttcgggggcatcatgtcttttgccagcagcctctatcggaaccacagtaccagcttcagtctttcaaacctcacactgcccaccaaaggtgcccgagagaaggccacgcccttccccagtctgaaaggaaacaggagggcgttagtggatcagaagtcatctgtcattaaacacagcccaacagtgaaaagagaacctccatcaccccagggtcgatccagcaattctagtgagaaccagcagttcctgaaggaggtggtgcacagcgtgctggacggccagggagttggctggctcaacatgaaaaaggtgcgccggctgctggagagcgagcagctgcgagtctttgtcctgagcaagctgaaccgcatggtgcagtcagaggacgatgcccggcaggacatcatcccggatgtggagatcagtcggaaggtgtacaagggaatgttagacctcctcaagtgtacagtcctcagcttggagcagtcctatgcccacgcgggtctgggtggcatggccagcatctttgggcttttggagattgcccagacccactactatagtaaagaaccagacaagcggaagagaagtccaacagaaagtgtaaataccccagttggcaaggatcctggcctagctgggcggggggacccaaaggctatggcacaactgagagttccacaactgggacctcgggcaccaagtgccacaggaaagggtcctaaggaactggacaccagaagtttaaaggaagaaaattttatagcatctattgggcctgaagtaatcaaacctgtctttgaccttggtgagacagaggagaaaaagtcccagatcagcgcagacagtggtgtgagcctgacgtctagttcccagaggactgatcaagactctgtcatcggcgtgagtccagctgttatgatccgcagctcaagtcaggattctgaagttagcaccgtggtgagtaatagctctggagagacccttggagctgacagtgacttgagcagcaatgcaggtgatggaccaggtggcgagggcagtgttcacctggcaagctctcggggcactttgtctgatagtgaaattgagaccaactctgccacaagcaccatctttggtaaagcccacagcttgaagccaagcataaaggagaagctggcaggcagccccattcgtacttctgaagatgtgagccagcgagtctatctctatgagggactcctaggcaaagagcgttctactttatgggaccaaatgcaattctgggaagatgccttcttagatgctgtgatgttggagagagaagggatgggtatggaccagggtccccaggaaatgatcgacaggtacctgtcccttggagaacatgaccggaagcgcctggaagatgatgaagatcgcttgttggccacacttctgcacaacctcatctcctacatgctgctgatgaaggtaaataagaatgacatccgcaagaaggtgaggcgcctaatgggaaagtcgcacattgggcttgtgtacagccagcaaatcaatgaggtgcttgatcagctggcgaacctgaatggacgcgatctctctatctggtccagtggcagccggcacatgaagaagcagacatttgtggtacatgcagggacagatacaaacggagatatctttttcatggaggtgtgcgatgactgtgtggtgttgcgtagtaacatcggaacagtgtatgagcgctggtggtacgagaagctcatcaacatgacctactgtcccaagacgaaggtgttgtgcttgtggcgtagaaatggctctgagacccagctcaacaagttctatactaaaaagtgtcgggagctgtactactgtgtgaaggacagcatggagcgcgctgccgcccgacagcaaagcatcaaacccggacctgaattgggtggcgagttccctgtgcaggacctgaagactggtgagggtggcctgctgcaggtgaccctggaagggatcaacctcaaattcatgcacaatcagctactcagaaggctgaggtgg

SEQ ID NO: 272345 - DNA, 5614 bp, Artificial Sequence
  derived and/or modified sequence
cccgctgcccaggattggtaggctccaccgctcggcagccggcttccctgctcggacgccgagcaccgccaaagcgcacttcgattttcagaattcctcctgggaatgctgactccttgcttggtgccctgatgcttctctgagataaactgatgaattggaaccatggtgcaaaagaagaagttctgtcctcggttacttgactatctagtgatcgtaggggccaggcacccgagcagtgatagcgtggcccagactcctgaattgctacggcgataccccttggaggatcacactgagtttcccctgcccccagatgtagtgttcttctgccagcccgagggctgcctgagcgtgcggcagcggcgcatgagccttcgggatgatacctcttttgtcttcaccctcactgacaaggacactggagtcacgcgatatggcatctgtgttaacttctaccgctccttccaaaagcgaatctctaaggagaagggggaaggtggggcagggtcccgtgggaaggaaggaacccatgccacctgtgcctcagaagagggtggcactgagagctcagagagtggctcatccctgcagcctctcagtgctgactctacccctgatgtgaaccagtctcctcggggcaaacgccgggccaaggcggggagccgctcccgcaacagtactctcacgtccctgtgcgtgctcagccactaccctttcttctccaccttccgagagtgtttgtatactctcaagcgcctggtggactgctgtagtgagcgccttctgggcaagaaactgggcatccctcgaggcgtacaaagggacaccatgtggcggatctttactggatcgctgctggtagaggagaagtcaagtgcccttctgcatgaccttcgagagattgaggcctggatctatcgattgctgcgctccccagtacccgtctctgggcagaagcgagtagacatcgaggtcctaccccaagagctccagccagctctgacctttgctcttccagacccatctcgattcaccctagtggatttcccactgcaccttcccttggaacttctaggtgtggacgcctgtctccaggtgctaacctgcattctgttagagcacaaggtggtgctacagtcccgagactacaatgcactctccatgtctgtgatggcattcgtggcaatgatctacccactggagtatatgtttcctgtcatcccgctgctacccacctgcatggcatcagcagagcagctgctgttggctccaaccccgtacatcattggggttcctgccagcttcttcctctacaaactggacttcaaaatgcctgatgatgtatggctagtggatctggacagcaatagggtgattgcccccaccaatgcagaagtgctgcctatcctgccagaaccagaatcactagagctgaaaaagcatttaaagcaggccttggccagcatgagtctcaacacccagcccatcctcaatctggagaaatttcatgagggccaggagatcccccttctcttgggaaggccttctaatgacctgcagtccacaccgtccactgaattcaacccactcatctatggcaatgatgtggattctgtggatgttgcaaccagggttgccatggtacggttcttcaattccgccaacgtgctgcagggatttcagatgcacacgcgtaccctgcgcctctttcctcggcctgtggtagcttttcaagctggctcctttctagcctcacgtccccggcagactccttttgccgagaaattggccaggactcaggctgtggagtactttggggaatggatccttaaccccaccaactatgcctttcagcgaattcacaacaatatgtttgatccagccctgattggtgacaagccaaagtggtatgctcatcagctgcagcctatccactatcgcgtctatgacagcaattcccagctggctgaggccctgagtgtaccaccagagcgggactctgactccgaacctactgatgatagtggcagtgatagtatggattatgacgattcaagctcttcttactcctcccttggtgactttgtcagtgaaatgatgaaatgtgacattaatggtgatactcccaatgtggaccctctgacacatgcagcactgggggatgccagcgaggtggagattgacgagctgcagaatcagaaggaagcagaagagcctggcccagacagtgagaactctcaggaaaaccccccactgcgctccagctctagcaccacagccagcagcagccccagcactgtcatccacggagccaactctgaacctgctgactctacggagatggatgataaggcagcagtaggcgtctccaagcccctcccttccgtgcctcccagcattggcaaatcgaacgtggacagacgtcaggcagaaattggagagggggctcaaaagctgctgcggcccaacagcttgagactggcaagtgactcagatgcagagtcagactctcgggcaagctctcccaactccaccgtctccaacaccagcaccgagggcttcgggggcatcatgtcttttgccagcagcctctatcggaaccacagtaccagcttcagtctttcaaacctcacactgcccaccaaaggtgcccgagagaaggccacgcccttccccagtctgaaaggaaacaggagggcgttagtggatcagaagtcatctgtcattaaacacagcccaacagtgaaaagagaacctccatcaccccagggtcgatccagcaattctagtgagaaccagcagttcctgaaggaggtggtgcacagcgtgctggacggccagggagttggctggctcaacatgaaaaaggtgcgccggctgctggagagcgagcagctgcgagtctttgtcctgagcaagctgaaccgcatggtgcagtcagaggacgatgcccggcaggacatcatcccggatgtggagatcagtcggaaggtgtacaagggaatgttagacctcctcaagtgtacagtcctcagcttggagcagtcctatgcccacgcgggtctgggtggcatggccagcatctttgggcttttggagattgcccagacccactactatagtaaagaaccagacaagcggaagagaagtccaacagaaagtgtaaataccccagttggcaaggatcctggcctagctgggcggggggacccaaaggctatggcacaactgagagttccacaactgggacctcgggcaccaagtgccacaggaaagggtcctaaggaactggacaccagaagtttaaaggaagaaaattttatagcatctattgggcctgaagtaatcaaacctgtctttgaccttggtgagacagaggagaaaaagtcccagatcagcgcagacagtggtgtgagcctgacgtctagttcccagaggactgatcaagactctgtcatcggcgtgagtccagctgttatgatccgcagctcaagtcaggattctgaagttagcaccgtggtgagtaatagctctggagagacccttggagctgacagtgacttgagcagcaatgcaggtgatggaccaggtggcgagggcagtgttcacctggcaagctctcggggcactttgtctgatagtgaaattgagaccaactctgccacaagcaccatctttggtaaagcccacagcttgaagccaagcataaaggagaagctggcaggcagccccattcgtacttctgaagatgtgagccagcgagtctatctctatgagggactcctaggcaaagagcgttctactttatgggaccaaatgcaattctgggaagatgccttcttagatgctgtgatgttggagagagaagggatgggtatggaccagggtccccaggaaatgatcgacaggtacctgtcccttggagaacatgaccggaagcgcctggaagatgatgaagatcgcttgttggccacacttctgcacaacctcatctcctacatgctgctgatgaaggtaaataagaatgacatccgcaagaaggtgaggcgcctaatgggaaagtcgcacattgggcttgtgtacagccagcaaatcaatgaggtgcttgatcagctggcgaacctgaatggacgcgatctctctatctggtccagtggcagccggcacatgaagaagcagacatttgtggtacatgcagggacagatacaaacggagatatctttttcatggaggtgtgcgatgactgtgtggtgttgcgtagtaacatcggaacagtgtatgagcgctggtggtacgagaagctcatcaacatgacctactgtcccaagacgaaggtgttgtgcttgtggcgtagaaatggctctgagacccagctcaacaagttctatactaaaaagtgtcgggagctgtactactgtgtgaaggacagcatggagcgcgctgccgcccgacagcaaagcatcaaacccggacctgaattgggtggcgagttccctgtgcaggacctgaagactggtgagggtggcctgctgcaggtgaccctggaagggatcaacctcaaattcatgcacaatcagttcctgaaattaaagaagtggtgagccacaagtacaagacaccaatggcccacgaaatctgctactccgtattatgtctcttctcgtacgtggctgcagttcatagcagtgaggaagatctcagaaccccgccccggcctgtctctagctgatggagaggggctacgcagctgccccagcccagggcacgcccctggccccttgctgttcccaagtgcacgatgctgctgtgactgaggagtggatgatgctcgtgtgtcctctgcaagccccctgctgtggcttggttggttaccggttatgtgtccctctgagtgtgtcttgagcgtgtccaccttctccctctccactcccagaagaccaaactgccttcccctcagggctcaagaatgtgtacagtctgtggggccggtgtgaacccactattttgtgtccttgagacatttgtgttgtggttccttgtccttgtccctggcgttataactgtccactgcaagagtctggctctcccttctctgtgacccggcatgactgggcgcctggagcagtttcactctgtgaggagtgagggaaccctggggctcaccctctcagaggaagggcacagagaggaagggaagaattggggggcagccggagtgagtggcagcctccctgcttccttctgcattcccaagccggcagctactgcccagggcccgcagtgttggctgctgcctgccacagcctctgtgactgcagtggagcggcgaattccctgtggcctgccatgccttcggcatcagaggatggagtggtcgaggctagtggagtcccagggaccgctggctgctctgcctgagcatcagggagggggcaggaaagaccaagctgggtttgcacatctgtctgcaggctgtctctccaggcacggggtgtcaggagggagagacagcctgggtatgggcaagaaatgactgtaaatatttcagccccacattatttatagaaaatgtacagttgtgtgaatgtgaaataaatgtcctcaactccc

SEQ ID NO: 272346 - DNA, 4440 bp, Artificial Sequence
  derived and/or modified sequence
atggtgcagaagaagaagttctgcccccggctgctggactacctggtgatagtcggcgccagacatccttcatccgatagcgtcgcccagacacccgaattgttacgccgatatcctttggaagaccacacagagttcccgttgcctcctgatgtcgtttttttttgtcagccagaggggtgtctgtccgttcggcagcggagaatgagtctgagagacgatactagcttcgtgtttactcttacagacaaagacactggagtcaccagatacggcatctgtgtaaatttctaccgttcatttcagaaaagaattagtaaggagaaaggagagggaggagccggtagccgcggtaaagagggaacacacgctacttgtgcctccgaggaaggtggcaccgagtcatctgagtccggcagcagcctgcagccgctgtcagccgatagcacacccgacgtcaaccagtcccctagaggcaaaagaagggccaaagccggaagtaggtcaagaaatagcactcttacctccttgtgcgtgttgagtcactacccgtttttttccacgtttagggaatgcttatacaccctgaagagattggtggattgttgcagtgaacgattgttgggaaagaagttgggcatcccaaggggtgtccagagagacaccatgtggcgaatcttcaccgggtctctgctcgtcgaggaaaagtcgtccgccctcctacacgacctaagggaaatcgaggcctggatctatcggctgctgcggagccccgtgcccgtctcgggccaaaaacgggtggatattgaagtgctgcctcaggagctccaacccgctctgacctttgcgcttccagatccttcacgatttacgctggtggacttccccttgcacctgccactagagctgctcggggttgatgcgtgtctgcaggtcctcacatgcatactgctggagcacaaagtagtgctgcaaagtcgtgattacaatgccttgagcatgtctgtgatggcttttgttgctatgatctaccccctggaatatatgttccccgttatacccttactgcccacttgtatggcttcggctgagcagctgctgcttgcccctactccgtatatcatcggcgtgcccgccagtttcttcctgtacaaacttgactttaaaatgcctgacgacgtttggctcgtggacttggacagtaaccgcgtgatcgcccctacaaatgctgaagtccttcctatcttgccagaacccgagagtctagagctgaagaagcatttgaaacaggcactggctagtatgagtctcaacacccaacccatcctaaatctggaaaaatttcacgaggggcaagagatccctcttttgctgggtcggccgtccaacgacttacagagcacgccttccacagaattcaatccattgatctatgggaacgacgtcgactccgtagatgtagccacgcgggtggccatggtgcggttcttcaactctgcaaatgtgttgcaggggttccagatgcacacacgcactttaaggttatttcctagaccggtggttgctttccaggcagggagtttcctcgcctcacgcccgcgacagaccccctttgccgaaaagctcgcccgcacccaggccgttgaatactttggcgagtggattcttaaccctactaactatgcctttcagcggattcacaacaatatgttcgatcccgccctgattggcgacaagcctaagtggtatgcgcatcagttgcagcccatccactaccgcgtgtatgattcgaacagccagctcgcagaggcactctctgtccctccggaacgcgattctgactctgagccgacggacgatagcgggagcgatagtatggattatgatgattcctcctcttcttattcgagtcttggcgattttgtgagtgaaatgatgaagtgtgacatcaatggtgacacccccaatgtcgacccactgactcacgcagcccttggcgacgcctctgaggtggagattgacgaactgcagaaccagaaagaagcggaggagccgggcccggactctgagaattcgcaagaaaatcccccattacgctctagctcctccaccactgcctctagctccccatccacagttattcacggggccaactccgaacccgctgacagcaccgagatggacgacaaggccgcagtgggcgtgtctaaaccactgcccagtgtgccacctagcattggtaagtctaacgtggacagacgacaagctgaaataggggagggggcccagaaactgctccggcccaactccctccgccttgcctcagatagtgacgctgagagtgacagccgggctagcagccctaacagtaccgtcagcaacaccagcactgagggattcggtgggatcatgtctttcgcctccagtctctaccgaaatcactctacctcattctcattaagtaacttgactctgccaacaaagggagcaagggagaaggccacccccttcccctcactgaagggaaaccggagggctctcgtagatcagaagagttctgttattaagcacagtccaacggtcaagagggaaccacccagccctcaggggaggagtagcaacagctcagaaaaccagcagttcctcaaggaggtggtccatagtgtcctcgacgggcaaggggtcggctggctcaatatgaagaaagtacgcaggcttctagagtcagaacagctgagggttttcgtgcttagcaagctgaacaggatggtccagtccgaagacgatgcccgccaggatatcatacctgacgtggagatctctcgaaaagtctataagggaatgctcgacttgcttaagtgcacagttctttcactggaacagagctatgctcacgctgggctgggagggatggcaagcatttttggactgctggagatcgcccagactcattattactccaaagagcccgataaacgtaaaaggtcacccactgagagcgtcaatacacccgtgggaaaagatcccggcctcgccggccgaggagaccccaaggctatggcccagctgcgcgtgccgcagctgggtccaagagcaccgtcagctaccggcaaggggcccaaagaactcgatacacgttcgcttaaggaggagaatttcatcgccagcattggaccagaggtgattaaaccagtatttgatctgggggagacagaagagaaaaaatcacagatcagcgccgattctggagtaagtttgaccagctcctcacaacgtaccgaccaagatagtgtcatcggggtcagccccgcggttatgatacgatctagttcacaggattccgaagtgtcaactgtcgtgtctaattcctccggcgaaaccttgggcgcggactccgatctgtcttccaacgccggggacggacccggcggagagggctctgtgcatctggcctcatctcggggaacactcagcgacagcgagattgagactaacagcgcaacctctacaattttcggcaaggcccattctctaaaaccctctataaaagagaagctagctggcagcccaatccgcacctccgaggacgtgagccagcgagtctatctgtacgagggattgcttggtaaggaacggtctacactatgggaccagatgcaattctgggaggacgcctttctggatgccgtcatgctggaacgggagggaatgggtatggaccagggcccccaggaaatgatcgacagatacctgtcactgggcgagcacgatcgtaaacgactggaggatgatgaagaccggttactggccactctgcttcacaacctaatctcttacatgctcctgatgaaggtgaacaagaatgatatcaggaagaaagttcggcgactaatgggtaaatctcacattggactagtttattcccaacaaattaacgaggtgcttgaccagctggccaacctcaatggccgagatcttagtatctggagttccggaagccgacatatgaagaagcaaacatttgtggttcacgccggcaccgataccaacggggatatcttctttatggaggtatgtgacgactgcgtcgttttgcggagcaatatcggcacagtttatgagcgctggtggtatgagaagctgatcaacatgacctactgccccaaaaccaaagtattgtgtctgtggcgacggaatgggtcagaaactcagctaaacaagttttataccaagaagtgtcgggagctttactactgcgtgaaagacagcatggagcgggcggcagcacgccagcagagtattaaacccggtcctgaactcggaggagagttccccgtgcaggaccttaagaccggagaaggcggactgctccaggtcacactcgaaggcatcaatcttaagtttatgcacaaccaattacttaggcggcttcggtggtag

SEQ ID NO: 272347 - DNA, 4440 bp, Artificial Sequence
  derived and/or modified sequence
atggtgcagaagaagaagttctgcccccggctgctggactacctggtaatcgtgggtgctaggcacccatccagtgactcagtggctcagacccctgagctgctgcggcggtatcctctggaggatcatacagaatttccactgcctccagacgtagtattcttttgtcaacccgagggatgcctatctgtacggcagagacgcatgtctctccgagacgatacatcgttcgtgtttaccctaaccgataaagatactggcgtaacccgctatgggatctgtgttaacttctacagatcgttccaaaagagaatttctaaggagaagggcgagggcggtgccggctcaagaggaaaagaagggacccatgcaacgtgtgcaagcgaggagggtggaactgaatcctccgagagcggaagctccttgcagcctttgtccgccgatagtaccccagacgtcaatcagtcaccgcgcggcaagcgacgggccaaggccggatctcgctctcgcaactccaccctgactagtctgtgtgttctaagccactatcccttcttctctacttttcgggagtgtttatatactcttaaaaggttggttgattgctgcagcgagcggctgctgggcaagaagctaggcattccccgcggagtacagagggacacaatgtggcgtatatttacaggctcgctgcttgtggaagagaagtcaagtgctctcctgcacgatttgcgggagattgaagcttggatatatcggctgcttcggtcccccgtgcctgtgagcgggcaaaaaagggttgatattgaagtgcttccgcaggaactccaacctgcgctcacattcgctttgcctgatccatctagatttacattggtggacttccccctccacctccccttggagctgctcggggtggatgcttgtctgcaggtgctgacctgcattttacttgagcacaaggttgtgctgcagtcccgagattacaatgcattatcaatgagcgtaatggcatttgtagccatgatctatccgttagaatatatgtttcccgtcatccctctcctgcctacatgtatggccagtgccgaacaactgcttttagcgcccacaccttatataatcggcgtgccagctagtttttttctgtataaattggactttaaaatgccggacgacgtttggctggtcgatctggacagcaatagggtgatcgcaccgaccaacgccgaagtgctgccaattcttccagagcccgagagcctagagctgaagaaacaccttaagcaggcactggcctcaatgagcttaaacacacagcccatactaaacttggaaaaattccatgaggggcaagaaatccctttactacttggaagaccttctaatgatctgcaaagcaccccatccaccgaatttaacccacttatctacggaaacgatgtggacagtgtagatgtggcgacccgggttgctatggtcagattctttaatagcgcaaatgttctgcaggggttccagatgcatacccggaccttgcgattgtttcctcgccccgtagttgcttttcaagccgggagttttctggccagtagacccagacagacaccattcgccgaaaagcttgccagaactcaggcagtagaatactttggagaatggatcctcaaccctactaattacgcatttcaaagaatccacaacaatatgttcgatccggcattaattggagacaagccaaagtggtacgcacatcaacttcagcccattcattaccgggtgtacgatagtaacagccaactggcggaggccctgagcgtaccccccgaacgcgattcagattccgaacccacagatgactcaggatctgatagcatggattatgatgacagctcatcaagttacagcagtctcggcgatttcgtctcagagatgatgaaatgcgacataaacggagacacaccgaacgtggacccactgacgcatgctgcattaggtgatgcttccgaggttgagattgacgaattacagaatcagaaggaggcagaggagccagggcccgatagcgaaaacagccaggagaaccccccactccgcagttcatcatctactactgcctcatccagcccctccactgtgattcacggagcaaactccgaacccgcagactcaaccgagatggatgacaaggctgccgtgggcgtcagtaagccgctgccgagtgtgccgccgtctattggtaagagcaatgtggacaggaggcaggccgagatcggggagggggcacagaaactcctccgcccaaacagcctcagactcgccagcgactcggacgcagagtccgactctcgcgcgtcaagccccaattcaacagtgagtaatactagtacagagggattcggagggataatgagtttcgcaagttctctttaccgtaatcacagcacttccttctcactaagcaacctaacgctgcccactaagggtgccagggagaaggccacacctttcccttctctcaagggtaacagaagggctcttgttgatcagaagagtagtgtgattaagcactctccaacagtaaaacgcgaacccccttcacctcaaggaaggtcatccaatagttcggaaaaccagcagttcctgaaagaggtggtgcactctgtactggatggtcagggcgtgggttggcttaacatgaagaaggtcagacgcctcttggagagtgaacagctcagggtctttgttctgagcaaacttaacaggatggtgcagagtgaagacgatgctaggcaggatattattccagatgtggaaatttcacgtaaagtgtacaaggggatgcttgatctgctcaaatgcactgtcctgagcctcgagcagagctatgcgcatgctggcctagggggtatggctagcatcttcgggctcctcgagatagcacagacccattactacagcaaagagcccgacaaaaggaagaggtccccaaccgaaagcgtaaacaccccggtggggaaggaccctggcttggcgggaaggggtgatcccaaggctatggcccagcttcgcgtgccgcagcttggcccccgcgcgccatccgctacaggaaagggccctaaagagctagatacaagatctcttaaggaggagaacttcatagccagtattggtcctgaagtgatcaagccagtgtttgatctcggtgaaacagaagagaagaaatcacagatttctgcagatagcggagtatctctcacaagctcgtcccagcggaccgaccaggactcagtcataggggtaagccctgccgtgatgatcaggtcctcctctcaggactccgaggtaagcaccgtggtgtctaattcctcgggggagactttgggagctgatagcgacctgtccagtaacgccggtgatggtcccggcggagaagggtcagtgcatctcgcctcttcgcgcggaaccctatcagatagcgaaattgagactaattctgccacctctaccatctttggtaaggcacactccctcaaaccatccataaaggaaaagctcgctggcagccccatccggacatctgaggacgtcagtcaacgggtttacctgtatgagggtctcctcggaaaagagcgttccaccctgtgggatcagatgcaattctgggaggatgctttcctcgacgcagtgatgctcgagcgagaagggatgggcatggatcagggcccgcaggaaatgatcgatagatacctgtcgctgggtgagcatgatcgcaagcggcttgaggatgacgaggaccggcttcttgctactctgctgcacaaccttatctcctatatgctgctgatgaaggtcaacaaaaatgatatacgtaaaaaagtacggcggctaatgggcaagagtcacatcggtttagtctattcacagcaaattaacgaagtcttggatcagttagcaaacctcaacgggcgggatctgtccatatggtcaagcggctctaggcacatgaaaaagcagaccttcgtggtgcatgctggaactgacacgaatggagacatctttttcatggaagtctgcgatgactgtgtggtgctgcggagtaatattggtacagtttatgaacgctggtggtacgaaaaactgattaacatgacttattgcccaaaaaccaaggttttgtgcctctggcgccgcaatgggagtgagactcagttgaacaaattttacacaaagaagtgcagagaactgtactattgtgtcaaggactcaatggagcgggctgccgcaagacagcagtccatcaaacccgggcccgagcttggaggcgaattccctgtgcaggatttgaaaaccggggaaggtgggctcctccaggtgaccctcgagggcataaacctgaaattcatgcacaatcagttccttaagctgaagaagtggtag

SEQ ID NO: 272348 - DNA, 4440 bp, Artificial Sequence
  derived and/or modified sequence
atggtgcagaagaaaaagttttgcccaaggctgttagactatctggtcatcgtgggcgcacgccatcctagtagcgacagtgtcgcccaaactcctgaactacttcgacggtatcccctggaagaccacaccgagtttccactgccccctgacgttgtattcttttgccagccagagggatgtttatccgtccgacagagacgcatgagtctgagggacgacacatcgttcgtttttactctcaccgataaagataccggcgtgacgaggtatggtatttgtgtgaacttttatcgctctttccagaagcgaatcagcaaggagaaaggagaaggcggagctgggtctcgcggaaaggaagggactcatgccacttgtgcctcagaggagggcggaacggagtctagtgaaagtggatcttcattgcagcctctgtcagcagacagcacaccagatgtgaaccaatctccccgtggcaagaggcgcgcaaaggccggtagtcggtcccggaacagtacactgacatcgctgtgtgtcctcagtcactatccgttcttttctacatttagagagtgtctatatacactgaaaaggctcgtggattgctgtagcgaacggcttctaggtaaaaaactcggaattccacggggagtacagagagacaccatgtggaggatcttcaccggatccctgctcgtggaggagaagtcctctgcgctgctccatgatctgcgggaaatcgaagcgtggatctaccgcttgctgaggtccccagtgccagtgtcgggccagaagagggtcgatatcgaagttctccctcaagagctgcaaccggcattgacgttcgccctccccgacccgtctaggtttaccttggtcgactttcccttacatcttccactggaactcctgggcgtggatgcttgtctgcaagtcctgacgtgcatactgctggaacataaggttgtactgcagtcgcgcgattataacgccctttctatgtctgtaatggcttttgtcgctatgatctatcccctggagtacatgttcccagttataccattgctgccgacttgtatggcatctgctgagcagctattgctggcaccgaccccgtatatcatcggcgtccccgctagctttttcctatataagcttgattttaagatgccagatgacgtgtggctggtggatttagactctaaccgtgttatagcacctaccaatgctgaggtgctgcccattctcccggagcccgagagcctggaactcaaaaaacacctgaagcaggctctcgcatcaatgtcccttaacactcagcctatcctgaacctggaaaaattccacgaggggcaggaaatccctctgcttctgggcagaccatctaatgatttacagtctactcccagtactgagttcaacccccttatttatggtaacgacgtagatagcgtcgacgtggcgacaagggttgcgatggtgcgtttcttcaactctgcgaacgtcttacagggcttccagatgcatacccgcacactgcgactctttcctaggccagtggtagcatttcaagctgggtccttccttgcttcccggccacgacaaacaccgttcgctgagaagcttgcaagaacacaggccgttgaatatttcggggagtggattctcaaccccactaattatgcatttcagagaatccacaataacatgttcgatcctgcgctaattggagacaaaccaaaatggtacgcccatcagctgcagccaattcattaccgagtgtatgacagtaatagtcaactggccgaagctctgagcgtcccacctgagcgagactcagattccgagccaaccgatgactccggtagcgacagcatggactacgacgacagctccagtagttattcgtcgcttggggactttgtttcagagatgatgaaatgcgacataaatggggacacccctaatgtggatccccttacccacgcagcactgggagatgcaagcgaggtggaaatcgacgaacttcagaatcagaaggaagcggaagagccaggccctgactccgagaacagtcaagagaatccacccctgcgctccagtagttctacaactgcttcatcaagtccatccactgtgattcatggagctaactcagaacctgcagatagcaccgaaatggatgataaggcagccgtcggcgtgtctaagcccctgccctctgtgcctccgagcattggaaaatcaaatgtggacaggcggcaggctgagataggagaaggcgcacagaaactgctgagacccaattcacttcggcttgcctctgacagcgatgcagagtcagattccagggcaagctctcctaattcaactgtgagcaatacaagtacagagggtttcggaggcattatgagctttgctagcagcctgtacaggaaccactctacatcattctccttatctaacctgaccctgcccacgaagggagcacgagaaaaggccacgccattccctagcttgaaaggcaaccgacgcgctcttgtggaccagaagtctagcgtgatcaaacattctcccaccgttaagcgggaaccgccaagcccccagggccgaagcagcaattcttcagaaaatcagcaattcctgaaagaagttgtgcatagcgtgctggacgggcagggagtcgggtggctgaacatgaagaaggttcgccgtctgctcgaaagtgaacagctgcgcgtgtttgtgctctctaagttgaacaggatggttcagtccgaagacgacgcacgacaggacattattcctgatgtcgagatttcgcggaaggtttataaagggatgctggatctgctcaaatgtacagtcctctccctggagcagagctacgcccacgctggactgggcggaatggcaagtatttttggcctgctggaaatcgcccaaacacattactatagcaaagagcccgacaagcggaaacgaagcccaaccgagtctgtaaatacacccgtcggtaaggacccaggccttgccggtcgtggtgaccccaaggctatggctcagctgagggtaccacaactgggcccacgggcaccctctgcaaccggcaagggacccaaggaactagatacacgctcgctgaaggaggagaacttcatcgcctccattggccctgaagttataaagccggtgttcgatctcggggagacagaagaaaagaagagccagatttccgcggacagtggggttagcctgacgtcctccagtcagcgcacagatcaggattcggtaatcggagtcagtcctgcagtgatgatccgttcgagcagccaggactctgaggtgagcacagttgtgtctaactcctccggcgagactctgggtgcagattccgaccttagcagcaatgccggagatggaccaggaggcgaaggcagtgtccacctggccagttccagagggacgctgtctgactcagagatcgagacaaactcggcaacaagcaccatcttcggtaaggcccattcccttaaacccagcatcaaagagaaacttgcaggtagtcctatccgtacctcagaggatgtatcccaaagagtctacctctatgagggcctattaggtaaggaacgttcaaccctgtgggaccagatgcaattctgggaagatgccttcctggacgcagtgatgctcgaaagggaggggatgggcatggaccagggccctcaggagatgattgacaggtacctgtctctaggtgagcatgaccggaagcggctggaggacgatgaagatcgcttgctcgccacacttctgcacaatttgatctcctacatgttgttgatgaaagtcaataagaatgatatccggaagaaggtccgtcggctgatggggaaaagccacatcgggctggtttactcccagcagataaacgaggtcctggatcagcttgccaacctcaatggcagagatctgtccatttggtcatcaggctcccgtcatatgaagaagcagacgttcgttgtccacgctgggaccgatactaacggggatatattcttcatggaggtctgtgatgactgcgtggttctacgctctaatattggtaccgtgtatgagcggtggtggtatgaaaagctgattaatatgacatactgtccaaagactaaagtcctgtgtctgtggaggcgcaatgggtcagagacccagctcaataaattttacactaagaagtgccgggaactttactattgcgtcaaagatagcatggaacgagccgctgctaggcagcagtctattaaacccggtcctgaactgggaggcgagtttccagtgcaggacctcaagaccggtgagggcggactgctgcaagtgaccttggagggcattaacctgaaatttatgcacaaccaactacttcgacggctgcgttggtag

SEQ ID NO: 272349 - DNA, 4440 bp, Artificial Sequence
  derived and/or modified sequence
atggtgcagaagaaaaaattctgcccgcgacttctcgattatctcgtgattgtgggagcacgccaccccagttccgactcggttgcgcagacaccagagttattgagacgatacccattggaggatcacacagagttccctcttccccctgacgttgtgttcttttgccaacctgaaggttgcctgtctgtgcggcagaggcgtatgtcgcttcgcgacgacacatccttcgtgtttactctgaccgacaaagacactggcgtgacccgctacggcatctgtgtgaacttttacagaagttttcaaaagcggatcagcaaggaaaagggagagggaggagctggtagcagaggaaaagaggggacacatgcgacctgcgcctccgaggaagggggaaccgagtcatctgagagtggatccagcctgcaacccctgagtgctgattcaactcccgacgtgaatcaaagcccccgtggaaaacgccgtgccaaggctgggtcacgctctcggaacagcactctcacttcattgtgcgtgctgtcacattacccgttctttagcacattccgggaatgcctttacactttaaaaaggttggttgattgttgcagcgagaggctgttaggaaagaaattggggatccctcggggtgtgcagcgggacaccatgtggaggattttcaccggctctttgctcgtggaggaaaagagctcagcccttctgcatgacctgcgagaaatcgaagcatggatttacagattacttagatcaccggtgcctgtgtccgggcagaagcgtgtggacattgaagttctgcctcaggaattgcagccagctctcacattcgcacttcccgacccatcacgtttcactctcgtagacttcccgctacatctgccgttggagctgctgggggtggacgcatgcctccaggtgcttacatgcattctgttggaacacaaagtggtcctccaatctagggactacaacgccctctcaatgagtgtcatggcttttgtggccatgatttatcccctggaatatatgtttccggtgattccgcttctgcccacttgcatggcctcggcagagcagttactgctggcaccaaccccctacattatcggggttcccgctagtttctttctgtataaattggacttcaaaatgcccgatgatgtgtggctagtggacctagactctaacagagtgatcgccccaacgaacgccgaagtgctgcccatcctcccagagccagagagtctagagttgaagaagcatctcaagcaagccctggcaagcatgtccttgaatacacagcctattctcaatctcgagaaattccatgagggccaggaaattcctctgctgttgggaagaccaagcaacgaccttcagtcaaccccttctactgaattcaacccattaatatacggaaacgatgtggacagcgtcgacgtcgcaacgcgcgtggcaatggtgagatttttcaatagcgccaacgtgttgcaggggtttcagatgcacaccagaactttgaggctgttccccagacccgtggttgcattccaggctggctcgtttctggcttccaggccccgacagacacccttcgctgaaaaactagccagaactcaggctgtcgagtatttcggtgaatggatcttgaatcctacaaactatgcctttcagagaatccacaacaacatgtttgatccagcattgatcggggataagcctaaatggtacgctcaccagctccaacccattcattacagagtttacgacagcaacagtcagctcgcggaggcactgagtgtgccaccagagcgagacagtgacagtgaaccaacagacgattcaggcagtgacagcatggattatgatgattcaagttcctcctatagttccctgggggacttcgtgtcagagatgatgaagtgtgacatcaatggcgatacccctaatgtcgacccgctgacccatgctgctctcggagacgctagcgaagtcgagatagatgaactgcaaaaccagaaggaagctgaagagcctgggcctgactcagaaaatagccaagaaaacccaccactgcgctcctccagctcgacaaccgcgagttcctcaccatcaacggtcatacacggggcaaattcagaacctgccgatagcacagagatggacgataaagccgcagtgggcgtatccaaacccctgccttccgtcccgccttctataggaaagtcaaacgtggatcgccgacaggcagagataggcgagggcgctcagaagctgctgaggccaaactctctgagactggccagtgacagtgacgccgaatcagactccagagcttcatcgccaaacagcactgtgtcgaatactagcaccgagggatttggagggattatgtcatttgcctcatcactctaccggaaccactcaacgtctttcagtctctccaatctgacacttcctacaaaaggcgctcgtgaaaaagccactccattcccctccttgaaaggtaatcggagggctttggtggatcaaaagagcagtgtgatcaaacattccccaactgtcaagcgcgaacctcccagcccacagggcagaagcagcaattcatctgagaatcagcagtttctcaaggaagtggtgcactcagtgcttgacgggcagggggttggatggttgaacatgaagaaggtccgcaggttactcgagtccgagcagctgcgcgtttttgtcctgtcgaagctaaatagaatggtgcagtccgaagatgacgcgaggcaggatattatccctgacgtcgaaatctcacgcaaggtgtacaagggcatgcttgacctcctaaaatgcacagtcctgtctctggagcagtcgtatgcccatgccggtctggggggaatggcaagcatcttcgggctcttagagatcgctcaaacacactactatagtaaggagccagacaagaggaaaaggtcgccgactgaatctgtgaatactccagttggtaaggatcctgggttagccggaaggggcgatcctaaggctatggcccagctccgagtgccgcagcttgggccacgcgctcccagtgccaccggaaaaggacctaaggagttagacacgcggtcactgaaggaggagaactttatagcttcaattggtcccgaggtcataaaacctgtgttcgatcttggcgagactgaggagaaaaagagtcagatttccgccgactccggagtatcacttacatccagttcccaacgcaccgaccaggacagcgtgatcggagtgtccccagccgtgatgatcagatctagttcccaagactcggaagttagcaccgtcgtctcaaacagcagcggcgagaccctaggtgccgacagtgatctctcaagtaacgcgggagacgggcctggcggtgagggaagcgtgcatctggcaagctcccgtgggacactcagcgactccgagatcgagacaaattctgctacctccactatcttcggaaaggcgcatagcctgaaaccatcaattaaggagaagctggccggaagtcctatcaggacatcagaagatgtctcccaacgcgtgtatctgtacgaagggctgctgggaaaggagagatcgaccctctgggatcagatgcagttttgggaggatgcctttttggatgccgtgatgctcgagcgtgaaggtatgggaatggatcaaggccctcaggagatgatcgatcgctacctgtctctgggcgagcacgataggaaacgcctcgaagatgacgaggaccgcctcttggctactctgttgcacaacctgatcagctatatgctgttgatgaaagttaacaaaaacgatatccgcaagaaagttagacgactcatgggtaaaagccacatcggcctcgtgtacagccagcagatcaacgaagtactcgaccaactagcgaatttgaatgggagagacctttctatatggagctccggatctaggcacatgaagaaacaaacattcgtggtgcatgccggtacagatactaacggagacatcttcttcatggaagtatgcgacgactgcgtggtactcagaagcaatattgggacagtgtacgagcgatggtggtacgaaaaactgatcaacatgacctattgccccaagaccaaagtgctgtgcctgtggcggagaaacgggagcgagacacaactcaacaagttctacacaaagaagtgccgcgagctgtattactgtgttaaggatagcatggagagagcagcggctcgccagcagtctattaagcctggccctgaactaggtggagagttcccggtgcaggatttgaagaccggcgaaggcggtctcttacaggtgaccctcgaaggcatcaatctgaaattcatgcacaatcagttcctgaaactcaagaaatggtag

SEQ ID NO: 272350 - DNA, 4440 bp, Artificial Sequence
  derived and/or modified sequence
atggtgcagaagaagaagttctgccccagactgctggactacctggtgatcgtgggcgccagacaccccagcagcgacagcgtggcccagacccccgagctgctgagaagataccccctggaggaccacaccgagttccccctgccccccgacgtggtgttcttctgccagcccgagggctgcctgagcgtgagacagagaagaatgagcctgagagacgacaccagcttcgtgttcaccctgaccgacaaggacaccggcgtgaccagatacggcatctgcgtgaacttctacagaagcttccagaagagaatcagcaaggagaagggcgagggcggcgccggcagcagaggcaaggagggcacccacgccacctgcgccagcgaggagggcggcaccgagagcagcgagagcggcagcagcctgcagcccctgagcgccgacagcacccccgacgtgaaccagagccccagaggcaagagaagagccaaggccggcagcagaagcagaaacagcaccctgaccagcctgtgcgtgctgagccactaccccttcttcagcaccttcagagagtgcctgtacaccctgaagagactggtggactgctgcagcgagagactgctgggcaagaagctgggcatccccagaggcgtgcagagagacaccatgtggagaatcttcaccggcagcctgctggtggaggagaagagcagcgccctgctgcacgacctgagagagatcgaggcctggatctacagactgctgagaagccccgtgcccgtgagcggccagaagagagtggacatcgaggtgctgccccaggagctgcagcccgccctgaccttcgccctgcccgaccccagcagattcaccctggtggacttccccctgcacctgcccctggagctgctgggcgtggacgcctgcctgcaggtgctgacctgcatcctgctggagcacaaggtggtgctgcagagcagagactacaacgccctgagcatgagcgtgatggccttcgtggccatgatctaccccctggagtacatgttccccgtgatccccctgctgcccacctgcatggccagcgccgagcagctgctgctggcccccaccccctacatcatcggcgtgcccgccagcttcttcctgtacaagctggacttcaagatgcccgacgacgtgtggctggtggacctggacagcaacagagtgatcgcccccaccaacgccgaggtgctgcccatcctgcccgagcccgagagcctggagctgaagaagcacctgaagcaggccctggccagcatgagcctgaacacccagcccatcctgaacctggagaagttccacgagggccaggagatccccctgctgctgggcagacccagcaacgacctgcagagcacccccagcaccgagttcaaccccctgatctacggcaacgacgtggacagcgtggacgtggccaccagagtggccatggtgagattcttcaacagcgccaacgtgctgcagggcttccagatgcacaccagaaccctgagactgttccccagacccgtggtggccttccaggccggcagcttcctggccagcagacccagacagacccccttcgccgagaagctggccagaacccaggccgtggagtacttcggcgagtggatcctgaaccccaccaactacgccttccagagaatccacaacaacatgttcgaccccgccctgatcggcgacaagcccaagtggtacgcccaccagctgcagcccatccactacagagtgtacgacagcaacagccagctggccgaggccctgagcgtgccccccgagagagacagcgacagcgagcccaccgacgacagcggcagcgacagcatggactacgacgacagcagcagcagctacagcagcctgggcgacttcgtgagcgagatgatgaagtgcgacatcaacggcgacacccccaacgtggaccccctgacccacgccgccctgggcgacgccagcgaggtggagatcgacgagctgcagaaccagaaggaggccgaggagcccggccccgacagcgagaacagccaggagaacccccccctgagaagcagcagcagcaccaccgccagcagcagccccagcaccgtgatccacggcgccaacagcgagcccgccgacagcaccgagatggacgacaaggccgccgtgggcgtgagcaagcccctgcccagcgtgccccccagcatcggcaagagcaacgtggacagaagacaggccgagatcggcgagggcgcccagaagctgctgagacccaacagcctgagactggccagcgacagcgacgccgagagcgacagcagagccagcagccccaacagcaccgtgagcaacaccagcaccgagggcttcggcggcatcatgagcttcgccagcagcctgtacagaaaccacagcaccagcttcagcctgagcaacctgaccctgcccaccaagggcgccagagagaaggccacccccttccccagcctgaagggcaacagaagagccctggtggaccagaagagcagcgtgatcaagcacagccccaccgtgaagagagagccccccagcccccagggcagaagcagcaacagcagcgagaaccagcagttcctgaaggaggtggtgcacagcgtgctggacggccagggcgtgggctggctgaacatgaagaaggtgagaagactgctggagagcgagcagctgagagtgttcgtgctgagcaagctgaacagaatggtgcagagcgaggacgacgccagacaggacatcatccccgacgtggagatcagcagaaaggtgtacaagggcatgctggacctgctgaagtgcaccgtgctgagcctggagcagagctacgcccacgccggcctgggcggcatggccagcatcttcggcctgctggagatcgcccagacccactactacagcaaggagcccgacaagagaaagagaagccccaccgagagcgtgaacacccccgtgggcaaggaccccggcctggccggcagaggcgaccccaaggccatggcccagctgagagtgccccagctgggccccagagcccccagcgccaccggcaagggccccaaggagctggacaccagaagcctgaaggaggagaacttcatcgccagcatcggccccgaggtgatcaagcccgtgttcgacctgggcgagaccgaggagaagaagagccagatcagcgccgacagcggcgtgagcctgaccagcagcagccagagaaccgaccaggacagcgtgatcggcgtgagccccgccgtgatgatcagaagcagcagccaggacagcgaggtgagcaccgtggtgagcaacagcagcggcgagaccctgggcgccgacagcgacctgagcagcaacgccggcgacggccccggcggcgagggcagcgtgcacctggccagcagcagaggcaccctgagcgacagcgagatcgagaccaacagcgccaccagcaccatcttcggcaaggcccacagcctgaagcccagcatcaaggagaagctggccggcagccccatcagaaccagcgaggacgtgagccagagagtgtacctgtacgagggcctgctgggcaaggagagaagcaccctgtgggaccagatgcagttctgggaggacgccttcctggacgccgtgatgctggagagagagggcatgggcatggaccagggcccccaggagatgatcgacagatacctgagcctgggcgagcacgacagaaagagactggaggacgacgaggacagactgctggccaccctgctgcacaacctgatcagctacatgctgctgatgaaggtgaacaagaacgacatcagaaagaaggtgagaagactgatgggcaagagccacatcggcctggtgtacagccagcagatcaacgaggtgctggaccagctggccaacctgaacggcagagacctgagcatctggagcagcggcagcagacacatgaagaagcagaccttcgtggtgcacgccggcaccgacaccaacggcgacatcttcttcatggaggtgtgcgacgactgcgtggtgctgagaagcaacatcggcaccgtgtacgagagatggtggtacgagaagctgatcaacatgacctactgccccaagaccaaggtgctgtgcctgtggagaagaaacggcagcgagacccagctgaacaagttctacaccaagaagtgcagagagctgtactactgcgtgaaggacagcatggagagagccgccgccagacagcagagcatcaagcccggccccgagctgggcggcgagttccccgtgcaggacctgaagaccggcgagggcggcctgctgcaggtgaccctggagggcatcaacctgaagttcatgcacaaccagctgctgagaagactgagatggtag

SEQ ID NO: 272351 - DNA, 4440 bp, Artificial Sequence
  derived and/or modified sequence
atggtgcagaagaagaagttctgccccagactgctggactacctggtgatcgtgggcgccagacaccccagcagcgacagcgtggcccagacccccgagctgctgagaagataccccctggaggaccacaccgagttccccctgccccccgacgtggtgttcttctgccagcccgagggctgcctgagcgtgagacagagaagaatgagcctgagagacgacaccagcttcgtgttcaccctgaccgacaaggacaccggcgtgaccagatacggcatctgcgtgaacttctacagaagcttccagaagagaatcagcaaggagaagggcgagggcggcgccggcagcagaggcaaggagggcacccacgccacctgcgccagcgaggagggcggcaccgagagcagcgagagcggcagcagcctgcagcccctgagcgccgacagcacccccgacgtgaaccagagccccagaggcaagagaagagccaaggccggcagcagaagcagaaacagcaccctgaccagcctgtgcgtgctgagccactaccccttcttcagcaccttcagagagtgcctgtacaccctgaagagactggtggactgctgcagcgagagactgctgggcaagaagctgggcatccccagaggcgtgcagagagacaccatgtggagaatcttcaccggcagcctgctggtggaggagaagagcagcgccctgctgcacgacctgagagagatcgaggcctggatctacagactgctgagaagccccgtgcccgtgagcggccagaagagagtggacatcgaggtgctgccccaggagctgcagcccgccctgaccttcgccctgcccgaccccagcagattcaccctggtggacttccccctgcacctgcccctggagctgctgggcgtggacgcctgcctgcaggtgctgacctgcatcctgctggagcacaaggtggtgctgcagagcagagactacaacgccctgagcatgagcgtgatggccttcgtggccatgatctaccccctggagtacatgttccccgtgatccccctgctgcccacctgcatggccagcgccgagcagctgctgctggcccccaccccctacatcatcggcgtgcccgccagcttcttcctgtacaagctggacttcaagatgcccgacgacgtgtggctggtggacctggacagcaacagagtgatcgcccccaccaacgccgaggtgctgcccatcctgcccgagcccgagagcctggagctgaagaagcacctgaagcaggccctggccagcatgagcctgaacacccagcccatcctgaacctggagaagttccacgagggccaggagatccccctgctgctgggcagacccagcaacgacctgcagagcacccccagcaccgagttcaaccccctgatctacggcaacgacgtggacagcgtggacgtggccaccagagtggccatggtgagattcttcaacagcgccaacgtgctgcagggcttccagatgcacaccagaaccctgagactgttccccagacccgtggtggccttccaggccggcagcttcctggccagcagacccagacagacccccttcgccgagaagctggccagaacccaggccgtggagtacttcggcgagtggatcctgaaccccaccaactacgccttccagagaatccacaacaacatgttcgaccccgccctgatcggcgacaagcccaagtggtacgcccaccagctgcagcccatccactacagagtgtacgacagcaacagccagctggccgaggccctgagcgtgccccccgagagagacagcgacagcgagcccaccgacgacagcggcagcgacagcatggactacgacgacagcagcagcagctacagcagcctgggcgacttcgtgagcgagatgatgaagtgcgacatcaacggcgacacccccaacgtggaccccctgacccacgccgccctgggcgacgccagcgaggtggagatcgacgagctgcagaaccagaaggaggccgaggagcccggccccgacagcgagaacagccaggagaacccccccctgagaagcagcagcagcaccaccgccagcagcagccccagcaccgtgatccacggcgccaacagcgagcccgccgacagcaccgagatggacgacaaggccgccgtgggcgtgagcaagcccctgcccagcgtgccccccagcatcggcaagagcaacgtggacagaagacaggccgagatcggcgagggcgcccagaagctgctgagacccaacagcctgagactggccagcgacagcgacgccgagagcgacagcagagccagcagccccaacagcaccgtgagcaacaccagcaccgagggcttcggcggcatcatgagcttcgccagcagcctgtacagaaaccacagcaccagcttcagcctgagcaacctgaccctgcccaccaagggcgccagagagaaggccacccccttccccagcctgaagggcaacagaagagccctggtggaccagaagagcagcgtgatcaagcacagccccaccgtgaagagagagccccccagcccccagggcagaagcagcaacagcagcgagaaccagcagttcctgaaggaggtggtgcacagcgtgctggacggccagggcgtgggctggctgaacatgaagaaggtgagaagactgctggagagcgagcagctgagagtgttcgtgctgagcaagctgaacagaatggtgcagagcgaggacgacgccagacaggacatcatccccgacgtggagatcagcagaaaggtgtacaagggcatgctggacctgctgaagtgcaccgtgctgagcctggagcagagctacgcccacgccggcctgggcggcatggccagcatcttcggcctgctggagatcgcccagacccactactacagcaaggagcccgacaagagaaagagaagccccaccgagagcgtgaacacccccgtgggcaaggaccccggcctggccggcagaggcgaccccaaggccatggcccagctgagagtgccccagctgggccccagagcccccagcgccaccggcaagggccccaaggagctggacaccagaagcctgaaggaggagaacttcatcgccagcatcggccccgaggtgatcaagcccgtgttcgacctgggcgagaccgaggagaagaagagccagatcagcgccgacagcggcgtgagcctgaccagcagcagccagagaaccgaccaggacagcgtgatcggcgtgagccccgccgtgatgatcagaagcagcagccaggacagcgaggtgagcaccgtggtgagcaacagcagcggcgagaccctgggcgccgacagcgacctgagcagcaacgccggcgacggccccggcggcgagggcagcgtgcacctggccagcagcagaggcaccctgagcgacagcgagatcgagaccaacagcgccaccagcaccatcttcggcaaggcccacagcctgaagcccagcatcaaggagaagctggccggcagccccatcagaaccagcgaggacgtgagccagagagtgtacctgtacgagggcctgctgggcaaggagagaagcaccctgtgggaccagatgcagttctgggaggacgccttcctggacgccgtgatgctggagagagagggcatgggcatggaccagggcccccaggagatgatcgacagatacctgagcctgggcgagcacgacagaaagagactggaggacgacgaggacagactgctggccaccctgctgcacaacctgatcagctacatgctgctgatgaaggtgaacaagaacgacatcagaaagaaggtgagaagactgatgggcaagagccacatcggcctggtgtacagccagcagatcaacgaggtgctggaccagctggccaacctgaacggcagagacctgagcatctggagcagcggcagcagacacatgaagaagcagaccttcgtggtgcacgccggcaccgacaccaacggcgacatcttcttcatggaggtgtgcgacgactgcgtggtgctgagaagcaacatcggcaccgtgtacgagagatggtggtacgagaagctgatcaacatgacctactgccccaagaccaaggtgctgtgcctgtggagaagaaacggcagcgagacccagctgaacaagttctacaccaagaagtgcagagagctgtactactgcgtgaaggacagcatggagagagccgccgccagacagcagagcatcaagcccggccccgagctgggcggcgagttccccgtgcaggacctgaagaccggcgagggcggcctgctgcaggtgaccctggagggcatcaacctgaagttcatgcacaaccagttcctgaagctgaagaagtggtag

SEQ ID NO: 272352 - protein, 516 aa, Artificial Sequence
  derived and/or modified sequence
MELLKLNRSVQGTGPGPGASLCRPGAPLLNSSSVGNLSCEPPRIRGAGTRELELAIRITLYAVIFLMSVGGNMLIIVVLGLSRRLRTVTNAFLLSLAVSDLLLAVACMPFTLLPNLMGTFIFGTVICKAVSYLMGVSVSVSTLSLVAIALERYSAICRPLQARVWQTRSHAARVIVATWLLSGLLMVPYPVYTVVQPVGPRVLQCVHRWPSARVRQTWSVLLLLLLFFIPGVVMAVAYGLISRELYLGLRFDGDSDSDSQSRVRNQGGLPGGAGPREQNLGEAELWRATGPAGVGGTEMKVRVRRKLEMELSWERRSGGDWAGDWGDSPFSLTAHPLCSGAVHQNGRCRPETGAVGEDSDGCYVQLPRSRPALELTALTAPGPGSGSRPTQAKLLAKKRVVRMLLVIVVLFFLCWLPVYSANTWRAFDGPGAHRALSGAPISFIHLLSYASACVNPLVYCFMHRRFRQACLETCARCCPRPPRARPRALPDEDPPTPSIASLSRLSYTTISTLGPG

SEQ ID NO: 272353 - DNA, 1551 bp, Artificial Sequence
  derived and/or modified sequence
atggagctgctgaaactcaataggtccgtccaggggacaggcccaggtcccggagcctccctgtgtaggcccggtgcccctctgttgaactcgtctagtgtagggaatctgagttgtgagcccccccgtatcagaggcgccggaacaagagaactcgagttggctatacgaattaccctttatgccgtaatttttctgatgagcgtggggggtaatatgctgatcattgtcgtactggggctctcaagacggctccggaccgtcactaatgcattcttgctgtcgctcgctgtgagcgaccttcttctggcggtagcgtgcatgcctttcaccctgctgccaaacctgatggggactttcattttcggcacagttatttgcaaggccgtgtcttatctcatgggcgtctccgtctcggtctccacgcttagtctggtcgccattgccctggagcggtatagcgccatatgccggcccctgcaggccagggtttggcagacaaggtctcacgccgccagggttattgtagctacctggcttctatccggacttctgatggtcccttatcctgtgtatacggtggtccagcccgttggcccaagggtgctacaatgtgtgcaccgatggcctagcgcccgcgtgcggcaaacctggagcgtgctactgctcctgttgcttttcttcattcccggggtagtgatggctgtcgcctatggcctcatttctagagaattgtacctcggcctccggttcgacggagactctgatagtgatagtcagtccagggtgaggaaccagggcgggttgcctgggggagccggccctcgcgagcagaatttgggcgaagccgaactgtggcgtgctacggggcccgctggcgtaggcggaactgagatgaaggtacgggtaagacggaagttagagatggaactgtcttgggagaggcggtcggggggagattgggctggggattggggcgactcccccttcagcctgacagcacatcccctgtgcagcggggccgtgcatcagaacggccggtgtagaccggaaactggcgccgttggcgaagattccgatggatgctacgtgcaactgcccagatccaggcccgccctggagctcactgccctcacggcccccggtccgggcagtggatccaggcccactcaggcgaaattactggctaaaaagagggttgtgcggatgctccttgtgattgtagtgcttttctttctgtgttggttgcctgtctacagtgctaatacgtggagggcgtttgatggccctggagctcaccgtgccctgtctggcgctcccatttcatttatacacctgctgtcatatgcatcggcctgcgtcaacccccttgtgtactgctttatgcacaggcgttttaggcaagcatgcttggagacctgtgcacgatgttgcccaaggcctcctcgcgcccggcctagagcactccctgatgaggatccccctactccatcaatcgccagccttagtcgactgagttatacgactatttcaacattagggcccggatag

SEQ ID NO: 272354 - DNA, 1551 bp, Artificial Sequence
  derived and/or modified sequence
atggagctgctgaagctgaacagatctgtgcagggcactggacctggccctggggccagcctgtgcaggcctggggcccccctgctgaacagcagctctgtgggcaacctgagctgtgagcccccacgcatcagaggagctggcacccgggagctggagctggccatccgcatcaccctgtatgctgtgatcttcctgatgtctgtgggcggcaacatgctgatcatcgtggtgctgggcctgagccggcggctgaggacagtgaccaatgccttcctgctgagcctggccgtgtctgacctgctgctggccgtggcctgcatgcccttcaccctgctgcccaacctgatgggcaccttcatcttcggcaccgtcatctgcaaggctgtgtcctacctgatgggcgtgtctgtgtctgtgtccaccctgagcctggtggccatcgccctggagcgctacagcgccatctgccggcccctgcaggcccgggtgtggcagaccaggagccatgctgcccgggtgattgtggccacctggctgctgagcggcctgctgatggtgccctaccctgtgtacacagtggtgcagcctgtgggcccccgggtgctgcagtgtgtgcaccgctggcccagcgcccgggtgcggcagacctggagcgtgctgctgctgctgctgctcttcttcatccctggggtggtgatggctgtggcctacggcctcatcagccgggagctgtacctgggcctgcgctttgatggagacagcgacagcgacagccagagccgggtgaggaaccagggcggcctgcccggcggggccggcccccgggagcagaacctgggggaggccgagctgtggagggccactggacctgctggggtgggcggcacagagatgaaggtgcgggtgcggaggaagctggagatggagctgtcctgggagaggagaagtggaggagactgggccggggactggggagacagccccttcagcctgacagcccaccccctgtgcagcggggctgtgcaccagaatggccgctgcaggcctgagaccggggctgtgggagaagattctgatggctgctacgtgcagctgcccaggagcaggcctgccctggagctgacagccctgacagcccctggccctggcagcggcagccggcccacccaggccaagctgctggccaagaagagggtggtgaggatgctgctggtgattgtggtgctcttcttcctgtgctggctgcctgtgtacagcgccaacacctggagggcctttgatggccctggggcccaccgggccctgagcggggcccccatctccttcatccacctgctgtcctatgccagcgcctgtgtgaaccccctggtgtactgcttcatgcaccggcgcttccggcaggcctgcctggagacctgtgcccgctgctgccccaggcctccccgggcccggccccgggccctgcctgatgaggacccccccacccccagcatcgccagcctgagccggctgagctacaccaccatcagcaccctgggccctggatag

SEQ ID NO: 272355 - DNA, 1551 bp, Artificial Sequence
  derived and/or modified sequence
atggagctgctgaagctgaaccggagcgtgcagggcaccggccccggacctggtgcaagtctgtgcaggccaggcgctcctcttttgaattccagtagcgtgggcaacctgagctgtgagccaccacggattcggggagccgggactcgtgaactcgagttagcaatcagaattacgctctacgccgtgatcttcctgatgtctgtgggtggcaacatgctgattatcgtagtgctcggcctctcccgacggctgcgcactgtcacaaatgctttcctgttgtctctggccgtgtccgacctcctcctggcagtggcttgcatgccattcacacttctacctaatttaatgggcacttttatcttcggaaccgtcatttgtaaggccgttagctatttgatgggggtgtccgtgagcgtctccacactatcactggtcgccatcgcccttgagcgctactcagcgatctgtcgtcctcttcaggccagagtttggcagacccgatcccacgcagctagggtgatcgtcgcaacctggttgctgagcggccttcttatggtgccctatccggtgtacacggtggtgcaaccagtggggccccgtgtacttcagtgcgtgcatcgatggccctccgcgagagtacgacagacatggagtgttctactcctactattattattttttattcccggagtggtgatggccgtggcatacgggttgatcagccgcgagctgtacctgggcctcagatttgacggcgactctgactctgactcccagtcccgtgtgcggaatcaaggcgggctccctggcggcgctggtcctagggaacagaacctgggagaggccgaattatggagagcaaccgggcccgccggtgtgggcgggactgaaatgaaggttcgcgtgagaaggaagcttgagatggagctcagctgggagaggaggagcggcggtgattgggccggagactggggagacagccctttttcgcttaccgcgcatcccctatgttccggagcagtccatcaaaacgggcgatgcagaccggagacgggtgccgtgggagaggacagcgatggatgctacgtacaacttcctcgatccaggcccgcccttgagctcaccgctctcaccgctcctggccccggttccggcagccgcccaacccaagctaaactgctggctaagaagcgggtggtacgcatgctcctggtgatcgtggtgctctttttcttgtgctggctgcccgtctatagcgcgaatacttggcgggcattcgatgggccaggagcccatcgggccctgtctggcgcccctatatcttttatccacctgctctcctatgccagcgcctgcgtgaaccccctcgtgtactgctttatgcacaggcgcttccgacaggcatgcctagagacttgtgcccgctgttgccccagacctccgagggccaggcccagggcactgcccgacgaagaccctcccacaccatccatagcgtctctcagtaggttgtcctatacgactataagcacactgggtcccggatag

SEQ ID NO: 272356 - DNA, 1551 bp, Artificial Sequence
  derived and/or modified sequence
atggagcttctaaagctgaatcggtccgtgcagggtactggtccaggacccggtgcctctctttgcagacccggagctcctctcttaaatagttctagtgtagggaatttgtcatgcgaacctcctaggataagaggcgcagggaccagagagctcgagctggccatcagaatcacattgtacgcagtgattttcctgatgagcgtcggcggtaatatgttgattatagtggtgttagggctctcccgtcgcctgcgaaccgttactaatgcctttcttcttagcctggcagtgtcggacttgctcttagcagtggcgtgtatgcccttcacgctgcttcccaacctgatggggacctttatctttgggacagtcatatgtaaggccgtgtcatatttgatgggtgtcagtgtttcagtgagcaccttgagcctggtcgcaattgccctcgaaaggtactcagcaatctgcaggcctctgcaagccagggtctggcaaactcggagtcatgctgcaagagtgattgtggctacctggctcctttcagggctcttaatggtaccctacccagtctatacagtcgtgcagcctgttggtccaagggtgctgcaatgcgtgcacaggtggccaagcgccagggttaggcagacttggtcagtactcctactgctgctcctgttctttattccaggggtggtcatggccgtagcctacgggctcatttccagagagctttatctgggtctacgcttcgatggggatagcgactctgactctcagagccgcgtgaggaatcagggaggattgcccggaggagcaggtcctagggagcagaatctcggggaagctgaactctggcgcgctacggggccagcgggagtcggcggtacagaaatgaaggtgagagtacggagaaagctggaaatggaactgtcatgggaaaggcggtcaggcggagactgggctggcgactggggcgattcccccttcagcctgactgcacatccattatgcagcggcgcagttcaccagaacggaaggtgcaggccggaaactggggctgttggcgaagactccgacggctgctacgtccagctccccaggtcccgcccagcgcttgagttaaccgcactgaccgctcctggcccaggatcaggcagccggccaacccaagccaaattacttgcaaaaaagcgcgtggttcgaatgttattggtgattgtggttctgtttttcctatgttggctgccagtctactcagcaaatacatggcgggcttttgatggaccaggggcacatagagcactttcaggagctcctatttctttcattcatctgctctcttatgcttcagcctgtgtgaacccgcttgtgtattgctttatgcacagaagatttagacaggcttgtctcgagacatgcgctcggtgttgtccaagacctcccagggcccgacctcgggctttaccggacgaggatccgccaactccatcaatcgcaagcctgtccaggctgtcctacaccaccatcagcactttggggcctgggtag

SEQ ID NO: 272357 - DNA, 2138 bp, Artificial Sequence
  derived and/or modified sequence
gccatggagctgctaaagctgaaccggagcgtgcagggaaccggacccgggccgggggcttccctgtgccgcccgggggcgcctctcctcaacagcagcagtgtgggcaacctcagctgcgagccccctcgcattcgcggagccgggacacgagaattggagctggccattagaatcactctttacgcagtgatcttcctgatgagcgttggaggaaatatgctcatcatcgtggtcctgggactgagccgccgcctgaggactgtcaccaatgccttcctcctctcactggcagtcagcgacctcctgctggctgtggcttgcatgcccttcaccctcctgcccaatctcatgggcacattcatctttggcaccgtcatctgcaaggcggtttcctacctcatgggggtgtctgtgagtgtgtccacgctaagcctcgtggccatcgcactggagcggtacagcgccatctgccgaccactgcaggcacgagtgtggcagacgcgctcccacgcggctcgcgtgattgtagccacgtggctgctgtccggactactcatggtgccctaccccgtgtacactgtcgtgcaaccagtggggcctcgtgtgctgcagtgcgtgcatcgctggcccagtgcgcgggtccgccagacctggtccgtactgctgcttctgctcttgttcttcatcccgggtgtggttatggccgtggcctacgggcttatctctcgcgagctctacttagggcttcgctttgacggcgacagtgacagcgacagccaaagcagggtccgaaaccaaggcgggctgccaggtggggctggaccacgtgagcaaaatctgggcgaggcggagctttggagggcgacggggcctgctggagtgggtgggactgaaatgaaggtgagggtgagaaggaagctggaaatggagttgagctgggagcggaggtcaggtggggactgggctggagactggggggactcgcctttttctctgaccgcccaccctttgtgctcaggggctgttcaccagaacgggcgttgccggcctgagactggcgcggttggcgaagacagcgatggctgctacgtgcaacttccacgttcccggcctgccctggagctgacggcgctgacggctcctgggccgggatccggctcccggcccacccaggccaagctgctggctaagaagcgcgtggtgcgaatgttgctggtgatcgttgtgcttttttttctgtgttggttgccagtttatagtgccaacacgtggcgcgcctttgatggcccgggtgcacaccgagcactctcgggtgctcctatctccttcattcacttgctgagctacgcctcggcctgtgtcaaccccctggtctactgcttcatgcaccgtcgctttcgccaggcctgcctggaaacttgcgctcgctgctgcccccggcctccacgagctcgccccagggctcttcccgatgaggaccctcccactccctccattgcttcgctgtccaggcttagctacaccaccatcagcacactgggccctggctgaggagtagaggggccgtgggggttgaggcagggcaaatgacatgcactgacccttccagacatacgaaacacaaaccacaactgacacaggaaaccaacacccaaagcatggactaaccccaacgcacaggaaaaggtagcttacctgacacaagaggaataagaatggagcagtacatgggaaaggaggcatgcctctgatatgggactgagcctggcccatagaaacatgacactgaccttggagagacacagcgtccctagcagtgaactatttctacacagtgggaactctgacaagggctgacctgcctctcacacacatagattaatggcactgattgttttagagactatggagcctggcacaggactgattctgggatgctcctagtttgacctcacagtgacccttcccaatcagcactgaaaataccatcaggcctaatctcatacctctgaccaacaggctgttctgcactgaaaaggttcttcatccctttccagttaaggaccgtggccctgccctctccttccttacccaaactgttcaagaaataataaattgtttggcttcctcctgaa

SEQ ID NO: 272358 - DNA, 1551 bp, Artificial Sequence
  derived and/or modified sequence
atggagctgctgaagctgaacagaagcgtgcagggcaccggccccggccccggcgccagcctgtgcagacccggcgcccccctgctgaacagcagcagcgtgggcaacctgagctgcgagccccccagaatcagaggcgccggcaccagagagctggagctggccatcagaatcaccctgtacgccgtgatcttcctgatgagcgtgggcggcaacatgctgatcatcgtggtgctgggcctgagcagaagactgagaaccgtgaccaacgccttcctgctgagcctggccgtgagcgacctgctgctggccgtggcctgcatgcccttcaccctgctgcccaacctgatgggcaccttcatcttcggcaccgtgatctgcaaggccgtgagctacctgatgggcgtgagcgtgagcgtgagcaccctgagcctggtggccatcgccctggagagatacagcgccatctgcagacccctgcaggccagagtgtggcagaccagaagccacgccgccagagtgatcgtggccacctggctgctgagcggcctgctgatggtgccctaccccgtgtacaccgtggtgcagcccgtgggccccagagtgctgcagtgcgtgcacagatggcccagcgccagagtgagacagacctggagcgtgctgctgctgctgctgctgttcttcatccccggcgtggtgatggccgtggcctacggcctgatcagcagagagctgtacctgggcctgagattcgacggcgacagcgacagcgacagccagagcagagtgagaaaccagggcggcctgcccggcggcgccggccccagagagcagaacctgggcgaggccgagctgtggagagccaccggccccgccggcgtgggcggcaccgagatgaaggtgagagtgagaagaaagctggagatggagctgagctgggagagaagaagcggcggcgactgggccggcgactggggcgacagccccttcagcctgaccgcccaccccctgtgcagcggcgccgtgcaccagaacggcagatgcagacccgagaccggcgccgtgggcgaggacagcgacggctgctacgtgcagctgcccagaagcagacccgccctggagctgaccgccctgaccgcccccggccccggcagcggcagcagacccacccaggccaagctgctggccaagaagagagtggtgagaatgctgctggtgatcgtggtgctgttcttcctgtgctggctgcccgtgtacagcgccaacacctggagagccttcgacggccccggcgcccacagagccctgagcggcgcccccatcagcttcatccacctgctgagctacgccagcgcctgcgtgaaccccctggtgtactgcttcatgcacagaagattcagacaggcctgcctggagacctgcgccagatgctgccccagaccccccagagccagacccagagccctgcccgacgaggacccccccacccccagcatcgccagcctgagcagactgagctacaccaccatcagcaccctgggccccggctag

SEQ ID NO: 272359 - protein, 816 aa, Artificial Sequence
  derived and/or modified sequence
MLWPRNLTSWDDSSSVSSGISDTIDNLSTDDINTSSSISSYANTPASSRKNLDVQTDAEKHSQVERNSLWSGDDVKKSDGGSDSGIKMEPGSKWRRNPSDVSDESDKSTSGKKNPVISQTGSWRRGMTAQVGITMPRTKPSAPAGALKTPGTGKTDDAKVSEKGRLSPKASQVKRSPSDAGRSSGDESKKPLPSSSRTPTANANSFGFKKQSGSAAGLAMITASGVTVTSRSATLGKIPKSSALVSRSAGRKSSMDGAQNQDDGYLALSSRTNLQYRSLPRPSKSNSRNGAGNRSSTSSIDSNISSKSAGLPVPKLREPSKTALGSSLPGLVNQTDKEKGISSDNESVASCNSVKVNPAAQPVSSPAQTSLQPGAKYPDVASPTLRRLFGGKPTKQVPIATAENMKNSVVISNPHATMTQQGNLDSPSGSGVLSSGSSSPLYSKNVDLNQSPLASSPSSAHSAPSNSLTWGTNASSSSAVSKDGLGFQSVSSLHTSCESIDISLSSGGVPSHNSSTGLIASSKDDSLTPFVRTNSVKTTLSERYTPTSQLRTQEDAKEWLRSHSAGGLQDTAANSPFSSGSSVTSPSGTRFNFSQLASPTTVTQMSLSNPTMLRTHSLSNADGQYDPYTDSRFRNSSMSLDEKSRTMSRSGSFRDGFEEVHGSSLSLVSSTSSVYSTPEEKCQSEIRKLRRELDASQEKVSALTTQLTANAHLVAAFEQSLGNMTIRLQSLTMTAEQKDSELNELRKTIELLKKQNAAAQAAINGVINTPELNCKGNGTAQSADLRIRRQHSSDSVSSINSATSHSSVGSNIESDS

SEQ ID NO: 272360 - DNA, 2451 bp, Artificial Sequence
  derived and/or modified sequence
atgctctggccacggaatctgacatcctgggacgacagttccagtgtatcttccggcatcagtgataccattgataacctgagcactgatgatatcaatactagttcttctatctcaagctacgcaaatacgccagcttcatccaggaaaaatctggacgtgcagacagatgcagagaagcatagtcaagtggagagaaactccttatggagcggagacgatgttaagaaaagtgacggcggcagcgattctgggataaagatggagccaggatccaagtggcgtcggaaccccagcgacgtaagtgatgagagcgataaatctacaagcggaaaaaaaaaccccgtgatctctcagacaggttcctggcgtcggggtatgaccgcccaagtcggaatcacaatgccccgcaccaagccttctgccccagccggtgcgctgaaaactccaggaaccggtaagactgacgacgctaaagtatccgagaagggcaggttgtcacctaaggcttctcaggttaagcggtccccaagtgatgccggcaggagcagcggtgatgaaagcaagaagccgctgccatcctcaagccggactcccacagccaatgctaattcattcggcttcaaaaaacagagcggctcggcagccgggctggccatgatcaccgcctccggggtgacagtaacgagccgtagtgcaacccttggtaagatccccaagagttccgcactggtctctcgcagtgccgggcgcaagtcaagtatggacggagcgcagaaccaggacgacggctatctcgcgctctcttccagaaccaacctgcagtatcgcagcttgcctcggccctccaagtctaattctcgaaatggggccgggaacaggagcagcacgtcttcaattgatagcaatatctcatcaaagtccgcaggcctcccggtacccaagctgcgggaaccctccaaaacagctctcggatcgagtctgcctggcttggtaaatcagacagacaaagaaaaagggatttcgtccgataatgagtcggtggctagctgcaactcagtgaaggttaatcccgccgcacagccagtgtccagtcctgcccagacctccttacagcccggtgccaagtacccagatgtggccagccccactcttcgcaggctgtttgggggaaagcccaccaaacaggtgccaatagccaccgctgagaacatgaaaaacagcgtggtaatcagcaatcctcacgctactatgacccagcagggtaatttggattcgcccagcggtagcggtgtgctatcttccggcagctcctcacccttgtacagtaagaatgttgacctgaatcagagccctctggcctccagcccttcctctgcacattccgccccgtctaattccttaacctggggaacgaatgcctcttcatctagtgccgtctccaaggacggactgggatttcagtctgtgtcctccctgcatacttcatgtgagagtatcgatatctcattatcttccgggggagtgccctcacataacagcagcaccggcttgatcgcttcttcgaaagatgatagtctgacaccttttgtgagaacaaatagtgttaagacgaccttgagtgaaaggtacacaccgacaagccaactgcggacacaggaagatgccaaggaatggctcaggagtcactcagcgggagggctgcaggacacagcggctaactctccgttcagcagcggctcttcagtcacctccccctctggaactaggtttaatttcagtcagttggcgagtcccacaaccgtgacacagatgtccctcagcaaccctacaatgttgagaacccattctctttccaacgctgacgggcagtacgacccttatactgattctcggttcaggaactcaagcatgtcactagatgaaaaaagccgaaccatgtcacgatccggttcattcagagatgggttcgaagaggttcacggttcgtcactctcactggtttcaagtacctcctcggtgtactctactccggaggagaaatgccagtcagaaatcaggaaacttcgtcgggaactggacgcttcgcaggaaaaagtctctgcccttactacccaactaaccgctaacgctcatctggtagctgcatttgagcagtcgctgggaaacatgactatccgactgcagtccctaacaatgaccgcggaacagaaggattctgaactcaatgaactgagaaagaccatcgagttgctcaagaagcaaaatgcggctgcccaagccgctattaatggcgtcatcaacacccccgaactcaactgcaagggtaatggtaccgcacagtctgcagatctccgaatacgacgccagcactcatctgatagcgtcagtagtattaactccgccacatcacattcatccgtggggtctaatatcgagagcgattcgtag

SEQ ID NO: 272361 - DNA, 2451 bp, Artificial Sequence
  derived and/or modified sequence
atgctgtggcccaggaacctgacctcctgggatgacagcagctctgtgagcagcggcatcagtgacaccatcgacaacctgagcacagatgacatcaacaccagcagcagcatcagcagctatgccaacaccccagccagcagcaggaagaacctggatgtgcagacagatgctgagaagcacagccaggtggagaggaacagcctgtggagcggagatgatgtgaagaagagtgatggcggcagtgacagcggcatcaagatggagcccggcagcaagtggaggaggaaccccagtgatgtgtctgatgaaagtgacaagagcaccagcggcaagaagaaccctgtgatcagccagacaggctcctggaggcggggcatgacagcccaggtgggcatcaccatgcccaggaccaagcccagcgccccagctggggccctgaagaccccaggcaccgggaagacagatgatgccaaggtgtctgagaagggccgcctgagccccaaggccagccaggtgaagaggagccccagtgatgctggccgcagcagtggagatgagagcaagaagcccctgcccagcagcagcaggacccccacagccaatgccaacagctttggcttcaagaagcagagcggcagcgctgctggcctggccatgatcacagccagcggcgtgacagtgaccagccgcagcgccaccctgggcaagatccccaagagcagcgccctggtgagccgctctgctggcaggaagagctccatggatggagcccagaaccaggatgatggctacctggccctgagcagcaggaccaacctgcagtaccgcagcctgccccggcccagcaagagcaacagcagaaatggagctggcaacagaagcagcaccagcagcattgacagcaacatcagcagcaagtctgctggcctgcctgtgcccaagctgcgggagcccagcaagacagccctgggcagcagcctgcccggcctggtgaaccagacagacaaggagaagggcatcagcagtgacaatgaatctgtggccagctgcaacagcgtgaaggtgaacccagctgcccagcctgtgagcagccctgcccagaccagcctgcagcccggggccaagtacccagatgtggccagccccaccctgcggcggctgtttggaggcaagcccaccaagcaggtgcccatcgccacagctgagaacatgaagaacagcgtggtgatcagcaacccccacgccaccatgacccagcagggcaacctggacagccccagcggcagcggcgtgctgagcagcggcagcagcagccccctgtacagcaagaatgtggacctgaaccagagccccctggccagcagccccagcagcgcccacagcgcccccagcaacagcctgacctggggcaccaatgccagcagcagcagcgctgtgtccaaggatggcctgggcttccagagcgtgagcagcctgcacaccagctgtgagagcattgacatcagcctgagcagcggcggcgtgcccagccacaacagcagcacaggcctgattgccagcagcaaggatgacagcctgaccccatttgtgaggaccaacagcgtgaagaccaccctgtctgagcgctacacccccaccagccagctgcggacccaggaggatgccaaggagtggctgcggagccacagcgctgggggcctgcaggacacagctgccaacagccccttcagcagcggcagctctgtgaccagccccagcggcacccgcttcaacttcagccagctggccagccccaccaccgtgacccagatgagcctgagcaaccccaccatgctgcggacccacagcctgagcaatgctgatggccagtatgacccctacacagacagccgcttcaggaacagctccatgagcctggatgagaagagcaggaccatgagccgcagcggcagcttcagagatggctttgaggaggtgcacggcagcagcctgagcctggtgagcagcaccagctctgtgtacagcaccccagaggagaagtgccagagcgagatcaggaagctgcggcgggagctggatgccagccaggagaaggtgtctgccctgaccacccagctgacagccaatgcccacctggtggccgcctttgagcagagcctgggcaacatgaccatccggctgcagagcctgaccatgacagctgagcagaaggacagcgagctgaatgagctgaggaagaccatcgagctgctgaagaagcagaatgctgctgcccaggccgccatcaacggggtcatcaacaccccagagctgaactgcaagggaaatggaacagcccagagcgctgacctgcgcatccggcggcagcacagcagtgacagcgtgagcagcatcaacagcgccaccagccacagctctgtgggcagcaacatcgagagtgacagctag

SEQ ID NO: 272362 - DNA, 2451 bp, Artificial Sequence
  derived and/or modified sequence
atgctgtggccccggaacctgaccagctgggacgacagcagcagcgtatcatctggtatcagtgatacaatcgacaatttgtccacagacgacatcaatacatcatccagtatttcctcctatgcaaacacccccgcttcttcacgaaaaaacctggacgtccagactgacgccgaaaagcatagtcaggtcgaaaggaactctctgtggtctggagatgacgttaagaagtctgacggcgggtcagatagcggaataaagatggagcccggcagcaagtggcgacgcaatccctcagacgtatctgatgaatctgataaatctaccagcggcaagaaaaatccggtaatcagtcagacagggagctggagacgggggatgaccgctcaggtgggcatcaccatgccgaggacgaaacccagtgctcccgcaggcgctttgaagacaccggggaccggaaaaactgatgatgccaaagtttccgagaaggggcggttgagcccaaaagcgtcacaggtgaaaaggtcaccatcagatgcagggcggtcttctggcgatgagagtaagaagcccctgccttcctcaagccggaccccaacggcaaatgcgaattcctttggattcaaaaagcagagcggtagtgccgccgggctggctatgataacagcgagtggcgttactgtcacatcaaggagcgccaccctcgggaagatccccaagtcatccgccctagttagccgatccgctggacgaaagtcctccatggacggagcacagaatcaggacgatgggtacctcgcgctgtcctcaagaacgaatcttcagtatagatctcttccccggccctccaaaagcaatagtcgtaacggagcgggaaaccggagcagtacatccagcattgattctaacatctctagcaaatccgccgggctcccagtccctaagctaagagaacccagcaaaaccgccctcggctcctcacttccgggacttgtcaaccaaactgacaaggagaaagggatatctagcgataacgagagtgtggcttcttgcaacagcgtgaaggtaaaccccgcagcccagccagtaagcagccctgcgcagactagcctgcaacccggggcaaaatatcctgatgtagcatctccaacacttaggcgactgtttggcggcaaaccaactaaacaggttccgattgctacagccgagaatatgaaaaattcagtcgttatttccaacccacatgcgaccatgactcaacaggggaacctcgactcaccgtcggggagcggtgtactgtcgagtggatcctcctcgccactctacagcaagaatgtggaccttaatcagtctcccctggcgtctagcccctcctcagctcactccgctccatctaattctctgacctgggggaccaacgcttcttcctccagtgctgtgagtaaagatggcctgggttttcagagcgtgtcttccctccacacctcctgtgaatcaatcgacataagcctcagtagcgggggagtgccctcccacaattcgtcaacgggtctgattgcatcctctaaggacgatagtctcaccccttttgtgcgtactaattccgttaagacgaccttatcggagcgttatactccaacatctcagctccgcacccaggaagacgccaaggagtggctacgcagccattccgcaggaggactgcaggacaccgctgccaactctcccttcagttcaggcagctctgttacttcaccatctggcacgcggttcaatttttctcagctcgctagtcccacgacagttactcaaatgtccctttctaaccctacaatgcttcgcactcactctctctccaacgctgatggtcagtatgatccgtacaccgacagccggtttcgaaacagctccatgtctctagacgagaagtccaggacaatgagccggtctggatccttcagagacgggtttgaggaagtgcatggctcttccctgtcgctggtgagcagcacatcgagcgtgtactcaaccccagaggaaaaatgccagagtgaaataagaaaactccgaagagagctggacgctagtcaagagaaggtatctgccctgactacgcaactgactgccaacgcccacttagtagccgcctttgagcagagcctgggtaacatgacgatccgattgcaaagtctcaccatgacggcagaacaaaaggattccgaactaaatgaactgcggaagaccatcgagctcttgaagaagcagaatgcagcagcacaggcggccattaacggggtgatcaacacacctgagctcaactgtaaaggcaacggtaccgcacagtcagctgaccttaggattcgcaggcagcacagctccgactcagtcagcagcatcaacagcgcgacctctcattctagtgtgggcagtaacattgagtccgacagctag

SEQ ID NO: 272363 - DNA, 7777 bp, Artificial Sequence
  derived and/or modified sequence
atgctctggcctaggaaccttacaagctgggacgacagcagctccgtcagcagcggcatcagcgacaccatagacaacctcagcactgatgacatcaacaccagctcctccatcagctcttatgccaacacacctgcctcctctcgaaaaaacctggatgtgcagactgatgctgagaagcactcacaggtggagaggaattccctgtggtctggtgatgatgtcaagaaatcagacggaggctcagacagcggcataaaaatggagccaggttccaagtggaggcggaatccttctgatgtgtctgacgagtccgacaaaagcacgtcgggcaagaagaatcctgtcatctcccagacaggctcatggcggcgaggcatgacagctcaggtgggcatcaccatgccaaggacgaagccttcagccccggcaggcgcactgaagaccccaggaactggaaaaacagacgacgcaaaggtgtctgagaaaggaaggctttctcctaaagcctcccaggtgaagcgctccccatcagatgcaggccggagcagtggtgacgaatccaaaaagcccctccccagcagctctaggacacctactgccaatgccaacagctttgggttcaagaagcagagtggttccgccgccggcctggccatgatcacagccagcggggtgactgtcaccagcaggtcagccacactgggcaaaatcccaaagtcatctgcactcgtcagtcggtctgctggtcggaagtcaagtatggatggggctcagaatcaggatgacgggtatctagccctaagctcccggacaaaccttcagtaccggagtttgccgaggcccagtaagtccaacagccggaacggggctgggaacaggtctagcaccagcagcatagattccaacattagcagcaagtccgcaggcctgccagtgcccaaactgagggagccttccaaaacagccctaggcagctctctaccaggtctggtcaaccaaacagacaaggagaaaggcatctcatcagacaacgagagtgtggcttcctgtaactcggtgaaagtgaatccggcagcccagcctgtgtccagtccggctcagaccagtctccagcctggagccaagtacccagatgtggcctctcccacactccgcagactctttggtgggaagcctaccaagcaagtgcccatcgccacagctgaaaacatgaaaaattcggtggtcatctccaatcctcatgccaccatgactcagcaaggtaacctagactccccgtcaggcagtggcgtcctgagcagtgggagcagcagtcctctctacagcaagaatgtggacctcaaccagtctccgctagcctccagccccagctcagcccactcggccccttccaacagcctcacctggggcaccaacgccagcagctcctccgcagttagcaaggatggcctgggctttcagtctgtcagcagcctccacaccagctgtgagtccatcgacatctccctcagcagtggaggggtccccagccacaattcttccactggcctcatcgcctcctccaaggacgactccttgactccctttgtcagaactaacagtgtgaagaccacactgtcagaaaggtatactcccacctcccagcttcgcacgcaagaagatgcaaaagaatggttacggtcccattctgcaggaggccttcaggacaccgctgccaattcccccttttcctctggctccagcgtgacttctccctccggaacaagattcaacttttcccagcttgcgagtcccaccactgtcacccagatgagcttgtccaacccgaccatgctgaggactcacagcctctccaatgctgatgggcagtatgatccatacactgacagccgcttccggaatagctccatgtccctggatgagaagagcagaaccatgagccgttcaggctcattccgggatgggtttgaagaagttcatggatcctcactctccttggtttccagcacatcgtcagtttattctacaccagaagaaaaatgccagtcagagattcgcaagctgcggcgggaactggatgcctcccaggagaaagtttcagctttgaccacccagctgacagcaaatgctcaccttgtggcagcctttgaacagagtcttggtaacatgacaatcaggctccagagtctgaccatgacagctgagcagaaggactcagaactgaatgagttaagaaaaaccattgagctgctaaagaaacagaacgcagctgcccaggctgccattaatggagtaattaacacacctgagctcaactgcaaaggaaacggcactgcccagtctgcagacctccgcatccgcaggcagcactcctcagacagcgtctccagcatcaacagtgccaccagccactccagcgtgggcagcaacatagagagtgactcaaagaagaagaagcggaagaactggttacgcagctccttcaagcaagctttcgggaagaagaagtccccaaaatctgcgtcctctcattcagatattgaggagatgacggattcttctttgccttcctcaccaaagttaccgcacaatgggtccacaggttccaccccactgctgaggaattctcactccaactctctaatttcagaatgcatggatagtgaagctgagaccgtcatgcagctccgaaatgagttaagagacaaggagatgaagctgacggatatccgcttagaagctctcagttctgcccaccagctggaccagctccgggaggccatgaacaggatgcagagtgaaatagagaagctgaaagctgagaatgatcggctgaagtcagagtctcaaggcagtggctgcagccgggctccttcccaagtgtccatctctgcctccccgaggcagtccatgggcctctcccagcacagcttgaacctcactgagtcaaccagcctggacatgttgctggatgacactggtgaatgctcggctcggaaggaaggaggcaggcatgttaagatagttgtcagctttcaggaggaaatgaagtggaaggaggattccagaccacatctctttcttattggctgcattggagttagtggcaagacgaagtgggatgtgctcgatggggtggttagacggctgttcaaagaatacatcattcatgtcgacccagtgagtcagctagggctgaattcagacagcgttcttggctacagcattggagaaatcaagcgcagcaacacttccgaaacaccggagctgcttccttgtggctatctggttggagagaacacgaccatctcagtgactgtgaaagggctcgcagaaaacagcctggactcactggtgtttgagtccttgattcccaagcccatcctgcagcgctacgtctccctcctgatagagcaccgtcggatcattctctctggccccagcggcactgggaaaacctacctggccaaccggctgtctgagtatatagtgcttcgagagggacgggagttgacagacggggttatcgccacctttaacgtggaccataagtccagcaaggaattgcgccagtacctgtccaaccttgctgaccagtgcaacagtgagaacaatgctgtggacatgcccctcgtcatcatcctggacaacctacaccacgtgagctctctgggagagatcttcaatgggctgctcaactgcaagtaccacaaatgcccttacataattggcacaatgaaccaggctacctcttcgactcccaacctgcagcttcaccataacttcagatgggtgctttgtgccaaccacacggagcctgtgaagggtttccttggccgattcctgaggaggaagctcatggaaacagagatcagtgggcgggtgcgcaatatggagctggtaaaaatcattgactggattcccaaggtctggcatcacctcaaccgcttcctggaggctcacagttcctcggacgtcaccatcggcccccggctcttcctgtcatgccccatcgatgtggacggctcgagagtgtggttcaccgacttgtggaactattccattatcccctatctcctggaagccgtcagagaaggactccagctctatggaaggcgcgccccctgggaggatcctgccaagtgggtgatggacacatatccatgggcagccagcccacaacagcacgagtggcctcccctgctgcagttacggcctgaggatgtcggcttcgacggctactccatgcctcgggagggatcgacaagcaagcagatgccccccagtgatgctgaaggtgacccgctgatgaacatgctgatgaggctgcaggaggcagccaactactccagcccccagagctatgacagcgactccaacagcaacagccatcacgatgacatcttggactcctctttggagtccactctgtgacaggggcccggagcccagcgccctcctcttctcctcaccgcattccacctgcatcccccacatcaccctgaagatgacttcctgagccagcccccagccacagccttagagctgcgggaacaccgagaccccccgtccttcagcctcgacctgggtgcaggcatcccgggccagctgcctgcggaccgcttccttccacagcgagaactgcactaccttctgttgtactttaattattgttttgccttgttgctgtgacctccctaagacactgaagatacttctcgggaaaggatcatcgccgttgaaatgaaaagagagacagagagaaaaaaaaaaagagaacccacatgaagctctgaaaccaaacagcatcctgccatgagcttcccagagacagaagagactggagcaaagtcggaaacacagagaagcacggcttcccctcagcacagaccctccagactgggtctcagagccgtgccacccaccctcccacacagccggccacagggagaactggtgctaaccagggtgcttgctttggtcacgttcaacgcactacagagctacgacacagggaaaccttaggagcaaataaaccgtgctttcatgttttttaaatggtgctttccttacccgagaggtattttgcctgttccaatcaaaccaccccattcaggtccatcagcctctgattaatatccgtgagagtgagtgacggagtgagagtgtgagcgagtggatgtggctgtcagtgcagaacagcatgtgtctctttccttctgatatatgaatgaatcaggtttttttttttttttttctgcaaacactgtgtatagtgagacttgttctactttggagaacaggttaccttttgaaaatgaggttgagtttcttcctttctgatgcattgatttttgaagatttttttttcccccttcccctcttggtcagaatcaatcctttggtgaaagtaagaaccgcaggagttgagttttggtttggtcctgctcagttttggtttttagttgtccatcctcacagtcctacacactcgcctcctcctgctagggctgggggtatctgtgtcctttaaaatggatgaggacctggtcctcgacatgtgggtgagccatggaccttgccttcccttctcgtccttgagggtttagaacacacaccaacacctccagcgtccccgccccagcttccggtggggtgatgcggtcaccctgcaaaagacttgcactttcctcagaaccaacatgacgcagctcaataagggtgagggtcactccctcccagaagccccgtctggacgagccttgcctgacctcttcggtgctgaccttcccaaagtgatgccttactggttttgtactaactgtgttcattttacataagtgtcgtgcctgcctggggtttgttttttttgtcattgttttccccattgaaacaaacagggctaaaaagtcatctgttcattaggagaactcaagttgctgtgacttttctcatccaaaagactcatttgtgtggatgcgtgaccatgggaaaaagaaaaaaaaaaagatccattttttaggttcttttcggtctccagctgacaacccaactggacaatgatctgtctggtgcaggagaaggcaaaagtttctacaagtctacatgaccttgctgatacttgttctaatagaaacccagtctgctgtgtcttcaacatactggtattttcattacaaagtatggtaaatttttgagttgtttgtttctgttttgtaaagagaatccttattggacaccagtgaaggtgtctctgttttaatgatcagggtttttattccatcttttgcatttcttctatttctgaaggtttgtctcttggcatctttttttagtttcttaccataagagtttgacccgaaactgctcacttcacattggatgacaccatgttcttcctctttgaaaagaaaaggggaatgtgtcccactagtgaaaggaaaacttttcaacactatccctgctttagtctcagcaaactcagactattctgcttagccttcattagtcatctgggtgtgagtgtgtcttgttctgtttttctttttaataaaacttttaaaccatatatttagcctgtgaccaggggggccaaaccctaagatttctggtaaacctgaagggtggccctcctcagacaatttatctcccagcaatgaccctactacactcgcgtactgtgaatttgggaggaggtaaagttgacttctcctcgtgggcagttttccaatcaccttgtgagtagacacctgccaatattgtttgaaacctttttttaatatgacatcctctcttgtcattctcttctcccctttcccacagacttccctcctgggtccaggttcagaaccaagacttctgtacctagtgctgcctgattggtgaacattgacttcaagtagcatagcccttgtgtgactcacaactccgtgtccttcctaaagtttcgggaagcagggttgtctaatatgcacatttcttattttggtcatatttttactttagtgtcactcaccttttacaaagtgactttgtactcatttagggctctatcggaaatgcttccattttgccttttctacagttaggccaattttgaaatatataaattctatgcaacatttatgttgagttaccaatggaagccaaaagttctcttcccaaactgccaagaatgatacaggccataattgaaatgggaataccttttaagtttcattaggggtggggtgggagtgggacaggaacaagacttgcctagatctttgttgtatcttggggacttttactttgttgtttgatgcttaaacttcaaaattctctgtattcaaatttgattgtggcgaatctacttcaaaaaggaaaaataatccaactttgtggatattaaatggaaggtttgctgttttgatctagttgtttccagtggagcagttttatgaaatatgttctataagatgtacattttttcattgtaacatagaaattgtaaataattgattaaagtgctgcattttgatgaattttttctagccatttttaaagagaaaactaggaattgagtattttgtgtacggtatgtttccatcctccctccccttcctcctcccctcctctctctctcttcctacctatttaattttcatttgtcatgaggtttttggatttgccaatgatctgctggacatcatgccccatgtcatagagaataaagctgatgattgtaccagtcttaaattattcatgattcaataaaattgatgcttatttattc

SEQ ID NO: 272364 - DNA, 2451 bp, Artificial Sequence
  derived and/or modified sequence
atgctgtggcccagaaacctgacttcgtgggatgattcctctagcgtaagttccggcattagtgacaccattgacaatctgtctactgacgacattaacaccagctctagcatttcttcgtacgctaacaccccagcctcttctcggaagaatctagacgtccagactgatgcagagaagcacagccaggtggaacgcaactccctgtggagcggcgacgacgtcaagaagagcgacggcggaagcgactccggaataaagatggagccagggtccaaatggaggagaaatccatccgacgttagtgatgaaagcgacaagagtacctccgggaagaagaatccggtcatctcacaaaccggatcttggaggcggggaatgacagcacaagttggcattactatgcctagaacaaaaccctctgcgcctgccggagcactcaagacccctggaaccggcaaaaccgatgatgccaaagttagcgaaaagggtagactgtccccaaaagcctctcaggttaagaggtccccaagcgatgctggtcgctcttctggtgacgaatctaagaaaccccttccctcctcatcaagaacccccaccgctaatgccaacagctttggtttcaagaagcagtccggctctgcggctgggctggccatgatcaccgcttctggagtgacggtcacttctagatctgcaactcttgggaaaatcccaaaatcaagcgcccttgtcagcaggtccgctgggagaaaatccagcatggatggggctcagaatcaggacgatggctacttagccctcagctcccgtacaaatcttcaatatagatcactccctaggccctctaaatcaaacagcagaaacggagccggaaacagaagttcaacaagctcgatcgatagcaacatttcctccaagagtgcagggcttcccgtcccaaaactgagagagccaagtaaaacagccctggggtcatccctgccaggactagttaaccagacagataaagagaagggcattagctccgacaacgaaagcgtggctagctgcaatagcgtgaaggtcaatcccgcagcccagccagtctccagtcctgcccagacttctctccagcctggagctaagtatcctgacgtcgcgtcgcccaccctgcgcagactgttcggtgggaaaccaaccaagcaggtgcccatcgcgacggccgagaatatgaagaactcagtcgttatatctaacccacacgcaaccatgacacagcagggcaatctggacagccctagtggcagcggtgtcctctctagcggctcatcgtcccccctgtactccaaaaatgtggacttgaatcagagccctctggcgagttcaccctcctctgcccacagcgctccttccaactccctcacatgggggacaaatgcctcctcttcttccgcggtctcaaaagatggtctgggtttccagagcgtcagttcgctccacaccagctgtgagagcatagacatctctctgagcagcggcggagttccttcccacaattcaagcactggattgattgctagttccaaagacgactccctcacaccatttgttcgcaccaactccgtgaaaacaaccttatccgaacgctatactcccaccagtcagctgcggactcaagaggacgctaaggaatggctgcggagccacagcgccggagggttacaggatacagccgcaaactccccattttcttcaggctcctccgttacaagcccatccgggactcggtttaatttttctcaactggcatctcctaccaccgttacccaaatgagcctaagtaaccctacaatgctgcgaacacactccctgtccaacgctgacgggcagtacgacccttataccgactcacgattccgcaatagctctatgtcactggatgagaaatcacggactatgtccaggtctggttcttttagagacgggttcgaggaggtgcacggtagcagcttgagcctggtttccagtacttcctccgtgtatagtacacctgaggaaaagtgtcaatcagaaatcagaaaattgaggagggaactcgatgcttcccaggagaaagtatctgcccttaccacccagctgacagccaacgcccatttagtcgcagcttttgagcaatctctgggaaacatgaccatccgcttgcaaagcttaacgatgactgcagagcagaaggactcggaactgaacgagcttaggaagactatagagctgctaaagaaacagaatgccgctgcacaggccgctataaacggggttattaacacccccgagctcaactgcaaaggaaatgggacagcccaatccgccgacttgaggattaggcggcagcacagctctgactccgtgtccagtattaattccgctacatcacactcttcggtggggagcaacattgaaagtgattcttag

SEQ ID NO: 272365 - DNA, 2451 bp, Artificial Sequence
  derived and/or modified sequence
atgctgtggcccagaaacctgaccagctgggacgacagcagcagcgtgagcagcggcatcagcgacaccatcgacaacctgagcaccgacgacatcaacaccagcagcagcatcagcagctacgccaacacccccgccagcagcagaaagaacctggacgtgcagaccgacgccgagaagcacagccaggtggagagaaacagcctgtggagcggcgacgacgtgaagaagagcgacggcggcagcgacagcggcatcaagatggagcccggcagcaagtggagaagaaaccccagcgacgtgagcgacgagagcgacaagagcaccagcggcaagaagaaccccgtgatcagccagaccggcagctggagaagaggcatgaccgcccaggtgggcatcaccatgcccagaaccaagcccagcgcccccgccggcgccctgaagacccccggcaccggcaagaccgacgacgccaaggtgagcgagaagggcagactgagccccaaggccagccaggtgaagagaagccccagcgacgccggcagaagcagcggcgacgagagcaagaagcccctgcccagcagcagcagaacccccaccgccaacgccaacagcttcggcttcaagaagcagagcggcagcgccgccggcctggccatgatcaccgccagcggcgtgaccgtgaccagcagaagcgccaccctgggcaagatccccaagagcagcgccctggtgagcagaagcgccggcagaaagagcagcatggacggcgcccagaaccaggacgacggctacctggccctgagcagcagaaccaacctgcagtacagaagcctgcccagacccagcaagagcaacagcagaaacggcgccggcaacagaagcagcaccagcagcatcgacagcaacatcagcagcaagagcgccggcctgcccgtgcccaagctgagagagcccagcaagaccgccctgggcagcagcctgcccggcctggtgaaccagaccgacaaggagaagggcatcagcagcgacaacgagagcgtggccagctgcaacagcgtgaaggtgaaccccgccgcccagcccgtgagcagccccgcccagaccagcctgcagcccggcgccaagtaccccgacgtggccagccccaccctgagaagactgttcggcggcaagcccaccaagcaggtgcccatcgccaccgccgagaacatgaagaacagcgtggtgatcagcaacccccacgccaccatgacccagcagggcaacctggacagccccagcggcagcggcgtgctgagcagcggcagcagcagccccctgtacagcaagaacgtggacctgaaccagagccccctggccagcagccccagcagcgcccacagcgcccccagcaacagcctgacctggggcaccaacgccagcagcagcagcgccgtgagcaaggacggcctgggcttccagagcgtgagcagcctgcacaccagctgcgagagcatcgacatcagcctgagcagcggcggcgtgcccagccacaacagcagcaccggcctgatcgccagcagcaaggacgacagcctgacccccttcgtgagaaccaacagcgtgaagaccaccctgagcgagagatacacccccaccagccagctgagaacccaggaggacgccaaggagtggctgagaagccacagcgccggcggcctgcaggacaccgccgccaacagccccttcagcagcggcagcagcgtgaccagccccagcggcaccagattcaacttcagccagctggccagccccaccaccgtgacccagatgagcctgagcaaccccaccatgctgagaacccacagcctgagcaacgccgacggccagtacgacccctacaccgacagcagattcagaaacagcagcatgagcctggacgagaagagcagaaccatgagcagaagcggcagcttcagagacggcttcgaggaggtgcacggcagcagcctgagcctggtgagcagcaccagcagcgtgtacagcacccccgaggagaagtgccagagcgagatcagaaagctgagaagagagctggacgccagccaggagaaggtgagcgccctgaccacccagctgaccgccaacgcccacctggtggccgccttcgagcagagcctgggcaacatgaccatcagactgcagagcctgaccatgaccgccgagcagaaggacagcgagctgaacgagctgagaaagaccatcgagctgctgaagaagcagaacgccgccgcccaggccgccatcaacggcgtgatcaacacccccgagctgaactgcaagggcaacggcaccgcccagagcgccgacctgagaatcagaagacagcacagcagcgacagcgtgagcagcatcaacagcgccaccagccacagcagcgtgggcagcaacatcgagagcgacagctag

SEQ ID NO: 272366 - DNA, 555 bp, Artificial Sequence
  derived and/or modified sequence
atgttctgtctgctgcacctttgcttttacctcgctaacttcgctagcagcatcaaacggacgcatgctgtgaatggctgttgtggactacaaatgatcgccctctgggcacaaagctctggtaacgccgatgcgcgagttgaagagatcctcgcgggcgaggaacggagactggccgcgcttttagggtcacagggaatgcgcttctgggtgtgccttgccgcctgtcgcgcgatgtggggactagctgctaggaggggacgagccgaagactctagtagctcaccagtggacgcgagcaagtttccctggcgtgggggtcagcatagaacaacgatgatgccgtgtttgctccgcgtaggagtgtttcgaccctgtcatgtgagacctactggggacccatcctgcgatgtacagccaccgagattggggttcagtagagtgcccgatacccaagtggccttctacggcagcggccactgggaccctaccccatttagtgtgcattcctgtttttttaatttccaagttcgcaaaattatcttccttttatag

SEQ ID NO: 272367 - RNA, 555 nt, Artificial Sequence
  derived and/or modified sequence
auguucugucugcugcaccuuugcuuuuaccucgcuaacuucgcuagcagcaucaaacggacgcaugcugugaauggcuguuguggacuacaaaugaucgcccucugggcacaaagcucugguaacgccgaugcgcgaguugaagagauccucgcgggcgaggaacggagacuggccgcgcuuuuagggucacagggaaugcgcuucugggugugccuugccgccugucgcgcgauguggggacuagcugcuaggaggggacgagccgaagacucuaguagcucaccaguggacgcgagcaaguuucccuggcgugggggucagcauagaacaacgaugaugccguguuugcuccgcguaggaguguuucgacccugucaugugagaccuacuggggacccauccugcgauguacagccaccgagauugggguucaguagagugcccgauacccaaguggccuucuacggcagcggccacugggacccuaccccauuuagugugcauuccuguuuuuuuaauuuccaaguucgcaaaauuaucuuccuuuuauag

SEQ ID NO: 272368 - DNA, 876 bp, Artificial Sequence
  derived and/or modified sequence
agcgccggcggcggcggcgccggcagcagactgcaggccgagatgctgcagatggacctgatcgacgccaccggcgacagcacccccgacgagcccgacgtgcacttcagcaagaagttcctgaacatcttcatgagcggcagaagcagaagcagcagcgccgagagcttcggcctgttcagctgcatcatcaacagagaggagcaggagcagacccacagaaccatcttcagattcgtgcccagacacgaggacgagcccgagctggaggtggacgaccccctgctggtggagctgcaggccgaggactactggtacgaggcctacaacatgagaaccggcgccagaggcttcttcaccgcctactacgccatcgaggtgaccaaggagcccgagcacatggccgccctggccaagaacagcgactgggtggaccagttcagagtgaagttcctgggcagcgtgcaggtgccctaccacaagggcgacgtggtgctgagcgccgccatgcagaagatcgccaccaccagaagactgaccgtgcacttcaacccccccagcagctgcgtgctggagatcagcgtgagaggcgtgaagatcggcgtgaaggccgacgacagccaggaggccaagggcaacaagtgcagccacttcttccagctgaagaacatcagcttcagaggctaccaccccaagaacaacaagtacttcggcttcatcaccaagcacctggccgaccacagattcgcctgccacgtgttcgtgagcgaggacagcaccaaggccctggccgagagcgtgggcagagccttccagcagttccacaagcagttcgtggagtacacctgccccaccgaggacatctacctggagtag

SEQ ID NO: 272369 - DNA, 876 bp, Artificial Sequence
  derived and/or modified sequence
tcggccggtggcggaggagccgggagcaggctccaggcagagatgctccaaatggacctgattgatgcaacaggggactcaactcccgacgaacccgacgtgcatttctccaaaaaattcttgaacatattcatgagtggcagatctcggtcctccagtgctgaatcattcggcctgttcagctgcataatcaatagagaagaacaggaacagacacaccggacaatctttaggttcgtcccccggcatgaagacgagccagagctggaggttgacgatcccctgctggtcgagctccaggccgaggactactggtacgaagcatataacatgaggaccggcgccagggggtttttcacggcttattatgccattgaagtgactaaagaacctgagcacatggccgcccttgccaaaaattccgattgggtggatcagtttcgcgttaaattccttggttccgttcaggtgccctaccacaaaggcgacgtggttctcagcgctgcaatgcagaagatcgccactactaggagactaaccgtgcatttcaatcctccctcatcctgcgtgctagagatctcggtgcgaggcgtgaagatcggggtaaaagccgatgactcccaagaagcgaaggggaataagtgctcccacttttttcagctgaagaatatatcattccgaggctaccatcccaaaaacaacaaatattttggcttcatcaccaagcacctggctgatcatcgattcgcatgtcacgtgttcgtgtcagaggacagcaccaaggcgcttgctgagtctgttggtagggcatttcagcagtttcataagcagttcgttgagtacacgtgcccaacagaggatatctacctggaatag

SEQ ID NO: 272370 - DNA, 876 bp, Artificial Sequence
  derived and/or modified sequence
tccgccggaggaggaggcgccgggtcgcgcttacaggctgaaatgctgcaaatggacctaattgatgccacgggcgacagcacgccagacgagccggacgtccacttttctaagaaatttctgaacatttttatgtcaggaaggtcgcggtcgagttccgcggagagttttggcctgttttcctgtatcatcaaccgcgaagaacaagagcagactcacagaaccatttttaggttcgtgcccagacacgaagacgaacccgagctcgaagtggacgaccctctgctggtcgaattgcaggcagaggactattggtatgaagcttataatatgcgcacaggtgccaggggattcttcacagcctactacgccattgaggtgaccaaggagcctgagcatatggcagctctggccaagaattccgactgggtggaccaattccgggtcaagttcctggggtcagtgcaggtcccatatcataaaggggacgtagtgctgtcagcagccatgcaaaagattgcgaccacccgaaggttgacagtgcatttcaacccgccatcatcctgtgtcctcgagataagcgtgcgaggcgtgaagattggagtgaaagcagatgattctcaggaagccaaaggaaacaaatgttcccactttttccagctgaagaacatctcatttagaggataccatcccaaaaacaacaaatacttcggatttataaccaagcatttggctgaccaccgctttgcttgtcacgtatttgtatctgaagattctacaaaagcactggctgagtccgtgggccgtgcatttcagcagtttcataagcagttcgtcgagtacacctgtcccacagaagacatttacctggagtag

SEQ ID NO: 272371 - DNA, 876 bp, Artificial Sequence
  derived and/or modified sequence
agcgcaggaggcggaggggctggttccaggttgcaagctgagatgttacagatggatctgatcgatgcaacaggcgattccactcctgacgaacctgatgtccacttctccaaaaaattcctcaacatcttcatgagcgggaggagccgttcatcctcagcggaaagctttgggttgttttcctgcattatcaatagagaggagcaggaacagacacaccgaacgatatttcggtttgttccacggcacgaagatgagcccgagctcgaggttgatgatccactgctggtcgagctccaggctgaagactactggtacgaggcttacaatatgcgtaccggggcgcgggggtttttcaccgcatactatgctatcgaggtaacgaaggaacctgagcacatggcggctctggcaaaaaacagcgattgggttgatcagtttagggtcaaattcctcggatcagttcaggtgccgtatcacaagggagatgttgtgctgtctgcggccatgcaaaagatcgcaacaactcgaaggctcacagttcacttcaacccccccagttcttgcgtcttggaaatctctgttcgaggtgtgaagattggcgtgaaggccgatgactcgcaggaggctaagggtaacaagtgctcacacttcttccaactgaagaatatcagcttcaggggctaccatcccaaaaacaataaatactttggctttatcaccaaacacctggcagatcatagattcgcctgccacgtgttcgtcagcgaagactcaacaaaggccctggccgagagtgttggcagagcatttcaacagttccacaaacagtttgtagagtacacatgcccaacggaggatatttacttggagtag

SEQ ID NO: 272372 - DNA, 876 bp, Artificial Sequence
  derived and/or modified sequence
tctgctgggggcggcggggccggcagccggctgcaggccgagatgctgcagatggacctgattgatgccaccggggacagcaccccagatgagccagatgtgcacttcagcaagaagttcctgaacatcttcatgagcggccgcagccgcagcagcagcgctgagagctttggcctcttcagctgcatcatcaaccgggaggagcaggagcagacccacaggaccatcttccgctttgtgcccaggcatgaagatgagcctgagctggaggtggatgaccccctgctggtggagctgcaggccgaggactactggtatgaggcctacaacatgaggactggagcccggggcttcttcaccgcctactatgccatcgaggtgaccaaggagcctgagcacatggccgccctggccaagaacagcgactgggtggaccagttccgggtgaagttcctgggctctgtgcaggtgccctaccacaagggagatgtggtgctgtctgctgccatgcagaagatcgccaccacccggcggctgactgtgcacttcaacccccccagcagctgtgtgctggagatctctgtgcggggcgtgaagattggagtgaaggcagatgacagccaggaggccaagggcaacaagtgcagccacttcttccagctgaagaacatctccttccggggctaccaccccaagaacaacaagtacttcggcttcatcaccaagcacctggccgaccacagatttgcctgccacgtgtttgtgtctgaggacagcaccaaggccctggccgagagcgtgggccgggccttccagcagttccacaagcagtttgtggagtacacctgccccacagaggacatctacctggagtag

SEQ ID NO: 272373 - DNA, 876 bp, Artificial Sequence
  derived and/or modified sequence
agcgccggcggcggcggcgccggcagccggctgcaggccgagatgctccaaatggacctgatcgacgccacaggcgactccactcctgatgagcccgatgttcactttagcaagaaatttctcaatattttcatgtctggcaggagccggtcctcttcagccgaaagcttcgggctctttagctgtattattaacagggaggaacaggagcaaacccacaggactatcttcagatttgtccctaggcatgaggatgaacctgagctcgaagtagacgatcccctgttggtcgagcttcaggcagaggactactggtacgaagcttataacatgcgtaccggagcacggggctttttcacagcttactacgcaatcgaggttaccaaggaaccagagcacatggccgccttagccaaaaactccgattgggtcgatcagtttagagtcaagttcctcggcagtgtgcaggtcccctatcataagggggacgtggtactatccgctgccatgcagaaaatagctacaactcggcgcctcactgtgcactttaacccgccttccagctgtgtgttggagatctccgttaggggtgtaaagattggagtaaaggccgacgactcccaggaagctaaaggcaacaaatgctctcattttttccagttgaagaatatttcttttcggggataccaccctaaaaataacaagtacttcggctttatcacaaaacacctcgcagaccataggttcgcttgtcacgtgttcgtgtcagaagactccacgaaggcgctagccgagagcgtaggaagagccttccagcagttccacaagcaattcgtggaatatacgtgccctacagaggacatctacctggagtag

SEQ ID NO: 272374 - DNA, 876 bp, Artificial Sequence
  derived and/or modified sequence
agcgccggcggcggcggcgccggcagccggctgcaggccgagatgctgcagatggatttgatagatgcgacaggagactccacaccagacgagcctgacgtgcacttctctaaaaagttcctgaatatatttatgagtggccggtcccgtagcagcagcgccgagtcattcggtctgttttcctgcatcattaacagggaagaacaagaacagacccaccggacgatatttaggttcgtgccccgccacgaagatgagcctgagctggaagttgacgatccactgcttgttgaattacaagctgaggactactggtacgaggcttataatatgcggaccggcgccagggggttctttacagcctattacgcgatcgaagtgacaaaagagccagaacatatggctgcactggccaaaaatagcgactgggtcgaccagtttcgggtgaagtttcttggcagcgtgcaggtgccttatcataagggggacgtggtgctttccgcagctatgcagaagattgcgactaccagaaggctaacggtgcactttaatcctccctcatcctgtgtccttgagatcagcgtgcgaggggtaaaaatcggggtgaaagcagatgattcccaggaggctaagggtaataagtgcagtcacttttttcaactgaagaatatttcattccgaggctatcaccccaagaataacaagtacttcggttttattaccaaacatctagcagaccacaggttcgcgtgccacgtgttcgtcagtgaggactctacaaaggcactggctgagagcgtgggccgtgccttccagcagtttcataagcagtttgtggagtatacttgcccaacggaagacatctacctggagtag

SEQ ID NO: 272375 - DNA, 876 bp, Artificial Sequence
  derived and/or modified sequence
agcgccggcggcggcggcgccggcagccggctgcaggccgagatgctccagatggaccttatcgacgccacaggcgactctacacccgatgagccagatgtgcatttctcgaaaaagtttctcaatattttcatgagcggcagatcgcggtcatcctcagctgagtccttcggtttgttctcttgcatcattaaccgtgaagagcaggagcaaacgcacaggactatctttaggtttgtgccacgccacgaagatgagcctgaactcgaggtggatgacccactgcttgttgaattgcaggccgaggactattggtatgaagcgtacaacatgcgcacgggggctcggggattcttcaccgcttactatgccattgaagtgaccaaggagccggagcatatggccgccctagcgaagaattctgattgggtggaccagtttagagtcaagtttctgggatctgtacaggtcccttatcataaaggagatgtcgtgctgtccgcagccatgcaaaagatagcgactactcggcgcctgaccgtgcacttcaaccctcctagttcatgtgtcctggagatatctgtcaggggcgtgaagatcggggtcaaggccgatgactcccaggaggctaagggcaacaagtgttctcacttcttccagctcaagaacatcagttttaggggataccatcccaagaataacaagtacttcggctttataactaaacacctggctgaccacaggttcgcatgccatgtttttgtgagtgaagactcaaccaaagccttagctgagagtgttggacgggccttccaacagtttcacaaacaatttgtagaatacacgtgccccaccgaggatatctatctcgagtag

SEQ ID NO: 272376 - DNA, 876 bp, Artificial Sequence
  derived and/or modified sequence
tctgcaggcggtggaggggctggaagtaggctacaggccgagatgttgcaaatggatcttattgacgctaccggagactcaacccccgacgagccggacgttcacttttccaagaagtttttgaacatcttcatgtctggacgatcccgttcctctagcgctgaaagctttgggctgttcagctgtataattaatagggaagaacaagaacagacccatagaacaatttttaggtttgtacctcgccatgaagacgaaccagagctcgaagtggatgatccactcttagttgagctgcaggccgaagactattggtacgaagcttacaacatgcgtaccggagccaggggcttctttactgcgtattacgccattgaagttacaaaagagcccgagcacatggccgctctcgccaagaacagcgactgggtggatcagtttagagtgaaattccttggcagtgtccaggtgccctaccataagggcgacgtggtactgtctgcggcaatgcagaagatcgcaacaactagaaggcttaccgtgcatttcaacccacctagtagttgcgtgttggagatttcagtgaggggcgtgaaaatcggtgtgaaagctgacgactcccaggaagctaagggcaataagtgtagccacttctttcaattaaaaaatatcagcttccgtggctaccaccccaagaataacaaatacttcgggtttattacaaaacacttggctgaccaccggttcgcgtgtcatgttttcgtctccgaggatagcacgaaagcccttgctgagtctgtcgggcgtgctttccaacagtttcacaaacagttcgtcgagtatacctgcccaacagaggatatatatctcgaatag

SEQ ID NO: 272377 - DNA, 876 bp, Artificial Sequence
  derived and/or modified sequence
tcagctgggggaggcggtgccggttcgcgtttgcaggcagagatgctccaaatggatcttattgacgccactggtgactctactcccgacgagccagacgttcacttctcaaagaaatttttgaacatctttatgtcgggcaggtctcgcagtagttccgcagaaagctttgggctttttagctgtatcattaatcgcgaagaacaggaacaaacacatagaactattttccgttttgtccctcggcatgaagatgagccggaactcgaagtggacgacccgctccttgtggagctgcaggccgaggattattggtacgaggcatataacatgcgcacaggggcacgcggtttctttactgcctactatgccatcgaggtgacaaaagaaccagagcacatggccgctctggctaaaaactctgactgggttgaccaattccgtgttaagttccttgggtcagtgcaagtgccgtaccacaagggagatgtcgtgttaagcgctgcaatgcagaaaattgcaaccacgaggagacttactgtccatttcaacccacccagttcttgcgtccttgaaattagtgtcaggggggtgaaaattggcgtaaaggccgacgacagccaggaggcgaaggggaacaagtgctctcatttcttccagttgaagaacattagtttcagaggctaccatcccaagaacaacaagtacttcggctttatcacaaagcatcttgctgatcatcgctttgcttgccatgtatttgtgagtgaggatagtaccaaggccctggctgagtccgtaggcagggcattccaacagttccataagcagttcgtggagtacacttgccccactgaagacatatacctggagtag

SEQ ID NO: 272378 - DNA, 876 bp, Artificial Sequence
  derived and/or modified sequence
agcgcgggaggagggggtgccggtagcaggctccaagccgagatgcttcagatggacctgatagacgctaccggtgactccacgcctgatgagccagacgtccacttctcaaagaagttcttaaacattttcatgtctggccgttcacggagttctagcgctgagagcttcggccttttttcttgtattataaatcgagaggaacaagagcaaacgcacagaactattttcaggttcgtccctcggcatgaggatgaacccgagctagaggtggatgatccgctcttggtggagctgcaggcggaagattactggtacgaggcctacaacatgcgtactggtgctcggggtttttttaccgcctactatgctattgaggtgactaaagagcccgagcacatggcagccttggccaagaactcggactgggtcgatcaattccgcgtcaaatttctcggcagtgtgcaagtaccatatcataagggagacgtcgtgttgagtgccgctatgcaaaagatcgctacgacgcgtcgtctgaccgtgcactttaaccctccttcaagttgtgtcctagaaattagcgtgcgcggagtcaagattggtgtgaaggctgatgacagccaggaggccaagggtaataagtgcagccattttttccagttaaagaatatctcgtttcgcggatatcaccccaagaacaataaatatttcggcttcatcaccaaacacctcgcggatcaccgcttcgcttgccatgtatttgtatccgaggattccacaaaggccctggctgagtccgtaggtagagcatttcagcagttccacaaacagttcgttgagtatacttgccctactgaagatatctacctcgagtag

SEQ ID NO: 272379 - DNA, 876 bp, Artificial Sequence
  derived and/or modified sequence
tctgcgggtggcggcggcgcggggagccggttgcaggccgagatgctgcagatggacctgatcgacgcgacgggggactccacgcctgacgaacccgacgtccatttctccaagaagttcctgaacatcttcatgagtggccgctcccgctcctccagtgccgagtccttcgggctgttctcctgcatcatcaaccgggaggagcaggagcagacccaccggaccatattcaggtttgtgcctcgacacgaagacgaacctgagctggaagtggatgaccctctgctagtggagctccaggctgaagactactggtacgaggcctacaacatgcgcactggtgcccggggcttctttactgcctattacgccatcgaagtcaccaaggagcccgagcacatggcagccctggctaaaaacagtgactgggtggaccagttccgggtgaagttcctgggctcagtccaggttccctatcacaagggcgatgtcgtcctctctgccgctatgcaaaagattgccaccacccgccggctaaccgtgcactttaacccgccctccagctgtgtcctggagatcagcgtgcggggtgtgaagataggtgtcaaggccgatgactcccaggaggccaaggggaataaatgtagccactttttccagttaaaaaacatctctttccgcggatatcatccaaagaacaacaagtactttgggttcatcaccaagcacctcgccgaccaccggtttgcctgccacgtctttgtgtctgaagactccaccaaagccctggcagagtccgtggggagagcattccagcagtttcacaagcagtttgtggagtacacctgccccacagaagatatctacctggagtag

SEQ ID NO: 272380 - DNA, 297 bp, Artificial Sequence
  derived and/or modified sequence
atggccgccaagcagcccccccccctgatgaagaagcacagccagaccgacctggtgagcagactgaagaccagaaagatcctgggcgtgggcggcgaggacgacgacggcgaggtgcacagaagcaagatcagccaggtgctgggcaacgagatcaagttcaccatcagagagcccctgggcctgagagtgtggcagttcgtgagcgccgtgctgttcagcggcatcgccatcatggccctggccttccccgaccagctgtacgacgccgtgttcgacggcgcccaggtgacctag

SEQ ID NO: 272381 - DNA, 222 bp, Artificial Sequence
  derived and/or modified sequence
atggccgccaagcagcccccccccctgatgaagaagcacagccagaccgacctggtgagcagactgaagaccagaaagatcctgggcgtgggcggcgaggacgacgacggcgaggtgcacagaagcaagatcagccaggtgctgggcaacgagatcaagttcaccatcagagagcccctgggcctgagagtgtggcagttcgtgagcgccgtgctgttctag

SEQ ID NO: 272382 - DNA, 240 bp, Artificial Sequence
  derived and/or modified sequence
atggccgccaagcagcccccccccctgatgaagaagcacagccagaccgacctggtgagcagactgaagaccagaaagatcctgggcgtgggcggcgaggacgacgacggcgaggtgcacagaagcaagatcagccaggtgctgggcaacgagatcaagttcaccatcagagagcccctgggcctgagagtgtggcagttcgtgagcgccgtgctgttcagcggcatcgccatcatgtag

SEQ ID NO: 272383 - DNA, 282 bp, Artificial Sequence
  derived and/or modified sequence
atggccgccaagcagcccccccccctgatgaagaagcacagccagaccgacctggtgagcagactgaagaccagaaagatcctgggcgtgggcggcgaggacgacgacggcgaggtgcacagaagcaagatcagccaggtgctgggcaacgagatcaagttcaccatcagagagcccctgggcctgagagtgtggcagttcgtgagcgccgtgctgttcagcggcatcgccatcatggccctggccttccccgaccagctgtacgacgccgtgttcgactag

SEQ ID NO: 272384 - DNA, 189 bp, Artificial Sequence
  derived and/or modified sequence
atggccgccaagcagcccccccccctgatgaagaagcacagccagaccgacctggtgagcagactgaagaccagaaagatcctgggcgtgggcggcgaggacgacgacggcgaggtgcacagaagcaagatcagccaggtgctgggcaacgagatcaagttcaccatcagagagcccctgggcctgtag

SEQ ID NO: 272385 - DNA, 297 bp, Artificial Sequence
  derived and/or modified sequence
atggccgctaagcagcctccccctctgatgaaaaagcattctcagactgatcttgtgagccggttgaagacaagaaagatcctaggggtgggaggcgaagacgacgacggagaggtgcacaggtcgaagatctctcaggtgctcgggaatgagataaagtttactatccgagagccactgggcctcagagtttggcagtttgtatcagccgtcctcttttccggcattgcaatcatggcactcgcttttcccgaccagctctacgatgctgtctttgatggggcgcaggtgacctag

SEQ ID NO: 272386 - DNA, 222 bp, Artificial Sequence
  derived and/or modified sequence
atggcagcgaagcagcccccccccctgatgaagaaacactcccagaccgacctggtgtcgaggcttaaaacacggaagattcttggagtgggaggagaggacgacgatggtgaggtacatcgatccaaaattagccaggttctgggaaacgagatcaaatttacaatccgtgaacccctgggtctgagagtgtggcagttcgtgagtgccgtgctattctag

SEQ ID NO: 272387 - DNA, 240 bp, Artificial Sequence
  derived and/or modified sequence
atggccgccaaacaaccacccccattaatgaaaaagcatagtcagactgatctagtcagcaggctgaagaccaggaagatcctgggagtgggaggcgaggacgatgatggcgaagtgcaccggtctaaaataagccaggtactgggtaacgaaattaaattcacgattagggaacccttaggattgcgtgtctggcagttcgttagtgctgtgctgttcagtgggattgccattatgtag

SEQ ID NO: 272388 - DNA, 282 bp, Artificial Sequence
  derived and/or modified sequence
atggctgcaaaacagccaccccccttgatgaaaaagcactctcagacagatctggtgagtcgtctcaagacaagaaagattcttggcgtaggcggggaagacgacgatggagaggtgcatcgtagcaaaatcagtcaggttctcgggaacgaaatcaaatttacaatacgcgagccccttggcctgcgtgtgtggcagttcgtgtctgctgttctattctcgggcatagccatcatggcgctagcatttccagatcagctctacgatgccgtgtttgattag

SEQ ID NO: 272389 - DNA, 189 bp, Artificial Sequence
  derived and/or modified sequence
atggccgccaaacagccccctcctctcatgaagaagcactctcagactgacctggtcagtcgattgaagaccagaaaaatcctaggagtgggcggcgaagatgacgatggagaagtgcatagatccaaaattagtcaagtactgggcaatgagatcaagttcacaattagggagcctctgggcctttag

SEQ ID NO: 272390 - DNA, 297 bp, Artificial Sequence
  derived and/or modified sequence
atggccgccaagcagcccccacccctgatgaagaagcacagccagacagacctggtgtcccggctgaagaccaggaagatcctgggcgtgggcggagaagatgatgatggagaggtgcacaggagcaagatcagccaggtgctgggcaatgagatcaagttcaccatccgggagcccctgggcctgcgggtgtggcagtttgtgtctgctgtgctcttcagcggcatcgccatcatggccctggccttcccagaccagctgtatgatgctgtgtttgatggagcccaggtgacctag

SEQ ID NO: 272391 - DNA, 222 bp, Artificial Sequence
  derived and/or modified sequence
atggccgccaagcagcccccacccctgatgaagaagcacagccagacagacctggtgtcccggctgaagaccaggaagatcctgggcgtgggcggagaagatgatgatggagaggtgcacaggagcaagatcagccaggtgctgggcaatgagatcaagttcaccatccgggagcccctgggcctgcgggtgtggcagtttgtgtctgctgtgctcttctag

SEQ ID NO: 272392 - DNA, 240 bp, Artificial Sequence
  derived and/or modified sequence
atggccgccaagcagcccccacccctgatgaagaagcacagccagacagacctggtgtcccggctgaagaccaggaagatcctgggcgtgggcggagaagatgatgatggagaggtgcacaggagcaagatcagccaggtgctgggcaatgagatcaagttcaccatccgggagcccctgggcctgcgggtgtggcagtttgtgtctgctgtgctcttcagcggcatcgccatcatgtag

SEQ ID NO: 272393 - DNA, 282 bp, Artificial Sequence
  derived and/or modified sequence
atggccgccaagcagcccccacccctgatgaagaagcacagccagacagacctggtgtcccggctgaagaccaggaagatcctgggcgtgggcggagaagatgatgatggagaggtgcacaggagcaagatcagccaggtgctgggcaatgagatcaagttcaccatccgggagcccctgggcctgcgggtgtggcagtttgtgtctgctgtgctcttcagcggcatcgccatcatggccctggccttcccagaccagctgtatgatgctgtgtttgattag

SEQ ID NO: 272394 - DNA, 189 bp, Artificial Sequence
  derived and/or modified sequence
atggccgccaagcagcccccacccctgatgaagaagcacagccagacagacctggtgtcccggctgaagaccaggaagatcctgggcgtgggcggagaagatgatgatggagaggtgcacaggagcaagatcagccaggtgctgggcaatgagatcaagttcaccatccgggagcccctgggcctgtag

SEQ ID NO: 272395 - DNA, 297 bp, Artificial Sequence
  derived and/or modified sequence
atggccgccaagcagcccccccccctgatgaagaagcacagccagaccgatctcgtcagcagactgaagacccgcaagatcctgggcgtgggcggcgaggatgatgacggcgaggtgcataggagcaaaatttcacaagtcctggggaatgaaattaaatttaccattcgcgagccactgggattgcgggtgtggcagtttgtgagcgcagtgttgttttccggcattgccattatggcactagccttcccggatcagctgtacgatgctgtattcgatggcgcccaggtaacatag

SEQ ID NO: 272396 - DNA, 222 bp, Artificial Sequence
  derived and/or modified sequence
atggccgccaagcagcccccccccctgatgaagaagcacagccagaccgatctggtctctagactgaagacacggaaaattctgggggtgggcggcgaggatgatgacggggaagttcacagatcaaagattagccaagtgctcggcaacgaaatcaaattcactatcagagagcccctcggactgcgggtgtggcagttcgtctccgcagtgctgttttag

SEQ ID NO: 272397 - DNA, 240 bp, Artificial Sequence
  derived and/or modified sequence
atggccgccaagcagcccccccccctgatgaagaagcacagccagaccgacctggttagtcgcctaaaaacccgaaaaatcctgggagtcggtggcgaggacgacgatggcgaagtacacaggtcgaaaatctcacaggtactaggaaacgaaatcaagttcacaatccgggagcctctcggactgcgcgtatggcaatttgtatcagccgtgctcttcagcgggatcgccattatgtag

SEQ ID NO: 272398 - DNA, 282 bp, Artificial Sequence
  derived and/or modified sequence
atggccgccaagcagcccccccccctgatgaagaagcacagccagacagaccttgtgagccgactgaaaacaaggaaaatattgggtgtagggggggaagacgatgatggagaggttcaccgcagcaagatttcacaggttcttggtaatgaaattaagttcacaattcgtgaaccactgggactccgagtttggcagtttgtgtcagctgtgcttttctccggtattgcgatcatggcactggcctttccagatcaattatacgacgccgtgtttgactag

SEQ ID NO: 272399 - DNA, 189 bp, Artificial Sequence
  derived and/or modified sequence
atggccgccaagcagcccccccccctgatgaagaagcacagccagactgacctggtctcccgtttaaagacgagaaaaatcctgggcgttggcggagaggatgacgacggagaagtgcaccggtccaagatctcacaagtcctcggcaatgagattaaattcaccatcagagagcccctcgggctgtag

SEQ ID NO: 272400 - DNA, 297 bp, Artificial Sequence
  derived and/or modified sequence
atggccgcaaaacagcctcccccactgatgaagaaacattcacagaccgatctcgtgtctaggcttaaaaccagaaagattctcggtgtcggtggcgaagatgatgatggtgaggtccatcgaagcaagatctcccaggtgcttggaaatgagatcaaattcaccatacgggagcccctcggcctcagagtttggcagtttgtaagcgccgtgctgtttagtggcatcgccataatggctctggcctttcccgatcagttgtacgacgccgtgtttgatggtgcccaggtgacctag

SEQ ID NO: 272401 - DNA, 222 bp, Artificial Sequence
  derived and/or modified sequence
atggccgcaaaacagccacctcctttgatgaagaaacactctcagacagaccttgtctctcgtttgaaaactcggaagattctgggagtgggcggagaagatgacgacggcgaggtgcacagatcaaaaatcagtcaggttctaggcaatgagattaagttcaccattcgggagccccttggtctgagagtctggcagtttgtgtctgccgtgttgttttag

SEQ ID NO: 272402 - DNA, 240 bp, Artificial Sequence
  derived and/or modified sequence
atggcagctaagcagcctcctccactaatgaaaaaacactcccagacggatctggtcagcagattgaagacgagaaaaatcctcggggtggggggtgaagacgacgacggagaggtgcatagatctaaaatcagccaggtccttggaaacgaaattaagtttaccattcgcgagcccctcgggctgcgcgtttggcagtttgtatccgccgtgctgttttccgggattgccatcatgtag

SEQ ID NO: 272403 - DNA, 282 bp, Artificial Sequence
  derived and/or modified sequence
atggcagccaaacaaccaccgcctttgatgaaaaaacactcacagaccgacctggtgagtaggctcaagacacgcaagatcctgggggtgggcggagaagacgacgatggcgaggtgcaccgaagcaagatcagccaagtattaggaaatgagatcaaattcactatacgcgagccgctagggctcagggtgtggcagtttgtttccgccgtactgttctcaggtattgcaataatggctctggccttccctgatcaattgtacgatgcagtattcgattag

SEQ ID NO: 272404 - DNA, 189 bp, Artificial Sequence
  derived and/or modified sequence
atggcagccaaacaaccaccccctctcatgaagaagcatagccagaccgacctggtctctagactgaagacacgtaagatccttggagttggcggtgaggatgacgatggcgaagtgcaccgcagcaagattagtcaggttctagggaatgagatcaagttcactattcgggaacctttggggctatag

SEQ ID NO: 272405 - DNA, 556 bp, Artificial Sequence
  derived and/or modified sequence
gtgcactccttctttctctctccaccagcacgtctgcgaggaagtgggaatgatggctccatttcacagatgaggaaaccgagactcagagcacaaggccacacagcaggaagagggcagctgtgattagagaagccagggccaccccggagccagcctctgaggcttcacctcaccccgtttacactgctgtctcctctgcatagatttggctgactgaggacgcgacagcccttctgcagaggccgggctggaggagaagatggcggccaagcagcccccgcctctgatgaagaagcacagccagacggacctcgtgagccgcctgaagacccgcaagatcctcggcgtgggcggggaggatgacgacggggaggtgcatcgctccaagatcagccaggtcttaggcaatgaaatcaagtttaccattcgggagcctttggggctcagggtctggcagttcgtctctgctgtgctcttctccggcattgccatcatggcgcttgccttccctgaccagctctatgatgcggtctttgatggagcccaggtgacc

SEQ ID NO: 272406 - DNA, 533 bp, Artificial Sequence
  derived and/or modified sequence
agagcctcgcgggggagccgggagcctggtttccccgccaacccccatcccgcccgccccggcggccaccctgggggcgaggcagcccggcgcgtgggaggggacggcgcgccattggcttgtgcgcggaaccgagaggagggaccagcgcgggccgccagactcgggcagctgtgattagagaagccagggccaccccggagccagcctctgaggcttcacctcaccccgtttacactgctgtctcctctgcatagatttggctgactgaggacgcgacagcccttctgcagaggccgggctggaggagaagatggcggccaagcagcccccgcctctgatgaagaagcacagccagacggacctcgtgagccgcctgaagacccgcaagatcctcggcgtgggcggggaggatgacgacggggaggtgcatcgctccaagatcagccaggtcttaggcaatgaaatcaagtttaccattcgggagcctttggggctcagggtctggcagttcgtctctgctgtgctcttct

SEQ ID NO: 272407 - DNA, 602 bp, Artificial Sequence
  derived and/or modified sequence
cgcgggccgccagactcggtaagccccggccgcgcagggcgccgcgcgcagtccagccggcccggccctgccctgccctgccctgtcctgccctgccctgccctgccctgccctgcactgcccggcccggcacgggcggcgcgatgtgaggcgtccgagcccggagcctccgcctggcatcagctccacgtagcccagcgccggcacgcgcgaggcccggcagctgtgattagagaagccagggccaccccggagccagcctctgaggcttcacctcaccccgtttacactgctgtctcctctgcatagatttggctgactgaggacgcgacagcccttctgcagaggccgggctggaggagaagatggcggccaagcagcccccgcctctgatgaagaagcacagccagacggacctcgtgagccgcctgaagacccgcaagatcctcggcgtgggcggggaggatgacgacggggaggtgcatcgctccaagatcagccaggtcttaggcaatgaaatcaagtttaccattcgggagcctttggggctcagggtctggcagttcgtctctgctgtgctcttctccggcattgccatcatg

SEQ ID NO: 272408 - DNA, 642 bp, Artificial Sequence
  derived and/or modified sequence
agagtcgaaaaggacaggaattcttcatgttctgcccatgtgaatgaccgtcgagacaggaaaaacctcccagtgacttctgagcggtgatggaggccatcagagggcctgatccccttgcccacagcagcagcttcagacccccgggggaggagcccaggaatgcctccttcttgccacctgctctgccctgacctctcgccctcttcagcacaggcagctgtgattagagaagccagggccaccccggagccagcctctgaggcttcacctcaccccgtttacactgctgtctcctctgcatagatttggctgactgaggacgcgacagcccttctgcagaggccgggctggaggagaagatggcggccaagcagcccccgcctctgatgaagaagcacagccagacggacctcgtgagccgcctgaagacccgcaagatcctcggcgtgggcggggaggatgacgacggggaggtgcatcgctccaagatcagccaggtcttaggcaatgaaatcaagtttaccattcgggagcctttggggctcagggtctggcagttcgtctctgctgtgctcttctccggcattgccatcatggcgcttgccttccctgaccagctctatgatgcggtctttgatg

SEQ ID NO: 272409 - DNA, 571 bp, Artificial Sequence
  derived and/or modified sequence
attgttcccggcaggaggagtgcgcggcgcaaacttgcgagttcccccagtctttgcccccgcagggccgcggacggaggtggtggcggagttcccgctgcccacaagtctggcccgaccttctggggtgggggcctgggggcaggggccctgggccggagaacccggggccgcctaacggctcggagctcaccgccgggggacaccggcgctgaggcctgggtctcagaaagtggggcagctgtgattagagaagccagggccaccccggagccagcctctgaggcttcacctcaccccgtttacactgctgtctcctctgcatagatttggctgactgaggacgcgacagcccttctgcagaggccgggctggaggagaagatggcggccaagcagcccccgcctctgatgaagaagcacagccagacggacctcgtgagccgcctgaagacccgcaagatcctcggcgtgggcggggaggatgacgacggggaggtgcatcgctccaagatcagccaggtcttaggcaatgaaatcaagtttaccattcgggagcctttggggctcag

SEQ ID NO: 272410 - protein, 714 aa, Artificial Sequence
  derived and/or modified sequence
MDKFWWHAAWGLCLVPLSLAQIDLNITCRFAGVFHVEKNGRYSISRTEAADLCKAFNSTLPTMAQMEKALSIGFETCRYGFIEGHVVIPRIHPNSICAANNTGVYILTSNTSQYDTYCFNASAPPEEDCTSVTDLPNAFDGPITITIVNRDGTRYVQKGEYRTNPEDIYPSNPTDDDVSSGSSSERSSTSGGYIFYTFSTVHPIPDEDSPWITDSTDRIPATTLMSTSATATETATKRQETWDWFSWLFLPSESKNHLHTTTQMAGTSSNTISAGWEPNEENEDERDRHLSFSGSGIDDDEDFISSTISTTPRAFDHTKQNQDWTQWNPSHSNPEVLLQTTTRMTADVDRNGTTAYEGNWNPEAHPPLIHHEHHEEEETPHSTSTIQATPSSTTEETATQKEQWFGNRWHEGYRQTPKEDSHSTTGTAAASAHTSHPMQGRTTPSPEDSSWTDFFNPISHPMGRGHQAGRRMDMDSSHSITLQPTANPNTGLVEDLDRTGPLSMTTRNRNDVTGGRRDPNHSEGSTTLLEGYTSHYPHTKESRTFIPVTSAKTGSFGVTAVTVGDSNSNVNRSLSGDQDTFHPSGGSHTTHGSESDGHSHGSQEGGANTTSGPIRTPQIPEWLIILASLLALALILAVCIAVNSRRRCGQKKKLVINSGNGAVEDRKPSGLNGEASKSQEMVHLVNKESSETPDQFMTADETRNLQNVDMKIGV

SEQ ID NO: 272411 - DNA, 2145 bp, Artificial Sequence
  derived and/or modified sequence
atggacaaattctggtggcacgccgcatggggcctctgtttggtgcccctgagtcttgcccagattgatttaaatatcacttgcaggttcgcaggtgtgtttcatgtcgaaaagaacggacgttattccataagtagaaccgaggccgcagacctctgtaaagctttcaactccacccttccaacaatggctcaaatggaaaaggcactctccattggcttcgagacatgtcggtacggatttatagaggggcatgtcgttattcctaggatccatcccaattctatttgtgccgctaataataccggggtgtacatcctcaccagtaataccagccaatatgacacctactgcttcaacgcttctgccccccctgaggaagactgtactagtgtcactgatctcccaaatgcattcgatggaccaattacaatcacgatcgtgaaccgcgatggcacaaggtacgtccaaaaaggggagtatcgcacaaatcccgaggacatctacccaagtaaccccacggacgacgacgtgagtagcggaagctcaagtgagagatcctccacttctgggggatatatcttttacactttctctaccgtgcatcccattccggacgaggactccccctggatcaccgactcaactgatagaatcccagccaccacgctgatgtctacctctgctaccgcgactgaaaccgccaccaagcggcaggaaacgtgggattggtttagttggttgttcctgccctcggagagcaagaatcacttgcacactacaactcagatggcgggcacgtcttcaaataccatatccgccgggtgggagcccaatgaggagaatgaagacgaacgggacaggcacttgtcctttagtggctctgggattgacgatgacgaggattttatttcaagcacaattagtacaacaccacgagcctttgaccataccaaacagaatcaggactggacgcaatggaatccatcccatagcaacccggaggtgctgctgcagaccacgacaagaatgaccgctgacgtggatagaaatggcaccacagcatacgaaggtaactggaatccagaggcccatcctcctctgattcaccacgagcaccacgaggaagaggaaacaccgcatagcacttcaaccatccaggccacaccatcatccaccacggaggagaccgcaacacagaaggagcagtggttcggcaacagatggcatgaaggctacaggcagacgcctaaggaggactcccacagcactactggtacagcagctgcctccgctcacacctcccacccaatgcagggccggactactccgagcccggaggactccagctggactgatttttttaatccaattagccacccaatgggacgcgggcaccaggccgggcgacgcatggatatggatagcagccattcgatcaccctacagccgacagccaaccctaatacaggcctcgtcgaggatctggacaggactggtcctctctccatgacaacccgtaatagaaatgatgttaccggtgggcgccgagatccaaaccactccgagggatccacgacactgctggagggctatacaagccactatcctcacacaaaggagtcacggacctttattccagtcacatccgcaaagactggttcctttggtgtcaccgcagtaacagtaggcgactccaactcaaatgtcaatcgatcgctgtctggagaccaggacacatttcatccatccgggggctcccacaccactcacggctccgagagtgatggccatagtcatggtagtcaggaaggaggggctaacacaacgtcaggcccaatcaggactccccagattccagagtggctcatcattctggcttccttactggcactggctctcattctcgccgtttgcattgccgtaaatagcagaaggaggtgcgggcagaaaaagaagcttgtcataaacagcgggaacggggcagttgaagatcgaaaacccagcggcctgaatggtgaagccagtaagtcccaggagatggttcatctggtcaataaggagagttctgaaacccccgatcagtttatgacagcagacgaaacccgcaatctgcagaacgtggatatgaagatcggcgtctag

SEQ ID NO: 272412 - DNA, 2145 bp, Artificial Sequence
  derived and/or modified sequence
atggacaagttctggtggcacgccgcctggggcctgtgcctggtgcccctgagcctggcccagattgacctgaacatcacctgccgctttgctggggtcttccacgtggagaagaatggccgctacagcatcagcaggacagaagctgctgacctgtgcaaggccttcaacagcaccctgcccaccatggcccagatggagaaggccctgagcatcggctttgagacctgccgctatggcttcatcgagggccacgtggtgatcccccgcatccaccccaacagcatctgtgccgccaacaacacaggagtgtacatcctgaccagcaacaccagccagtatgacacctactgcttcaatgccagcgcccccccagaggaggactgcacctctgtgacagacctgcccaatgcctttgatggccccatcaccatcaccatcgtgaacagagatggcaccaggtatgtgcagaagggggagtaccgcaccaaccctgaggacatctaccccagcaaccccacagatgatgatgtgagcagcggcagcagcagcgagaggagcagcaccagcggcggctacatcttctacaccttcagcacagtgcaccccatcccagatgaggacagcccctggatcacagacagcacagaccgcatcccagccaccaccctgatgagcaccagcgccacagccacagaaacagccaccaagaggcaggagacctgggactggttctcctggctgttcctgcccagcgagagcaagaaccacctgcacaccaccacccagatggccggcaccagcagcaacaccatctctgctggctgggagcccaatgaagaaaatgaagatgagcgggacagacacctgtccttcagcggcagcggcattgatgatgatgaggacttcatcagcagcaccatcagcaccaccccccgggcctttgaccacaccaagcagaaccaggactggacccagtggaaccccagccacagcaaccctgaggtgctgctgcagaccaccaccaggatgacagcagatgtggacagaaatggcaccacagcctatgagggcaactggaaccctgaggcccaccccccactcatccaccacgagcaccacgaggaggaggagaccccccacagcaccagcaccatccaggccacccccagcagcaccacagaggagacagccacccagaaggagcagtggtttggaaaccgctggcatgagggctaccggcagacccccaaggaggacagccacagcaccactggaacagctgctgccagcgcccacaccagccaccccatgcagggccgcaccacccccagccctgaggacagctcctggacagacttcttcaaccccatcagccaccccatgggccggggccaccaggccggccgcaggatggacatggacagcagccacagcatcaccctgcagcccacagccaaccccaacacaggcctggtggaggacctggacagaacaggccccctgtccatgaccaccaggaacagaaatgatgtgactggaggccggcgggaccccaaccacagcgagggcagcaccaccctgctggagggctacaccagccactacccccacaccaaggagagcaggaccttcatccctgtgaccagcgccaagacaggcagctttggagtgacagctgtgacagtgggggacagcaacagcaatgtgaacagaagcctgagcggggaccaggacaccttccaccccagcggcggcagccacaccacccacggcagcgagagtgatggccacagccacggcagccaggagggcggggccaacaccaccagcggccccatccgcaccccccagatccctgagtggctgatcatcctggccagcctgctggccctggccctgatcctggccgtgtgcatcgctgtgaacagcagaagaagatgtggccagaagaagaagctggtgatcaacagcggaaatggagctgtggaggacaggaagcccagcggcctgaatggagaggccagcaagagccaggagatggtgcacctggtgaacaaggagagcagcgagaccccagaccagttcatgacagcagatgagaccaggaacctgcagaatgtggacatgaagattggagtgtag

SEQ ID NO: 272413 - DNA, 2145 bp, Artificial Sequence
  derived and/or modified sequence
atggacaagttctggtggcacgccgcctggggcctgtgcctggtgcccctttcactggcccagatagacttgaacatcacctgccgatttgctggcgtctttcatgttgagaaaaacggccgctactccatcagccgtactgaggccgctgacctctgtaaggccttcaacagcacactgcctacgatggcacaaatggagaaagccttgtccattggctttgagacctgtaggtatggctttatcgaaggtcatgtggtcatccctaggattcatccaaatagtatctgtgctgctaacaatactggggtctatatcctgacttctaacacttctcagtacgatacatattgtttcaacgcttccgcccccccagaggaggattgtactagcgtgaccgacttgccaaatgcctttgacggacccatcactattaccatcgtcaacagagatggtactcgctatgttcagaagggcgagtaccgtacgaatccagaagatatttacccaagtaatccaacagatgacgacgtctcttctggctccagcagcgagagatccagcacttcagggggttacatcttttacaccttctctacggtgcacccaatccccgacgaggatagcccttggattactgatagtacggacagaatcccagctaccacattgatgtccacgtccgccactgcaacagaaaccgctactaaacgacaagaaacctgggattggttctcttggttgtttttgccttctgaatccaagaatcacttacacactaccactcagatggccggaactagttcgaataccatcagtgcaggctgggagccgaacgaggagaacgaagatgaacgggaccgccatctcagcttttcgggcagtggaatcgacgacgatgaggactttatttctagcactatcagtaccactccaagagctttcgatcacactaagcagaaccaagactggacgcaatggaacccttctcactccaatcccgaggtacttttgcaaacaaccactaggatgacggctgatgtggataggaacgggaccaccgcctacgaagggaattggaaccccgaggctcacccccctttaatccatcacgagcaccatgaggaagaggaaactccccacagtacatccacaatccaggctactccaagcagcactaccgaagaaacagcaacgcaaaaagaacagtggtttggaaacagatggcatgagggctatcggcagactcctaaggaggattcacacagcactaccggcactgcggccgcctccgcgcacacttcccatcccatgcaaggtcgcactaccccatcccctgaggacagttcttggaccgacttctttaacccaatctcccaccccatgggccgaggccatcaagcaggtaggcgtatggatatggactcctctcattctatcaccctgcaaccaaccgctaatcctaataccggcctggtggaggacctagatcggacaggaccacttagcatgactacacgaaatcggaatgatgtgacagggggacgcagggatcccaaccactctgaaggtagcacgacgcttttagagggctatacctctcactatccgcatactaaagaaagccgcacttttattccagtgacttctgctaaaaccggcagcttcggagtgaccgctgtcactgtgggcgacagcaattctaacgtgaaccgctctttgagtggcgaccaggataccttccatccgtcgggcggaagccatacaacccatggctctgagagcgacggacatagtcatggctcacaagaaggaggcgcaaataccacttcagggcccatcagaacaccccagatacctgaatggcttataattctggcctctctcctggccctagcattgatcttggccgtgtgtattgcagtcaattcgcgtagacgatgcggacaaaagaagaagctcgttataaactctggaaacggcgctgtggaggacagaaaaccttcaggactgaatggggaggccagcaagagtcaggaaatggtacaccttgtgaataaggaatccagtgagacgccagatcagtttatgacagccgacgagactcgcaacttgcagaacgtcgatatgaagatcggtgtctag

SEQ ID NO: 272414 - DNA, 2145 bp, Artificial Sequence
  derived and/or modified sequence
atggataagttttggtggcacgctgcttgggggctttgcctcgtgccactgagtctggcacagatcgatcttaacatcacgtgccggttcgctggagtctttcatgtagagaaaaacggaaggtacagcatctctcggaccgaggcagcggatctctgcaaggccttcaattctacccttccaacaatggcacagatggaaaaggcactctcgatcgggtttgagacctgcagatatggattcatcgaaggacacgtcgtgattcccagaatccacccaaatagcatctgtgctgcgaataataccggcgtgtatattctgacaagcaacacaagccagtatgatacatattgttttaacgcttccgctcccccagaggaagattgcacaagcgtcacagatctacccaatgcttttgatggtcccatcaccatcacgattgtgaaccgcgacggcaccaggtacgtgcagaaaggcgagtataggaccaacccagaggatatctatccttcaaaccctaccgatgacgacgtgtccagcgggagctcctcagaaaggtcatctacatctggaggatacattttttacaccttttccaccgtacacccaatccccgatgaggatagtccctggatcactgactccacagacaggataccagccactacgttgatgtccacctctgccacagcgaccgaaacggcaaccaagcgccaggagacatgggactggtttagctggctctttctcccttcagaaagcaaaaatcatctgcacactaccacccagatggcgggaacatccagcaacaccatcagtgccggatgggaacctaacgaagaaaacgaggatgaacgcgacagacacctgtcattcagtggctcggggattgacgacgatgaggactttatatcttcgaccattagcaccactccccgagctttcgatcacaccaagcagaatcaggattggacccagtggaacccttcacattccaaccccgaggtgcttttgcaaacaaccacacgcatgaccgctgacgttgatcgcaatggcaccacagcgtacgaggggaactggaaccctgaagcccacccccctctcatccatcacgaacatcatgaggaggaggagacccctcactccacctcaacaatacaggccacgccaagttcgactaccgaggaaaccgccacccagaaagagcagtggtttggtaacaggtggcatgagggctatcgacagacccctaaggaggattctcattccacaaccgggaccgccgctgcttcagctcatacctctcatccaatgcagggaagaaccacaccatcccccgaagacagtagctggaccgatttctttaaccccatttcacaccccatggggaggggccaccaggccggtaggagaatggatatggacagttctcactccatcaccctccagcctacagccaaccccaatacgggcttggtggaagatctcgacagaacgggaccacttagtatgactacgagaaatcggaacgacgtaaccggcggtcgcagagaccctaatcattctgaaggctctacaactttgctggagggctacacttcccactacccccacaccaaggagtcgcgcaccttcatcccagtgaccagtgctaaaactgggtcattcggagtgacagccgtgaccgttggcgactcaaatagcaacgttaatcggtctctgtctggcgatcaggacactttccacccctccggcggaagccacactactcacggttcggagagtgacggtcactctcacgggagtcaggagggaggagcgaatacgacaagtggccctattagaacaccacagataccagaatggctcattatcctcgcatccctcttggctctggctctgattctagctgtgtgcatagccgtaaactcccgtcgcaggtgcggtcagaaaaaaaaactggtgatcaactccggcaatggggcagtcgaggaccgcaagccgtccggtctaaatggggaagcttccaagtcacaggaaatggtgcatctggtaaataaggaatcttccgagacacccgaccagttcatgaccgctgatgagacaaggaacctccagaatgtcgacatgaagattggcgtctag

SEQ ID NO: 272415 - DNA, 2414 bp, Artificial Sequence
  derived and/or modified sequence
cctcattgcccagcggaccccagcctctgccaggttcggtccgccatcctcgtcccgtcctccgccggcccctgccccgcgcccagggatcctccagctcctttcgcccgcgccctccgttcgctccggacaccatggacaagttttggtggcacgcagcctggggactctgcctcgtgccgctgagcctggcgcagatcgatttgaatataacctgccgctttgcaggtgtattccacgtggagaaaaatggtcgctacagcatctctcggacggaggccgctgacctctgcaaggctttcaatagcaccttgcccacaatggcccagatggagaaagctctgagcatcggatttgagacctgcaggtatgggttcatagaagggcacgtggtgattccccggatccaccccaactccatctgtgcagcaaacaacacaggggtgtacatcctcacatccaacacctcccagtatgacacatattgcttcaatgcttcagctccacctgaagaagattgtacatcagtcacagacctgcccaatgcctttgatggaccaattaccataactattgttaaccgtgatggcacccgctatgtccagaaaggagaatacagaacgaatcctgaagacatctaccccagcaaccctactgatgatgacgtgagcagcggctcctccagtgaaaggagcagcacttcaggaggttacatcttttacaccttttctactgtacaccccatcccagacgaagacagtccctggatcaccgacagcacagacagaatccctgctaccactttgatgagcactagtgctacagcaactgagacagcaaccaagaggcaagaaacctgggattggttttcatggttgtttctaccatcagagtcaaagaatcatcttcacacaacaacacaaatggctggtacgtcttcaaataccatctcagcaggctgggagccaaatgaagaaaatgaagatgaaagagacagacacctcagtttttctggatcaggcattgatgatgatgaagattttatctccagcaccatttcaaccacaccacgggcttttgaccacacaaaacagaaccaggactggacccagtggaacccaagccattcaaatccggaagtgctacttcagacaaccacaaggatgactgcagatgtagacagaaatggcaccactgcttatgaaggaaactggaacccagaagcacaccctcccctcattcaccatgagcatcatgaggaagaagagaccccacattctacaagcacaatccaggcaactcctagtagtacaacggaagaaacagctacccagaaggaacagtggtttggcaacagatggcatgagggatatcgccaaacacccaaagaagactcccattcgacaacagggacagctgcagcctcagctcataccagccatccaatgcaaggaaggacaacaccaagcccagaggacagttcctggactgatttcttcaacccaatctcacaccccatgggacgaggtcatcaagcaggaagaaggatggatatggactccagtcatagtataacgcttcagcctactgcaaatccaaacacaggtttggtggaagatttggacaggacaggacctctttcaatgacaacgcgtaataggaatgatgtcacaggtggaagaagagacccaaatcattctgaaggctcaactactttactggaaggttatacctctcattacccacacacgaaggaaagcaggaccttcatcccagtgacctcagctaagactgggtcctttggagttactgcagttactgttggagattccaactctaatgtcaatcgttccttatcaggagaccaagacacattccaccccagtggggggtcccataccactcatggatctgaatcagatggacactcacatgggagtcaagaaggtggagcaaacacaacctctggtcctataaggacaccccaaattccagaatggctgatcatcttggcatccctcttggccttggctttgattcttgcagtttgcattgcagtcaacagtcgaagaaggtgtgggcagaagaaaaagctagtgatcaacagtggcaatggagctgtggaggacagaaagccaagtggactcaacggagaggccagcaagtctcaggaaatggtgcatttggtgaacaaggagtcgtcagaaactccagaccagtttatgacagctgatgagacaaggaacctgcagaatgtggacatgaagattggggtgtaacacctacaccattatcttggaaagaaacaaccgttggaaacataaccattacagggagctgggacacttaacagatgcaatgtgctactgattgtttcattgcgaatcttttttagcataaaattttctactctt

SEQ ID NO: 272416 - DNA, 2145 bp, Artificial Sequence
  derived and/or modified sequence
atggacaagttctggtggcacgccgcctggggcctgtgcctggtgcccctgagcctggcccagatcgacctgaacatcacctgcagattcgccggcgtgttccacgtggagaagaacggcagatacagcatcagcagaaccgaggccgccgacctgtgcaaggccttcaacagcaccctgcccaccatggcccagatggagaaggccctgagcatcggcttcgagacctgcagatacggcttcatcgagggccacgtggtgatccccagaatccaccccaacagcatctgcgccgccaacaacaccggcgtgtacatcctgaccagcaacaccagccagtacgacacctactgcttcaacgccagcgccccccccgaggaggactgcaccagcgtgaccgacctgcccaacgccttcgacggccccatcaccatcaccatcgtgaacagagacggcaccagatacgtgcagaagggcgagtacagaaccaaccccgaggacatctaccccagcaaccccaccgacgacgacgtgagcagcggcagcagcagcgagagaagcagcaccagcggcggctacatcttctacaccttcagcaccgtgcaccccatccccgacgaggacagcccctggatcaccgacagcaccgacagaatccccgccaccaccctgatgagcaccagcgccaccgccaccgagaccgccaccaagagacaggagacctgggactggttcagctggctgttcctgcccagcgagagcaagaaccacctgcacaccaccacccagatggccggcaccagcagcaacaccatcagcgccggctgggagcccaacgaggagaacgaggacgagagagacagacacctgagcttcagcggcagcggcatcgacgacgacgaggacttcatcagcagcaccatcagcaccacccccagagccttcgaccacaccaagcagaaccaggactggacccagtggaaccccagccacagcaaccccgaggtgctgctgcagaccaccaccagaatgaccgccgacgtggacagaaacggcaccaccgcctacgagggcaactggaaccccgaggcccacccccccctgatccaccacgagcaccacgaggaggaggagaccccccacagcaccagcaccatccaggccacccccagcagcaccaccgaggagaccgccacccagaaggagcagtggttcggcaacagatggcacgagggctacagacagacccccaaggaggacagccacagcaccaccggcaccgccgccgccagcgcccacaccagccaccccatgcagggcagaaccacccccagccccgaggacagcagctggaccgacttcttcaaccccatcagccaccccatgggcagaggccaccaggccggcagaagaatggacatggacagcagccacagcatcaccctgcagcccaccgccaaccccaacaccggcctggtggaggacctggacagaaccggccccctgagcatgaccaccagaaacagaaacgacgtgaccggcggcagaagagaccccaaccacagcgagggcagcaccaccctgctggagggctacaccagccactacccccacaccaaggagagcagaaccttcatccccgtgaccagcgccaagaccggcagcttcggcgtgaccgccgtgaccgtgggcgacagcaacagcaacgtgaacagaagcctgagcggcgaccaggacaccttccaccccagcggcggcagccacaccacccacggcagcgagagcgacggccacagccacggcagccaggagggcggcgccaacaccaccagcggccccatcagaaccccccagatccccgagtggctgatcatcctggccagcctgctggccctggccctgatcctggccgtgtgcatcgccgtgaacagcagaagaagatgcggccagaagaagaagctggtgatcaacagcggcaacggcgccgtggaggacagaaagcccagcggcctgaacggcgaggccagcaagagccaggagatggtgcacctggtgaacaaggagagcagcgagacccccgaccagttcatgaccgccgacgagaccagaaacctgcagaacgtggacatgaagatcggcgtgtag

SEQ ID NO: 272417 - DNA, 2100 bp, Artificial Sequence
  derived and/or modified sequence
atggataaattttggtggcacgcggcctggggactttgtttggtgcccctaagcctggctcagatcgatttgaacattacttgccgtttcgctggcgtgtttcacgtcgagaagaacggaagatattcaattagtagaacggaggcagccgacctctgtaaggctttcaactctacactgccaaccatggcccaaatggaaaaagccctgtcgataggttttgaaacctgccggtacggctttatcgaaggtcacgttgttataccacggatccacccaaactccatctgtgctgcaaataataccggcgtgtacatcttgaccagcaacacaagtcagtacgatacatactgcttcaacgccagcgccccgccagaagaggattgtacgtcagtaactgacctgccaaacgcctttgacgggcctattaccatcaccattgtcaaccgagatggtactagatatgttcaaaagggcgaatatcgcacaaatcctgaggatatctaccccagtaaccctactgatgatgacgtgagttctggctcaagcagtgaaagatcctccaccagcggcggctatatcttttataccttctctaccgtccatccaatcccagatgaggactctccctggatcacagactcaacagatagaatcccggctaccaccctcatgtccacttcggcaaccgcgacagaaacagccacaaagcgccaagagacgtgggactggttttcctggctgtttctaccaagtgaatccaagaatcacctgcacacaaccactcaaatggcgggaacttcctccaataccatctccgccggatgggaacctaatgaagagaatgaagacgagagagatagacacttatcctttagtggtagtggaatcgatgacgatgaagatttcatctcatccacaatcagcactacacctcgcgcctttgaccatacaaagcagaaccaggattggacacaatggaatccctctcactcgaatcccgaggtgcttcttcagactacgacacgaatgacagatgtggaccggaacggcaccacagcatatgaaggcaactggaaccccgaggcgcatccacctcttattcaccatgaacatcatgaagaggaggagactccccactcaactagcactacagctagtgctcacactagccacccaatgcagggacgcaccaccccatcacccgaagattcctcatggacagacttcttcaatccgatcagccaccccatggggagggggcaccaggccggcagacgcatggatatggattcctcacattcaattactctgcaacccacagcaaacccgaataccgggctggtcgaggatctcgacaggacgggcccactcagtatgactacccaacaatccaactcccaaagcttctctactagccacgagggactggaagaggataaagaccatcctacaacttctaccctgacctcatccaaccggaacgacgtaactggagggaggcgagaccccaatcatagcgagggtagtacaaccctgctcgagggatatacttcccactatcctcacacaaaggagtccaggacattcattcccgtcacatcggctaaaaccgggagttttggcgtgacagcagtgacagttggagattccaactccaacgttaatcgatccctctctggagatcaggacacctttcatcctagcggcggctcccacacaacacacggaagcgaatcagacggtcacagccacggtagtcaggagggcggggccaatacaaccagcggccccatccggacacctcagattcccgagtggctgataatactggctagtttgctggctcttgcccttatcctggcggtctgcatcgccgtcaactcacgaaggaggtgcgggcaaaaaaaaaaactcgtgatcaatagcgggaacggcgcggtggaagaccgcaagccctccggcctgaacggggaggcttccaagagccaggaaatggttcatctggtgaacaaagagtctagtgaaacccccgatcagtttatgactgcagacgaaacacgtaatttgcagaacgtagatatgaagatcggcgtttag

SEQ ID NO: 272418 - DNA, 2100 bp, Artificial Sequence
  derived and/or modified sequence
atggacaagttctggtggcacgccgcctggggcctgtgcctggtgcccctgagcctggcccagattgacctgaacatcacctgccgctttgctggggtcttccacgtggagaagaatggccgctacagcatcagcaggacagaagctgctgacctgtgcaaggccttcaacagcaccctgcccaccatggcccagatggagaaggccctgagcatcggctttgagacctgccgctatggcttcatcgagggccacgtggtgatcccccgcatccaccccaacagcatctgtgccgccaacaacacaggagtgtacatcctgaccagcaacaccagccagtatgacacctactgcttcaatgccagcgcccccccagaggaggactgcacctctgtgacagacctgcccaatgcctttgatggccccatcaccatcaccatcgtgaacagagatggcaccaggtatgtgcagaagggggagtaccgcaccaaccctgaggacatctaccccagcaaccccacagatgatgatgtgagcagcggcagcagcagcgagaggagcagcaccagcggcggctacatcttctacaccttcagcacagtgcaccccatcccagatgaggacagcccctggatcacagacagcacagaccgcatcccagccaccaccctgatgagcaccagcgccacagccacagaaacagccaccaagaggcaggagacctgggactggttctcctggctgttcctgcccagcgagagcaagaaccacctgcacaccaccacccagatggccggcaccagcagcaacaccatctctgctggctgggagcccaatgaagaaaatgaagatgagcgggacagacacctgtccttcagcggcagcggcattgatgatgatgaggacttcatcagcagcaccatcagcaccaccccccgggcctttgaccacaccaagcagaaccaggactggacccagtggaaccccagccacagcaaccctgaggtgctgctgcagaccaccaccaggatgacagatgtggacagaaatggcaccacagcctatgagggcaactggaaccctgaggcccaccccccactcatccaccacgagcaccacgaggaggaggagaccccccacagcaccagcaccacagccagcgcccacaccagccaccccatgcagggccgcaccacccccagccctgaggacagctcctggacagacttcttcaaccccatcagccaccccatgggccggggccaccaggccggccgcaggatggacatggacagcagccacagcatcaccctgcagcccacagccaaccccaacacaggcctggtggaggacctggacagaacaggccccctgtccatgaccacccagcagagcaacagccagagcttcagcaccagccatgagggcctggaggaggacaaggaccaccccaccaccagcaccctgaccagcagcaacagaaatgatgtgactggaggaagaagagaccccaaccacagcgagggcagcaccaccctgctggagggctacaccagccactacccccacaccaaggagagcaggaccttcatccctgtgaccagcgccaagacaggcagctttggagtgacagctgtgacagtgggggacagcaacagcaatgtgaacagaagcctgagcggggaccaggacaccttccaccccagcggcggcagccacaccacccacggcagcgagagtgatggccacagccacggcagccaggagggcggggccaacaccaccagcggccccatccgcaccccccagatccctgagtggctgatcatcctggccagcctgctggccctggccctgatcctggccgtgtgcatcgctgtgaacagcagaagaagatgtggccagaagaagaagctggtgatcaacagcggaaatggagctgtggaggacaggaagcccagcggcctgaatggagaggccagcaagagccaggagatggtgcacctggtgaacaaggagagcagcgagaccccagaccagttcatgacagcagatgagaccaggaacctgcagaatgtggacatgaagattggagtgtag

SEQ ID NO: 272419 - DNA, 2100 bp, Artificial Sequence
  derived and/or modified sequence
atggacaagttctggtggcacgccgcctggggcctgtgcctggtgcccctgagcttggcacagattgacctcaatatcacctgcaggtttgctggtgtgttccacgtcgagaaaaatggccgctacagtatctcccggacggaggcagctgacttgtgcaaggcattcaatagtactctccccacaatggcccagatggaaaaagccctctctataggcttcgagacatgccgttatggattcatagagggccatgtggtgatcccacgtatccatcccaattcaatttgcgctgcgaacaataccggcgtctatattctcacatctaacacttcacagtacgacacctactgctttaatgcgtcagctccccctgaggaggattgcacctccgtgactgacctgccgaatgcattcgacgggcctataaccatcaccatcgtgaacagggacggaacccggtatgtgcagaaaggtgaatacaggacaaatcccgaagacatttacccaagtaatccgaccgatgacgatgtgtcctctgggtcctcaagtgagaggtcatcaacctctgggggttacatattttacacattcagcactgtccatccaataccagatgaggattctccctggatcactgattctaccgacaggatcccggcgaccaccctgatgtccacctccgcgaccgctactgaaacggctactaagcgccaggaaacctgggattggttcagttggctgtttctgccctcagaaagtaagaaccatcttcatacgacaactcagatggctggaacctcttccaacacaattagtgccgggtgggagccaaacgaagagaatgaggatgaaagagatagacatctgagcttcagtggctcgggaatcgacgacgacgaagactttatatctagcaccatctccacgaccccgcgcgctttcgatcataccaagcagaaccaggactggactcagtggaatccctctcacagtaaccctgaagtactgcttcagactacaactcggatgacggacgtggatcggaacggaactacagcatatgaaggaaactggaaccccgaggcccatccccctctgatacaccacgaacaccacgaggaagaagaaacaccccactctacatctaccaccgcatcggcacacacatcacatcctatgcaagggagaacgacccctagccctgaggactcttcatggactgattttttcaacccaatctcacaccctatggggcgaggacatcaagccggacggcgcatggacatggactcaagccactcaattaccctccagccaaccgccaatcccaacacaggcctggtagaagacctggataggacaggcccccttagcatgacaacccagcagtctaactctcagtcattctcaaccagccacgaaggcctcgaggaagataaggatcatccaacgacgagcaccctgacctcatctaatagaaacgatgttaccggcggtaggagggatcctaaccacagcgaagggtctacgaccctattagaaggttacaccagtcattacccgcacaccaaagagagcaggactttcattcccgtgactagcgccaaaaccggctcatttggagtcacagcagtcacagttggtgattctaattcaaatgttaatcgcagcctgagtggtgaccaagacactttccatccaagtggcggctcccacaccactcacggatctgagagtgacggccactctcacgggagccaggagggaggagctaacacaacaagcgggcccattcggacgcctcagattcccgaatggctgataatcctggcgtcactactggctcttgccctgatcctggctgtgtgtatcgccgtgaacagcaggagaaggtgcggacagaagaaaaaactggtgataaactctggcaatggggccgtggaagataggaagcccagtggactgaatggggaggcatccaagtcacaagagatggttcacctggttaacaaggagagctctgagaccccagatcagttcatgactgctgacgaaactcggaatctccagaatgtagatatgaagattggagtgtag

SEQ ID NO: 272420 - DNA, 2100 bp, Artificial Sequence
  derived and/or modified sequence
atggataagttctggtggcacgccgcttgggggctgtgtttggtgccactgtctctggcccagatagaccttaatatcacctgtcggttcgccggagtatttcatgtcgaaaagaatggcagatattctatatcccgaacagaggcggctgacttgtgtaaagctttcaattcgaccctgcccacaatggctcagatggaaaaagcactgtcaattggatttgagacatgcaggtacggattcatagagggccatgtggtcataccaaggattcatcccaacagcatctgcgccgcaaacaatactggtgtgtatatcctgacgtccaatacatcccagtatgatacgtactgcttcaatgccagcgcccctcctgaggaggactgcacatccgtgaccgatctgcccaacgctttcgacggacccattaccatcaccatcgtaaaccgggacggcacacgatacgttcagaagggcgaataccgcacaaaccccgaagacatatatccttctaatccgacagatgatgatgtgagcagcgggagcagcagtgagcgcagcagcaccagtggagggtatatcttttacacattcagcacggtgcatcccatacctgatgaagactcgccatggatcaccgattccacggaccgaatcccagctacgacactgatgtccactagtgccaccgcaaccgagacggcaactaaacgccaggaaacatgggactggttttcatggctgttcctgccctctgagtccaagaatcacctccataccacaacgcaaatggcgggaacctcgtcgaatacgatctctgctggctgggaaccaaatgaggaaaatgaagatgagagagacaggcacctttcattcagcgggtctggcatcgacgacgacgaggacttcatcagttccaccatctccacgacgccccgtgcctttgatcacacgaagcagaaccaggactggacgcagtggaatccgagccacagcaaccctgaggtcctgttgcagactacaacgaggatgaccgatgtggatcgcaacggaaccaccgcctatgaaggcaactggaatccagaggctcaccccccactgattcaccatgagcaccatgaggaggaggaaactccccactcaacgtctactactgcatccgcgcatacttcacatcccatgcaggggaggacgacaccaagccctgaggacagcagttggacagacttttttaatcccatcagccaccccatggggcgaggacaccaagctggcagacgaatggacatggactcttctcattcgatcacacttcagcccacggccaacccaaatactgggttggttgaggatctggaccgcactgggccacttagcatgaccacccagcagtcaaactctcagtccttctcgaccagccacgagggcctggaagaggataaagaccacccgacgacctctacactgacttcatcgaacaggaatgatgtgaccggtggtaggcgtgaccccaatcactctgaaggctctacaacactcctggaagggtacacatcgcactatccccacacaaaggagagcagaactttcatccctgtaaccagcgcgaaaaccggctccttcggtgtgaccgccgttactgtcggcgactcgaactctaacgtgaatcgtagcctctctggtgatcaggacactttccatccgtccggaggctcgcacaccactcacggttctgaatccgacggccattcacacggttcccaggagggaggggcaaatacaacatccggacccatccgaacaccccagataccggaatggctcatcatactcgcgtcactgctggctctagctctcattctagccgtgtgtatcgcggtcaatagtaggagaagatgcgggcagaagaagaagttggtgatcaatagtggcaatggagctgtggaagaccggaagcctagcggactcaatggcgaggcatcaaaatcacaagagatggtgcatctcgtcaataaagaaagcagcgagactccggatcagttcatgactgctgacgaaactaggaacctgcagaatgtagacatgaagatcggcgtctag

SEQ ID NO: 272421 - DNA, 2369 bp, Artificial Sequence
  derived and/or modified sequence
cctcattgcccagcggaccccagcctctgccaggttcggtccgccatcctcgtcccgtcctccgccggcccctgccccgcgcccagggatcctccagctcctttcgcccgcgccctccgttcgctccggacaccatggacaagttttggtggcacgcagcctggggactctgcctcgtgccgctgagcctggcgcagatcgatttgaatataacctgccgctttgcaggtgtattccacgtggagaaaaatggtcgctacagcatctctcggacggaggccgctgacctctgcaaggctttcaatagcaccttgcccacaatggcccagatggagaaagctctgagcatcggatttgagacctgcaggtatgggttcatagaagggcacgtggtgattccccggatccaccccaactccatctgtgcagcaaacaacacaggggtgtacatcctcacatccaacacctcccagtatgacacatattgcttcaatgcttcagctccacctgaagaagattgtacatcagtcacagacctgcccaatgcctttgatggaccaattaccataactattgttaaccgtgatggcacccgctatgtccagaaaggagaatacagaacgaatcctgaagacatctaccccagcaaccctactgatgatgacgtgagcagcggctcctccagtgaaaggagcagcacttcaggaggttacatcttttacaccttttctactgtacaccccatcccagacgaagacagtccctggatcaccgacagcacagacagaatccctgctaccactttgatgagcactagtgctacagcaactgagacagcaaccaagaggcaagaaacctgggattggttttcatggttgtttctaccatcagagtcaaagaatcatcttcacacaacaacacaaatggctggtacgtcttcaaataccatctcagcaggctgggagccaaatgaagaaaatgaagatgaaagagacagacacctcagtttttctggatcaggcattgatgatgatgaagattttatctccagcaccatttcaaccacaccacgggcttttgaccacacaaaacagaaccaggactggacccagtggaacccaagccattcaaatccggaagtgctacttcagacaaccacaaggatgactgatgtagacagaaatggcaccactgcttatgaaggaaactggaacccagaagcacaccctcccctcattcaccatgagcatcatgaggaagaagagaccccacattctacaagcacaacagcctcagctcataccagccatccaatgcaaggaaggacaacaccaagcccagaggacagttcctggactgatttcttcaacccaatctcacaccccatgggacgaggtcatcaagcaggaagaaggatggatatggactccagtcatagtataacgcttcagcctactgcaaatccaaacacaggtttggtggaagatttggacaggacaggacctctttcaatgacaacgcagcagagtaattctcagagcttctctacatcacatgaaggcttggaagaagataaagaccatccaacaacttctactctgacatcaagcaataggaatgatgtcacaggtggaagaagagacccaaatcattctgaaggctcaactactttactggaaggttatacctctcattacccacacacgaaggaaagcaggaccttcatcccagtgacctcagctaagactgggtcctttggagttactgcagttactgttggagattccaactctaatgtcaatcgttccttatcaggagaccaagacacattccaccccagtggggggtcccataccactcatggatctgaatcagatggacactcacatgggagtcaagaaggtggagcaaacacaacctctggtcctataaggacaccccaaattccagaatggctgatcatcttggcatccctcttggccttggctttgattcttgcagtttgcattgcagtcaacagtcgaagaaggtgtgggcagaagaaaaagctagtgatcaacagtggcaatggagctgtggaggacagaaagccaagtggactcaacggagaggccagcaagtctcaggaaatggtgcatttggtgaacaaggagtcgtcagaaactccagaccagtttatgacagctgatgagacaaggaacctgcagaatgtggacatgaagattggggtgtaacacctacaccattatcttggaaagaaacaaccgttggaaacataaccattacagggagctgggacacttaacagatgcaatgtgctactgattgtttcattgcgaatcttttttagcataaaattttctactctt

SEQ ID NO: 272422 - DNA, 2100 bp, Artificial Sequence
  derived and/or modified sequence
atggacaagttctggtggcacgccgcctggggcctgtgcctggtgcccctgagcctggcccagatcgacctgaacatcacctgcagattcgccggcgtgttccacgtggagaagaacggcagatacagcatcagcagaaccgaggccgccgacctgtgcaaggccttcaacagcaccctgcccaccatggcccagatggagaaggccctgagcatcggcttcgagacctgcagatacggcttcatcgagggccacgtggtgatccccagaatccaccccaacagcatctgcgccgccaacaacaccggcgtgtacatcctgaccagcaacaccagccagtacgacacctactgcttcaacgccagcgccccccccgaggaggactgcaccagcgtgaccgacctgcccaacgccttcgacggccccatcaccatcaccatcgtgaacagagacggcaccagatacgtgcagaagggcgagtacagaaccaaccccgaggacatctaccccagcaaccccaccgacgacgacgtgagcagcggcagcagcagcgagagaagcagcaccagcggcggctacatcttctacaccttcagcaccgtgcaccccatccccgacgaggacagcccctggatcaccgacagcaccgacagaatccccgccaccaccctgatgagcaccagcgccaccgccaccgagaccgccaccaagagacaggagacctgggactggttcagctggctgttcctgcccagcgagagcaagaaccacctgcacaccaccacccagatggccggcaccagcagcaacaccatcagcgccggctgggagcccaacgaggagaacgaggacgagagagacagacacctgagcttcagcggcagcggcatcgacgacgacgaggacttcatcagcagcaccatcagcaccacccccagagccttcgaccacaccaagcagaaccaggactggacccagtggaaccccagccacagcaaccccgaggtgctgctgcagaccaccaccagaatgaccgacgtggacagaaacggcaccaccgcctacgagggcaactggaaccccgaggcccacccccccctgatccaccacgagcaccacgaggaggaggagaccccccacagcaccagcaccaccgccagcgcccacaccagccaccccatgcagggcagaaccacccccagccccgaggacagcagctggaccgacttcttcaaccccatcagccaccccatgggcagaggccaccaggccggcagaagaatggacatggacagcagccacagcatcaccctgcagcccaccgccaaccccaacaccggcctggtggaggacctggacagaaccggccccctgagcatgaccacccagcagagcaacagccagagcttcagcaccagccacgagggcctggaggaggacaaggaccaccccaccaccagcaccctgaccagcagcaacagaaacgacgtgaccggcggcagaagagaccccaaccacagcgagggcagcaccaccctgctggagggctacaccagccactacccccacaccaaggagagcagaaccttcatccccgtgaccagcgccaagaccggcagcttcggcgtgaccgccgtgaccgtgggcgacagcaacagcaacgtgaacagaagcctgagcggcgaccaggacaccttccaccccagcggcggcagccacaccacccacggcagcgagagcgacggccacagccacggcagccaggagggcggcgccaacaccaccagcggccccatcagaaccccccagatccccgagtggctgatcatcctggccagcctgctggccctggccctgatcctggccgtgtgcatcgccgtgaacagcagaagaagatgcggccagaagaagaagctggtgatcaacagcggcaacggcgccgtggaggacagaaagcccagcggcctgaacggcgaggccagcaagagccaggagatggtgcacctggtgaacaaggagagcagcgagacccccgaccagttcatgaccgccgacgagaccagaaacctgcagaacgtggacatgaagatcggcgtgtag

SEQ ID NO: 272423 - protein, 1103 aa, Artificial Sequence
  derived and/or modified sequence
MGENEDEKQAQAGQVFENFVQASTCKGTLQAFNILTRHLDLDPLDHRNFYSKLKSKVTTWKAKALWYKLDKRGSHKEYKRGKSCTNTKCLIVGGGPCGLRTAIELAYLGAKVVVVEKRDSFSRNNVLHLWPFTIHDLRGLGAKKFYGKFCAGSIDHISIRQLQLILFKVALMLGVEIHVNVEFVKVLEPPEDQENQKIGWRAEFLPTDHSLSEFEFDVIIGADGRRNTLEGFRRKEFRGKLAIAITANFINRNSTAEAKVEEISGVAFIFNQKFFQDLKEETGIDLENIVYYKDCTHYFVMTAKKQSLLDKGVIINDYIDTEMLLCAENVNQDNLLSYAREAADFATNYQLPSLDFAMNHYGQPDVAMFDFTCMYASENAALVRERQAHQLLVALVGDSLLEPFWPMGTGCARGFLAAFDTAWMVKSWNQGTPPLELLAERESLYRLLPQTTPENINKNFEQYTLDPGTRYPNLNSHCVRPHQVKHLYITKELEHYPLERLGSVRRSVNLSRKESDIRPSKLLTWCQQQTEGYQHVNVTDLTTSWRSGLALCAIIHRFRPELINFDSLNEDDAVENNQLAFDVAEREFGIPPVTTGKEMASAQEPDKLSMVMYLSKFYELFRGTPLRPVDSWRKNYGENADLSLAKSSISNNYLNLTFPRKRTPRVDGQTGENDMNKRRRKGFTNLDEPSNFSSRSLGSNQECGSSKEGGNQNKVKSMANQLLAKFEESTRNPSLMKQERRVSGIGKPVLCSSSGPPVHSCCPKPEEATPSPSPPLKRQFPSVVVTGHVLRELKQVSAGSECLSRPWRARAKSDLQLGGTENFATLPSTRPRAQALSGVLWRLQQVEEKILQKRAQNLANREFHTKNIKEKAAHLASMFGHGDFPQNKLLSKGLSHTHPPSPPSRLPSPDPAASSSPSTVDSASPARKLTVGKVSSGIGAAAEVLVNLYMNDHRPKAQATSPDLESMRKSFPLNLGGSDTCYFCKKRVYVMERLSAEGHFFHRECFRCSICATTLRLAAYTFDCDEGKFYCKPHFIHCKTNSKQRKRRAELKQQREEEATWQEQEAPRRDTPTESSCAVAAIGTLEGSPPVHFSLPVLHPLLG

SEQ ID NO: 272424 - DNA, 3312 bp, Artificial Sequence
  derived and/or modified sequence
atgggagaaaatgaagacgaaaaacaggcacaggccggacaggtcttcgagaactttgttcaggcaagtacttgcaagggaaccctccaggcatttaatattttgaccaggcaccttgatctggacccgttagatcaccgaaatttctacagcaaactgaagtcaaaggtgacaacctggaaagctaaagcgctgtggtataaacttgacaaaaggggttcgcacaaagaatacaaacgcggcaagagttgtacgaatactaagtgcctcatcgtagggggtggcccttgcggtctgcgtacggccattgagttagcatatctgggtgcaaaggtggtggtagtggaaaaacgcgattcattttcacggaataatgtcctgcacttgtggccctttaccatacacgaccttcgaggtttgggggcaaaaaaattctatggtaagttctgtgcaggatccattgaccacatctcaattcgacagctgcagttaatcctgtttaaggtcgccttgatgctgggcgtagagatccacgtcaacgtagagttcgtgaaggtcttggaaccacccgaggaccaggaaaaccagaagattggatggcgcgcagagtttctgcccaccgatcactcactgtctgaatttgaattcgacgttattatcggcgcagacggccgcagaaatacgttggagggttttagacgaaaggagttccgcggaaagctggccattgcaatcactgcgaatttcatcaacaggaacagtaccgccgaggctaaagtggaagaaatctctggagttgcttttattttcaatcaaaaatttttccaagatttaaaagaggagaccggcattgatctggaaaacattgtctactataaggattgcactcactacttcgttatgaccgcaaagaaacaaagcctcctggataagggggtgataatcaacgactatatagataccgaaatgctcctgtgcgccgaaaacgtgaatcaggataacctgctcagctacgcaagagaggctgccgatttcgccaccaactatcagctaccatctctcgatttcgccatgaatcattatggacagcctgacgtagccatgtttgacttcacatgtatgtatgccagcgagaacgctgccctggtccgcgaacgccaggcccaccagttgctggtggcgctggttggcgattcactgcttgagcccttttggcccatgggaaccgggtgcgctcgcggcttcctcgcagcattcgatactgcctggatggtgaagtcctggaatcagggtacccccccccttgagctgctggctgagcgcgagtcactgtacaggttacttccacagaccactcccgagaatatcaataaaaattttgagcagtatactctggaccccggaacccgataccctaatctcaactctcactgtgtccggccacatcaggtcaaacacctctatattaccaaagagctggagcattacccgttggagagactgggctctgtgcggcggtcagtaaatctgtcacgaaaggaaagcgacatacggccatctaaacttctcacctggtgtcagcaacagacagagggatatcagcatgtgaatgttactgatttaaccacctcctggcgctccgggctggcattgtgtgccattatccataggttcaggcctgagctcatcaacttcgatagcctcaatgaggacgatgccgtagagaacaatcagttggcttttgacgtggcagagcgggaatttggcatcccccccgtgaccaccggcaaagaaatggcttcggctcaggagccggataagctgtcaatggttatgtatctgagcaaattttatgagctcttccgcgggacgcccctgcgccccgtggacagctggcgaaagaattatggtgagaacgctgacctttctctggccaagtcgtcaatatctaacaactacctcaatctcactttcccgcgaaagcgtacccctcgcgtagacggtcagactggagaaaatgacatgaacaagcgaagaaggaaggggttcactaatctggatgagccatccaacttctccagcaggtctcttggctcgaatcaggagtgcggctctagcaaagagggaggaaatcagaataaagtgaagtcaatggccaaccagctactggctaaatttgaagagtcaactaggaatccctccctcatgaagcaggagaggagggttagcggaatcggcaagcccgtcttgtgttcttcatcaggcccgccagttcactcctgttgccccaagccagaagaagccactcctagtccctctccaccccttaaaagacagttccccagtgttgtcgtgacagggcacgtgctgagagagttaaaacaggtctccgcagggagcgaatgcctgagtcggccttggcgggctcgagctaagtcagatctccagttggggggcaccgagaacttcgctactctcccttcaacgagacccagagcccaggctctgtctggagtgctgtggcgcctacagcaggttgaagagaaaatattgcagaagagggcacagaatctggctaatagagagttccacaccaaaaacatcaaggaaaaagccgcccatctggcctcaatgtttggacatggagatttcccccagaataaactgcttagtaaaggactgtcacatactcatccaccatctcctccaagccggctgccctctccagacccagccgcatcatcgagcccttctacagtagacagtgcttccccagctagaaagctcactgtgggaaaagttagctccggcataggggctgcagcagaagtcctggtgaacctgtatatgaatgaccacagacctaaagcgcaggcgacttcccctgacctcgagtctatgaggaaatcctttcctctgaaccttggagggagtgacacatgttacttctgtaagaagagggtgtatgtaatggaacggcttagtgccgaaggacacttctttcacagagaatgtttccgctgctccatttgtgctacaactctccgcttggcagcgtatacctttgactgcgacgaaggcaaattttactgtaaaccccattttatccactgcaagactaacagcaagcaacgaaagcgccgcgctgagctcaagcagcagcgcgaggaagaggccacctggcaggagcaggaggcccccaggagggacactcccacagagagctcatgcgccgtggctgctatcggtaccctggaaggctcgcccccggtgcacttttctctgcctgtgctccatccactgctgggctag

SEQ ID NO: 272425 - DNA, 3312 bp, Artificial Sequence
  derived and/or modified sequence
atgggagaaaatgaagatgagaagcaggcccaggccggccaggtgtttgaaaattttgtgcaggccagcacctgcaagggcaccctgcaggccttcaacatcctgaccaggcacctggacctggaccccctggaccacaggaacttctacagcaagctgaagagcaaggtgaccacctggaaggccaaggccctgtggtacaagctggacaagaggggcagccacaaggagtacaagaggggcaagagctgcaccaacaccaagtgcctgattgtgggcggcggcccctgtggcctgaggacagccatcgagctggcctacctgggcgccaaggtggtggtggtggagaagagggacagcttcagcagaaataatgtgctgcacctgtggcccttcaccatccatgacctgcggggcctgggcgccaagaagttctacggcaagttctgtgccggcagcattgaccacatcagcatccggcagctgcagctgatcctcttcaaggtggccctgatgctgggcgtggagatccacgtgaatgtggagtttgtgaaggtgctggagcccccagaggaccaggagaaccagaagattggctggagggctgagttcctgcccacagaccacagcctgtctgaatttgaatttgatgtgatcatcggggctgatggaagaagaaacaccctggagggcttccggaggaaggagttccggggcaagctggccatcgccatcacagccaacttcatcaacagaaacagcacagctgaggccaaggtggaggagatcagcggcgtggccttcatcttcaaccagaagttcttccaggacctgaaggaggagaccggcatcgacctggagaacatcgtgtactacaaggactgcacccactactttgtgatgacagccaagaagcagagcctgctggacaagggcgtcatcatcaatgactacatcgacacagagatgctgctgtgtgccgagaatgtgaaccaggacaacctgctgtcctatgcccgggaggccgctgactttgccaccaactaccagctgcccagcctggactttgccatgaaccactacggccagccagatgtggccatgtttgacttcacctgcatgtatgcctctgaaaatgctgccctggtgcgggagcggcaggcccaccagctgctggtggccctggtgggggacagcctgctggagcccttctggcccatgggcaccggctgtgcccggggcttcctggccgcctttgacacagcctggatggtgaagtcctggaaccagggcaccccacccctggagctgctggccgagcgggagagcctgtaccgcctgctgccccagaccaccccagagaacatcaacaagaactttgagcagtacaccctggaccccggcacccgctaccccaacctgaacagccactgtgtgcggccccaccaggtgaagcacctgtacatcaccaaggagctggagcactaccccctggagcggctgggctctgtgagaagatctgtgaacctgagcaggaaggagagtgacatccggcccagcaagctgctgacctggtgccagcagcagacagagggctaccagcacgtgaatgtgacagacctgaccacctcctggaggagcggcctggccctgtgtgccatcatccaccgcttccggcctgagctgatcaactttgacagcctgaatgaagatgatgctgtggagaacaaccagctggcctttgatgtggccgagcgggagtttggcatcccccctgtgaccaccgggaaggagatggccagcgcccaggagccagacaagctgtccatggtgatgtacctgagcaagttctatgagctgttccggggcacccccctgcggcctgtggacagctggaggaagaactacggggagaatgctgacctgagcctggccaagagcagcatcagcaacaactacctgaacctgaccttccccaggaagaggaccccccgggtggatggccagacaggagaaaatgacatgaacaagagaagaaggaagggcttcaccaacctggatgagcccagcaacttcagcagccgcagcctgggcagcaaccaggagtgtggcagcagcaaggagggcggcaaccagaacaaggtgaagtccatggccaaccagctgctggccaagtttgaggagagcaccaggaaccccagcctgatgaagcaggagcggcgggtgtctggaattggcaagcctgtgctgtgcagcagcagcggcccccctgtgcacagctgctgccccaagccagaggaggccacccccagccccagcccccccctgaagaggcagttccccagcgtggtggtgacaggccacgtgctgcgggagctgaagcaggtgtctgctggctctgaatgtctgagccggccctggagggcccgggccaagagtgacctgcagctgggcggcacagaaaattttgccaccctgcccagcacccggccccgggcccaggccctgtctggagtgctgtggaggctgcagcaggtggaggagaagatcctgcagaagagggcccagaacctggccaaccgggagttccacaccaagaacatcaaggagaaggccgcccacctggcctccatgtttggacatggagacttcccccagaacaagctgctgagcaagggcctgagccacacccacccccccagcccccccagccggctgcccagcccagaccctgctgccagcagcagccccagcacagtggacagcgccagccctgccaggaagctgactgtgggcaaggtgagcagcggcatcggggctgctgctgaggtgctggtgaacctgtacatgaatgaccaccggcccaaggcccaggccaccagcccagacctggagagcatgaggaagagcttccccctgaacctgggcggcagtgacacctgctacttctgcaagaagagggtgtatgtgatggagcggctgtctgctgagggccacttcttccaccgggagtgcttccgctgcagcatctgtgccaccaccctgcggctggccgcctacacctttgactgtgatgagggcaagttctactgcaagccccacttcatccactgcaagaccaacagcaagcagaggaagagaagagctgagctgaagcagcagcgggaggaggaggccacctggcaggagcaggaggccccccggcgggacacccccacagagagcagctgtgctgtggccgccatcggcaccctggagggcagcccccctgtgcacttcagcctgcctgtgctgcaccccctgctgggctag

SEQ ID NO: 272426 - DNA, 3477 bp, Artificial Sequence
  derived and/or modified sequence
aagagaagactttaaccactgtgatgcctgagaatccagtgagtgtgacgtttctccagatacttcatgctgttcacctgtgtcctcgccgcaccactgccgcacacgactcctgaaccatgggggaaaacgaggatgagaagcaggcccaggcggggcaggtttttgagaactttgtccaggcatccacgtgcaaaggtaccctccaggccttcaacattctcacacgacacctggacctagaccctctggaccacagaaacttttattccaagctcaagtccaaggtgaccacctggaaagccaaagccctgtggtacaaattggataagcgtggttcccacaaagagtataagcgagggaagtcgtgcacgaacaccaagtgtctcatagttgggggaggaccctgtggcttgcgcactgccattgaacttgcctacctgggagccaaagtggtcgtggtggagaagagggactccttctcccggaacaacgtgctacacctctggcctttcaccatccatgaccttcgtggcctgggagccaagaagttctatgggaagttctgtgctggctccatcgaccatatcagtattcgccaactacagctcatcctattcaaggtggccctgatgctgggagttgaaatccatgtgaatgtggagttcgtgaaggttctagagcctcctgaagatcaagaaaatcaaaaaattggctggcgggcagaatttctccctacagaccattctctgtcggagtttgagtttgacgtcatcattggtgccgatggccgcaggaacaccctggaagggttcagaagaaaagaattccgtgggaagctggcgattgccatcaccgccaacttcataaacagaaacagcacagcggaagccaaggtggaagagattagtggtgtggctttcatcttcaatcagaaattttttcaggaccttaaagaagaaacaggcatagatcttgagaacattgtttactacaaggactgcacccactattttgtaatgacagccaagaagcagagcctgctcgacaaaggtgtcatcattaacgactacatcgacacagagatgctgctgtgtgcggagaacgtgaaccaagacaacctgctatcctatgcccgggaagctgcagactttgccaccaactaccagctgccatccttagactttgccatgaaccactatgggcagcctgatgtggccatgtttgactttacctgcatgtatgcctcagagaacgcggccctggtgcgggagcggcaggcgcaccagctgctcgtggcccttgtgggtgacagcttgcttgagccattttggcccatgggtacaggctgtgcccgtggcttcctggcagcctttgacacggcatggatggtgaagagctggaaccagggcacccctcccctggagctgctggctgaaagggaaagtctctaccggctgttacctcagacaaccccggagaacatcaacaagaactttgagcagtacacgttggacccagggacacggtacccaaacctcaactcacactgtgtcaggccccatcaggtgaagcatttgtatatcactaaggagctggagcactaccctctcgagagactgggctcggtgaggagatctgtcaacctctccaggaaggagtcagatatccggcccagcaagctcctgacctggtgccagcagcagacagagggctaccagcatgtcaacgtcaccgacctgaccacatcctggcgcagtgggttggccctgtgtgccatcatccaccgcttccggcctgagctcatcaactttgactctttgaatgaagatgatgctgtggagaacaaccagctcgcatttgatgtggccgagcgagagtttgggatccctccagtgaccacgggcaaagagatggcatctgcccaggagcctgacaagctcagcatggtcatgtacctctccaagttctacgagctcttccggggcaccccactgaggcccgtggattcttggcgcaaaaactatggagaaaatgctgacctcagcttggccaaatcatccatttctaataactatctcaacctcacatttccaaggaagaggactccacgggtggatggtcaaaccggagagaatgacatgaacaaacggagacggaagggcttcaccaacctggacgagccttcaaacttttccagccgtagcttgggctccaatcaagagtgtgggagcagtaaggaaggtggaaatcagaacaaagtcaagtccatggcgaatcagctgctggccaagtttgaggagagcactcggaacccctcactcatgaagcaggaacgccgtgtctcagggataggtaagccggtcctgtgctcttcctccggccctcctgttcactcttgctgccccaagccggaggaggccacacccagcccatcacctcctctgaaaaggcagttcccctctgtggtcgtgacggggcacgtgctcagagagctcaagcaagtgtctgctggcagtgagtgcctgagcagaccttggagagccagagccaagtctgacctacagctgggtgggacagaaaatttcgctaccctgccttctacccgcccgagggcgcaggctctttccggggtgctgtggcggctgcagcaagtggaggaaaagattctccagaagagggctcagaacttggccaacagggaatttcacacaaagaacattaaggagaaggcggctcaccttgcctccatgtttggacacggggatttcccgcagaataaactactctctaaaggcctgtctcatactcatcctccatctcctccctctcgccttccgtctcctgatccagctgcttcttcctctccatcaactgttgactctgcttctcctgccagaaagctgacggtagggaaagtgtccagcggaataggggctgcagctgaagtcctggtcaatctgtacatgaatgatcacagacctaaggcccaggccacctctccagacctggaatctatgcgaaagtcatttccccttaacctgggaggcagcgacacgtgttacttctgtaagaaacgtgtgtacgtgatggaacggctgagcgccgagggccacttcttccaccgggagtgtttccgctgcagcatctgtgccaccaccttgcgcctggccgcctacacctttgactgcgatgaaggcaaattttactgcaagcctcacttcattcactgtaaaaccaatagcaaacaacggaagagacgggcagagttgaagcaacaaagagaggaggaggcaacatggcaagagcaggaagcccctcggagagacactcccaccgaaagttcttgcgcagtggccgccattggcaccctggaaggcagccccccagttcatttcagccttccagtgctacacccacttcttggctgacacacttctgctctaagagtctccctccctttatagaatgtcaacc

SEQ ID NO: 272427 - DNA, 3312 bp, Artificial Sequence
  derived and/or modified sequence
atgggcgagaacgaggacgagaagcaggcccaggccggccaggtgttcgaaaattttgtgcaagcgtccacttgtaaggggaccctacaagcattcaacatcctgactcgtcacctcgatttggacccactggatcatagaaacttctatagcaagctgaagtcaaaggtaactacttggaaagctaaagctctctggtacaaactagataaaaggggaagccataaagaatataaaagagggaagtcctgcaccaacactaagtgcttgattgtcggcggcggaccctgtggcttacgcaccgccatagagctggcatatcttggagcgaaggtagtagtggtagaaaaaagggattccttctctcgcaataacgtgttgcatctgtggccatttacaatccacgatttgcgtggtctgggcgcaaaaaagttttacggaaagttttgcgctggctccatcgatcacatttccattcggcagctacagctaatactgttcaaggtggccttgatgctcggcgtcgagatccacgtgaacgtggaatttgtgaaggttctggaaccccctgaagaccaggagaatcaaaaaattggctggagggcggagtttctgcccacagaccattctctgtcagagtttgaatttgatgtgatcataggtgctgatggccgccggaacactctggagggtttcagacggaaggagttcaggggcaaactggctatcgccattactgccaactttattaatagaaactccacagccgaggccaaggttgaggagataagcggagtcgccttcatattcaatcagaagttttttcaagatctgaaggaagagacaggcatcgatctggaaaatattgtgtattacaaagattgcacacactatttcgtgatgaccgccaagaaacagtctttgttggataagggagtgattattaacgattatatagacaccgaaatgttactctgtgcagaaaatgttaaccaagataacctccttagctatgccagggaggcagctgacttcgccaccaactaccagcttccttcactcgacttcgcaatgaatcattacggtcaaccagatgttgccatgtttgactttacatgtatgtatgcctctgagaacgctgcgctggtccgggaaaggcaggcacatcaactccttgtggccctggtcggagatagcctgctcgaaccattttggcctatggggaccggctgcgcacggggctttctggccgccttcgacaccgcatggatggtgaaaagctggaatcagggcacgccgccactggaattacttgccgaacgcgaatctctctatcgacttctcccccagacaacacctgagaacattaataaaaacttcgaacagtacacccttgatcccggaactcggtatcccaatctaaacagtcactgtgttcggccacaccaggtgaagcacctttacatcacgaaggagctagaacactatcctttggaacggctcgggtccgtccgtcgctctgtcaacctttctcggaaggagtccgatatccgtcctagtaagctgcttacctggtgccagcaacagactgagggatatcaacatgtcaatgtgacggacctcacgacgtcttggcgcagtggcttggcactgtgtgccattattcaccgctttcgccccgaactgatcaactttgacagcttgaatgaagatgacgcagtggagaacaatcagctggctttcgatgtggcggagagggagtttggaattccaccagtcacaactggaaaagagatggcaagtgcgcaggaacccgacaaactgtccatggtgatgtacctgtctaagttctacgagctttttcggggaactccgctcaggcccgttgactcttggagaaaaaactatggcgaaaacgcagatttaagcctcgcgaaatcttccatctcgaacaactatctgaatctcacattcccaagaaaacgcacaccaagggtcgatgggcagactggcgaaaatgatatgaataaacggcgaagaaaaggattcactaatctggatgaaccttcgaacttctcatctcggtctttggggtccaaccaggagtgtggatcatctaaggagggcggtaaccagaacaaagtcaagagcatggccaaccagttgctggccaagttcgaggagagcaccagaaacccctccttgatgaaacaagaacgtagagtgagtggcatcggaaaacccgtcttgtgttcctctagtggacccccagtccatagctgttgtcccaagccagaggaagccaccccatcaccctccccacctctgaaaagacagtttccttccgtggtcgtgacagggcacgtgctgcgagaactaaagcaggtgagcgctggatcagagtgtcttagccgcccctggcgggcaagggccaaatctgacctgcagttgggcggaacagaaaattttgccaccctccctagcacacggccgcgcgcgcaggccctgagcggtgtcctttggcgtcttcagcaggtcgaagaaaaaattttacaaaaaagagctcagaacctagctaatagagaatttcatacgaaaaatatcaaagagaaggcagctcatctcgcaagcatgtttgggcatggggatttccctcagaacaagctcttatctaaaggcctctcccacacccaccccccatcccctcctagcagactcccctcaccggatcctgccgctagcagctcaccatcaactgtggactctgcgtctcccgctagaaaattgactgtgggcaaagtgtccagtgggatcggcgccgcagcagaagtgctagttaacctttatatgaacgaccaccggccaaaagcccaagccacatctccagatctcgaatcaatgcgaaagtcgtttcctttaaatctgggcggaagtgatacctgctacttttgcaagaagagggtgtacgtgatggaaaggttgtccgctgagggccacttttttcacagggagtgctttcggtgttccatttgtgcgactactctacgcctcgctgcatatacgtttgattgtgatgaggggaagttttactgcaagccccactttattcattgcaagaccaacagtaagcagcggaagcgtcgtgccgagcttaaacagcagagagaggaggaagcaacgtggcaggagcaagaggctcctcgccgggacacacccaccgaaagctcctgtgccgtcgccgcaatcggaacattggaaggatccccaccagttcatttcagcctaccagtgttgcatcccctgctgggatag

SEQ ID NO: 272428 - DNA, 3312 bp, Artificial Sequence
  derived and/or modified sequence
atgggtgagaacgaggatgagaagcaggcccaagccggacaagtattcgaaaacttcgtgcaggcctccacatgcaagggcactttacaggcgtttaatatcctgactcgacatctggatctggatccattggaccacagaaatttctattctaagctaaagagtaaggtgaccacctggaaggcgaaggcactatggtacaaattggacaagagaggttctcacaaagaatacaagcggggaaaatcctgtaccaataccaagtgccttatcgtcggcggtggtccgtgcgggcttaggaccgccattgagctagcttatctcggggctaaggtggtggttgtggaaaagcgagattccttctccaggaataacgtcctgcatctctggccttttacaattcatgacctccggggactgggagcaaaaaagttttacggcaaattttgcgccggatcaatcgaccacatcagcatccgacagctgcagttgatcttatttaaagtggctctgatgcttggcgtggaaatccacgtgaatgtggagttcgtgaaggtattggagccacctgaggaccaggagaatcaaaaaattggctggagggcagaattcctacctactgatcattctctttcagagtttgagtttgatgtcattatcggcgcagacggacggagaaacacactggagggttttcgacggaaagagttccgcggaaagctggccatagcaattacggcgaattttatcaatcgaaatagtacagcagaggctaaggttgaggagatcagcggagtggctttcattttcaaccagaaatttttccaggatctgaaggaagagacaggcatcgacctcgaaaacattgtctattacaaagactgcacccactattttgttatgacagccaaaaaacagagtctgctagacaagggcgttattatcaatgattacattgacacagagatgctcctgtgcgccgaaaatgtgaaccaggacaacctcctgagttacgctagggaggccgcagactttgctaccaattatcagctcccgtcacttgatttcgccatgaatcactacggacaaccagatgtggctatgtttgatttcacctgtatgtacgcatccgagaatgctgctcttgtgagagaacggcaggctcatcaacttctggttgctctcgtgggagattcgcttctggagccgttttggcctatgggcacagggtgcgcccgaggattcctggcggcatttgacacggcttggatggtcaaatcttggaaccaaggcacaccaccccttgagcttctggctgagcgagagtcactctacagactgctgccccaaacgactccagagaatattaacaaaaattttgaacagtataccctggaccccggtaccagatatcccaaccttaacagccattgcgttcgtcctcatcaagtcaagcacttatacattaccaaagagttggaacactaccccctagagaggctgggcagtgtccgcaggtctgttaacctttcgagaaaagagtccgacatacgacccagcaagttactcacctggtgccagcaacaaaccgagggctaccaacatgtgaacgtgacagacctgacaacctcttggcggagcgggcttgctctttgtgctataattcacaggttcaggccagagctcatcaatttcgattctttgaatgaggatgatgccgtggaaaataatcagctggcttttgacgttgctgagcgagagtttgggataccaccggttactactggaaaagagatggcctcagcccaagaaccggataagctgagtatggttatgtacctgtcaaaattttatgagctgttccgcggtacccccctgcggccagtcgactcctggagaaagaactacggtgagaacgctgatctctccttagcaaaatctagcatatccaacaattatctcaacctcacttttcccagaaagagaaccccgagggtagacgggcagacaggtgagaacgacatgaacaaacgaagacggaaaggtttcacgaacctggatgaaccatcaaatttctctagtagaagcttgggatccaaccaggagtgtggctcatccaaagagggtggtaatcagaataaggtgaagtccatggccaatcagctcttggccaaattcgaagagagtacacggaatccatccttgatgaagcaagagcgtcgtgtgtccggcatcggaaaacccgtgctgtgcagtagtagcggcccaccagtgcatagctgttgcccgaagccagaagaagccacgccgagcccttccccacccctgaaacgccagtttcccagcgtggtggtgacaggacacgtgctgagagagcttaagcaagtctccgctggaagcgagtgtttgtcaagaccttggagagcacgagcgaaatctgacctgcagctgggcggaaccgagaacttcgcaacgcttccatcgacacgtcctcgcgcacaagcattgtccggagtgttatggcgcttgcagcaggtcgaggagaagatcctgcagaagcgcgcacaaaatctggcaaaccgcgaattccacaccaagaatatcaaagaaaaagcggcacatctggcctccatgtttggacacggggacttcccccagaacaaactcctgagcaaaggcttaagccacacacaccctccatctcctccctcaaggctcccaagcccggacccagctgcctcttcatccccaagcaccgtcgactctgcctcccctgcgagaaagctgacggtcggcaaagtgtctagtggcattggagccgctgccgaggtgctggtgaacctctacatgaacgatcatagaccaaaagcacaggccacgtcacccgacttagagtcaatgcgaaaatccttcccattgaacctggggggaagtgatacttgttatttttgcaagaagagagtctacgtcatggagaggctatcggctgaaggccatttctttcaccgggaatgttttcgatgtagcatttgcgccactacactcagacttgccgcatataccttcgattgcgacgagggaaagttttactgtaagccccattttattcactgtaagaccaactctaagcaacgcaagagaagggctgagctgaaacaacagcgtgaggaggaagccacctggcaagagcaagaggctccccgaagagatacaccaactgaatcatcttgtgccgtggctgccataggaacactggaaggtagtcctccagtgcacttttcactcccagtcctccaccctttgttgggctag

SEQ ID NO: 272429 - DNA, 3312 bp, Artificial Sequence
  derived and/or modified sequence
atgggcgagaacgaggacgagaagcaggcccaggccggccaggtgttcgagaacttcgtgcaggccagcacctgcaagggcaccctgcaggccttcaacatcctgaccagacacctggacctggaccccctggaccacagaaacttctacagcaagctgaagagcaaggtgaccacctggaaggccaaggccctgtggtacaagctggacaagagaggcagccacaaggagtacaagagaggcaagagctgcaccaacaccaagtgcctgatcgtgggcggcggcccctgcggcctgagaaccgccatcgagctggcctacctgggcgccaaggtggtggtggtggagaagagagacagcttcagcagaaacaacgtgctgcacctgtggcccttcaccatccacgacctgagaggcctgggcgccaagaagttctacggcaagttctgcgccggcagcatcgaccacatcagcatcagacagctgcagctgatcctgttcaaggtggccctgatgctgggcgtggagatccacgtgaacgtggagttcgtgaaggtgctggagccccccgaggaccaggagaaccagaagatcggctggagagccgagttcctgcccaccgaccacagcctgagcgagttcgagttcgacgtgatcatcggcgccgacggcagaagaaacaccctggagggcttcagaagaaaggagttcagaggcaagctggccatcgccatcaccgccaacttcatcaacagaaacagcaccgccgaggccaaggtggaggagatcagcggcgtggccttcatcttcaaccagaagttcttccaggacctgaaggaggagaccggcatcgacctggagaacatcgtgtactacaaggactgcacccactacttcgtgatgaccgccaagaagcagagcctgctggacaagggcgtgatcatcaacgactacatcgacaccgagatgctgctgtgcgccgagaacgtgaaccaggacaacctgctgagctacgccagagaggccgccgacttcgccaccaactaccagctgcccagcctggacttcgccatgaaccactacggccagcccgacgtggccatgttcgacttcacctgcatgtacgccagcgagaacgccgccctggtgagagagagacaggcccaccagctgctggtggccctggtgggcgacagcctgctggagcccttctggcccatgggcaccggctgcgccagaggcttcctggccgccttcgacaccgcctggatggtgaagagctggaaccagggcaccccccccctggagctgctggccgagagagagagcctgtacagactgctgccccagaccacccccgagaacatcaacaagaacttcgagcagtacaccctggaccccggcaccagataccccaacctgaacagccactgcgtgagaccccaccaggtgaagcacctgtacatcaccaaggagctggagcactaccccctggagagactgggcagcgtgagaagaagcgtgaacctgagcagaaaggagagcgacatcagacccagcaagctgctgacctggtgccagcagcagaccgagggctaccagcacgtgaacgtgaccgacctgaccaccagctggagaagcggcctggccctgtgcgccatcatccacagattcagacccgagctgatcaacttcgacagcctgaacgaggacgacgccgtggagaacaaccagctggccttcgacgtggccgagagagagttcggcatcccccccgtgaccaccggcaaggagatggccagcgcccaggagcccgacaagctgagcatggtgatgtacctgagcaagttctacgagctgttcagaggcacccccctgagacccgtggacagctggagaaagaactacggcgagaacgccgacctgagcctggccaagagcagcatcagcaacaactacctgaacctgaccttccccagaaagagaacccccagagtggacggccagaccggcgagaacgacatgaacaagagaagaagaaagggcttcaccaacctggacgagcccagcaacttcagcagcagaagcctgggcagcaaccaggagtgcggcagcagcaaggagggcggcaaccagaacaaggtgaagagcatggccaaccagctgctggccaagttcgaggagagcaccagaaaccccagcctgatgaagcaggagagaagagtgagcggcatcggcaagcccgtgctgtgcagcagcagcggcccccccgtgcacagctgctgccccaagcccgaggaggccacccccagccccagcccccccctgaagagacagttccccagcgtggtggtgaccggccacgtgctgagagagctgaagcaggtgagcgccggcagcgagtgcctgagcagaccctggagagccagagccaagagcgacctgcagctgggcggcaccgagaacttcgccaccctgcccagcaccagacccagagcccaggccctgagcggcgtgctgtggagactgcagcaggtggaggagaagatcctgcagaagagagcccagaacctggccaacagagagttccacaccaagaacatcaaggagaaggccgcccacctggccagcatgttcggccacggcgacttcccccagaacaagctgctgagcaagggcctgagccacacccacccccccagcccccccagcagactgcccagccccgaccccgccgccagcagcagccccagcaccgtggacagcgccagccccgccagaaagctgaccgtgggcaaggtgagcagcggcatcggcgccgccgccgaggtgctggtgaacctgtacatgaacgaccacagacccaaggcccaggccaccagccccgacctggagagcatgagaaagagcttccccctgaacctgggcggcagcgacacctgctacttctgcaagaagagagtgtacgtgatggagagactgagcgccgagggccacttcttccacagagagtgcttcagatgcagcatctgcgccaccaccctgagactggccgcctacaccttcgactgcgacgagggcaagttctactgcaagccccacttcatccactgcaagaccaacagcaagcagagaaagagaagagccgagctgaagcagcagagagaggaggaggccacctggcaggagcaggaggcccccagaagagacacccccaccgagagcagctgcgccgtggccgccatcggcaccctggagggcagcccccccgtgcacttcagcctgcccgtgctgcaccccctgctgggctag

SEQ ID NO: 272430 - DNA, 450 bp, Artificial Sequence
  derived and/or modified sequence
atgtcactttctttctgcggaaataatatcagttcttataacataaatgatggagtgttgcagaacagctgctttgtggacgctctgaatttagttccacacgtgtttctattatttattacgttccctatactgttcataggatgggggtcacagtcttccaaagtccaaatccatcacaatacctggctgcatttcccgggccataatttgcgctggattctcactttcgccctcctgttcgttcatgtgtgcgaaattgccgagggaatagttagcgattcacggcgcgaatcacgtcacctgcacttgttcatgcctgcagtgatgggctttgtggctacgacgacttcgattgtgtattatcataacatcgaaacaagtaacttccctaaattgttgttaggattcagtcatcacgagtcaaagtcttgctatcagcactcttag

SEQ ID NO: 272431 - DNA, 450 bp, Artificial Sequence
  derived and/or modified sequence
atgagcctgtccttctgtggcaacaacatcagcagctacaacatcaatgatggagtgctgcagaacagctgctttgtggatgccctgaacctggtgccccacgtgttcctgctcttcatcaccttccccatcctcttcatcggctggggcagccagagcagcaaggtgcagatccaccacaacacctggctgcacttccctggccacaacctgcgctggatcctgacctttgccctgctgtttgtgcacgtgtgtgaaattgctgagggcatcgtgtctgacagccggcgggagagccgccacctgcacctgttcatgcctgctgtgatgggctttgtggccaccaccaccagcatcgtgtactaccacaacatcgagaccagcaacttccccaagctgctgctgggcttcagccaccacgagagcaagagctgctaccagcacagctag

SEQ ID NO: 272432 - DNA, 450 bp, Artificial Sequence
  derived and/or modified sequence
atgagcctgagcttctgcggcaacaacatcagcagctacaacatcaacgatggtgtgctgcagaacagttgcttcgttgacgccctgaatttggtcccccacgtcttcctccttttcattacattcccaattctgttcataggatggggcagtcagagcagcaaggttcagatccaccacaatacatggttgcatttccccggccataatcttcgctggattctgacgttcgcactactctttgtgcatgtgtgcgaaatcgcggaggggattgtgagcgattctcggcgggagagccgccacctccatttgtttatgccagctgtaatgggcttcgtcgccacgaccaccagcattgtatactatcacaacatagaaacaagcaattttcctaaactgctgttaggtttctcccaccacgaaagtaaaagttgctaccaacactcttag

SEQ ID NO: 272433 - DNA, 450 bp, Artificial Sequence
  derived and/or modified sequence
atgagcttgtctttttgtgggaataatatttcaagttacaacatcaatgacggggtgttgcagaactcttgcttcgtcgatgccctcaatctcgtgccccacgtctttcttctctttatcacttttcctatcctatttattgggtggggctctcaaagctctaaggtgcaaatccatcacaacacttggctgcatttccccggacacaacctgcgttggattttaacgttcgctctgcttttcgtccacgtctgcgaaatcgccgaaggtatcgtgtccgacagccgacgcgagagtagacatcttcatttgttcatgccagccgtgatgggttttgtcgctacaaccacttccattgtgtattatcataatatcgagacctcaaatttccccaagctcttattgggattcagccatcacgagtcaaagtcttgctatcagcatagttag

SEQ ID NO: 272434 - DNA, 1693 bp, Artificial Sequence
  derived and/or modified sequence
ggggaaggtctccggccccaggcgcggcgcgcggggcttctgcccagtttcctgcttctcagccgcggtgtctgccccggcccagagcagtctgtgcaatttagaaactcgataggaggcagcagctggtctcccaccaccctaaaaataatccgttccggcgcactgcgtgcttcgcctaggggaggaaaactgtcatcggagagttctgcgtccgggtttgaaatttacatcttaagacagtgtaggaagtcggtgttttgaaggtagctcaagtgcaccggcaggggtttgaagcagcgtgaagctattgcccaaggaaaagtattgtttgtgaccattgctaaatcaattatcaatgaaaggaaagaaagaaaagagtaaaccatataagaagaaatgagcctttcattttgtggtaacaacatttcttcatataatatcaacgatggtgtactacaaaattcctgctttgtggatgccctcaacctggtccctcatgtctttctgttgtttatcacttttccaatattgtttattgggtgggggagccaaagctcaaaagtacaaattcaccacaacacatggcttcattttccgggacataacctgagatggattcttacattcgctctcctgtttgtgcatgtctgtgaaatagcagaaggcattgtttcagactcgcggcgggaatcaaggcacctccacctctttatgccagccgtgatgggattcgttgccactacaacatcgatagtgtattatcataatatcgaaacatcaaattttcctaaattacttttaggttttagccatcatgagagtaaaagctgctatcaacattcttaagtattttgtggctatatgcatttatttctcctaggtaaatacctaagagtgaaatctctgggtcatacaataagtgggtaaatgttcatattttaagaaactgacatcttttcccaaaatgtttgtatcattttttatactcactaacaaggtgtaagagttccagttccacatgttcatcatttggtgatcttggtctaatttagtcatgctagtgggtgtgtactggtaatacattgcggttttaatttgcatttatctgattgctaattatgttgaacactctttgatgagtttattggccatttttaatctttgggatgtggctattcatatcttttgcccatgtttcattgggttgcacttttattattgcgttgtaggaatattttgtgcatactagatattagtatgtcatcagttacatgttttgataatgttttccttctagtctgtggcatacatattcatttatttaatagggtcttttaatgagcagaagattttaaatttcgatgtagtataatttatcatttcttctagtccttagttactgctttctgtgtcttaagacatctttgtcttccctctaaatatgtttccctcttattctcctgtttgcttttagatgctttatggtttccatttttatttttaggactacgattctttctaaattaattgtgtatatggtgtaagataggtgtcaaagttcttttttttttttttccaagtggatatcaatgtgttccagcaccatttgtgggatagactttctgtttctcaagagattgcattggcacttatgtaaaaaaaaataaatcaaatgactatttaaatttaa

SEQ ID NO: 272435 - DNA, 450 bp, Artificial Sequence
  derived and/or modified sequence
atgagcctgagcttctgcggcaacaacatcagcagctacaacatcaacgacggcgtgctgcagaacagctgcttcgtggacgccctgaacctggtgccccacgtgttcctgctgttcatcaccttccccatcctgttcatcggctggggcagccagagcagcaaggtgcagatccaccacaacacctggctgcacttccccggccacaacctgagatggatcctgaccttcgccctgctgttcgtgcacgtgtgcgagatcgccgagggcatcgtgagcgacagcagaagagagagcagacacctgcacctgttcatgcccgccgtgatgggcttcgtggccaccaccaccagcatcgtgtactaccacaacatcgagaccagcaacttccccaagctgctgctgggcttcagccaccacgagagcaagagctgctaccagcacagctag

SEQ ID NO: 272436 - protein, 256 aa, Artificial Sequence
  derived and/or modified sequence
MTLAHKHIVKTVDFTQDSNYLLTGGQDKLLRIYDLNKPEAEPKEISGHTSGIKKALWCSEDKQILSADDKTVRLWDHATMTEVKSLNFNMSVSSMEYIPEGEILVITYGRSIAFHSAVSLDPIKSFEAPATINSASLHPEKEFLVAGGEDFKLYKYDYNSGEELESYKGHFGPIHCVRFSPDGELYASGSEDGTLRLWQTVVGKTYGLWKCVLPEEDSGELAKPKIGFPETTEEELEEIASENSDCIFPSAPDVKA

SEQ ID NO: 272437 - DNA, 771 bp, Artificial Sequence
  derived and/or modified sequence
atgaccctggcgcacaagcacattgtcaaaactgtggactttacacaggactccaactacctgctgacaggtggccaggataagttgctccggatttatgatctcaacaagccagaggcagagcctaaggagatctccggacacacgagcggtatcaaaaaggccctatggtgctcagaggataaacagatattgtctgccgatgataagaccgtgcggctttgggaccacgccaccatgacagaggtgaaatcactcaacttcaatatgtccgtatcatccatggagtatatacccgagggagagatactcgtcatcacatacggccggagtatcgccttccacagcgctgtgagcttggaccctattaaaagttttgaggctccagcaaccattaactcagcttctctgcatcctgagaaagagttcctcgtggccggaggggaggattttaaactgtacaaatacgactataactctggagaggagcttgaaagctacaaggggcacttcggcccaatccactgcgtccggttctcccccgatggggaactgtacgcctccggatccgaagacggaacattgcgcctgtggcaaaccgtcgtgggaaagacctatgggctttggaagtgcgtcctacccgaggaagactcgggagagctggcgaagccaaagataggattccccgagacaaccgaagaggaactggaggaaattgcctccgaaaattccgactgtatattcccatccgcccccgacgtcaaggcttag

SEQ ID NO: 272438 - DNA, 771 bp, Artificial Sequence
  derived and/or modified sequence
atgaccctggcccacaagcacatcgtgaagacagtggacttcacccaggacagcaactacctgctgactggaggccaggacaagctgctgcgcatctatgacctgaacaagccagaggccgagcccaaggagatcagcggccacaccagcggcatcaagaaggccctgtggtgcagcgaggacaagcagatcctgtctgcagatgacaagacagtgcggctgtgggaccacgccaccatgacagaggtgaagagcctgaacttcaacatgtctgtgtcctccatggagtacatccctgagggggagatcctggtgatcacctacggccgcagcatcgccttccacagcgctgtgtccctggaccccatcaagagctttgaggccccagccaccatcaacagcgccagcctgcaccctgagaaggagttcctggtggccggaggagaggacttcaagctgtacaagtatgactacaacagcggggaggagctggagagctacaagggccacttcggccccatccactgtgtgcgcttctccccagatggagagctgtatgccagcggctctgaagatggcaccctgcggctgtggcagacagtggtgggcaagacctacggcctgtggaagtgtgtgctgcctgaggaggacagcggggagctggccaagcccaagattggcttccctgagaccacagaggaggagctggaggagatcgccagcgagaacagcgactgcatcttccccagcgccccagatgtgaaggcctag

SEQ ID NO: 272439 - DNA, 771 bp, Artificial Sequence
  derived and/or modified sequence
atgaccctggcccacaagcacatcgtgaagaccgtggacttcacccaagattcaaactatcttctgaccggtggccaggacaaattgctccgcatctacgatttgaacaagccggaggcagagcccaaggaaataagcggtcatacaagcgggatcaaaaaagcactgtggtgttcagaagataagcaaatcctgtctgctgacgataaaactgttcggctgtgggatcacgccactatgacagaggttaagtcacttaatttcaatatgagcgtctccagcatggaatatattccagaaggcgagatccttgttatcacctacgggcgctccatcgctttccattccgcagtgtcactggatcctatcaagtccttcgaagctccggccacaataaacagtgcctccctccaccccgaaaaagagttcctagtggccgggggtgaggatttcaagctgtacaaatacgactacaacagtggcgaggagctggaatcctacaagggtcactttgggccaattcattgcgtgcgattcagccccgacggagagctgtatgcaagtggctcagaggatggcacactgcgcctgtggcagactgttgtgggaaagacgtacggcttatggaagtgcgtactcccagaggaggatagcggggagctggccaaaccaaagatcggttttcccgagacaacagaggaagagctcgaggagattgcgtccgagaatagcgactgtatttttccctcggcccccgacgtgaaagcatag

SEQ ID NO: 272440 - DNA, 771 bp, Artificial Sequence
  derived and/or modified sequence
atgacactggcccataaacacattgtcaaaacagtagacttcactcaggattcaaactacctgttgacaggcggtcaagataaattgttacggatatacgatctgaacaagcccgaagccgaaccaaaagaaatatcaggccatacttctggcatcaagaaggctttgtggtgctcagaggataagcagatcctgtcagcagacgataagaccgtacgactatgggaccatgccaccatgactgaggttaaatctctgaacttcaatatgtctgttagctctatggaatatataccggagggtgagatacttgtcattacctacggaagaagcattgcttttcactcggccgtgtccctcgatcccattaagtcatttgaggccccagctaccatcaacagcgcgtccctgcacccggaaaaagagttcctggtcgcaggcggtgaagactttaagttatacaagtacgactacaactcaggtgaggaacttgaatcctacaagggacatttcggaccgattcattgcgtgaggttctctcctgatggagagctgtacgcctcgggatcggaagacgggaccctccgcctttggcagactgtggtggggaaaacatacggactgtggaaatgcgtgctcccagaggaggattctggcgagctggctaaaccaaaaatcggctttccagaaactactgaggaagagttggaggagattgccagcgagaatagtgattgcatttttccctctgccccagacgtgaaggcctag

SEQ ID NO: 272441 - DNA, 771 bp, Artificial Sequence
  derived and/or modified sequence
atgaccctggcccacaagcacatcgtgaagaccgtggacttcacccaggacagcaactacctgctgaccggcggccaggacaagctgctgagaatctacgacctgaacaagcccgaggccgagcccaaggagatcagcggccacaccagcggcatcaagaaggccctgtggtgcagcgaggacaagcagatcctgagcgccgacgacaagaccgtgagactgtgggaccacgccaccatgaccgaggtgaagagcctgaacttcaacatgagcgtgagcagcatggagtacatccccgagggcgagatcctggtgatcacctacggcagaagcatcgccttccacagcgccgtgagcctggaccccatcaagagcttcgaggcccccgccaccatcaacagcgccagcctgcaccccgagaaggagttcctggtggccggcggcgaggacttcaagctgtacaagtacgactacaacagcggcgaggagctggagagctacaagggccacttcggccccatccactgcgtgagattcagccccgacggcgagctgtacgccagcggcagcgaggacggcaccctgagactgtggcagaccgtggtgggcaagacctacggcctgtggaagtgcgtgctgcccgaggaggacagcggcgagctggccaagcccaagatcggcttccccgagaccaccgaggaggagctggaggagatcgccagcgagaacagcgactgcatcttccccagcgcccccgacgtgaaggcctag

SEQ ID NO: 272442 - protein, 903 aa, Artificial Sequence
  derived and/or modified sequence
MSDEGGSNFRRVAIRRKSNPSYLPPGVPRPWSRPASHLGRVGTAAFKGQVPSGATGSSTCPKIALVPPCSTSSTTTLVGENVSEEEAQGINGNRPAKHSAASPKPQVPPKPLHLQNSPSSNIHQTPRHKALPSAKPRMEEIKPASASCVSKEKPSKVSDLISRFEGGSSLSNYSDLKKESAVNLNAPRTPGRHGLTTTPQQKLLSQHLPQRQGNDTDKTQGAQTCVANGVMAAQNQMECEEEKAATLSSDTSIQASEPLLDTHIVNGERDETATAPASPTTDSCDGNASDSSYRTPGIGPVLPLEERGAETETKVQERENGESPLELEQLDQHHEMKETNEQKLHKIANELLLTERAYVNRLDLLDQVFYCKLLEEANRGSFPAEMVNKIFSNISSINAFHSKFLLPELEKRMQEWETTPRIGDILQKLAPFLKMYGEYVKGFDNAMELVKNMTERIPQFKSVVEEIQKQKICGSLTLQHHMLEPVQRIPRYEMLLKDYLRKLPPDSLDWNDAKKSLEIISTAASHSNSAIRKMENLKKLLEIYEMLGEEEDIVNPSNELIKEGQILKLAARNTSAQERYLFLFNNMLLYCVPKFSLVGSKFTVRTRVGIDGMKIVETQNEEYPHTFQVSGKERTLELQASSAQDKEEWIKALQETIDAFHQRHETFRNAIAKDNDIHSEVSTAELGKRAPRWIRDNEVTMCMKCKEPFNALTRRRHHCRACGYVVCWKCSDYKAQLEYDGGKLSKVCKDCYQIISGFTDSEEKKRKGILEIESAEVSGNSVVCSFLQYMEKSKPWQKAWCVIPKQDPLVLYMYGAPQDVRAQATIPLLGYVVDEMPRSADLPHSFKLTQSKSVHSFAADSEELKQKWLKVILLAVTGETPGGPNEHPATLDDHPEPKKKSEC

SEQ ID NO: 272443 - DNA, 2977 bp, Artificial Sequence
  derived and/or modified sequence
ggtagcggctttgagtgagtgcgggagctgcagataccgagacgctgcgactgccgcaggagtcgccgcagccaaactcgccgcgacgccgggagggagcgtaccgggaaggagagggagaggaggcactcgctgaggagacgccgcagtagagggcgcccccggagtcgcgccgaacctgggcatgcaggcgacgccccccaggggccgctcgcggctggacgggagcgggaggagtcggggagcggcggtcgagcccggcaggatgagcgacgagggcggctccaacttcaggcgggtggcgatccggcggaagtccaacccctcctacctgccgcccggggtgccccggccctggagcaggcccgcgtcgcacctgggacgtgtagggaccgctgccttcaagggccaggtgccctcaggagccacaggcagcagtacctgtccaaagatcgctttagttccaccttgctccacaagcagcacaaccacactggttggtgagaatgtatctgaagaagaggctcagggaataaatgggaacaggccagcaaaacactcagctgcaagtccaaagccacaagtgcctccaaagccattacacctgcagaattcaccttcgtccaatatacaccaaacccccaggcataaagctttacctagtgcaaaaccaaggatggaggaaattaaacctgcctctgcttcttgtgtctcaaaagaaaaacccagtaaggtatcagatctcatcagtcgctttgaaggaggcagctcattatcaaattatagtgatttgaagaaagagtctgctgtgaacctaaatgctcctagaaccccaggaaggcatggattgacaaccacacctcaacaaaaactcctctcccagcacttgccacagaggcagggaaatgatacagataagactcagggtgcacagacttgtgtggccaacggtgtaatggcagcacaaaaccagatggaatgtgaggaggagaaagctgccactcttagctcagatacttctattcaagcttctgaacccttgcttgatacgcacatagtgaatggagaaagagatgaaactgccacagctcctgcatcacccacaacagacagctgtgatggaaatgcttctgacagtagctacaggactccaggcataggcccagtgctccccctagaagaaagaggggcagaaacagaaaccaaggtacaagagagggaaaatggggaaagccctctggaactggagcagctggaccagcaccatgagatgaaggagactaatgagcaaaaacttcacaaaatagccaatgaacttttgcttactgaaagagcttatgtcaaccgacttgacctcttagatcaggtattttattgcaaactgttggaagaagcaaaccgaggctcgtttccagcagagatggtgaataaaatcttttctaatatttcatcaataaatgccttccatagtaaattcctcttgccagagctggagaaacgaatgcaagaatgggaaactactcctagaattggagacatccttcagaaattggcaccattccttaagatgtatggagaatatgtgaaaggatttgataatgcaatggaattggttaaaaacatgacagaacgtattccccagttcaaatcagtggttgaagaaattcagaaacagaaaatctgtgggagcttaactttgcagcatcacatgctagaacctgttcagcggattccccggtatgagatgctccttaaggactatctaaggaaattgcctcctgattccctggactggaatgatgctaaaaaatcacttgaaattatatctacagcagcaagccattctaatagtgcaataaggaaaatggagaacctaaagaaactcttagagatttatgaaatgttgggagaagaagaagacattgtaaacccttcaaatgaactaataaaagaaggacagatcctcaaactagctgctcggaacacttcagcacaagaacgctaccttttcttattcaacaacatgttgctgtactgtgtgcccaaattcagcttggtaggctctaaattcacagttcgaaccagggttggcattgatggaatgaaaattgtagagactcaaaatgaagaatatccacatactttccaggtgtctgggaaagagagaacactggaactgcaggccagttctgcgcaagacaaagaagaatggatcaaggcccttcaagaaaccatcgatgcttttcatcaaaggcatgaaaccttcagaaatgcaattgcaaaggataatgacattcactcagaggtttctactgctgagctagggaaaagagccccaagatggatccgagataatgaagtgacaatgtgtatgaaatgtaaagaacctttcaatgcactgacacgaaggaggcatcattgtcgagcatgtggatatgtggtttgttggaaatgctccgactacaaagctcaacttgaatatgatggtggtaaattgagcaaagtttgtaaagactgttatcaaatcataagtggattcacagacagtgaagaaaagaaaagaaaaggaattttagagattgaatcagcagaagtatctggaaacagtgtggtgtgcagctttcttcagtatatggagaagtcaaaaccttggcagaaagcttggtgtgtgatccccaagcaagaccctcttgtgctgtacatgtatggtgccccccaggacgtcagagcccaggccaccattccacttctgggctatgtggtggatgaaatgccaaggagcgcagacctgccacacagtttcaaactgacccagtctaagtccgtgcacagctttgctgcagacagtgaggaactgaagcagaagtggctgaaagtcatccttttagctgtcacaggtgagacaccaggtggtccaaatgagcatccagccaccttggatgatcatcctgaacctaagaaaaaatcagaatgctga

SEQ ID NO: 272444 - DNA, 2712 bp, Artificial Sequence
  derived and/or modified sequence
atgtcggacgagggcggcagcaattttcggagagtggcaattcggcgtaaaagcaacccctcctacctcccacccggcgttccacgaccgtggagccgccccgcctcacacctaggccgagtgggtaccgccgctttcaagggacaggttccttcgggggccactggctccagtacatgtcctaagatagctttggtgccaccttgttccacgtctagcaccactaccctggtgggggagaatgtaagcgaggaggaggctcagggaatcaacgggaatagaccagccaagcactcagcagcctctcctaagcctcaagtcccacccaaaccgttgcacttgcagaattcacccagcagcaacatccaccagacacccaggcacaaggctctgccctctgccaaaccaagaatggaagaaattaagcccgcctccgctagttgcgtgtccaaggagaagccatccaaagtcagcgacctgatctctaggtttgaaggagggtcatctctgtcgaattattctgacctcaaaaaagaaagcgctgttaacctgaatgctcctcgcactccaggtcggcacgggttaacaaccacccctcagcagaagcttctctcacagcatttgccgcaacgtcaggggaacgacacagataaaacccagggcgctcagacctgtgtggctaacggagtgatggccgcgcaaaatcagatggaatgcgaagaggagaaggcagctacactttccagcgatacctccattcaggcatctgagcctctgttggacacccatatcgtgaatggtgagcgcgacgagacagccaccgcccccgccagcccgactacggactcatgtgatggcaacgcaagtgattcaagctatcgcaccccaggcattggacctgtgctcccccttgaggagcgtggtgcagaaaccgaaaccaaagttcaggaaagggagaacggggaaagtccactagaactggagcaactggaccaacatcacgaaatgaaggaaaccaacgaacagaagctccataaaattgccaacgaattgctcctgaccgagcgtgcctacgtaaaccgtttagatctgctcgaccaggtcttttactgtaaactcttggaagaagccaataggggatcctttcccgccgagatggttaacaaaattttttccaatatctcctccattaatgcatttcatagtaaattcttattgcccgagctggagaagcggatgcaggagtgggaaaccacgccaaggatcggggacattctgcagaagctcgccccgtttcttaaaatgtacggcgaatacgtaaaaggctttgataacgccatggagctggtcaaaaacatgaccgaacggatcccccagtttaagtcagtggtcgaggagatccagaagcagaagatatgtgggtctctgactcttcagcaccacatgttggagccagtgcagcgcatccccaggtacgagatgctgcttaaggactaccttcggaaactccctcctgatagccttgactggaatgatgctaaaaagagtttagagattatcagcaccgccgcgagtcatagtaatagcgccattcgcaagatggaaaacctcaagaaacttctagagatatacgaaatgcttggggaggaggaagacatcgtgaatccatctaacgaattgattaaggaaggacagatactgaaactggcagcccgtaatacatctgcccaagaaaggtatttgtttctgtttaataacatgttactttattgcgtgccgaagttctccttggttgggtctaagttcactgtacgtacacgggtagggattgacggaatgaagatcgttgagacgcagaacgaagagtacccacacacctttcaagttagtggcaaggagagaacactggaattgcaggccagttcagcccaggataaagaggaatggattaaagccctgcaggagacgatagacgcatttcaccaacgtcacgagacctttagaaacgcgattgcgaaggacaacgacatacattccgaagtatcaaccgcagaattggggaaaagagctccaaggtggatccgagacaatgaggtcactatgtgtatgaagtgcaaagagccattcaatgccttaacccgccgcaggcatcattgtcgcgcttgtgggtatgtggtgtgttggaaatgctctgactacaaagcccagctcgagtatgatggtgggaaactgtctaaggtgtgtaaggattgttaccagattatcagcggtttcacggatagtgaagagaaaaaacgaaaaggcatcctggagatcgagagtgctgaggttagcggaaacagtgtggtctgcagttttctgcagtacatggagaaaagcaagccatggcaaaaggcctggtgtgtaatccccaaacaggatcctctcgtgttgtatatgtacggcgcacctcaagacgtccgggcccaagcaaccattccactgctcggttacgtggtcgacgagatgcctcgatcagccgatctgccgcactcattcaagctcacacagtctaaaagtgttcactcctttgccgctgactccgaggaactcaagcagaagtggctcaaagtgattcttttggccgtgactggggagacaccaggcggcccaaatgaacacccggcaacgctcgacgatcatccagaacctaaaaagaagtccgagtgttag

SEQ ID NO: 272445 - DNA, 2712 bp, Artificial Sequence
  derived and/or modified sequence
atgtctgatgaaggaggcagcaacttccggcgggtggccatccggaggaagagcaaccccagctacctgcccccaggagtgccccggccctggagcaggcctgccagccacctgggccgggtgggcacagctgccttcaagggccaggtgcccagcggggccaccggcagcagcacctgccccaagatcgccctggtgcccccctgcagcaccagcagcaccaccaccctggtgggggagaatgtgtctgaggaggaggcccagggcatcaatggaaacagacctgccaagcacagcgctgccagccccaagccccaggtgccccccaagcccctgcacctgcagaacagccccagcagcaacatccaccagacccccaggcacaaggccctgcccagcgccaagcccaggatggaggagatcaagccagccagcgccagctgtgtgtccaaggagaagcccagcaaggtgtctgacctgatcagcagatttgagggcggcagcagcctgagcaactacagcgacctgaagaaggagagcgctgtgaacctgaatgcccccaggaccccaggaagacatggcctgaccaccaccccccagcagaagctgctgagccagcacctgccccagaggcagggcaatgacacagacaagacccagggcgcccagacctgtgtggccaacggggtgatggccgcccagaaccagatggagtgtgaggaggagaaggccgccaccctgagcagtgacaccagcatccaggccagcgagcccctgctggacacccacatcgtgaatggagagagagatgaaacagccacagccccagccagccccaccacagacagctgtgatggaaatgccagtgacagcagctaccgcaccccaggcatcggccctgtgctgcccctggaggagagaggagctgagacagagaccaaggtgcaggagagagaaaatggagagagccccctggagctggagcagctggaccagcaccacgagatgaaggagaccaatgagcagaagctgcacaagatcgccaatgagctgctgctgacagagcgggcctacgtgaaccggctggacctgctggaccaggtgttctactgcaagctgctggaggaggccaacagaggcagcttccctgctgagatggtgaacaagatcttcagcaacatcagcagcatcaatgccttccacagcaagttcctgctgcctgagctggagaagaggatgcaggagtgggagaccaccccccgcatcggggacatcctgcagaagctggcccccttcctgaagatgtacggggagtatgtgaagggctttgacaatgccatggagctggtgaagaacatgacagagcgcatcccccagttcaagtctgtggtggaggagatccagaagcagaagatctgtggcagcctgaccctgcagcaccacatgctggagcctgtgcagaggatccccaggtatgagatgctgctgaaggactacctgaggaagctgcccccagacagcctggactggaatgatgccaagaagagcctggagatcatcagcacagctgccagccacagcaacagcgccatcaggaagatggagaacctgaagaagctgctggagatctatgagatgctgggggaggaggaggacatcgtgaaccccagcaatgagctgatcaaggagggccagatcctgaagctggccgccaggaacaccagcgcccaggagcgctacctgttcctgttcaacaacatgctgctgtactgtgtgcccaagttcagcctggtgggcagcaagttcaccgtgaggaccagggtgggcattgatggcatgaagatcgtggagacccagaatgaggagtacccccacaccttccaggtgtctgggaaggagaggaccctggagctgcaggccagcagcgcccaggacaaggaggagtggatcaaggccctgcaggagaccattgatgccttccaccagagacatgagaccttcagaaatgccatcgccaaggacaatgacatccacagcgaggtgtccacagctgagctgggcaagagggccccccgctggatccgggacaatgaggtgaccatgtgcatgaagtgcaaggagcccttcaatgccctgaccaggagaagacaccactgccgggcctgtggctacgtggtgtgctggaagtgcagcgactacaaggcccagctggagtatgatggcggcaagctgagcaaggtgtgcaaggactgctaccagatcatcagcggcttcacagattctgaggagaagaagaggaagggcatcctggagattgagagcgctgaggtgtctggcaacagcgtggtgtgcagcttcctgcagtacatggagaagagcaagccctggcagaaggcctggtgtgtgatccccaagcaggaccccctggtgctgtacatgtacggggccccccaggatgtgcgggcccaggccaccatccccctgctgggctacgtggtggatgagatgcccaggtctgctgacctgccccacagcttcaagctgacccagagcaagtctgtgcacagctttgctgctgacagcgaggagctgaagcagaagtggctgaaggtgatcctgctggccgtgactggagagaccccaggcggccccaatgagcacccagccaccctggatgaccaccctgagcccaagaagaagtctgagtgctag

SEQ ID NO: 272446 - DNA, 2712 bp, Artificial Sequence
  derived and/or modified sequence
atgagcgacgagggcggcagcaacttccggcgggtggccatccggcgtaaatccaaccctagttatctgcctccgggggtgccacgcccatggagtcggccggcaagccatttggggcgcgtcggaaccgctgcatttaaaggccaggtccccagtggtgcgacaggtagcagtacatgtcctaaaatagctttggtgcctccctgttcaactagctcaaccacaactctggtgggtgaaaatgtttctgaagaagaagctcagggtatcaatggtaatcgacctgctaaacactcagccgctagcccaaagccgcaggttcctcctaaacccttacatctgcagaattccccctcctccaacatccaccaaacccctcgccacaaagcactcccaagcgctaagccaaggatggaagagatcaagccagcctcagcgtcatgtgtctctaaagagaaaccgtcgaaagttagtgatttgatatcaagattcgaggggggctccagcctctccaattatagcgacctgaaaaaggagtccgccgttaacctgaacgcacctcgaactcctggccgccacgggcttacaactacaccgcagcaaaagttgctgagccagcatttgccgcagagacagggaaatgatacagataagactcagggtgcgcagacatgcgttgcgaatggggtgatggcagctcagaaccagatggagtgtgaagaagagaaagccgccaccctgagcagtgacacaagcattcaggccagcgagcccctccttgatacccatattgttaacggtgagagggatgaaaccgcgaccgcgcccgctagtccaactactgactcatgcgatggcaatgcttctgactcaagttatagaactcctgggatcggccctgtgttacctctggaagagcgtggggctgagacggagactaaggtccaggagcgagaaaatggcgaatcccccctggaattggagcaactggatcagcaccatgaaatgaaagagaccaatgagcagaaactgcacaagattgccaatgagctgctgctaacagaaagggcgtacgtgaaccgcctcgatctgcttgaccaggtgttctattgtaagctccttgaggaagccaacagggggtctttccccgcagagatggtgaataagatattcagtaacatcagcagcataaatgcattccactcaaaatttttgctgccggagttggaaaagcgcatgcaagaatgggagaccaccccgagaattggagatattcttcagaaactcgcgccatttctgaaaatgtatggcgaatatgttaaggggttcgacaatgcaatggaacttgtcaagaacatgacagaaagaatcccgcagtttaagtctgttgtagaagagatccagaaacagaagatttgtggaagccttaccctgcagcatcatatgctggaacctgtgcagagaatccccaggtatgaaatgctgctcaaggactatctgaggaaactacctccagatagtctagactggaatgatgccaagaagagcctcgagattatttcaacggccgcaagccactcaaattccgctatccggaagatggaaaatctcaagaagcttttggaaatctacgagatgctaggcgaagaagaggacatcgtgaacccatctaatgagcttatcaaggagggacagatactgaaactcgctgctaggaatacgagcgcacaggagagatatcttttcctatttaataatatgctgctttattgcgtgccaaaattctcactggtggggagcaagttcactgtccgaacgagggttgggattgatggcatgaaaattgtagagacacaaaatgaagagtatccacacactttccaggttagtggtaaagagaggacactcgaattgcaagcctcttcagcccaggacaaagaggagtggattaaagccctgcaagagaccattgacgcctttcatcagcggcatgagacattccggaatgctattgcaaaagataacgatatccactcggaagtgtcaaccgcagagctaggcaaaagagcccctcggtggattcgagacaatgaagtgacaatgtgcatgaagtgcaaggagccttttaacgctctgactcgaagacggcatcattgtcgtgcatgtgggtacgtagtttgttggaagtgctctgactataaggcacagctggaatacgatgggggaaaacttagtaaggtgtgcaaggattgttaccagattatttccggtttcaccgactctgaggagaagaaacggaagggcattctcgaaatcgagagtgcggaggtttctggcaactctgtcgtctgctccttcctgcagtatatggagaagtcgaaaccgtggcaaaaggcatggtgtgtgatccccaagcaagatccactagtgttgtatatgtatggagcacctcaggacgtgagagcgcaggcaaccattcctctactgggatatgtggtcgatgagatgcctcgaagcgctgaccttccacactcctttaaactgacccagtcaaaatctgtccatagcttcgcagccgattcagaagagctcaaacagaagtggctgaaagtgatcttgctggctgttacaggtgagactcctggcggacccaacgagcatcccgccaccctagacgatcaccctgaacctaagaagaaaagtgagtgttag

SEQ ID NO: 272447 - DNA, 2712 bp, Artificial Sequence
  derived and/or modified sequence
atgtctgacgaaggcggatctaatttcagacgggtggcgattaggcggaaaagcaatccttcctacctgccgccaggcgtgcccaggccttggtctaggccggcttcgcatttgggtcgtgttggcactgccgcatttaaaggacaggtgccctccggcgcaaccggttccagcacttgtcccaagattgccctggttccaccttgttcgacgagtagtactactacgctggtgggagagaacgtgtccgaggaggaggcgcagggtatcaatggcaaccgtccagccaagcactctgccgcatcacctaagccgcaggtgcccccaaagcccctccatttacagaatagtccctcgagcaacatccaccagactcctagacataaggcacttcccagtgccaagcccaggatggaggagatcaagccagcttccgcctcctgtgtgagtaaggagaagccctccaaagtttctgacctgatcagccgcttcgagggtggctccagcctttctaactacagcgatctcaagaaagaaagcgcagtgaacctgaacgcaccccgaactccaggacgccacggactcaccaccacaccacaacagaagttactctcacagcatctgcctcagaggcaaggcaacgacacagacaaaacccagggggcacaaacctgcgtggccaatggggttatggcagctcagaaccaaatggagtgcgaggaggagaaggcggcaacgctctcgtctgatacttctatccaggcttctgagcctctccttgacacccatattgtaaatggagagcgtgatgagactgctaccgccccagcaagtcccactacagacagttgtgacgggaatgcaagcgattcctcctaccgtacgcctgggatcggccctgtgttgcccctcgaggaaagaggagcagaaacggagactaaggtacaggagcgagagaacggggagtccccactggagctggagcaactagaccagcaccacgagatgaaagagacaaatgaacagaaactgcacaaaatcgccaacgagctgcttttgactgagagagcctacgtcaatagactggacctccttgatcaagttttttattgtaaactccttgaagaagccaacaggggctcattccctgcagaaatggtcaacaagatttttagtaacatcagctccattaatgcttttcatagcaagttcctgctgcctgaacttgaaaaaagaatgcaagagtgggaaacaacccccagaatcggagatatcctgcagaaactggcaccttttctgaaaatgtacggggaatacgtcaaaggcttcgataatgctatggagctggtgaaaaatatgaccgagaggatcccacaattcaagtctgtagttgaggaaatccagaaacaaaagatatgcggctctctcactctccagcaccacatgctggaacctgtgcagaggataccccgttacgaaatgcttctgaaagactaccttcgcaaactgccccctgacagcctggattggaatgatgctaaaaaaagcctcgaaataatatccaccgcggcttcccatagcaacagcgcgatacgaaagatggagaatctaaaaaaactcctggagatctatgagatgctgggggaggaggaagatattgtaaaccctagcaacgagctaatcaaggagggccagattctgaagttggccgcaagaaatacctctgctcaggaaaggtacttattcttattcaacaatatgctgctgtactgcgtgcccaaattctccctggtcgggtccaaattcactgtgcggactagagtgggtattgatggaatgaagattgtggagacccaaaatgaagaataccctcataccttccaggtttcaggtaaggaaagaaccctggaacttcaggcatcatccgcccaggataaggaagagtggattaaagccctgcaggaaacgatcgacgctttccaccaacgccatgaaactttccgcaatgcaatcgcaaaagataacgatatccactcagaggtcagcaccgccgagctgggcaagcgcgctccacgctggatcagagacaacgaagtcaccatgtgtatgaagtgtaaggaaccattcaacgcactgactcggcgtcggcaccattgccgagcatgtgggtatgtcgtttgttggaagtgttccgactacaaagctcagctggaatacgacggcggtaagctttccaaagtttgcaaagactgctatcagatcatcagcgggtttactgacagcgaggagaagaaacgcaagggcattcttgaaattgagagtgcagaagtgtctgggaactccgtcgtgtgctctttccttcagtacatggaaaagtccaagccttggcagaaggcttggtgtgtcatcccaaaacaggaccccctcgtgctctacatgtatggagctccccaggacgtccgcgctcaggcaaccatcccacttctgggttatgtcgtagacgagatgccaaggtctgctgatctgccccattcctttaaacttacgcagtctaaaagcgtccatagctttgccgctgacagcgaggaattgaaacaaaaatggctcaaagttatcttgctggccgtcacaggggagaccccgggagggccaaatgaacacccggcaactctagatgaccatcctgaaccaaagaagaagtcagaatgctag

SEQ ID NO: 272448 - DNA, 2712 bp, Artificial Sequence
  derived and/or modified sequence
atgagcgacgagggcggcagcaacttcagaagagtggccatcagaagaaagagcaaccccagctacctgccccccggcgtgcccagaccctggagcagacccgccagccacctgggcagagtgggcaccgccgccttcaagggccaggtgcccagcggcgccaccggcagcagcacctgccccaagatcgccctggtgcccccctgcagcaccagcagcaccaccaccctggtgggcgagaacgtgagcgaggaggaggcccagggcatcaacggcaacagacccgccaagcacagcgccgccagccccaagccccaggtgccccccaagcccctgcacctgcagaacagccccagcagcaacatccaccagacccccagacacaaggccctgcccagcgccaagcccagaatggaggagatcaagcccgccagcgccagctgcgtgagcaaggagaagcccagcaaggtgagcgacctgatcagcagattcgagggcggcagcagcctgagcaactacagcgacctgaagaaggagagcgccgtgaacctgaacgcccccagaacccccggcagacacggcctgaccaccaccccccagcagaagctgctgagccagcacctgccccagagacagggcaacgacaccgacaagacccagggcgcccagacctgcgtggccaacggcgtgatggccgcccagaaccagatggagtgcgaggaggagaaggccgccaccctgagcagcgacaccagcatccaggccagcgagcccctgctggacacccacatcgtgaacggcgagagagacgagaccgccaccgcccccgccagccccaccaccgacagctgcgacggcaacgccagcgacagcagctacagaacccccggcatcggccccgtgctgcccctggaggagagaggcgccgagaccgagaccaaggtgcaggagagagagaacggcgagagccccctggagctggagcagctggaccagcaccacgagatgaaggagaccaacgagcagaagctgcacaagatcgccaacgagctgctgctgaccgagagagcctacgtgaacagactggacctgctggaccaggtgttctactgcaagctgctggaggaggccaacagaggcagcttccccgccgagatggtgaacaagatcttcagcaacatcagcagcatcaacgccttccacagcaagttcctgctgcccgagctggagaagagaatgcaggagtgggagaccacccccagaatcggcgacatcctgcagaagctggcccccttcctgaagatgtacggcgagtacgtgaagggcttcgacaacgccatggagctggtgaagaacatgaccgagagaatcccccagttcaagagcgtggtggaggagatccagaagcagaagatctgcggcagcctgaccctgcagcaccacatgctggagcccgtgcagagaatccccagatacgagatgctgctgaaggactacctgagaaagctgccccccgacagcctggactggaacgacgccaagaagagcctggagatcatcagcaccgccgccagccacagcaacagcgccatcagaaagatggagaacctgaagaagctgctggagatctacgagatgctgggcgaggaggaggacatcgtgaaccccagcaacgagctgatcaaggagggccagatcctgaagctggccgccagaaacaccagcgcccaggagagatacctgttcctgttcaacaacatgctgctgtactgcgtgcccaagttcagcctggtgggcagcaagttcaccgtgagaaccagagtgggcatcgacggcatgaagatcgtggagacccagaacgaggagtacccccacaccttccaggtgagcggcaaggagagaaccctggagctgcaggccagcagcgcccaggacaaggaggagtggatcaaggccctgcaggagaccatcgacgccttccaccagagacacgagaccttcagaaacgccatcgccaaggacaacgacatccacagcgaggtgagcaccgccgagctgggcaagagagcccccagatggatcagagacaacgaggtgaccatgtgcatgaagtgcaaggagcccttcaacgccctgaccagaagaagacaccactgcagagcctgcggctacgtggtgtgctggaagtgcagcgactacaaggcccagctggagtacgacggcggcaagctgagcaaggtgtgcaaggactgctaccagatcatcagcggcttcaccgacagcgaggagaagaagagaaagggcatcctggagatcgagagcgccgaggtgagcggcaacagcgtggtgtgcagcttcctgcagtacatggagaagagcaagccctggcagaaggcctggtgcgtgatccccaagcaggaccccctggtgctgtacatgtacggcgccccccaggacgtgagagcccaggccaccatccccctgctgggctacgtggtggacgagatgcccagaagcgccgacctgccccacagcttcaagctgacccagagcaagagcgtgcacagcttcgccgccgacagcgaggagctgaagcagaagtggctgaaggtgatcctgctggccgtgaccggcgagacccccggcggccccaacgagcaccccgccaccctggacgaccaccccgagcccaagaagaagagcgagtgctag

SEQ ID NO: 272449 - protein, 970 aa, Artificial Sequence
  derived and/or modified sequence
MANETQKVGAIHFPFPFTPYSIQEDFMAELYRVLEAGKIGIFESPTGTGKSLSLICGALSWLRDFEQKKREEEARLLETGTGPLHDEKDESLCLSSSCEGAAGTPRPAGEPAWVTQFVQKKEERDLVDRLKAEQARRKQREERLQQLQHRVQLKYAAKRLRQEEEERENLLRLSREMLETGPEAERLEQLESGEEELVLAEYESDEEKKVASRVDEDEDDLEEEHITKIYYCSRTHSQLAQFVHEVKKSPFGKDVRLVSLGSRQNLCVNEDVKSLGSVQLINDRCVDMQRSRHEKKKGAEEEKPKRRRQEKQAACPFYNHEQMGLLRDEALAEVKDMEQLLALGKEARACPYYGSRLAIPAAQLVVLPYQMLLHAATRQAAGIRLQDQVVIIDEAHNLIDTITGMHSVEVSGSQLCQAHSQLLQYVERYGKRLKAKNLMYLKQILYLLEKFVAVLGGNIKQNPNTQSLSQTGTELKTINDFLFQSQIDNINLFKVQRYCEKSMISRKLFGFTERYGAVFSSREQPKLAGFQQFLQSLQPRTTEALAAPADESQASTLRPASPLMHIQGFLAALTTANQDGRVILSRQGSLSQSTLKFLLLNPAVHFAQVVKECRAVVIAGGTMQPVSDFRQQLLACAGVEAERVVEFSCGHVIPPDNILPLVICSGISNQPLEFTFQKRELPQMMDEVGRILCNLCGVVPGGVVCFFPSYEYLRQVHAHWEKGGLLGRLAARKKIFQEPKSAHQVEQVLLAYSRCIQACGQERGQVTGALLLSVVGGKMSEGINFSDNLGRCVVMVGMPFPNIRSAELQEKMAYLDQTLSPRPGTPREGSGGEPVHEGRQPVHRQGHQAPEGFCQRSAPGPAICPAPCPGQAAGLDPSPCGGQSYLWPRHCCCAEVSPGEVGLFLMGNHTTAWRRALPLSCPLETVFVVGVVCGDPVTKVKPRRRVWSPECCQDPGTGVSSRRRKWGNPE

SEQ ID NO: 272450 - DNA, 3922 bp, Artificial Sequence
  derived and/or modified sequence
tgcgcagcggcgggggttgttccggctgcctttcactgaggggacccgccagtttctaactcagtggcgtttgccctgattcccggggcctggctttcagcgtagcaattctgccggcgaagaaggtgagcgcagtgctgtgtggcagcagagctccttaggacgaggagcagcgggacgaggaagggcagactggtgaaatcgcaaactgggcgtctgttccggcgccggacccctatttgcaaaggtccatggctaatgaaacacagaaggttggtgccatccattttccttttcccttcacaccctattccatccaggaagacttcatggcagagctgtaccgggttttggaggctggcaagattgggatatttgagagtccaactggcactgggaagtccttaagtcttatttgtggggccctctcttggctccgtgactttgaacagaagaagcgtgaagaagaggcacgactccttgaaactggaactggccccttacatgatgagaaagatgaatccctgtgtctgtcttcttcctgcgaaggggctgcaggcaccccgaggcctgctggagaaccggcctgggttactcagtttgtgcagaagaaagaagagagggacctggtggaccgactaaaggcggagcaggccaggaggaagcagcgagaagaacgcctgcagcagctgcagcacagggtgcagctcaagtatgcagccaagcgcctgaggcaggaagaagaagaaagagagaatctcctccgcctcagcagggagatgctagagacaggcccggaggctgagcggctggagcagctggagtctggggaggaggagctggtcctcgccgaatacgagagtgatgaggagaaaaaggtggcgagcagagtggatgaggatgaggatgacctggaggaagaacacataactaagatttattactgtagtcggacacactcccagctggcccagtttgtgcatgaggtgaagaagagcccctttggcaaggatgttcggctggtctcccttggctcccggcagaacctttgtgtaaatgaagacgtgaaaagcctaggttctgtgcagcttatcaacgaccgctgtgtggacatgcagagaagcaggcacgagaagaagaaaggagctgaggaggagaagccaaagaggaggaggcaggagaagcaggcagcctgccccttctacaaccacgagcagatgggccttctccgggatgaggccctggcagaggtgaaggacatggagcagctgctggcccttgggaaggaggcccgggcctgtccctattacgggagccgccttgccatccctgcagcccagctggtggtgctgccctatcagatgctgctgcatgcggccactcggcaggccgcgggcatccggctgcaggaccaggtggtgatcatcgacgaggcgcacaacctgatcgacaccatcacgggcatgcacagcgtggaggtcagcggctcccagctctgccaggcccattcccagctgctgcagtacgtggagcgatacgggaagcgtttgaaggccaagaacctgatgtacctgaagcagatcctgtatttgctggagaaattcgtggctgtgctaggggggaacattaagcaaaatcccaatacacagagtctgtcacagacagggacggagctgaagaccatcaacgactttctcttccagagccagatcgacaacatcaacctgttcaaggtgcagcgatactgtgagaagagcatgatcagcagaaagctctttggattcactgaacggtacggagcagtgttctcatcccgggagcagcccaaactggctgggtttcagcaattcctgcagagcctgcagcccaggacgactgaagctcttgcagcccctgcagacgagagtcaggccagcaccctgcgaccagcttctccactgatgcacatccaaggcttcctggcagctctcactacggccaaccaggacggcagggtcatcctgagccgccaaggcagcctcagtcagagcaccctgaagtttttgctcctgaatccagctgtgcactttgcccaagtggtgaaggaatgccgggcagtggtcattgcggggggtaccatgcagccggtgtctgacttccggcagcagctgctggcctgtgccggggtggaagctgagcgcgtggtggagttttcctgtggtcacgtgatccctccagacaacatcctgcccctcgtcatctgcagcgggatctccaaccagccgctggaattcacgttccagaaaagagagctgcctcagatgatggacgaggtgggtcgcattctctgtaacctgtgcggtgtggttcctggaggggtggtctgtttcttcccctcctacgagtacctgcgccaggtccatgcccactgggagaagggtggcctgctgggccgtctggctgccaggaagaagatattccaggaacctaagagcgcacaccaggtggagcaggtgctgctggcatattccaggtgcatccaggcctgtggccaggagagaggccaggtgacaggggccctgctcctctctgtggttggaggaaagatgagtgaagggatcaacttctctgacaacctaggccggtgtgtggtgatggtgggcatgcccttccccaacatcaggtctgcagagctgcaggagaagatggcctacttggatcaaaccctcagcccccggccaggcacccccagggaaggctctggtggagaacctgtgcatgaaggccgtcaaccagtccataggcagggccatcaggcaccagaaggattttgccagcgtagtgctcctggaccagcgatatgcccggccccctgtcctggccaagctgccggcctggatccgagcccgtgtggaggtcaaagctacctttggccccgccattgctgctgtgcagaagtttcaccgggagaagtcggcctcttcctgatgggcaaccacaccactgcctggcgccgtgcccttcctttgtcctgcccgctggagacagtgtttgtcgtgggcgtggtctgcggggatcctgttacaaaggtgaaacccaggaggagagtgtggagtccagagtgctgccaggacccaggcacaggcgttagctcccgtaggagaaaatgggggaatcctgaatgaacagtgggtcctggctgtccttggggcgttccagggcagctcccctcctggaatagaatctttctttccatcctgcatggctgagagccaggcttccttcctggtctccgcaggaggctgtggcagctgtggcatccactgtggcatctccgtcctgcccaccttcttaagaggcgagatggagcaggcccatctgcctctgccctttctagccaaggttatagctgccctggactgctcactctctggtctcaatttaaaatgatccatggccacagggctcctgcccaggggcttgtcaccttcccctcctccttcctgagtcactccttcagtagaaggccctgctccctatcctgtcccacagccctgcctggatttgtatccttggcttcgtgccagttcctccaagtctatggcacctccctccctctcaaccacttgagcaaactccaagacaccttctaccccaacaccagcaattatgccaagggccgttaggctctcaacatgactatagagaccccgtgtcatcacggagacctttgttcctgtgggaaaatatccctcccacctgcaacagctgcccctgctgactgcgcctgtcttctccctctgaccccagagaaaggggctgtggtcagctgggatcttctgccaccatcagggacaaacgggggcaggaggaaagtcactgatgcccagatgtttgcatcctgcacagctataggtccttaaataaaagtgtgctgttggtt

SEQ ID NO: 272451 - DNA, 3751 bp, Artificial Sequence
  derived and/or modified sequence
cagtttctaactcagtggcgtttgccctgattcccggggcctggctttcagcgtagcaattctgccggcgaagaaggtccatggctaatgaaacacagaaggttggtgccatccattttccttttcccttcacaccctattccatccaggaagacttcatggcagagctgtaccgggttttggaggctggcaagattgggatatttgagagtccaactggcactgggaagtccttaagtcttatttgtggggccctctcttggctccgtgactttgaacagaagaagcgtgaagaagaggcacgactccttgaaactggaactggccccttacatgatgagaaagatgaatccctgtgtctgtcttcttcctgcgaaggggctgcaggcaccccgaggcctgctggagaaccggcctgggttactcagtttgtgcagaagaaagaagagagggacctggtggaccgactaaaggcggagcaggccaggaggaagcagcgagaagaacgcctgcagcagctgcagcacagggtgcagctcaagtatgcagccaagcgcctgaggcaggaagaagaagaaagagagaatctcctccgcctcagcagggagatgctagagacaggcccggaggctgagcggctggagcagctggagtctggggaggaggagctggtcctcgccgaatacgagagtgatgaggagaaaaaggtggcgagcagagtggatgaggatgaggatgacctggaggaagaacacataactaagatttattactgtagtcggacacactcccagctggcccagtttgtgcatgaggtgaagaagagcccctttggcaaggatgttcggctggtctcccttggctcccggcagaacctttgtgtaaatgaagacgtgaaaagcctaggttctgtgcagcttatcaacgaccgctgtgtggacatgcagagaagcaggcacgagaagaagaaaggagctgaggaggagaagccaaagaggaggaggcaggagaagcaggcagcctgccccttctacaaccacgagcagatgggccttctccgggatgaggccctggcagaggtgaaggacatggagcagctgctggcccttgggaaggaggcccgggcctgtccctattacgggagccgccttgccatccctgcagcccagctggtggtgctgccctatcagatgctgctgcatgcggccactcggcaggccgcgggcatccggctgcaggaccaggtggtgatcatcgacgaggcgcacaacctgatcgacaccatcacgggcatgcacagcgtggaggtcagcggctcccagctctgccaggcccattcccagctgctgcagtacgtggagcgatacgggaagcgtttgaaggccaagaacctgatgtacctgaagcagatcctgtatttgctggagaaattcgtggctgtgctaggggggaacattaagcaaaatcccaatacacagagtctgtcacagacagggacggagctgaagaccatcaacgactttctcttccagagccagatcgacaacatcaacctgttcaaggtgcagcgatactgtgagaagagcatgatcagcagaaagctctttggattcactgaacggtacggagcagtgttctcatcccgggagcagcccaaactggctgggtttcagcaattcctgcagagcctgcagcccaggacgactgaagctcttgcagcccctgcagacgagagtcaggccagcaccctgcgaccagcttctccactgatgcacatccaaggcttcctggcagctctcactacggccaaccaggacggcagggtcatcctgagccgccaaggcagcctcagtcagagcaccctgaagtttttgctcctgaatccagctgtgcactttgcccaagtggtgaaggaatgccgggcagtggtcattgcggggggtaccatgcagccggtgtctgacttccggcagcagctgctggcctgtgccggggtggaagctgagcgcgtggtggagttttcctgtggtcacgtgatccctccagacaacatcctgcccctcgtcatctgcagcgggatctccaaccagccgctggaattcacgttccagaaaagagagctgcctcagatgatggacgaggtgggtcgcattctctgtaacctgtgcggtgtggttcctggaggggtggtctgtttcttcccctcctacgagtacctgcgccaggtccatgcccactgggagaagggtggcctgctgggccgtctggctgccaggaagaagatattccaggaacctaagagcgcacaccaggtggagcaggtgctgctggcatattccaggtgcatccaggcctgtggccaggagagaggccaggtgacaggggccctgctcctctctgtggttggaggaaagatgagtgaagggatcaacttctctgacaacctaggccggtgtgtggtgatggtgggcatgcccttccccaacatcaggtctgcagagctgcaggagaagatggcctacttggatcaaaccctcagcccccggccaggcacccccagggaaggctctggtggagaacctgtgcatgaaggccgtcaaccagtccataggcagggccatcaggcaccagaaggattttgccagcgtagtgctcctggaccagcgatatgcccggccccctgtcctggccaagctgccggcctggatccgagcccgtgtggaggtcaaagctacctttggccccgccattgctgctgtgcagaagtttcaccgggagaagtcggcctcttcctgatgggcaaccacaccactgcctggcgccgtgcccttcctttgtcctgcccgctggagacagtgtttgtcgtgggcgtggtctgcggggatcctgttacaaaggtgaaacccaggaggagagtgtggagtccagagtgctgccaggacccaggcacaggcgttagctcccgtaggagaaaatgggggaatcctgaatgaacagtgggtcctggctgtccttggggcgttccagggcagctcccctcctggaatagaatctttctttccatcctgcatggctgagagccaggcttccttcctggtctccgcaggaggctgtggcagctgtggcatccactgtggcatctccgtcctgcccaccttcttaagaggcgagatggagcaggcccatctgcctctgccctttctagccaaggttatagctgccctggactgctcactctctggtctcaatttaaaatgatccatggccacagggctcctgcccaggggcttgtcaccttcccctcctccttcctgagtcactccttcagtagaaggccctgctccctatcctgtcccacagccctgcctggatttgtatccttggcttcgtgccagttcctccaagtctatggcacctccctccctctcaaccacttgagcaaactccaagacaccttctaccccaacaccagcaattatgccaagggccgttaggctctcaacatgactatagagaccccgtgtcatcacggagacctttgttcctgtgggaaaatatccctcccacctgcaacagctgcccctgctgactgcgcctgtcttctccctctgaccccagagaaaggggctgtggtcagctgggatcttctgccaccatcagggacaaacgggggcaggaggaaagtcactgatgcccagatgtttgcatcctgcacagctataggtccttaaataaaagtgtgctgttggtt

SEQ ID NO: 272452 - protein, 906 aa, Artificial Sequence
  derived and/or modified sequence
MANETQKVGAIHFPFPFTPYSIQEDFMAELYRVLEAGKIGIFESPTGTGKSLSLICGALSWLRDFEQKKREEEARLLETGTGPLHDEKDESLCLSSSCEGAAGTPRPAGEPAWVTQFVQKKEERDLVDRLKAEQARRKQREERLQQLQHRVQLKYAAKRLRQEEEERENLLRLSREMLETGPEAERLEQLESGEEELVLAEYESDEEKKVASRVDEDEDDLEEEHITKIYYCSRTHSQLAQFVHEVKKSPFGKDVRLVSLGSRQNLCVNEDVKSLGSVQLINDRCVDMQRSRHEKKKGAEEEKPKRRRQEKQAACPFYNHEQMGLLRDEALAEVKDMEQLLALGKEARACPYYGSRLAIPAAQLVVLPYQMLLHAATRQAAGIRLQDQVVIIDEAHNLIDTITGMHSVEVSGSQLCQAHSQLLQYVERYGKRLKAKNLMYLKQILYLLEKFVAVLGGNIKQNPNTQSLSQTGTELKTINDFLFQSQIDNINLFKVQRYCEKSMISRKLFGFTERYGAVFSSREQPKLAGFQQFLQSLQPRTTEALAAPADESQASTLRPASPLMHIQGFLAALTTANQDGRVILSRQGSLSQSTLKFLLLNPAVHFAQVVKECRAVVIAGGTMQPVSDFRQQLLACAGVEAERVVEFSCGHVIPPDNILPLVICSGISNQPLEFTFQKRELPQMMDEVGRILCNLCGVVPGGVVCFFPSYEYLRQVHAHWEKGGLLGRLAARKKIFQEPKSAHQVEQVLLAYSRCIQACGQERGQVTGALLLSVVGGKMSEGINFSDNLGRCVVMVGMPFPNIRSAELQEKMAYLDQTLPRAPGQAPPGKALVENLCMKAVNQSIGRAIRHQKDFASVVLLDQRYARPPVLAKLPAWIRARVEVKATFGPAIAAVQKFHREKSASS

SEQ ID NO: 272453 - DNA, 3079 bp, Artificial Sequence
  derived and/or modified sequence
tgcgcagcggcgggggttgttccggctgcctttcactgaggggacccgccagtttctaactcagtggcgtttgccctgattcccggggcctggctttcagcgtagcaattctgccggcgaagaaggtgagcgcagtgctgtgtggcagcagagctccttaggacgaggagcagcgggacgaggaagggcagactggtgaaatcgcaaactgggcgtctgttccggcgccggacccctatttgcaaaggtccatggctaatgaaacacagaaggttggtgccatccattttccttttcccttcacaccctattccatccaggaagacttcatggcagagctgtaccgggttttggaggctggcaagattgggatatttgagagtccaactggcactgggaagtccttaagtcttatttgtggggccctctcttggctccgtgactttgaacagaagaagcgtgaagaagaggcacgactccttgaaactggaactggccccttacatgatgagaaagatgaatccctgtgtctgtcttcttcctgcgaaggggctgcaggcaccccgaggcctgctggagaaccggcctgggttactcagtttgtgcagaagaaagaagagagggacctggtggaccgactaaaggcggagcaggccaggaggaagcagcgagaagaacgcctgcagcagctgcagcacagggtgcagctcaagtatgcagccaagcgcctgaggcaggaagaagaagaaagagagaatctcctccgcctcagcagggagatgctagagacaggcccggaggctgagcggctggagcagctggagtctggggaggaggagctggtcctcgccgaatacgagagtgatgaggagaaaaaggtggcgagcagagtggatgaggatgaggatgacctggaggaagaacacataactaagatttattactgtagtcggacacactcccagctggcccagtttgtgcatgaggtgaagaagagcccctttggcaaggatgttcggctggtctcccttggctcccggcagaacctttgtgtaaatgaagacgtgaaaagcctaggttctgtgcagcttatcaacgaccgctgtgtggacatgcagagaagcaggcacgagaagaagaaaggagctgaggaggagaagccaaagaggaggaggcaggagaagcaggcagcctgccccttctacaaccacgagcagatgggccttctccgggatgaggccctggcagaggtgaaggacatggagcagctgctggcccttgggaaggaggcccgggcctgtccctattacgggagccgccttgccatccctgcagcccagctggtggtgctgccctatcagatgctgctgcatgcggccactcggcaggccgcgggcatccggctgcaggaccaggtggtgatcatcgacgaggcgcacaacctgatcgacaccatcacgggcatgcacagcgtggaggtcagcggctcccagctctgccaggcccattcccagctgctgcagtacgtggagcgatacgggaagcgtttgaaggccaagaacctgatgtacctgaagcagatcctgtatttgctggagaaattcgtggctgtgctaggggggaacattaagcaaaatcccaatacacagagtctgtcacagacagggacggagctgaagaccatcaacgactttctcttccagagccagatcgacaacatcaacctgttcaaggtgcagcgatactgtgagaagagcatgatcagcagaaagctctttggattcactgaacggtacggagcagtgttctcatcccgggagcagcccaaactggctgggtttcagcaattcctgcagagcctgcagcccaggacgactgaagctcttgcagcccctgcagacgagagtcaggccagcaccctgcgaccagcttctccactgatgcacatccaaggcttcctggcagctctcactacggccaaccaggacggcagggtcatcctgagccgccaaggcagcctcagtcagagcaccctgaagtttttgctcctgaatccagctgtgcactttgcccaagtggtgaaggaatgccgggcagtggtcattgcggggggtaccatgcagccggtgtctgacttccggcagcagctgctggcctgtgccggggtggaagctgagcgcgtggtggagttttcctgtggtcacgtgatccctccagacaacatcctgcccctcgtcatctgcagcgggatctccaaccagccgctggaattcacgttccagaaaagagagctgcctcagatgatggacgaggtgggtcgcattctctgtaacctgtgcggtgtggttcctggaggggtggtctgtttcttcccctcctacgagtacctgcgccaggtccatgcccactgggagaagggtggcctgctgggccgtctggctgccaggaagaagatattccaggaacctaagagcgcacaccaggtggagcaggtgctgctggcatattccaggtgcatccaggcctgtggccaggagagaggccaggtgacaggggccctgctcctctctgtggttggaggaaagatgagtgaagggatcaacttctctgacaacctaggccggtgtgtggtgatggtgggcatgcccttccccaacatcaggtctgcagagctgcaggagaagatggcctacttggatcaaaccctccccagagcccccggccaggcacccccagggaaggctctggtggagaacctgtgcatgaaggccgtcaaccagtccataggcagggccatcaggcaccagaaggattttgccagcgtagtgctcctggaccagcgatatgcccggccccctgtcctggccaagctgccggcctggatccgagcccgtgtggaggtcaaagctacctttggccccgccattgctgctgtgcagaagtttcaccgggagaagtcggcctcttcctgatgggcaaccacaccactgcctggcgccgtgcccttcctttgtcctgcccgctggagacagtgtttgtcgtgggcgtggtctgcggggatcctgttacaaaggtgaaa

SEQ ID NO: 272454 - protein, 822 aa, Artificial Sequence
  derived and/or modified sequence
MNGHISNHPSSFGMYPSQMNGYGSSPTFSQTDREHGSKTSAKALYEQRKNYARDSVSSVSDISQYRVEHLTTFVLDRKDAMITVDDGIRKLKLLDAKGKVWTQDMILQVDDRAVSLIDLESKNELENFPLNTIQHCQAVMHSCSYDSVLALVCKEPTQNKPDLHLFQCDEVKANLISEDIESAISDSKGGKQKRRPDALRMISNADPSIPPPPRAPAPAPPGTVTQVDVRSRVAAWSAWAADQGDFEKPRQYHEQEETPEMMAARIDRDVQILNHILDDIEFFITKLQKAAEAFSELSKRKKNKKGKRKGPGEGVLTLRAKPPPPDEFLDCFQKFKHGFNLLAKLKSHIQNPSAADLVHFLFTPLNMVVQATGGPELASSVLSPLLNKDTIDFLNYTVNGDERQLWMSLGGTWMKARAEWPKEQFIPPYVPRFRNGWEPPMLNFMGATMEQDLYQLAESVANVAEHQRKQEIKRLSTEHSSVSEYHPADGYAFSSNIYTRGSHLDQGEAAVAFKPTSNRHIDRNYEPLKTQPKKYAKSKYDFVARNNSELSVLKDDILEILDDRKQWWKVRNASGDSGFVPNNILDIVRPPESGLGRADPPYTHTIQKQRMEYGPRPADTPPAPSPPPTPAPVPVPLPPSTPAPVPVSKVPANITRQNSSSSDSGGSIVRDSQRHKQLPVDRRKSQMEEVQDELIHRLTIGRSAAQKKFHVPRQNVPVINITYDSTPEDVKTWLQSKGFNPVTVNSLGVLNGAQLFSLNKDELRTVCPEGARVYSQITVQKAALEDSSGSSELQEIMRRRQEKISAAASDSGVESFDEGSSH

SEQ ID NO: 272455 - protein, 121 aa, Artificial Sequence
  derived and/or modified sequence
MNGHISNHPSSFGMYPSQMNGYGSSPTFSQTDREHGSKTSAKALYEQRKNYARDSVSSVSDISQYRVEHLTTFVLDRKDAMITVDDGIRKLKLLDAKGKVWTQDMILQVDDRAVSLIDLES

SEQ ID NO: 272456 - protein, 562 aa, Artificial Sequence
  derived and/or modified sequence
MMAARIDRDVQILNHILDDIEFFITKLQKAAEAFSELSKRKKNKKGKRKGPGEGVLTLRAKPPPPDEFLDCFQKFKHGFNLLAKLKSHIQNPSAADLVHFLFTPLNMVVQATGGPELASSVLSPLLNKDTIDFLNYTVNGDERQLWMSLGGTWMKARAEWPKEQFIPPYVPRFRNGWEPPMLNFMGATMEQDLYQLAESVANVAEHQRKQEIKRLSTEHSSVSEYHPADGYAFSSNIYTRGSHLDQGEAAVAFKPTSNRHIDRNYEPLKTQPKKYAKSKYDFVARNNSELSVLKDDILEILDDRKQWWKVRNASGDSGFVPNNILDIVRPPESGLGRADPPYTHTIQKQRMEYGPRPADTPPAPSPPPTPAPVPVPLPPSTPAPVPVSKVPANITRQNSSSSDSGGSIVRDSQRHKQLPVDRRKSQMEEVQDELIHRLTIGRSAAQKKFHVPRQNVPVINITYDSTPEDVKTWLQSKGFNPVTVNSLGVLNGAQLFSLNKDELRTVCPEGARVYSQITVQKAALEDSSGSSELQEIMRRRQEKISAAASDSGVESFDEGSSH

SEQ ID NO: 272457 - DNA, 4061 bp, Artificial Sequence
  derived and/or modified sequence
cacttcgcctcaagcgctggagtcgaccagaactctgcggctcggctgccggcaagacccggatagcggatttcgctcctggctgcggggcgcgcactcgcccgcccgcccgctcgctcgttcctcgcgcgggcactgggcatgcgcggcgcgcggttggcactggctgcgagcgggcgggcggctccagacttcacaggcagcagctagcgaggcggtctcgcccggcgcgaggccggcgctgtgctcgcctcggagatcgctgctctttagctgggtgcagaaggcggctccgcggctcgcggacgactggctgggcgcgaatcagattggggggctttctcccggtcccctcccacctcgtctgggctcgcggcgtctccggggaaagccgtggccccgagggcggatccgagaacacacaagtgaaagacacaatgaatggtcatatttctaatcatcccagtagttttggaatgtacccatctcagatgaatggctacggatcatcacctaccttttcccagacggacagagaacatggttcaaaaacaagtgcaaaggccctttatgaacaaaggaagaattatgcacgggacagtgtcagcagtgtgtcagatatatctcaataccgtgttgaacacttgactacctttgtcctggatcggaaagatgctatgatcactgttgatgatggaataaggaaattgaaattgcttgatgccaagggcaaagtgtggactcaagatatgattcttcaagtggatgacagagctgtgagcctgattgatttagaatcaaagaatgaactggagaattttcctttaaacacaatccagcactgccaagctgtgatgcattcatgcagctatgattcagttcttgcactggtgtgcaaagagccaacccagaacaagccagatcttcatctcttccagtgtgatgaggttaaggcaaacctaattagtgaagatattgaaagtgcaatcagtgacagtaaaggagggaaacagaagaggcggcccgacgccctgaggatgatttccaatgcagaccctagtataccgcctccacccagagctcctgcccctgcgccccctgggaccgtcacccaggtggatgttagaagtcgagtggcagcctggtctgcatgggcagccgaccaaggggactttgagaaaccaaggcagtatcatgagcaggaagaaacacctgagatgatggcagcccgcattgacagagatgtgcaaatcttaaaccacattttggatgacattgaattttttatcacaaaactccaaaaagcagcagaagcattttctgagctttctaaaaggaagaaaaacaagaaaggtaaaaggaaaggaccaggagagggtgttttaacgctgcgggcaaaacctccacctcctgatgaatttcttgactgtttccaaaagtttaaacacggatttaaccttctggccaaactgaagtctcatattcagaatcctagtgctgcagatttggttcactttttgtttactccattaaatatggtggtgcaggcaacaggaggtcctgaactagccagttcagtacttagtcccctattgaataaggacacaattgatttcttaaattatactgtcaatggtgatgaacggcagctgtggatgtcattgggaggaacttggatgaaagccagagcagagtggccaaaagaacagtttattccaccatatgttccacgattccgcaatggctgggagcccccaatgctgaactttatgggagccacaatggaacaagatctttatcaactggcagaatctgtggcaaatgtagcagaacatcagcgcaaacaggaaataaaaagattatccacagagcattccagtgtatcagagtatcatccagccgatggctatgcgttcagtagcaacatttacacaagaggatcccacctggaccaaggggaagctgctgttgcttttaagccaacttctaatcgccatatagatagaaattatgaaccactcaaaacacaacccaagaaatatgccaaatccaagtatgactttgtagcaaggaacaacagtgagctctcggttctaaaggatgatattttagagatacttgatgatcggaagcaatggtggaaagttcgaaatgcaagtggagactctggatttgtgccaaataacattttggatattgtgagacctccagaatctggattggggcgtgctgatccaccttatactcatactatacagaaacaaaggatggagtatggcccaagaccagctgatactccccctgctccatcacctcctccaacaccagctcctgttcctgttccccttcccccttccactccagcacctgttcctgtgtcaaaggtcccagcaaatataacacgtcaaaacagcagctccagtgacagtggtggcagtatcgtgcgagacagccagagacacaaacaacttccggtggaccgaaggaaatctcagatggaggaagtgcaagatgaactcatccacagactgaccattggtcggagtgccgctcagaagaaattccatgtgccacggcagaacgtgccagttatcaatatcacttacgactccacaccagaggatgtgaagacgtggttacagtcaaagggattcaaccctgtgactgtcaatagtcttggagtattaaatggtgcacaacttttctctctcaataaggatgaactgaggacagtctgccctgaaggggcgagagtctatagccaaatcactgtacaaaaagctgcattggaggatagcagtggcagctccgagttacaagaaattatgagaagacgacaggaaaaaatcagtgctgccgctagtgattcaggagtggaatcttttgatgaaggaagcagtcactaatttgtttgtttgtatttaaactccattgtttttggcattattccaacatgctttgttttaagaagccttgaagggaatgtcagattcatttttcttgatgtaatttatcaccataaaaaaaaacccatgcaaacctgagtgagcacaggatttgcttctaggcccattatttttattaaaactgaaaaaatttaaactgaattttttgaccttggaaaatatttttcttactttaccaaggtgaagtttccttaattagactaattattttatccccatcccagggtataaacaggaattgttttgatagtggtggagttattcactgcaacaaagcaacaatgttgtccatgattcaaaatctaagcagtttcgattttgcctgtgaatatggtgtctgtcattcagggcatagctcactgtaggctagcctctgcttacttaagtctcttctctgacatactcaatggaagaatatttagatttatttaaagttcttaatgccaacagtttaaaaaaaaattaaaacatttgaatgaactgtaaagtacagccataccttggacatgcaaatataaatctatggagcattctcaagagagtttgtcatggctctgttgattgcaactccttgtatagcttgtattttgatttagtttatattctgcttattatgtatactgtgttcttatatatgagaaagcacaaatgcgaaagaggtcatgtcttctcaaaatctagcaaaggaagtagtctgcattggtgtgcattacagtattttgcttaatgaaagcctcagttctgaatgttgatatgagtagttaaaaggaagtggggccattttatgtgtttatctgtgtcaagtatttctggtaataagaagcacttaatttacacatattttaatcctgtgaaagattccacatagagaaaagaaagatacctaaccttcaacaaatgttatttttggaaacacaatttttgtcattaaatgttatattatttcacatatataaaacagatgttatgtaagaatgttgtatattttaacataaatcatttagagaaattatctagattcattaattttcatagtgcctttttcacatgagtcagctggaaagtctgcaataaacagtatttgctgtctgttaa

SEQ ID NO: 272458 - DNA, 559 bp, Artificial Sequence
  derived and/or modified sequence
agacttcacaggcagcagctagcgaggcggtctcgcccggcgcgaggccggcgctgtgctcgcctcggagatcgctgctctttagctgggtgcagaaggcggctccgcggctcgcggacgactggctgggcgcgaatcagattggggggctttctcccggtcccctcccacctcgtctgggctcgcggcgtctccggggaaagccgtggccccgagggcggatccgaggacggtcagtaaaatcttcccctgaggacattgtgattgaactgagatctgaagaatgagacagaattaactcgaagtgaccagatcttgaatattatttctttataacacacaagtgaaagacacaatgaatggtcatatttctaatcatcccagtagttttggaatgtacccatctcagatgaatggctacggatcatcacctaccttttcccagacggacagagaacatggttcaaaaacaagtgcaaaggccctttatgaacaaaggaagaattatgcacgggacagtgtcagcagtgtgtcagatatatctcaataccgtgttgaa

SEQ ID NO: 272459 - DNA, 2574 bp, Artificial Sequence
  derived and/or modified sequence
cacttcgcctcaagcgctggagtcgaccagaactctgcggctcggctgccggcaagacccggatagcggatttcgctcctggctgcggggcgcgcactcgcccgcccgcccgctcgctcgttcctcgcgcgggcactgggcatgcgcggcgcgcggttggcactggctgcgagcgggcgggcggctccagacttcacaggcagcagctagcgaggcggtctcgcccggcgcgaggccggcgctgtgctcgcctcggagatcgctgctctttagctgggtgcagaaggcggctccgcggctcgcggacgactggctgggcgcgaatcagattggggggctttctcccggtcccctcccacctcgtctgggctcgcggcgtctccggggaaagccgtggccccgagggcggatccgagaacacacaagtgaaagacacaatgaatggtcatatttctaatcatcccagtagttttggaatgtacccatctcagatgaatggctacggatcatcacctaccttttcccagacggacagagaacatggttcaaaaacaagtgcaaaggccctttatgaacaaaggaagaattatgcacgggacagtgtcagcagtgtgtcagatatatctcaataccgtgttgaacacttgactacctttgtcctggatcggaaagatgctatgatcactgttgatgatggaataaggaaattgaaattgcttgatgccaagggcaaagtgtggactcaagatatgattcttcaagtggatgacagagctgtgagcctgattgatttagaatcaaagaatgaactggagaattttcctttaaacacaatccagcactgccaagctgtgatgcattcatgcagctatgattcagttcttgcactggtgtgcaaagagccaacccagaacaagccagatcttcatctcttccagtgtgatgaggttaaggcaaacctaattagtgaagatattgaaagtgcaatcagtgacagtaaaggagggaaacagaagaggcggcccgacgccctgaggatgatttccaatgcagaccctagtataccgcctccacccagagctcctgcccctgcgccccctgggaccgtcacccaggtggatgttagaagtcgagtggcagcctggtctgcatgggcagccgaccaaggggactttgagaaaccaaggcagtatcatgagcaggaagaaacacctgagatgatggcagcccgcattgacagagatgtgcaaatcttaaaccacattttggatgacattgaattttttatcacaaaactccaaaaagcagcagaagcattttctgagctttctaaaaggaagaaaaacaagaaaggtaaaaggaaaggaccaggagagggtgttttaacgctgcgggcaaaacctccacctcctgatgaatttcttgactgtttccaaaagtttaaacacggatttaaccttctggccaaactgaagtctcatattcagaatcctagtgctgcagatttggttcactttttgtttactccattaaatatggtggtgcaggcaacaggaggtcctgaactagccagttcagtacttagtcccctattgaataaggacacaattgatttcttaaattatactgtcaatggtgatgaacggcagctgtggatgtcattgggaggaacttggatgaaagccagagcagagtggccaaaagaacagtttattccaccatatgttccacgattccgcaatggctgggagcccccaatgctgaactttatgggagccacaatggaacaagatctttatcaactggcagaatctgtggcaaatgtagcagaacatcagcgcaaacaggaaataaaaagattatccacagagcattccagtgtatcagagtatcatccagccgatggctatgcgttcagtagcaacatttacacaagaggatcccacctggaccaaggggaagctgctgttgcttttaagccaacttctaatcgccatatagatagaaattatgaaccactcaaaacacaacccaagaaatatgccaaatccaagtatgactttgtagcaaggaacaacagtgagctctcggttctaaaggatgatattttagagatacttgatgatcggaagcaatggtggaaagttcgaaatgcaagtggagactctggatttgtgccaaataacattttggatattgtgagacctccagaatctggattggggcgtgctgatccaccttatactcatactatacagaaacaaaggatggagtatggcccaagaccagctgatactccccctgctccatcacctcctccaacaccagctcctgttcctgttccccttcccccttccactccagcacctgttcctgtgtcaaaggtcccagcaaatataacacgtcaaaacagcagctccagtgacagtggtggcagtatcgtgcgagacagccagagacacaaaacttccggtggaccgaaggaaatctcagatggaggaagtgcaagatgaactcatccacagactgaccattggtcggagtgccgctcagaagaaattccatgtgccacgg

SEQ ID NO: 272460 - DNA, 374 bp, Artificial Sequence
  derived and/or modified sequence
agaaggctcagagaatggaggcagccagacacccgttttagtacagtgtggagctgaaggaagtatatattaaaaaacaaacaaacaatggactttggaatcagaccttatctgccttggttttcttatcaaagaggtggaaatgtcaaaacacacaagtgaaagacacaatgaatggtcatatttctaatcatcccagtagttttggaatgtacccatctcagatgaatggctacggatcatcacctaccttttcccagacggacagagaacatggttcaaaaacaagtgcaaaggccctttatgaacaaaggaagaattatgcacgggacagtgtcagcagtgtgtcagatatatctcaataccgtgttgaa

SEQ ID NO: 272461 - DNA, 3925 bp, Artificial Sequence
  derived and/or modified sequence
agacttcacaggcagcagctagcgaggcggtctcgcccggcgcgaggccggcgctgtgctcgcctcggagatcgctgctctttagctgggtgcagaaggcggctccgcggctcgcggacgactggctgggcgcgaatcagattggggggctttctcccggtcccctcccacctcgtctgggctcgcggcgtctccggggaaagccgtggccccgagggcggatccgagctccttgggttctggaaagtgagcactagtaatggacgtcatgtggtaaacacacaagtgaaagacacaatgaatggtcatatttctaatcatcccagtagttttggaatgtacccatctcagatgaatggctacggatcatcacctaccttttcccagacggacagagaacatggttcaaaaacaagtgcaaaggccctttatgaacaaaggaagaattatgcacgggacagtgtcagcagtgtgtcagatatatctcaataccgtgttgaacacttgactacctttgtcctggatcggaaagatgctatgatcactgttgatgatggaataaggaaattgaaattgcttgatgccaagggcaaagtgtggactcaagatatgattcttcaagtggatgacagagctgtgagcctgattgatttagaatcaaagaatgaactggagaattttcctttaaacacaatccagcactgccaagctgtgatgcattcatgcagctatgattcagttcttgcactggtgtgcaaagagccaacccagaacaagccagatcttcatctcttccagtgtgatgaggttaaggcaaacctaattagtgaagatattgaaagtgcaatcagtgacagtaaaggagggaaacagaagaggcggcccgacgccctgaggatgatttccaatgcagaccctagtataccgcctccacccagagctcctgcccctgcgccccctgggaccgtcacccaggtggatgttagaagtcgagtggcagcctggtctgcatgggcagccgaccaaggggactttgagaaaccaaggcagtatcatgagcaggaagaaacacctgagatgatggcagcccgcattgacagagatgtgcaaatcttaaaccacattttggatgacattgaattttttatcacaaaactccaaaaagcagcagaagcattttctgagctttctaaaaggaagaaaaacaagaaaggtaaaaggaaaggaccaggagagggtgttttaacgctgcgggcaaaacctccacctcctgatgaatttcttgactgtttccaaaagtttaaacacggatttaaccttctggccaaactgaagtctcatattcagaatcctagtgctgcagatttggttcactttttgtttactccattaaatatggtggtgcaggcaacaggaggtcctgaactagccagttcagtacttagtcccctattgaataaggacacaattgatttcttaaattatactgtcaatggtgatgaacggcagctgtggatgtcattgggaggaacttggatgaaagccagagcagagtggccaaaagaacagtttattccaccatatgttccacgattccgcaatggctgggagcccccaatgctgaactttatgggagccacaatggaacaagatctttatcaactggcagaatctgtggcaaatgtagcagaacatcagcgcaaacaggaaataaaaagattatccacagagcattccagtgtatcagagtatcatccagccgatggctatgcgttcagtagcaacatttacacaagaggatcccacctggaccaaggggaagctgctgttgcttttaagccaacttctaatcgccatatagatagaaattatgaaccactcaaaacacaacccaagaaatatgccaaatccaagtatgactttgtagcaaggaacaacagtgagctctcggttctaaaggatgatattttagagatacttgatgatcggaagcaatggtggaaagttcgaaatgcaagtggagactctggatttgtgccaaataacattttggatattgtgagacctccagaatctggattggggcgtgctgatccaccttatactcatactatacagaaacaaaggatggagtatggcccaagaccagctgatactccccctgctccatcacctcctccaacaccagctcctgttcctgttccccttcccccttccactccagcacctgttcctgtgtcaaaggtcccagcaaatataacacgtcaaaacagcagctccagtgacagtggtggcagtatcgtgcgagacagccagagacacaaacaacttccggtggaccgaaggaaatctcagatggaggaagtgcaagatgaactcatccacagactgaccattggtcggagtgccgctcagaagaaattccatgtgccacggcagaacgtgccagttatcaatatcacttacgactccacaccagaggatgtgaagacgtggttacagtcaaagggattcaaccctgtgactgtcaatagtcttggagtattaaatggtgcacaacttttctctctcaataaggatgaactgaggacagtctgccctgaaggggcgagagtctatagccaaatcactgtacaaaaagctgcattggaggatagcagtggcagctccgagttacaagaaattatgagaagacgacaggaaaaaatcagtgctgccgctagtgattcaggagtggaatcttttgatgaaggaagcagtcactaatttgtttgtttgtatttaaactccattgtttttggcattattccaacatgctttgttttaagaagccttgaagggaatgtcagattcatttttcttgatgtaatttatcaccataaaaaaaaacccatgcaaacctgagtgagcacaggatttgcttctaggcccattatttttattaaaactgaaaaaatttaaactgaattttttgaccttggaaaatatttttcttactttaccaaggtgaagtttccttaattagactaattattttatccccatcccagggtataaacaggaattgttttgatagtggtggagttattcactgcaacaaagcaacaatgttgtccatgattcaaaatctaagcagtttcgattttgcctgtgaatatggtgtctgtcattcagggcatagctcactgtaggctagcctctgcttacttaagtctcttctctgacatactcaatggaagaatatttagatttatttaaagttcttaatgccaacagtttaaaaaaaaattaaaacatttgaatgaactgtaaagtacagccataccttggacatgcaaatataaatctatggagcattctcaagagagtttgtcatggctctgttgattgcaactccttgtatagcttgtattttgatttagtttatattctgcttattatgtatactgtgttcttatatatgagaaagcacaaatgcgaaagaggtcatgtcttctcaaaatctagcaaaggaagtagtctgcattggtgtgcattacagtattttgcttaatgaaagcctcagttctgaatgttgatatgagtagttaaaaggaagtggggccattttatgtgtttatctgtgtcaagtatttctggtaataagaagcacttaatttacacatattttaatcctgtgaaagattccacatagagaaaagaaagatacctaaccttcaacaaatgttatttttggaaacacaatttttgtcattaaatgttatattatttcacatatataaaacagatgttatgtaagaatgttgtatattttaacataaatcatttagagaaattatctagattcattaattttcatagtgcctttttcacatgagtcagctggaaagtctgcaataaacagtatttgctgtctgttaataaa

SEQ ID NO: 272462 - DNA, 2965 bp, Artificial Sequence
  derived and/or modified sequence
acaatgccgaaactgacgcttagagtcccaccctttctgacgttgtgccaaaggtcacttggcacataagtaaactgagtggaatggcctctcaatattgcctggacgattgcttagaggagtatttcctgaactgtgtggaacacacaagtgaaagacacaatgaatggtcatatttctaatcatcccagtagttttggaatgtacccatctcagatgaatggctacggatcatcacctaccttttcccagacggacagagaacatggttcaaaaacaagtgcaaaggccctttatgaacaaaggaagaattatgcacgggacagtgtcagcagtgtgtcagatatatctcaataccgtgttgaacacttgactacctttgtcctggatcggaaagatgctatgatcactgttgatgatggaataaggaaattgaaattgcttgatgccaagggcaaagtgtggactcaagatatgattcttcaagtggatgacagagctgtgagcctgattgatttagaatcaaagaatgaactggagaattttcctttaaacacaatccagcactgccaagctgtgatgcattcatgcagctatgattcagttcttgcactggtgtgcaaagagccaacccagaacaagccagatcttcatctcttccagtgtgatgaggttaaggcaaacctaattagtgaagatattgaaagtgcaatcagtgacagtaaaggagggaaacagaagaggcggcccgacgccctgaggatgatttccaatgcagaccctagtataccgcctccacccagagctcctgcccctgcgccccctgggaccgtcacccaggtggatgttagaagtcgagtggcagcctggtctgcatgggcagccgaccaaggggactttgagaaaccaaggcagtatcatgagcaggaagaaacacctgagatgatggcagcccgcattgacagagatgtgcaaatcttaaaccacattttggatgacattgaattttttatcacaaaactccaaaaagcagcagaagcattttctgagctttctaaaaggaagaaaaacaagaaaggtaaaaggaaaggaccaggagagggtgttttaacgctgcgggcaaaacctccacctcctgatgaatttcttgactgtttccaaaagtttaaacacggatttaaccttctggccaaactgaagtctcatattcagaatcctagtgctgcagatttggttcactttttgtttactccattaaatatggtggtgcaggcaacaggaggtcctgaactagccagttcagtacttagtcccctattgaataaggacacaattgatttcttaaattatactgtcaatggtgatgaacggcagctgtggatgtcattgggaggaacttggatgaaagccagagcagagtggccaaaagaacagtttattccaccatatgttccacgattccgcaatggctgggagcccccaatgctgaactttatgggagccacaatggaacaagatctttatcaactggcagaatctgtggcaaatgtagcagaacatcagcgcaaacaggaaataaaaagattatccacagagcattccagtgtatcagagtatcatccagccgatggctatgcgttcagtagcaacatttacacaagaggatcccacctggaccaaggggaagctgctgttgcttttaagccaacttctaatcgccatatagatagaaattatgaaccactcaaaacacaacccaagaaatatgccaaatccaagtatgactttgtagcaaggaacaacagtgagctctcggttctaaaggatgatattttagagatacttgatgatcggaagcaatggtggaaagttcgaaatgcaagtggagactctggatttgtgccaaataacattttggatattgtgagacctccagaatctggattggggcgtgctgatccaccttatactcatactatacagaaacaaaggatggagtatggcccaagaccagctgatactccccctgctccatcacctcctccaacaccagctcctgttcctgttccccttcccccttccactccagcacctgttcctgtgtcaaaggtcccagcaaatataacacgtcaaaacagcagctccagtgacagtggtggcagtatcgtgcgagacagccagagacacaaacaacttccggtggaccgaaggaaatctcagatggaggaagtgcaagatgaactcatccacagactgaccattggtcggagtgccgctcagaagaaattccatgtgccacggcagaacgtgccagttatcaatatcacttacgactccacaccagaggatgtgaagacgtggttacagtcaaagggattcaaccctgtgactgtcaatagtcttggagtattaaatggtgcacaacttttctctctcaataaggatgaactgaggacagtctgccctgaaggggcgagagtctatagccaaatcactgtacaaaaagctgcattggaggatagcagtggcagctccgagttacaagaaattatgagaagacgacaggaaaaaatcagtgctgccgctagtgattcaggagtggaatcttttgatgaaggaagcagtcactaatttgtttgtttgtatttaaactccattgtttttggcattattccaacatgctttgttttaagaagccttgaagggaatgtcagattcatttttcttgatgtaatttatcaccataaaaaaaaacccatgcaaacctgagtgagcacaggatttgcttctaggcccattatttttattaaaactgaaaaaatttaaactgaattttttgaccttggaaaatatttttcttactttaccaaggtgaagtttccttaattagactaattattttatccccatcccagggtataaacaggaattgttttgatagtggtggagttattcactgcaacaa

SEQ ID NO: 272463 - DNA, 542 bp, Artificial Sequence
  derived and/or modified sequence
attgccatggtgatgaataatctgctgagttttatggttggcatgattcttctggattaggtcacttgtgttttctttctataataccagtcgactacgcttttggtaacagttaaagttccatcactaaaaagctaaacacacaagtgaaagacacaatgaatggtcatatttctaatcatcccagtagttttggaatgtacccatctcagatgaatggctacggatcatcacctaccttttcccagacggacagagaacatggttcaaaaacaagtgcaaaggccctttatgaacaaaggaagaattatgcacgggacagtgtcagcagtgtgtcagatatatctcaataccgtgttgaacacttgactacctttgtcctggatcggaaagatgctatgatcactgttgatgatggaataaggaaattgaaattgcttgatgccaagggcaaagtgtggactcaagatatgattcttcaagtggatgacagagctgtgagcctgattgatttagaatcaaagaatgaactggagaatttt

SEQ ID NO: 272464 - protein, 371 aa, Artificial Sequence
  derived and/or modified sequence
MEEEGLADEEVRLVQKKDTGHIYAMKILRKSDMLEKEQVAHIRAERDILVEADGAWVVKMFYSFQDKRNLYLIMEFLPGGDMMTLLMKKDTLTEEETQFYISETVLAIDAIHQLGFIHRDIKPDNLLLDAKGHVKLSDFGLCTGLKKAHRTEFYRNLTHNPPSDFSFQNMNSKRKAETWKKNRRQLAYSTVGTPDYIAPEVFMQTGYNKLCDWWSLGVIMYEMLIGYPPFCSETPQETYRKVMNWKETLVFPPEVPISEKAKDLILRFCIDSENRIGNSGVEEIKGHPFFEGVDWEHIRERPAAIPIEIKSIDDTSNFDDFPESDILQPVPNTTEPDYKSKDWVFLNYTYKRFEGLTQRGSIPTYMKAGKL

SEQ ID NO: 272465 - DNA, 1424 bp, Artificial Sequence
  derived and/or modified sequence
gtgcggaggctgagccggccgcgggcgcgaccggaggcaggcagaagaaattagaagtggccatggaagaagaaggattagcagatgaagaggtgcggttggtccagaagaaagatacaggccatatctatgcaatgaagatattgagaaagtctgatatgcttgaaaaagagcaggtggcccatatccgagcagaaagagatattttggtagaagcagatggtgcctgggtggtgaagatgttttacagttttcaggataagaggaatctttatctaatcatggaatttctccctggaggtgacatgatgacattgctaatgaagaaagacaccttgacagaagaggaaacacagttctacatttcagagactgttctggcaatagatgcgatccaccagttgggtttcatccatcgggatattaagccagacaaccttttattggatgccaagggtcatgtaaaattatctgattttggtttatgtacgggattaaagaaagctcacaggactgaattttatagaaatctcacacacaacccaccaagtgacttctcatttcagaacatgaactcaaagaggaaagcagaaacttggaagaagaacaggagacaactggcatattccacagttgggacaccagattacattgctccagaagtattcatgcagactggttacaacaaattgtgtgactggtggtctttgggagtgattatgtatgaaatgctaataggatatccacctttctgctctgaaacacctcaagaaacgtacagaaaagtgatgaactggaaagaaactctggtatttcctccagaggtacctatatctgagaaagccaaggacttaattctcagattttgtattgattctgaaaacagaattggaaatagtggagtagaagaaataaaaggtcatcccttttttgaaggtgtcgactgggagcacataagggaaaggccagcagcaatccctatagaaatcaaaagcattgatgatacttcaaattttgatgacttccctgaatctgatattttacaaccagtgccaaataccacagaaccggactacaaatccaaagactgggtttttctcaattatacctataaaaggtttgaagggttgactcaacgtggctctatccccacctacatgaaagctgggaagttatgaatgaagataacattcacccataaccaagagaactcaggtagctgcatcaccaggcttgcttggcgtagataacaatacactgaaatactcctgaagatggtggtgcttattgactacaagaggaaattctacaggattaggatttctaagactactataggaattggttggcagtgccagctggctcttttttttaatattttattatttttgttaactttattatatgaaggtactggaataaaa

SEQ ID NO: 272466 - protein, 146 aa, Artificial Sequence
  derived and/or modified sequence
MKFQYKEDHPFEYRKKEGEKIRKKYPDRVPVIVEKAPKARVPDLDKRKYLVPSDLTVGQFYFLIRKRIHLRPEDALFFFVNNTIPPTSATMGQLYEVMVLVAQYWMPSSAVWHPLALVLDALITHLRSGAEGVIYPDPLTYGSVRL

SEQ ID NO: 272467 - protein, 70 aa, Artificial Sequence
  derived and/or modified sequence
MKFQYKEDHPFEYRKKEGEKIRKKYPDRVPVIVEKAPKARVPDLDKRKYLVPSDLTVGQFYFLIRKRIHL

SEQ ID NO: 272468 - DNA, 855 bp, Artificial Sequence
  derived and/or modified sequence
ggctcgcggggtgacgtcacagcccgacgcgccacccagctgtttttgtgctcccagctctagcgaaaagccgccggtatttctccatctggctctcctctacctccaggcaggctcacccgagatccccgccccgaaccccccctgcacactcggcccagcgctgttgcccccggagcggacgtttctgcagctattctgagcacaccttgacgtcggctgagggagcgggacagggtcagcggcgaaggaggcaggccccgcgcggggatctcggaagccctgcggtgcatcatgaagttccagtacaaggaggaccatccctttgagtatcggaaaaaggaaggagaaaagatccggaagaaatatccggacagggtccccgtgattgtagagaaggctccaaaagccagggtgcctgatctggacaagaggaagtacctagtgccctctgaccttactgttggccagttctacttcttaatccggaagagaatccacctgagacctgaggacgccttattcttctttgtcaacaacaccatccctcccaccagtgctaccatgggccaactgtatgaggtaatggttctggttgcacaatactggatgccgtccagtgcagtctggcatcctctagcccttgttctagatgcgttgataacacatctgagaagtggggcagaaggtgttatttatccggatcctcttacatatggcagtgtaaggctctgagagattagatacctcttgttttttagggattagccactctactagatttaatccttctgaaatcttgtctgactatagtcttgtctgactatagtgttttaatgctggactgtttattga

SEQ ID NO: 272469 - DNA, 653 bp, Artificial Sequence
  derived and/or modified sequence
gtgctcccagctctagcgaaaagccgccggtatttctccatctggctctcctctacctccaggcaggctcacccgagatccccgccccgaaccccccctgcacactcggccccgcgcggggatctcggaagccctgcggtgcatcatgaagttccagtacaaggaggaccatccctttgagtatcggaaaaaggaaggagaaaagatccggaagaaatatccggacagggtccccgtgattgtagagaaggctccaaaagccagggtgcctgatctggacaagaggaagtacctagtgccctctgaccttactgttggccagttctacttcttaatccggaagagaatccacctgagacctgaggacgccttattcttctttgtcaacaacaccatccctcccaccagtgctaccatgggccaactgtatgaggtaatggttctggttgcacaatactggatgccgtccagtgcagtctggcatcctctagcccttgttctagatgcgttgataacacatctgagaagtggggcagaaggtgttatttatccggatcctcttacatatggcagtgtaaggctctgagagattagatacctcttgttttttagggattagccactctactagatttaatccttctgaaatcttg

SEQ ID NO: 272470 - DNA, 441 bp, Artificial Sequence
  derived and/or modified sequence
atgaagttccagtataaggaggaccacccatttgaatacaggaaaaaggagggagaaaagattcggaaaaaataccccgatcgcgtgccagtgattgtcgagaaggcccccaaggcccgggtcccggatctggacaaacggaaatacctggtgcccagcgatctgaccgtgggtcagttttatttccttataaggaagcggatccatctgagacccgaagatgcattatttttcttcgtgaataataccatacctcccacctcagcaacgatggggcaactctacgaggtcatggttctagtggcccagtactggatgccctcttcggccgtttggcatccactcgcactcgtgctcgatgccctgattacacacctccggagcggagctgagggcgtgatctatccagacccactgacctatggaagcgttcgactctag

SEQ ID NO: 272471 - DNA, 441 bp, Artificial Sequence
  derived and/or modified sequence
atgaagttccagtataaagaagaccacccattcgaataccgcaaaaaagagggcgagaagatcagaaaaaaataccccgaccgggtgcccgttattgtggagaaagctccaaaagctagggtccctgacctggacaaacgcaagtatctggtgccatctgacctgacagtcggacagttttacttcctaattagaaaacggattcacctgaggccagaagatgccctgttcttttttgttaacaatactatccctcctacctcagctacaatgggacaattgtacgaagtgatggtgctagtggcccagtattggatgcctagctcggcagtgtggcacccactggccttggttcttgacgcactgataactcacttgcggagtggcgcagaaggcgtcatttaccctgaccctcttacttatggttcggtgcgactatag

SEQ ID NO: 272472 - DNA, 441 bp, Artificial Sequence
  derived and/or modified sequence
atgaagttccagtacaaggaggaccacccctttgagtacaggaagaaggagggggagaagatcaggaagaagtacccagacagagtgcctgtgattgtggagaaggcccccaaggcccgggtgcctgacctggacaagaggaagtacctggtgcccagcgacctgactgtgggccagttctacttcctgatcaggaagaggatccacctgcggccagaagatgccctcttcttctttgtgaacaacaccatcccccccaccagcgccaccatgggccagctgtatgaggtgatggtgctggtggcccagtactggatgcccagcagcgctgtgtggcaccccctggccctggtgctggatgccctgatcacccacctgcggagcggggctgagggcgtcatctacccagaccccctgacctacggctctgtgcggctgtag

SEQ ID NO: 272473 - DNA, 441 bp, Artificial Sequence
  derived and/or modified sequence
atgaagttccagtacaaggaggaccaccccttcgagtaccggaagaaagagggcgaaaagatcaggaaaaagtatcccgatcgggtgccggtgattgttgaaaaagctcccaaggcacgggttccagacctggacaaacgcaagtaccttgttccctctgatctgacggtgggacagttctatttcttgatacgcaaacgcattcacctgcgtcctgaggatgctctgttctttttcgtcaacaataccattccgccgacatccgctaccatggggcaactttacgaagtcatggtacttgtcgcccagtactggatgcctagttccgccgtgtggcatcctttggccttggtgctcgatgccctgattacccatttaaggtccggcgctgaaggcgtgatctaccccgacccattgacttacggctcggttaggctctag

SEQ ID NO: 272474 - DNA, 441 bp, Artificial Sequence
  derived and/or modified sequence
atgaagttccagtacaaggaggaccaccccttcgagtaccggaagaaagagggagaaaagatccgcaagaaatacccagatcgggtcccggtcattgtggagaaggcccctaaggctagggtcccagacctggataaaaggaagtacttggtaccatcagatctgacagtggggcagttttatttcctgattaggaaacgcattcatttgcgccctgaagacgcactgttttttttcgtcaataatacgattccccctacaagcgctactatgggccagctgtacgaggtcatggtcctggtcgcccagtattggatgccctcatcagcggtgtggcatccacttgctctggttttggatgctttgatcactcacctgcgatccggggcagaaggtgtgatctatccagatccgttaacctacgggtccgtgagactgtag

SEQ ID NO: 272475 - DNA, 441 bp, Artificial Sequence
  derived and/or modified sequence
atgaaattccagtacaaagaagaccaccccttcgaataccggaagaaggaaggtgaaaaaattaggaagaagtatcccgaccgagtgccagttattgttgaaaaagccccaaaagctagggttccagatttggataagcgcaaataccttgtgccaagtgacctcaccgtgggtcagttttactttcttatccggaaacgcatccatcttaggcccgaagacgctctcttcttctttgtgaataacacgatcccccctacgtcggccacaatggggcagctgtacgaggtaatggtgctagtggcccaatactggatgcctagctctgctgtgtggcatcctctggccctcgtgctcgacgcattgatcacccacctccgctcgggcgctgagggcgtgatttaccctgaccctcttacttatggcagtgtgcgcctgtag

SEQ ID NO: 272476 - DNA, 441 bp, Artificial Sequence
  derived and/or modified sequence
atgaagttccagtacaaagaggatcatccttttgagtatcgcaagaaagaaggagaaaaaatccgcaagaagtatcctgatagggtcccagttattgtggaaaaggccccaaaggccagagtgcctgacctcgacaaacggaagtaccttgtgccaagcgaccttacggtgggtcagttctatttcctgatacgaaagaggatccacttgcgaccagaggacgctctctttttctttgtgaacaatacaattccacccacatctgctactatgggccagttgtatgaggtgatggtcctcgtcgctcaatattggatgccctcttcggcggtgtggcatcctctggctctggttttagatgccttgattacccacttaagatccggcgctgagggggtcatctatccagatcctctcacatatggcagtgttcgcctgtag

SEQ ID NO: 272477 - DNA, 441 bp, Artificial Sequence
  derived and/or modified sequence
atgaagttccagtacaaggaggaccaccccttcgagtacagaaagaaggagggcgagaagatcagaaagaagtaccccgacagagtgcccgtgatcgtggagaaggcccccaaggccagagtgcccgacctggacaagagaaagtacctggtgcccagcgacctgaccgtgggccagttctacttcctgatcagaaagagaatccacctgagacccgaggacgccctgttcttcttcgtgaacaacaccatcccccccaccagcgccaccatgggccagctgtacgaggtgatggtgctggtggcccagtactggatgcccagcagcgccgtgtggcaccccctggccctggtgctggacgccctgatcacccacctgagaagcggcgccgagggcgtgatctaccccgaccccctgacctacggcagcgtgagactgtag

SEQ ID NO: 272478 - protein, 424 aa, Artificial Sequence
  derived and/or modified sequence
MLARKSIIPEEYVLARIAAENLRKPRIRDRLPKARFIAKSGACNLAHKNIREQGRFLQDIFTTLVDLKWRHTLVIFTMSFLCSWLLFAIMWWLVAFAHGDIYAYMEKSGMEKSGLESTVCVTNVRSFTSAFLFSIEVQVTIGFGGRMMTEECPLAITVLILQNIVGLIINAVMLGCIFMKTAQAHRRAETLIFSRHAVIAVRNGKLCFMFRVGDLRKSMIISASVRIQVVKKTTTPEGEVVPIHQLDIPVDNPIESNNIFLVAPLIICHVIDKRSPLYDISATDLANQDLEVIVILEGVVETTGITTQARTSYIAEEIQWGHRFVSIVTEEEGVYSVDYSKFGNTVKVAAPRCSARELDEKPSILIQTLQKSELSHQNSLRKRNSMRRNNSMRRNNSIRRNNSSLMVPKVQFMTPEGNQNTSES

SEQ ID NO: 272479 - protein, 114 aa, Artificial Sequence
  derived and/or modified sequence
MLARKSIIPEEYVLARIAAENLRKPRIRDRLPKARFIAKSGACNLAHKNIREQGRFLQDIFTTLVDLKWRHTLVIFTMSFLCSWLLFAIMWWLVAFAHGDIYAYMEKSGMEKSG

SEQ ID NO: 272480 - DNA, 1275 bp, Artificial Sequence
  derived and/or modified sequence
atgcttgcccgcaaatccattataccggaggaatatgtgcttgcccgcattgcagcggagaaccttcgcaagccgagaatccgtgatcgactgcccaaagcccgctttattgctaaatctggggcatgcaacctggcccacaagaacatacgggaacaaggacgctttcttcaagacatctttacaacattggtggatttaaaatggaggcacacacttgtgatcttcaccatgagtttcctatgcagttggctactgtttgccataatgtggtggctcgtggcctttgcacacggcgatatctacgcctatatggaaaaatctgggatggagaagagcggcttggagtcaacagtgtgtgtgaccaacgtcagatctttcacctcagctttcctgttcagtatcgaagtgcaggtcacgattggcttcggcgggaggatgatgacggaggaatgtccgttggctatcactgtactaattctgcagaacatagtggggctgataattaacgctgtcatgttgggctgtatatttatgaagactgcccaggctcatagacgagcagaaacactcattttctccagacacgccgtcatcgccgttcgaaatggcaagttatgtttcatgttcagagttggcgacttgcgtaaatcaatgatcatcagtgcgagcgtcagaatacaggtcgtgaaaaagaccacaacaccagaaggagaggttgtgcctatccaccagcttgacatacccgtggacaatcccatcgagagtaacaacatctttttagtggctcctctgatcatatgtcacgtgatagataaacggagtccactctacgatatctccgccacagatttggccaaccaagacctggaagtgatcgtgattctcgaaggagtggtcgagacgaccggcatcaccacccaagccaggacttcgtatatcgccgaggagattcagtggggccaccgattcgtgagtatcgtaacagaggaagagggtgtgtattccgttgattattctaagttcggaaatacagtgaaggtagccgcaccccgctgttctgcccgagagctcgatgagaagccatcaatcctcattcaaactctgcagaagagcgagctgtcccaccagaatagcctgaggaaacggaatagcatgagacgaaataattctatgcgacgcaataactccatccgtagaaacaactcctccctgatggtgccgaaggtgcagtttatgacccccgaaggtaaccagaacacgtccgagtcttag

SEQ ID NO: 272481 - DNA, 345 bp, Artificial Sequence
  derived and/or modified sequence
atgctggctcggaagtccattattcccgaggagtacgttctagcccggatcgccgcagaaaatctcagaaagccccggattcgggacagactccccaaagcgcgctttattgccaagtctggggcatgcaacttggcacataagaatatccgcgagcaggggcgattcctgcaggacatttttactacactggtggatctgaaatggaggcacactttggtgattttcacaatgtcctttttatgttcatggctgctgttcgccataatgtggtggctcgttgctttcgcgcacggagacatttatgcctatatggagaagagcgggatggaaaaatcaggttag

SEQ ID NO: 272482 - DNA, 1275 bp, Artificial Sequence
  derived and/or modified sequence
atgctcgccagaaaaagcatcatccccgaggagtacgtgcttgcaaggattgctgccgaaaaccttcggaaaccacgcattcgggaccgactccctaaagcccgcttcattgctaagagtggggcctgcaatctcgcccacaaaaatatccgggagcaagggcgattcctgcaggacatcttcaccacactggttgacttgaagtggagacacaccctggtgatttttactatgagtttcctgtgttcttggctgctgtttgccatcatgtggtggctcgtcgcctttgctcacggagacatttatgcctatatggagaagtcgggaatggagaagtccgggctcgaatctaccgtctgtgtgaccaatgtacgaagtttcactagcgcatttctgttcagcatcgaagttcaagtcaccatcggcttcggaggcagaatgatgactgaggagtgtcctctcgccattacggtgctgatcctgcagaatatcgtgggcctcattataaacgcagtgatgctcggatgtatttttatgaaaacggcacaggcccacagaagggctgagacgttaatcttttccagacatgccgttattgctgtgcggaatggcaagctgtgttttatgttcagagttggcgatctgcgtaagagcatgatcatctctgcctcagtgagaatccaagtcgtaaaaaaaactaccacgccagaaggtgaagtggtgcctattcaccagctggatataccggtagacaaccctattgagagcaataacatttttctggtggcacccttaatcatctgccacgtgatcgataaaaggtcacctctgtatgacatttccgccaccgatttagcaaatcaagatctcgaggtaatcgtcatccttgaaggagtcgttgagacgactggcataactacacaggctcgcacttcttacatcgccgaggagatacagtgggggcatcgattcgtgtcaatcgtgaccgaagaagagggagtgtactccgtggactattctaagtttggaaacaccgtcaaagtcgctgctccacggtgcagtgctagggagctggatgaaaagcccagcattctgatccaaaccttacagaaatccgagctgagccaccagaatagcctgagaaaaaggaactctatgcgaagaaacaattcaatgaggcgtaacaacagtatccgaagaaataattcaagcctgatggtgccaaaagttcagttcatgactccggaaggcaaccagaatacttctgaatcttag

SEQ ID NO: 272483 - DNA, 1275 bp, Artificial Sequence
  derived and/or modified sequence
atgctggccaggaagagcatcatccctgaggagtatgtgctggccagaattgctgctgagaacctgaggaagccccgcatccgggaccggctgcccaaggcccgcttcatcgccaagagcggggcctgcaacctggcccacaagaacatccgggagcagggccgcttcctgcaggacatcttcaccaccctggtggacctgaagtggaggcacaccctggtgatcttcaccatgtccttcctgtgctcctggctgctgtttgccatcatgtggtggctggtggcctttgcccacggggacatctatgcctacatggagaagagcggcatggagaagagcggcctggagagcacagtgtgtgtgaccaacgtgcgctccttcaccagcgccttcctgttcagcattgaggtgcaggtgaccatcggctttggaggccgcatgatgacagaagaatgtcccctggccatcaccgtgctgatcctgcagaacatcgtgggcctcatcatcaatgctgtgatgctgggctgcatcttcatgaagacagcccaggcccaccggcgggcagagaccctcatcttcagcagacatgctgtgattgctgtgagaaatggcaagctgtgcttcatgttccgggtgggggacctgaggaagtccatgatcatcagcgcctctgtgcgcatccaggtggtgaagaagaccaccaccccagagggggaggtggtgcccatccaccagctggacatccctgtggacaaccccatcgagagcaacaacatcttcctggtggcccccctcatcatctgccacgtgattgacaagaggagccccctgtatgacatcagcgccacagacctggccaaccaggacctggaggtgattgtcatcctggagggcgtggtggagaccaccggcatcaccacccaggcccggaccagctacatcgccgaggagatccagtggggccacagatttgtgtccatcgtgacagaggaggagggcgtgtacagcgtggactacagcaagtttggaaacacagtgaaggtggccgccccccgctgcagcgcccgggagctggatgagaagcccagcatcctgatccagaccctgcagaagtctgagctgagccaccagaacagcctgaggaagagaaattccatgagaagaaacaacagcatgagaagaaacaacagcatcagaagaaacaacagcagcctgatggtgcccaaggtgcagttcatgaccccagagggcaaccagaacaccagcgagagctag

SEQ ID NO: 272484 - DNA, 345 bp, Artificial Sequence
  derived and/or modified sequence
atgctggccaggaagagcatcatccctgaggagtatgtgctggccagaattgctgctgagaacctgaggaagccccgcatccgggaccggctgcccaaggcccgcttcatcgccaagagcggggcctgcaacctggcccacaagaacatccgggagcagggccgcttcctgcaggacatcttcaccaccctggtggacctgaagtggaggcacaccctggtgatcttcaccatgtccttcctgtgctcctggctgctgtttgccatcatgtggtggctggtggcctttgcccacggggacatctatgcctacatggagaagagcggcatggagaagtctggatag

SEQ ID NO: 272485 - DNA, 1275 bp, Artificial Sequence
  derived and/or modified sequence
atgctggcccggaagagcatcatccccgaggagtacgtgctggcccgaattgccgcagaaaatctaaggaaaccccgcatcagggacagattacctaaggcccgtttcatagccaagtccggtgcttgcaatctcgctcataagaacatccgggaacagggcagatttcttcaagatatattcacaacccttgtggacctgaagtggaggcatacactagtcatctttacgatgagttttctgtgttcatggctgctgttcgccattatgtggtggcttgtcgcgtttgcgcatggagatatctacgcatatatggaaaagagtggcatggagaagagcgggctggaatcgacagtctgcgtcactaatgtgaggagctttactagcgcctttctgttctccatcgaggtgcaggtgacgatcgggtttggcggcaggatgatgaccgaagagtgtccgctcgcgataaccgtcctgatcttgcagaacatagtcgggctcataatcaatgccgtgatgctcggttgcatctttatgaaaaccgcacaggcgcaccggcgcgctgagactttgatttttagtcgccacgccgtaatcgccgtccgcaacggcaaactttgctttatgtttcgggtgggggacctccggaaatctatgataatctcggccagcgtgcgcattcaagtagtcaagaagacaaccacccctgagggtgaagtggtcccaatacatcagctagatattcccgtagataatccaattgaatccaacaacatatttctggtggcacctttaatcatatgtcacgtcatcgacaagagatctcccctgtatgacatctcagcaacagacctcgccaaccaggatctagaagtgatagtgatcctggaaggcgtagtcgagacgaccggcataaccacgcaggcccgcacaagctatattgccgaggagattcagtggggacatagattcgtgagtattgtcacggaagaagaaggggtctacagcgtggattattcgaaattcgggaataccgtcaaagttgctgccccccgatgcagcgcccgcgagctagatgaaaagccgagcatcttgatccagaccctccagaaatcggagctcagccatcagaacagcctgcgcaagcgtaacagtatgaggagaaacaacagtatgaggaggaataactcgataaggaggaacaattcctcgctgatggtccctaaagtccagttcatgactcctgagggtaatcagaatacaagcgagtcttag

SEQ ID NO: 272486 - DNA, 345 bp, Artificial Sequence
  derived and/or modified sequence
atgctggcccggaagagcatcatccccgaggagtacgtgctggccaggatcgccgccgagaatttgcggaaaccgcggatcagggacaggttgcctaaggcccgttttatagccaaaagcggagcctgtaacctggcccacaaaaatatccgagaacagggccgatttctgcaggatatttttacgactctggttgatcttaagtggaggcatactctggtcatattcacgatgtcttttctgtgcagttggctgctgttcgccatcatgtggtggctcgttgctttcgctcatggcgacatttatgcctatatggagaagtccggcatggagaagtctggctag

SEQ ID NO: 272487 - DNA, 1275 bp, Artificial Sequence
  derived and/or modified sequence
atgctggcccggaagagcatcatccccgaggagtacgtgctggcccgaatcgccgctgaaaaccttaggaaaccccgtatcagagaccgcctccctaaagccagattcattgcaaagtctggagcctgcaacttggcccacaagaacattcgagaacaggggcggttccttcaggatatcttcaccaccctcgtcgatctaaaatggagacatacacttgttatcttcaccatgagcttcttgtgctcctggctgctgttcgccattatgtggtggctggtcgcattcgcccacggagacatttacgcgtacatggagaaaagtgggatggagaagtctgggcttgagtctacagtgtgcgtgacaaacgtcagatcattcaccagcgcgttcctatttagtatcgaagttcaggttactattggcttcggcggccgtatgatgacagaggagtgcccacttgcgataactgttctcatcctgcaaaacatcgtaggacttatcataaatgccgtgatgctggggtgcatatttatgaagacagcccaggctcacaggagagcggaaacacttattttctctcggcacgccgtcatcgccgtgcgaaacggcaaactgtgttttatgttcagagtaggcgacctgcggaagtctatgatcatttcagcttcggtcaggatccaggtagtgaagaaaactaccactccagagggcgaggtggtgcccattcaccagctcgacattcccgtcgataatccaatcgaatcaaacaacatatttctcgttgccccactgataatttgccatgtgatcgacaaaaggtctccactgtacgacattagcgcaaccgacctcgccaaccaagatttggaagtgattgtcatcctcgaaggtgtggtagagaccacaggcatcaccacccaggctagaacgagttacattgccgaggagatccagtgggggcatcgatttgtttcaatcgtgaccgaggaggagggcgtctactcagttgattacagtaagtttgggaatactgtcaaagtcgcggcaccgcgctgttcggcccgggaactggacgagaagccctcaatcctgatccaaacactccaaaagtccgagctctctcatcagaactccctgaggaaaaggaacagcatgcggagaaacaacagcatgcggcgtaataattccatccgcaggaacaactcaagcctgatggtgcccaaagtgcagtttatgaccccagagggtaaccaaaacacatctgagagctag

SEQ ID NO: 272488 - DNA, 2389 bp, Artificial Sequence
  derived and/or modified sequence
cctcctccttccactgaagtggccaagggagttgagctgagcagggggaggggaagatctacacccatcccccttcctctagccctccctgcgtttagattcagttgcaccttttattattttaactcttctccttaggacacgcagcccccaatttgtccctccggcctgggcggcccctggtcccgcgcgccagcatgggagagcgagggacctgcccgcggcccgccggcgtgtgcaaggaggtccagccgccgcgcccgctacccggagtctgaggacgggtgtccagggacggagaggcaggtgagagggaggtggctaagctggctatggtgacaggacgatgttggccagaaagagtatcatcccggaggagtatgtgctggcgcgcatcgccgcagagaacctgcgcaagccgcgcatccgagaccgcctccccaaagcccgcttcatcgccaagagcggggcctgcaacctggcgcataagaacatccgtgagcaaggacgctttctacaggacatcttcaccaccttggtggacctgaaatggcgccacacgctggtcatctttaccatgtccttcctctgcagctggctgctcttcgctatcatgtggtggctggtggcctttgcccatggggacatctatgcttacatggagaaaagtggaatggagaaaagtggtttggagtccactgtgtgtgtgactaatgtcaggtctttcacttctgcttttctcttctccattgaagttcaagttaccattgggtttggagggaggatgatgacagaggaatgccctttggccatcacggttttgattctccagaatattgtgggtttgatcatcaatgcagtcatgttaggctgcattttcatgaaaacagctcaggctcacagaagggcagaaactttgattttcagccgccatgctgtgattgccgtccgaaatggcaagctgtgcttcatgttccgagtgggtgacctgaggaaaagcatgatcattagtgcctctgtgcgcatccaggtggtcaagaaaacaactacacctgaaggggaggtggttcctattcaccaactggacattcctgttgataacccaatcgagagcaataacatttttctggtggcccctttgatcatctgccacgtgattgacaagcgcagtcccctgtatgacatctcagcaactgacctggccaaccaagacttggaggtcatagttattctggaaggagtggttgaaactactggcatcaccacacaagcacgaacctcctacattgctgaggagatccaatggggccaccgctttgtgtccattgtgactgaggaagaaggagtgtattctgtggattactccaaatttggcaacactgttaaagtagctgctccacggtgcagtgcccgagagctggatgagaaaccttccatccttattcagaccctccaaaagagtgaactgtctcatcaaaattctctgaggaagcgcaactccatgagaagaaacaattccatgaggaggaacaattctatccgaaggaacaattcttccctcatggtaccaaaggtgcaatttatgactccagaaggaaatcaaaacacatcggaatcatgacagcaagataaccccaagacagtcttttatcaagttttgacggtttatgctgggcactgccagactgaaccagagctggaacacaataatgtgtccttctacattttattacactaaatgatattcatattcaagcaacagcactttctgtagtaataaaaagtaacacaccaagtggaggattcatggcttatgcttgtttcatacatgtagaattcgcagtgatatacttaagttatgtgcaggggtgggtatgctcgtttctctcaatttgaaacacaagaattacactaatagtaacaggccttgagcacaaaatttggtcaagaaatgagtctgtttgaaatgcttagttggtgaaacccagatcgctgtgttactaatgatcactctggaaatgcaaatagaataggaggggaaaaaacaaaatcatgttaatgcgttttgtacatcagccttctcctgtctccatgataactgcatttggtaggaagcctgaggcaaaaactgcttaagtggatctgtttgtaagtggattcagttcattcgctttgtctgtcggtgactcctgaaggtttcctggtccatctcattgcggcctgttgggcagagctggacaaggtgtctttgaaggaaagctaagtcttgtctcatttaggactgggttccccacagtgacagtcacttccttcagcatctcacttcttcttctagaatccccacagggaaatactgtattgaatattttattaaaacattttctttgta

SEQ ID NO: 272489 - DNA, 507 bp, Artificial Sequence
  derived and/or modified sequence
aagaagctgcaacatttcagaaagcaaccaattactgaggaccgaatgacctggccttatcagcgctgaagtgttaacggccgtccctgtttggggaggacgggtgtccagggacggagaggcaggtgagagggaggtggctaagctggctatggtgacaggacgatgttggccagaaagagtatcatcccggaggagtatgtgctggcgcgcatcgccgcagagaacctgcgcaagccgcgcatccgagaccgcctccccaaagcccgcttcatcgccaagagcggggcctgcaacctggcgcataagaacatccgtgagcaaggacgctttctacaggacatcttcaccaccttggtggacctgaaatggcgccacacgctggtcatctttaccatgtccttcctctgcagctggctgctcttcgctatcatgtggtggctggtggcctttgcccatggggacatctatgcttacatggagaaaagtggaatggagaaaagtggt

SEQ ID NO: 272490 - DNA, 1586 bp, Artificial Sequence
  derived and/or modified sequence
attattttaactcttctccttaggacacgcagcccgccggcgtgtgcaaggaggtccagccgccgcgcccgctacccggagtctgaggacgggtgtccagggacggagaggcaggtgagagggaggtggctaagctggctatggtgacaggacgatgttggccagaaagagtatcatcccggaggagtatgtgctggcgcgcatcgccgcagagaacctgcgcaagccgcgcatccgagaccgcctccccaaagcccgcttcatcgccaagagcggggcctgcaacctggcgcataagaacatccgtgagcaaggacgctttctacaggacatcttcaccaccttggtggacctgaaatggcgccacacgctggtcatctttaccatgtccttcctctgcagctggctgctcttcgctatcatgtggtggctggtggcctttgcccatggggacatctatgcttacatggagaaaagtggaatggagaaaagtggtttggagtccactgtgtgtgtgactaatgtcaggtctttcacttctgcttttctcttctccattgaagttcaagttaccattgggtttggagggaggatgatgacagaggaatgccctttggccatcacggttttgattctccagaatattgtgggtttgatcatcaatgcagtcatgttaggctgcattttcatgaaaacagctcaggctcacagaagggcagaaactttgattttcagccgccatgctgtgattgccgtccgaaatggcaagctgtgcttcatgttccgagtgggtgacctgaggaaaagcatgatcattagtgcctctgtgcgcatccaggtggtcaagaaaacaactacacctgaaggggaggtggttcctattcaccaactggacattcctgttgataacccaatcgagagcaataacatttttctggtggcccctttgatcatctgccacgtgattgacaagcgcagtcccctgtatgacatctcagcaactgacctggccaaccaagacttggaggtcatagttattctggaaggagtggttgaaactactggcatcaccacacaagcacgaacctcctacattgctgaggagatccaatggggccaccgctttgtgtccattgtgactgaggaagaaggagtgtattctgtggattactccaaatttggcaacactgttaaagtagctgctccacggtgcagtgcccgagagctggatgagaaaccttccatccttattcagaccctccaaaagagtgaactgtctcatcaaaattctctgaggaagcgcaactccatgagaagaaacaattccatgaggaggaacaattctatccgaaggaacaattcttccctcatggtaccaaaggtgcaatttatgactccagaaggaaatcaaaacacatcggaatcatgacagcaagataaccccaagacagtcttttatcaagttttgacggtttatgctgggcactgccagactgaaccagagctggaacacaataatgtgtccttctacattttattacactaaatgatattcatattcaagcaacagcactttctgtagtaat

SEQ ID NO: 272491 - DNA, 1275 bp, Artificial Sequence
  derived and/or modified sequence
atgctggcccgaaagtcaatcatcccagaggaatatgtgctagctcgcattgctgccgagaacctgcggaaacctcgcatcagggatagactcccgaaagccagatttatcgctaaatccggggcttgcaatctggctcacaaaaacattcgtgaacagggacgcttcttgcaggacatttttaccaccctcgtggatctcaagtggcgccataccctagtcatctttacaatgtcgttcttatgctcatggctgctatttgccatcatgtggtggctcgtggctttcgcacacggcgatatctatgcatacatggaaaagagcgggatggaaaagtcaggattagagagtaccgtttgtgttacaaatgtgcgcagtttcacttccgcgtttttatttagtatcgaggtacaagtcacgattgggttcggtggcaggatgatgaccgaagaatgtccattggccatcaccgtcctaattctgcagaatattgtcggactgataatcaacgcagtgatgctgggatgcatcttcatgaagactgcccaggctcatcgcagagccgagactctgatcttcagcaggcacgccgtgatcgctgtccggaacggtaagttgtgcttcatgttccgcgtgggcgacctgcgcaaaagtatgataatatccgcatcggtgaggatccaggttgtaaagaagaccactacccctgagggggaagtcgtgcctattcaccagctggatattcctgtcgacaatccgatcgaaagcaacaacatattcctcgtcgcgcctctgatcatctgtcatgtgatcgacaagcggtctccactgtacgacatctccgctaccgacctcgctaatcaggatttagaggtgattgtaattctggagggagtggtggagacaactggcataactacgcaggcccgaacctcttatattgccgaggaaattcagtgggggcacagattcgttagcatagtgaccgaggaagagggcgtctattcagtagattatagtaagtttggaaacaccgtgaaagtagcggctccaaggtgttcagccagggaactggacgagaaaccgtcaatcctgatacagaccctacagaaatcggaactgtcccaccaaaattctcttcgcaagaggaacagtatgcgcaggaataactcaatgcggcgaaataacagcattcggcgtaataactcaagcctgatggtgcctaaagttcagttcatgacaccagaagggaatcaaaacacatccgagagctag

SEQ ID NO: 272492 - DNA, 345 bp, Artificial Sequence
  derived and/or modified sequence
atgctggcccgtaaatccatcatacccgaggaatacgtgctggcacgcattgcagcagaaaacctccgaaagccaagaattcgagacaggttgcctaaggccagattcatcgcaaaatcaggggcttgtaatctagcccacaagaatattcgcgagcagggccgattccttcaggatatattcaccaccctggtggatctgaagtggcgccacaccctggtgattttcacaatgtcctttttatgttcttggttgctcttcgcgatcatgtggtggctggtggcattcgcccatggcgacatttacgcgtatatggaaaagtcggggatggagaaaagtggctag

SEQ ID NO: 272493 - DNA, 1275 bp, Artificial Sequence
  derived and/or modified sequence
atgctggctagaaaatctatcattcctgaggagtatgtgctcgcccgtatcgcggcagaaaacctgcgtaagccgagaattagggacaggttgccaaaagcgagatttattgccaagtcaggggcatgcaatctcgcgcacaagaatatccgcgaacagggacggtttttgcaagacatattcaccaccctggtagatttaaaatggcggcatacccttgttatattcacaatgagttttctgtgctcttggctgctcttcgccatcatgtggtggctagtcgcctttgcccacggagatatctatgcttacatggaaaagtcaggtatggagaagtcaggcctggagtccacggtttgcgtgacaaacgtaaggagctttacatccgctttcctcttctcaatcgaggtgcaggtgactatcgggttcggcggtagaatgatgaccgaagagtgccctctggctataactgttcttattctgcagaacatcgttggcctaattatcaatgctgttatgctcggttgcatctttatgaagacagcccaagctcatcgaagggcagaaactctgattttctcacggcatgccgtgatcgcagtcaggaatggaaaactttgctttatgtttagagtgggcgacttaaggaagagcatgatcatttcggcttcagtccggattcaggtggtgaagaagaccacaacaccggagggggaagttgttcccattcaccagctagatatccctgttgataatcccatcgagtctaacaatatctttctagttgctcccctgattatatgccacgtgattgacaagaggtctccactttacgatatctctgcgacagacctcgccaatcaagatctggaagttattgttatcctcgagggtgtggttgaaaccacggggattacaactcaggctcgcacctcctacatcgctgaagaaatccaatgggggcatcgcttcgtgtccattgtgaccgaagaggaaggcgtgtacagcgtggactattccaagtttggaaacactgtgaaagtggctgctcccaggtgtagcgcacgtgagctggatgaaaagcccagtattctcatccagaccctgcagaaaagtgagctgtcacaccagaactctctgcgcaaaagaaatagcatgcgaagaaacaactccatgaggagaaacaattccatccgaagaaataacagctcactcatggtgccaaaggtgcagttcatgacacccgagggcaatcaaaatacttccgagagctag

SEQ ID NO: 272494 - DNA, 1275 bp, Artificial Sequence
  derived and/or modified sequence
atgctggccagaaagagcatcatccccgaggagtacgtgctggccagaatcgccgccgagaacctgagaaagcccagaatcagagacagactgcccaaggccagattcatcgccaagagcggcgcctgcaacctggcccacaagaacatcagagagcagggcagattcctgcaggacatcttcaccaccctggtggacctgaagtggagacacaccctggtgatcttcaccatgagcttcctgtgcagctggctgctgttcgccatcatgtggtggctggtggccttcgcccacggcgacatctacgcctacatggagaagagcggcatggagaagagcggcctggagagcaccgtgtgcgtgaccaacgtgagaagcttcaccagcgccttcctgttcagcatcgaggtgcaggtgaccatcggcttcggcggcagaatgatgaccgaggagtgccccctggccatcaccgtgctgatcctgcagaacatcgtgggcctgatcatcaacgccgtgatgctgggctgcatcttcatgaagaccgcccaggcccacagaagagccgagaccctgatcttcagcagacacgccgtgatcgccgtgagaaacggcaagctgtgcttcatgttcagagtgggcgacctgagaaagagcatgatcatcagcgccagcgtgagaatccaggtggtgaagaagaccaccacccccgagggcgaggtggtgcccatccaccagctggacatccccgtggacaaccccatcgagagcaacaacatcttcctggtggcccccctgatcatctgccacgtgatcgacaagagaagccccctgtacgacatcagcgccaccgacctggccaaccaggacctggaggtgatcgtgatcctggagggcgtggtggagaccaccggcatcaccacccaggccagaaccagctacatcgccgaggagatccagtggggccacagattcgtgagcatcgtgaccgaggaggagggcgtgtacagcgtggactacagcaagttcggcaacaccgtgaaggtggccgcccccagatgcagcgccagagagctggacgagaagcccagcatcctgatccagaccctgcagaagagcgagctgagccaccagaacagcctgagaaagagaaacagcatgagaagaaacaacagcatgagaagaaacaacagcatcagaagaaacaacagcagcctgatggtgcccaaggtgcagttcatgacccccgagggcaaccagaacaccagcgagagctag

SEQ ID NO: 272495 - DNA, 345 bp, Artificial Sequence
  derived and/or modified sequence
atgctggccagaaagagcatcatccccgaggagtacgtgctggccagaatcgccgccgagaacctgagaaagcccagaatcagagacagactgcccaaggccagattcatcgccaagagcggcgcctgcaacctggcccacaagaacatcagagagcagggcagattcctgcaggacatcttcaccaccctggtggacctgaagtggagacacaccctggtgatcttcaccatgagcttcctgtgcagctggctgctgttcgccatcatgtggtggctggtggccttcgcccacggcgacatctacgcctacatggagaagagcggcatggagaagagcggctag

SEQ ID NO: 272496 - protein, 1179 aa, Artificial Sequence
  derived and/or modified sequence
MAADLNLEWISLPRSWTYGITRGGRVFFINEEAKSTTWLHPVTGEAVVTGHRRQSTDLPTGWEEAYTFEGARYYINHNERKVTCKHPVTGQPSQDNCIFVVNEQTVATMTSEEKKERPISMINEASNYNVTSDYAVHPMSPVGRTSRASKKVHNFGKRSNSIKRNPNAPVVRRGWLYKQDSTGMKLWKKRWFVLSDLCLFYYRDEKEEGILGSILLPSFQIALLTSEDHINRKYAFKAAHPNMRTYYFCTDTGKEMELWMKAMLDAALVQTEPVKRVDKITSENAPTKETNNIPNHRVLIKPEIQNNQKNKEMSKIEEKKALEAEKYGFQKDGQDRPLTKINSVKLNSLPSEYESGSACPAQTVHYRPINLSSSENKIVNVSLADLRGGNRPNTGPLYTEADRVIQRTNSMQQLEQWIKIQKGRGHEEETRGVISYQTLPRNMPSHRAQIMARYPEGYRTLPRNSKTRPESICSVTPSTHDKTLGPGAEEKRRSMRDDTMWQLYEWQQRQFYNKQSTLPRHSTLSSPKTMVNISDQTMHSIPTSPSHGSIAAYQGYSPQRTYRSEVSSPIQRGDVTIDRRHRAHHPKHVYVPDRRSVPAGLTLQSVSPQSLQGKTLSQDEGRGTLYKYRPEEVDIDAKLSRLCEQDKVVHALEEKLQQLHKEKYTLEQALLSASQEIEMHADNPAAIQTVVLQRDDLQNGLLSTCRELSRATAELERAWREYDKLEYDVTVTRNQMQEQLDHLGEVQTESAGIQRAQIQKELWRIQDVMEGLSKHKQQRGTTEIGMIGSKPFSTVKYKNEEEEVVPPRPPLPRSYDFTEQPPIIPPLPSDSSSLLCYSRGPVHLPEEKKMYQVQGYPRNGSHCGPDYRLYKSEPELTTVAEVDESNGEEKSEPVSEIETSVVKGSHFPVGVVPPRAKSPTPESSTIASYVTLRKTKKMMDLRTERPRSAVEQLCLAESTRPRMTVEEQMERIRRHQQACLREKKKGLNVIGASDQSPLQSPSNLRDNPFRTTQTRRRDDKELDTAIRENDVKPDHETPATEIVQLKETEPQNVDFSKELKKTENISYEMLFEPEPNGVNSVEMMDKERNKDKMPEDVTFSPQDETQTANHKPEEHPEENTKNSVDEQEETVISYESTPEVSRGNQTMAVKSLSPSPESSASPVPSTQPQLTEGSHFMCV

SEQ ID NO: 272497 - DNA, 3540 bp, Artificial Sequence
  derived and/or modified sequence
atggccgccgacctgaacctggagtggatcagcctgcccagaagctggacctacggcatcaccagaggcggcagagtgttcttcatcaacgaggaggccaagagcaccacctggctgcaccccgtgaccggcgaggccgtggtgaccggccacagaagacagagcaccgacctgcccaccggctgggaggaggcctacaccttcgagggcgccagatactacatcaaccacaacgagagaaaggtgacctgcaagcaccccgtgaccggccagcccagccaggacaactgcatcttcgtggtgaacgagcagaccgtggccaccatgaccagcgaggagaagaaggagagacccatcagcatgatcaacgaggccagcaactacaacgtgaccagcgactacgccgtgcaccccatgagccccgtgggcagaaccagcagagccagcaagaaggtgcacaacttcggcaagagaagcaacagcatcaagagaaaccccaacgcccccgtggtgagaagaggctggctgtacaagcaggacagcaccggcatgaagctgtggaagaagagatggttcgtgctgagcgacctgtgcctgttctactacagagacgagaaggaggagggcatcctgggcagcatcctgctgcccagcttccagatcgccctgctgaccagcgaggaccacatcaacagaaagtacgccttcaaggccgcccaccccaacatgagaacctactacttctgcaccgacaccggcaaggagatggagctgtggatgaaggccatgctggacgccgccctggtgcagaccgagcccgtgaagagagtggacaagatcaccagcgagaacgcccccaccaaggagaccaacaacatccccaaccacagagtgctgatcaagcccgagatccagaacaaccagaagaacaaggagatgagcaagatcgaggagaagaaggccctggaggccgagaagtacggcttccagaaggacggccaggacagacccctgaccaagatcaacagcgtgaagctgaacagcctgcccagcgagtacgagagcggcagcgcctgccccgcccagaccgtgcactacagacccatcaacctgagcagcagcgagaacaagatcgtgaacgtgagcctggccgacctgagaggcggcaacagacccaacaccggccccctgtacaccgaggccgacagagtgatccagagaaccaacagcatgcagcagctggagcagtggatcaagatccagaagggcagaggccacgaggaggagaccagaggcgtgatcagctaccagaccctgcccagaaacatgcccagccacagagcccagatcatggccagataccccgagggctacagaaccctgcccagaaacagcaagaccagacccgagagcatctgcagcgtgacccccagcacccacgacaagaccctgggccccggcgccgaggagaagagaagaagcatgagagacgacaccatgtggcagctgtacgagtggcagcagagacagttctacaacaagcagagcaccctgcccagacacagcaccctgagcagccccaagaccatggtgaacatcagcgaccagaccatgcacagcatccccaccagccccagccacggcagcatcgccgcctaccagggctacagcccccagagaacctacagaagcgaggtgagcagccccatccagagaggcgacgtgaccatcgacagaagacacagagcccaccaccccaagcacgtgtacgtgcccgacagaagaagcgtgcccgccggcctgaccctgcagagcgtgagcccccagagcctgcagggcaagaccctgagccaggacgagggcagaggcaccctgtacaagtacagacccgaggaggtggacatcgacgccaagctgagcagactgtgcgagcaggacaaggtggtgcacgccctggaggagaagctgcagcagctgcacaaggagaagtacaccctggagcaggccctgctgagcgccagccaggagatcgagatgcacgccgacaaccccgccgccatccagaccgtggtgctgcagagagacgacctgcagaacggcctgctgagcacctgcagagagctgagcagagccaccgccgagctggagagagcctggagagagtacgacaagctggagtacgacgtgaccgtgaccagaaaccagatgcaggagcagctggaccacctgggcgaggtgcagaccgagagcgccggcatccagagagcccagatccagaaggagctgtggagaatccaggacgtgatggagggcctgagcaagcacaagcagcagagaggcaccaccgagatcggcatgatcggcagcaagcccttcagcaccgtgaagtacaagaacgaggaggaggaggtggtgccccccagaccccccctgcccagaagctacgacttcaccgagcagccccccatcatcccccccctgcccagcgacagcagcagcctgctgtgctacagcagaggccccgtgcacctgcccgaggagaagaagatgtaccaggtgcagggctaccccagaaacggcagccactgcggccccgactacagactgtacaagagcgagcccgagctgaccaccgtggccgaggtggacgagagcaacggcgaggagaagagcgagcccgtgagcgagatcgagaccagcgtggtgaagggcagccacttccccgtgggcgtggtgccccccagagccaagagccccacccccgagagcagcaccatcgccagctacgtgaccctgagaaagaccaagaagatgatggacctgagaaccgagagacccagaagcgccgtggagcagctgtgcctggccgagagcaccagacccagaatgaccgtggaggagcagatggagagaatcagaagacaccagcaggcctgcctgagagagaagaagaagggcctgaacgtgatcggcgccagcgaccagagccccctgcagagccccagcaacctgagagacaaccccttcagaaccacccagaccagaagaagagacgacaaggagctggacaccgccatcagagagaacgacgtgaagcccgaccacgagacccccgccaccgagatcgtgcagctgaaggagaccgagccccagaacgtggacttcagcaaggagctgaagaagaccgagaacatcagctacgagatgctgttcgagcccgagcccaacggcgtgaacagcgtggagatgatggacaaggagagaaacaaggacaagatgcccgaggacgtgaccttcagcccccaggacgagacccagaccgccaaccacaagcccgaggagcaccccgaggagaacaccaagaacagcgtggacgagcaggaggagaccgtgatcagctacgagagcacccccgaggtgagcagaggcaaccagaccatggccgtgaagagcctgagccccagccccgagagcagcgccagccccgtgcccagcacccagccccagctgaccgagggcagccacttcatgtgcgtgtag

SEQ ID NO: 272498 - DNA, 3540 bp, Artificial Sequence
  derived and/or modified sequence
atggctgcggacttaaacctggaatggatctcactgccccgcagctggacatacgggatcacccggggggggcgagttttcttcattaatgaggaagccaagtcaaccacctggttgcaccccgtaacaggggaagccgtggtgacagggcataggaggcaatccactgaccttccaacagggtgggaagaggcttatacatttgagggcgcaaggtactacattaaccacaatgagcgaaaggtgacttgtaagcaccctgtcaccgggcagcctagccaggataattgtatctttgtggtcaacgaacagaccgtggcaaccatgaccagcgaggagaagaaagaaagacccatctcaatgatcaatgaagcctcaaattataacgtgacctcggactacgctgtacacccgatgtccccagtggggagaacttctagagctagcaagaaggtgcacaatttcgggaaacggtccaattccatcaaacgtaacccaaatgctccagtggttcgtcgaggttggctttacaagcaggattctaccgggatgaaattgtggaagaaaagatggtttgtgctaagcgacctgtgtctattctattaccgggatgaaaaggaggagggcatcttagggtctattctgctgccctcctttcagattgcgctgttgacctccgaagaccacatcaatagaaagtatgcttttaaagcagcacaccccaacatgcgtacctactacttctgcaccgacaccggcaaggagatggaactgtggatgaaagctatgctagacgcagctctagtgcaaaccgaaccagtaaaaagagtcgataagataacatcggagaacgccccgacgaaggagaccaataacattcctaatcaccgcgttctgatcaaacctgagatccaaaacaatcagaagaataaggaaatgtctaagatagaggagaagaaagcactcgaggccgaaaaatacggatttcagaaagacggccaggaccgccccttgacaaaaatcaattctgtcaagctcaactcccttccaagtgaatatgaatccggcagcgcttgtcctgcccagaccgttcactatcggcccatcaatttgagtagctctgaaaataaaattgtgaacgtcagccttgccgacctgaggggcggaaaccggccgaatactggtcccctctatacggaggctgaccgcgtaatccagcgaacaaattccatgcagcagctggagcagtggataaagatccagaaagggaggggtcacgaagaggagacacggggtgtgatttcctatcagaccttaccacgaaacatgccgtcccatagggcacagattatggcccggtatccagagggctatcggacactaccacgtaatagcaaaacaaggcccgagagcatatgctcggtgactccatcaactcatgacaaaaccttggggcccggggcagaggagaagaggcggtctatgagggacgatactatgtggcaactgtatgaatggcaacagcgccagttctacaataagcagtcgactctgccaagacacagcacactaagctctcccaaaactatggttaatatcagcgaccagaccatgcattccatcccgacctctccctcgcacggctctattgcagcgtatcaaggttacagcccccagaggacctatcgctcagaggtttcaagcccaatccaacggggggatgttaccatagaccgccgacaccgtgcccatcaccccaagcacgtctacgtgccagaccggaggtccgttcctgcgggcttaacgcttcaaagcgttagcccgcagtctctacagggcaagacactgtcacaggacgagggtagaggtaccctgtataaatacaggcctgaagaagttgacattgacgccaaactgtcacggctatgtgagcaggataaggtggtgcatgccttagaagaaaaactccagcagttacacaaggaaaagtataccctggaacaggccttactcagtgccagtcaggagattgagatgcatgctgacaacccggccgctatccagacggtggtgctgcaacgggacgacctgcagaatggactgctctccacatgccgggaactgagccgcgctacggcagagctggaacgtgcttggagagaatatgataagttggaatatgacgttaccgttactcgcaaccagatgcaagaacagctggatcaccttggggaggtgcaaaccgagtcagccgggatccagcgcgcccaaatccagaaggagctgtggcggatccaagacgtgatggaaggattgtcaaaacacaagcagcagcggggtaccacagaaatcggcatgattgggtccaagcccttttctaccgtcaagtacaaaaacgaagaggaggaggttgtgcctccacgaccaccgctccctcgctcatatgatttcacagagcagccgccaatcattccacctctcccctcagattcaagctcattgctgtgttatagccgcggtccagtgcatcttccagaagagaaaaagatgtatcaggtgcagggctacccacgcaacggttcccactgcggacctgattaccgactgtacaagagcgagcccgagctcactactgtggccgaggtggacgagagtaatggcgaggagaaaagcgaacccgttagtgagatcgagaccagtgtggtaaagggatcccattttccggtgggtgtggtgccaccccgggctaagtcccccacccctgagtcatctaccattgccagctatgttaccctaaggaagacgaagaaaatgatggatttgagaaccgaacggccccgttccgccgttgaacaactgtgccttgccgagagtactcggccccggatgacggtggaggagcagatggaaaggatcagacggcatcagcaggcttgtctgcgggagaagaagaaaggattaaacgtgatcggggcctccgatcagagccctctccagtcaccttccaatctccgagacaatccattcagaacaacccaaactcggcgacgcgacgataaggagctggatactgcaatcagggaaaacgacgtgaagcccgaccatgaaacccccgccacagagatcgttcaattaaaagaaactgagccccagaatgtcgacttttcaaaagaattaaagaagaccgagaacatcagttatgaaatgcttttcgagcccgaacctaatggggtgaatagcgtcgaaatgatggacaaagagcgaaataaggacaaaatgccagaggatgtcacctttagcccccaggacgaaacccagacagctaaccataagccagaagaacacccagaggaaaatacaaagaacagcgtggacgagcaagaagagactgtgatctcttacgagtcaactccggaggtgtctagaggaaatcagactatggcagttaagtcactgtccccctcacccgagtcctccgcatcccctgtcccaagcacacagccccaactaacagagggcagccatttcatgtgcgtgtag

SEQ ID NO: 272499 - DNA, 3540 bp, Artificial Sequence
  derived and/or modified sequence
atggctgctgacctgaacctggagtggatcagcctgcccaggtcctggacctacggcatcacccggggcggccgggtcttcttcatcaatgaggaggccaagagcaccacctggctgcaccctgtgactggagaggccgtggtgacaggccaccggcggcagagcacagacctgcccaccggctgggaggaggcctacacctttgagggcgcccgctactacatcaaccacaatgaaaggaaggtgacctgcaagcaccctgtgacaggccagcccagccaggacaactgcatctttgtggtgaatgagcagacagtggccaccatgaccagcgaggagaagaaggagcggcccatctccatgatcaatgaggccagcaactacaacgtgaccagtgactatgctgtgcaccccatgagccctgtgggccgcaccagccgggccagcaagaaggtgcacaactttgggaagaggagcaacagcatcaagaggaaccccaatgcccctgtggtgcggcggggctggctgtacaagcaggacagcacaggcatgaagctgtggaagaagcgctggtttgtgctgagtgacctgtgcctcttctactacagagatgagaaggaggagggcatcctgggcagcatcctgctgcccagcttccagatcgccctgctgaccagcgaggaccacatcaacagaaaatatgccttcaaggccgcccaccccaacatgaggacctactacttctgcacagacaccgggaaggagatggagctgtggatgaaggccatgctggatgctgccctggtgcagacagagcctgtgaagagggtggacaagatcaccagtgaaaatgcccccaccaaggagaccaacaacatccccaaccaccgggtgctgatcaagccagagatccagaacaaccagaagaacaaggagatgagcaagattgaggagaagaaggccctggaggccgagaagtatggcttccagaaggatggccaggaccggcccctgaccaagatcaacagcgtgaagctgaacagcctgcccagtgaatatgaaagtggcagcgcctgcccagcccagacagtgcactaccggcccatcaacctgagcagcagcgagaacaagatcgtgaatgtgtccctggccgacctgcggggcggcaaccggcccaacacaggccccctgtacacagaagctgacagagtcatccagaggaccaacagcatgcagcagctggagcagtggatcaagatccagaagggccggggccacgaggaggagacccggggcgtcatctcctaccagaccctgcccaggaacatgcccagccaccgggcccagatcatggcccgctacccagagggctaccgcaccctgcccaggaacagcaagaccaggcctgagagcatctgcagcgtgacccccagcacccatgacaagaccctgggccctggagctgaggagaagaggaggtccatgagagatgacaccatgtggcagctgtatgagtggcagcagaggcagttctacaacaagcagagcaccctgcccaggcacagcaccctgagcagccccaagaccatggtgaacatcagtgaccagaccatgcacagcatccccaccagccccagccacggcagcattgctgcctaccagggctacagcccccagaggacctacagaagtgaggtgagcagccccatccagagaggagatgtgaccatcgacagaagacaccgggcccaccaccccaagcacgtgtatgtgcctgaccggcgctctgtgcctgctggcctgaccctgcagagcgtgagcccccagagcctgcagggcaagaccctgagccaggatgagggccggggcaccctgtacaagtacagacctgaggaggtggacattgatgccaagctgagccggctgtgtgagcaggacaaggtggtgcacgccctggaggagaagctgcagcagctgcacaaggagaagtacaccctggagcaggccctgctgagcgccagccaggagattgagatgcatgctgacaacccagctgccatccagacagtggtgctgcagagagatgacctgcagaatggcctgctgagcacctgccgggagctgagccgggccacagctgagctggagcgggcctggagagaatatgacaagctggagtatgatgtgacagtgaccaggaaccagatgcaggagcagctggaccacctgggggaggtgcagacagagagcgctggcatccagagggcccagatccagaaggagctgtggaggatccaggatgtgatggagggcctgagcaagcacaagcagcagaggggcaccacagagatcggcatgattggcagcaagcccttcagcacagtgaagtacaagaatgaggaggaggaggtggtgccccccaggcctcccctgcccaggagctatgacttcacagagcagccccccatcatcccccccctgcccagcgacagcagcagcctgctgtgctacagccggggccctgtgcacctgcctgaggagaagaagatgtaccaggtgcagggctaccccagaaatggcagccactgcggccctgactaccgcctgtacaagtctgagcctgagctgaccaccgtggccgaggtggatgagagcaatggagaggagaagtctgagcctgtgtctgaaattgagacctctgtggtgaagggcagccacttccctgtgggcgtggtgcccccccgggccaagagccccaccccagagagcagcaccatcgccagctatgtgaccctgaggaagaccaagaagatgatggacctgaggacagagcggcccaggtctgctgtggagcagctgtgcctggccgagagcacccggcccaggatgacagtggaggagcagatggagcgcatcagaagacaccagcaggcctgcctgcgggagaagaagaagggcctgaatgtcatcggggccagtgaccagagccccctgcagagccccagcaacctgcgggacaaccccttccgcaccacccagaccaggagaagagatgacaaggagctggacacagccatccgggagaatgatgtgaagccagaccacgagaccccagccacagagatcgtgcagctgaaggagacagagccccagaatgtggacttcagcaaggagctgaagaagacagagaacatctcctatgagatgctgtttgagcctgagcccaacggggtgaacagcgtggagatgatggacaaggagaggaacaaggacaagatgccagaagatgtgaccttcagcccccaggatgagacccagacagccaaccacaagccagaggagcaccctgaggagaacaccaagaacagcgtggatgagcaggaggagaccgtcatctcctatgagagcaccccagaggtgtcccggggcaaccagaccatggctgtgaagagcctgagccccagccctgagagcagcgccagccctgtgcccagcacccagccccagctgacagagggcagccacttcatgtgtgtgtag

SEQ ID NO: 272500 - DNA, 3540 bp, Artificial Sequence
  derived and/or modified sequence
atggccgccgacctgaacctggagtggatcagcctgccccggagctggacctatggtataacacgaggcgggcgagtgttttttataaatgaggaggctaaatccactacctggttacatccagtgacaggagaggctgtagtcaccggacacagacgccagtctacggatctcccgacgggatgggaagaagcttacacctttgagggggcaaggtattatatcaatcacaacgaaagaaaagtgacatgtaagcatccagtcactggccagccgtctcaggacaactgtatatttgtggtgaacgagcagacggttgcaactatgacatccgaagaaaaaaaggagcgacccattagcatgatcaacgaggcatcaaactataatgttacctccgattatgccgtccatccaatgtcacccgtgggtcggacctctagggcttctaaaaaggttcacaatttcggaaagcgcagcaacagtatcaagcgcaatcccaatgcccctgttgtgcggcgaggatggctctacaaacaggattccaccggcatgaaattatggaagaagcgatggttcgtcctgtctgatctgtgcctgttctattatagagacgaaaaagaagaaggcatcctcgggagcatcctgctgccctccttccagatcgccttgctaacgtccgaagatcacatcaaccgcaagtacgctttcaaggccgctcaccctaacatgagaacctactacttctgcacggacaccggtaaggagatggaactgtggatgaaagccatgctggacgccgccctagttcaaacggaacctgtgaaaagagtcgacaagattaccagcgaaaatgcgccaaccaaggaaacaaataatattcctaaccaccgcgtgctgataaaacctgagatccagaataatcagaaaaacaaagaaatgtctaaaatcgaggaaaagaaggctctggaggccgagaaatacggtttccaaaaggatggccaggatagacccctgactaagatcaattcagtgaaactgaactcccttccttccgagtacgagagcggaagcgcttgcccggcccaaacagtgcactataggccaataaacctttccagcagcgaaaataagatagtgaacgtttctctcgccgaccttcgcggagggaacaggcccaataccggcccactgtacactgaggccgaccgagtgatccagcggaccaatagcatgcagcagttggaacaatggattaaaatccagaagggtaggggccacgaggaggaaacacgcggagtaatatcctatcagaccctgccgagaaatatgccctcccatcgcgctcagatcatggcaagatacccagaagggtatcgaacactgcctagaaacagtaaaaccaggcctgagtccatatgctcagtgactccaagtacacatgacaaaactcttggtcccggagccgaagaaaagcgtaggtcaatgagagatgatacaatgtggcagttgtacgagtggcaacagcggcagttttataataagcagtcaaccctgcccagacattccaccctctctagtcccaaaaccatggttaatatcagcgatcagacgatgcacagcattcccacatcaccctcccacggctctatcgccgcgtatcagggctactcaccacagagaacatataggtctgaagtgagctctccaattcagagaggcgatgtgactatcgaccgcaggcaccgggcacaccatcccaagcatgtgtacgtcccagacaggcggagtgtgccagccggccttacattgcagtccgtgtcaccacagtcgttgcaaggaaagaccctcagccaggacgagggacggggcacactgtacaaatacagacctgaggaagtggacatagacgccaagctgtcgcgactgtgtgagcaggacaaggtggtgcatgccctagaggagaagctgcagcagctgcataaagagaagtatactttagagcaggccttactgtcggcgtctcaggagattgagatgcacgcagataaccctgccgccattcagactgttgttctgcagagagacgatctgcagaacgggttgttaagcacctgtcgcgaactgtcaagggccacagcagagctggagagggcttggagggaatatgataaacttgaatacgacgttacggtgactagaaatcagatgcaagaacagcttgatcatctgggcgaggtgcagacagagtccgcaggtattcagcgggcccaaattcagaaagagttgtggagaatccaggatgtcatggaaggcctgagtaagcacaaacagcaacgcggtaccacagagatcggcatgatcggctcaaagccattttctacagtaaaatacaagaacgaggaagaggaagttgtaccacccaggccacctttgccgaggagctacgatttcactgaacagccacctattatccctccactgccctccgatagtagtagcttgctttgctacagccgcgggccagtgcatttgcccgaggagaaaaaaatgtatcaggtgcaagggtaccctcggaatgggtcccactgtggcccggactatcggctgtataaaagcgaacccgaattgactaccgtggccgaagtggacgaatccaacggtgaagaaaagtcagagcctgtgtcagagatcgagacttccgtcgtgaaaggatctcattttcccgttggagtagtcccccccagagccaaatccccaactcccgagagcagcacaattgcttcatatgttacactccggaagaccaaaaagatgatggatctgaggaccgaaagacctcggagtgcggtcgaacaactctgtctggctgagtccacacgaccacgaatgacagttgaagagcaaatggagcggataagacgccaccaacaggcatgtttgagggagaagaagaagggcctcaacgtaatcggcgcctctgaccagtctccccttcagtccccgtctaatctgcgcgataacccattcaggacgacacaaaccagacgtcgggacgataaggagctggatacagccataagagagaatgacgtaaagccagatcacgaaaccccagccaccgagattgttcagctgaaagaaacagaacctcagaatgttgacttttcaaaagaactgaaaaagaccgagaatatcagttatgaaatgctgttcgaaccagaacccaacggcgtaaactccgtggaaatgatggataaagagaggaacaaagataagatgcccgaggatgtcaccttcagtccccaggacgaaacgcagacggcaaaccacaagcccgaggaacatcccgaggagaataccaaaaattcagtcgacgagcaggaggaaaccgtgatttcctacgagagtacaccagaagtaagtcgcggaaatcagacaatggcggtgaagtctctgtcaccatcaccagagtcaagcgcttcaccagtccccagtacccagccccagctcacagagggctctcacttcatgtgtgtctag

SEQ ID NO: 272501 - DNA, 4504 bp, Artificial Sequence
  derived and/or modified sequence
gcgctcccttcgctcgctcgttccctcctccctcggcagccgcggcggcagcaggagaaggcggcggcggcggctagggatcagacatggcggcggatctgaacctggagtggatctccctgccccggtcctggacttacgggatcaccaggggcggccgagtcttcttcatcaacgaggaggccaagagcaccacctggctgcaccccgtcaccggcgaggcggtggtcaccggacaccggcggcagagcacagatttgcctactggctgggaagaagcatatacttttgaaggtgcaagatactatataaaccataatgaaaggaaagtgacctgcaaacatccagtcacaggacaaccatcacaggacaattgtatttttgtagtgaatgaacagactgttgcaaccatgacatctgaagaaaagaaggaacggccaataagtatgataaatgaagcttctaactataacgtgacttcagattatgcagtgcatccaatgagccctgtaggcagaacttcacgagcttcaaaaaaagttcataattttggaaagaggtcaaattcaattaaaaggaatcctaatgcaccggttgtcagacgaggttggctttataaacaggacagtactggcatgaaattgtggaagaaacgctggtttgtgctttctgacctttgcctcttttattatagagatgagaaagaagagggtatcctgggaagcatactgttacctagttttcagatagctttgcttacctctgaagatcacattaatcgcaaatatgcttttaaggcagcccatccaaacatgcggacctattatttctgcactgatacaggaaaggaaatggagttgtggatgaaagccatgttagatgctgccctagtacagacagaacctgtgaaaagagtggacaagattacatctgaaaatgcaccaactaaagaaaccaataacattcccaaccatagagtgctaattaaaccagagatccaaaacaatcaaaaaaacaaggaaatgagcaaaattgaagaaaaaaaggcattagaagctgaaaaatatggatttcagaaggatggtcaagatagacccttaacaaaaattaatagtgtaaagctgaattctctgccatctgaatatgagagtgggtcagcatgccctgctcagactgtgcactacagaccaatcaacttgagcagttcagagaacaaaatagtcaatgttagcctggcagatcttagaggtggaaatcgccccaatacagggcccttatacacagaggccgatcgagtcatacagagaacaaattcaatgcagcagttggaacagtggattaaaatccagaaggggaggggtcatgaagaagaaaccaggggagtaatttcttaccaaacattaccaagaaatatgccaagtcacagagcccagattatggcccgctaccctgaaggttatagaacactcccaagaaacagcaagacaaggcctgaaagtatctgcagtgtaaccccttccactcatgacaagacattaggacccggagcggaggagaaacggaggtccatgagagatgacacaatgtggcagctctacgaatggcagcagcgtcagttttataacaaacagagcaccctccctcgacacagtactttgagtagtcccaaaaccatggtaaatatttctgaccagacaatgcactctattcccacatcaccttcccacgggtcaatagctgcttatcagggatactcccctcaacgaacttacagatcggaagtgtcttcaccaattcagagaggagatgtgacaatagaccgcagacacagggcccatcaccctaagcatgtctatgtgcctgacagaaggtcagtgccagctggcctgactttacagtctgttagtccccagagcctccaagggaaaacgctgtcacaagatgaaggtagaggcacattatacaaatacagacctgaagaagtagatattgatgccaagttaagccgattatgtgaacaagataaagtggtgcatgctctggaagagaaacttcagcaactccacaaggagaaatacacgcttgagcaagctttgctatcagccagccaagagatagaaatgcatgcagataacccagcagccattcagacagtggtgttacaaagggatgatttacaaaatggactgcttagtacgtgtcgagaactttctcgagccactgccgaattggaacgagcatggagagaatatgataagttagaatacgatgtaactgttaccaggaaccagatgcaagagcagctggatcaccttggtgaagttcagacggaatcagcaggaattcagcgtgcacagattcagaaagaactttggcgaattcaggatgtcatggaagggctgagtaaacataagcagcaaagaggtactacagaaataggtatgataggatcaaagcctttctcaacagttaagtacaaaaatgaggaagaggaagtagtcccacctcgtcctccacttcctcggtcctatgactttacagagcagcctcccataatcccccctctgcccagtgatagcagctccttgctctgttatagcaggggcccagttcatctgcctgaagaaaagaagatgtatcaagttcaaggatatccaagaaatggatctcactgtggtccagattatagactctacaagagtgaaccagagttaacaacagtggcagaagttgatgaatctaatggagaagaaaaatcagaacctgtttcagagatagaaacttcagttgttaaaggttcccactttcctgttggagtagtccctccaagagcaaaatcaccaacacccgaatcttcgacaatagcttcctatgtaaccttgaggaaaactaagaagatgatggatctaagaacggaaagaccaagaagtgcagtggaacagctctgtttggctgaaagtactcgaccaaggatgactgtggaagagcaaatggaaagaataagaagacatcaacaagcgtgcctgagggagaagaaaaaagggttaaatgttatcggtgcttcagaccagtcacccttacaaagcccttcaaatttaagggataatccatttaggactactcagactcgaaggagggatgataaggaactggacactgccattagagaaaatgatgtaaagccagaccatgaaactcctgcaacagaaattgttcaactaaaagaaaccgaaccccaaaatgtggacttcagcaaagagttaaaaaaaactgaaaacatttcatatgaaatgctttttgaacctgagccaaatggagtaaattctgtggaaatgatggataaagaaagaaacaaagacaaaatgcctgaggatgttacattcagccctcaagatgaaacacagaccgcaaatcataaaccagaagagcatcctgaagaaaatacaaagaacagtgttgacgaacaggaagaaactgttatttcttacgaatcaactcctgaggtttctagaggaaatcaaacaatggcagtgaaaagtctgtccccatctcctgagtcctcggcatcgccagttccatccactcagccgcagctcacagaaggatcacatttcatgtgtgtgtagtcttagaagaactatactgacttctgttgaaaccattcaaagctaaagacatggaccttcagcagtgtaagaagatattgtacagtatattttaaatctatgaaattcatagttctgatgcttttggtcacagagcatcattttatcacttctggaaaatgtttattccaaaacagctttaatggcccatatgtacacttcgtaatctcaaggttattattctgacaccagcttgctgctatgatttcagagcacataagtaaaggtgctttttaatgtgcagtctatttccagagcttacttagttgctgatttccagatttcgatgtttcttaagtctaggtgaatttatatatatatttttttgcttttcattttctaaagttagttattatttccattgaagcttgttttcttttttttcttcccattttagctactgcagtgcttttgtttcacacttgatttgtaaaaattttatatatatgtatttaaaatgtgccattttattgctaagtgaagtatgtcctgttttctgctataattctttctcggtcagattgcaatgtcagcagttactgccacactcctgtcagcttaaacacaaatgttactgcttatcttttcttaaaaaaaaaaaaaacaaagtgtaggtattttgaagtactgggcttatatttcattggaatacatgtgtacagcaataagcaggtttccaaatccggtacttagtttgtgtacaaatgtaattatgttcattgtgtatatattatacaatgagcacatgtaatgtattaaaggctacttactattgtttaaatgcaaatgttcatatctcatttctttttttatcatgttaaataaatgttgatgttctt

SEQ ID NO: 272502 - DNA, 3540 bp, Artificial Sequence
  derived and/or modified sequence
atggctgctgatctcaatctcgaatggattagtctaccgaggtcttggacctatggcatcacacgaggaggcagggtgttctttatcaatgaggaggctaaatctacaacctggctccacccagttacgggtgaagccgtggtgactggacacaggagacaatcaacggatctcccaaccgggtgggaggaagcttacacattcgaaggagcgcgatattatattaaccacaacgagcggaaagtaacctgcaagcaccccgtgactggccagcccagccaggacaattgcatcttcgtggtcaacgagcagactgttgcaactatgacaagcgaggaaaaaaaggagagacctatctccatgatcaatgaagcctccaattataacgtgacatctgactacgccgtgcacccaatgagtcccgtagggcgaacgtctagggcctctaagaaagtgcataactttggcaagagatcaaacagtatcaagcgtaacccgaacgcccctgtcgtgcgcagaggttggctgtacaaacaggattcaaccggcatgaagctgtggaagaagaggtggttcgttttgtctgacctctgccttttctactaccgggacgaaaaggaagagggcatcttgggcagtatactactcccttcgttccagatcgctcttttgacttctgaagaccatatcaaccggaaatacgctttcaaggctgctcaccccaacatgcgtacttattatttctgtaccgatacaggtaaggagatggagctgtggatgaaagccatgctggatgccgctttagtccagactgagcccgtgaagcgggtagataagatcacatccgagaacgcacccaccaaggagacaaataacattcccaatcatagagtgttaatcaagcccgagatacaaaacaaccaaaagaacaaagaaatgagcaagattgaggagaaaaaagccctagaagcagaaaaatatggtttccagaaagacggacaggacaggcccctgaccaagataaactcggttaagctcaattccctccctagtgagtacgaaagcggatccgcctgccctgctcagaccgtgcactaccgccctataaacttgtcgagtagcgaaaacaaaatcgtcaacgtgtctctcgctgatttgcgagggggaaacagaccaaataccggacccctttataccgaagccgatcgggttatccagcgtacaaattccatgcagcagctcgagcagtggatcaaaattcagaagggacggggtcacgaagaagagacccggggagtgatcagttaccagacactcccccgtaatatgccctcccacagagcccagattatggccagataccctgagggctatcggacgctgcctcggaatagcaagaccaggccggaaagtatctgtagcgttacacctagcacccatgacaaaacactcgggccaggagccgaggaaaagagacgaagcatgagggacgacacaatgtggcagctctacgaatggcagcaaaggcagttttacaacaagcagtcgaccttgccgaggcacagcactctgtcctcacctaaaaccatggtaaacatcagtgatcagaccatgcattcgattcccacctcgccctcccatggttccatcgcggcatatcagggttattcaccgcagcgtacgtacaggtccgaggtctcaagccctattcagcgcggtgatgtgactatagaccgacgacatcgtgcacaccatccgaaacatgtctacgtgccggaccgacgcagcgtgcctgccggtctcaccctccagtcagtgagtccacagtcgcttcaggggaagacactctcccaggacgaggggaggggcaccctttacaagtaccgacccgaagaggtggatattgatgccaagctttcccgactgtgcgaacaagataaagtcgttcacgccctcgaagagaaactgcaacagctccacaaggagaaatacaccctagagcaggccctactctccgcttcacaggagattgaaatgcacgcagacaaccccgcagctattcaaaccgtggtgctgcagagggacgacctgcagaacggtctgctctccacgtgtagagaactatcacgggcaactgccgaactcgagcgagcatggcgtgagtatgataagctggagtatgatgtgaccgtcacacgcaaccagatgcaggaacagctggatcatctgggtgaagtccaaacggagtctgcaggcatccagcgggctcagatccagaaggagctttggcggattcaggacgtgatggagggcctgtcaaagcataaacagcagcgaggcacaacagagattggtatgataggttctaagcccttctccactgtgaagtacaaaaacgaggaggaggaagtcgttcctcccagaccacccttaccaaggtcgtatgactttacggaacagcctcccatcatcccccctctgcccagtgatagttctagcctactctgttattcccgaggacctgtgcatttgcccgaggagaaaaagatgtatcaggtacaagggtaccccaggaacggctctcactgcggcccagactatcgcctgtacaaatcagagccagagctcactaccgttgccgaagtggatgaaagtaatggtgaggaaaagtcagagccagtctctgagattgaaacgtctgtggtgaaaggttcgcacttccctgtcggtgtagttccacctcgcgctaagagcccaacccccgaatcatccacaatcgcttcttacgttacactgagaaagacaaagaagatgatggacctgcgcactgagaggccgcgaagcgctgtagagcagttatgtcttgccgaatccacacgtccaaggatgactgtggaagagcagatggagcggattcgacgtcaccagcaggcatgcctccgtgagaagaaaaaaggtctgaatgtaattggggcttccgaccagtctcccctgcaatccccttctaatctgcgcgataacccattcaggacaactcagacccgcagaagagatgataaggaactggatactgccataagagaaaacgacgtaaagcccgaccatgagacacctgcaaccgagattgtccaactgaaagaaactgaaccccagaatgtagacttttccaaagagttaaagaagacggaaaatatctcttacgaaatgctgtttgagcctgaacctaacggcgtcaactccgtcgaaatgatggacaaagagcgtaacaaggacaaaatgccagaggatgtcaccttctccccccaggatgagacacaaactgcaaaccacaaacctgaggaacatcccgaggagaatactaagaacagtgtggatgaacaggaggaaactgtaatttcttacgaaagtactccagaggtgtctcgtggtaatcagactatggccgtgaagagcctgtctccctctcccgaaagctctgcatcacctgtgccctctacgcagccacagctcacagaaggctcacactttatgtgcgtttag

SEQ ID NO: 272503 - protein, 1747 aa, Artificial Sequence
  derived and/or modified sequence
MNWNEKPKSATLPPLYPKSQPPFLHQSLINQITTTSQSSFSYPGSNQEACMYPGNSNPISQPLLNIQNYPQQISVSDMHNGTVVASHTSVERITYANVNGPKQLTHNLQMSSGVTQNVWLNSPMRNPVHSHIGATVSHQTDFGANVPNMPALQSQLITSDTYSMQMQMIPSNSTRLPVAYQGNQGLNQSFSEQQVDWTQQCISKGLTYPDYRPPPKLYRYSPQSFLPDSTIQKQNFIPHTSLQVKNSQLLNSVLTLPSRQTSAVPSQQYATQTDKRPPPPPYNCRYGSQPLQSTQHITKHLSMEVPQSREMLSSEIRTSFQQQWQNPNENVSTIGNFTNLKVNTNSKQPFNSPIRSSVDGVQTLAQTNEEKIMDSCNPTSNQVLDTSVAKEKLVRDIKTLVEIKQKFSELARKIKINKDLLMAAGCIKMTNTSYSEPAQNSKLSLKQTAKIQSGPQITPVMPENAERQTPTVVESAETNKTQCMLNSDIQEVNCRRFNQVDSVLPNPVYSEKRPMPDSSHDVKVLTSKTSAVEMTQAVLNTQLSSENVTKVEQNSPAVCETISVPKSMSTEEYKSKIQNENMLLLALLSQARKTQKTVLKDANQTIQDSKPDSCEMNPNTQMTGNQLNLKNMETPSTSNVSGRVLDNSFCSGQESSTKGMPAKSDSSCSMEVLATCLSLWKKQPSDTAKEKECDKLRTNTTAVGISKPANIHVKSPCSVVGNSNSQNKISNPSQQTALSMVMHNYESSGINITKGTELQIAVVSPLVLSEVKTLSVKGITPAVLPETVYPVIKEGSVCSLQNQLAENAKATAALKVDVSGPVASTATSTKIFPLTQKEKQNESTNGNSEVTPNVNQGKHNKLESAIHSPMNDQQISQESRNSTVVSSDTLQIDNICSLVEGDTSYNSQIAKIFSSLPLKMVEPQKPSLPNQQGIGSREPEKQLDNTTENKDFGFQKDKPVQCTDVSHKICDQSKSEPPLESSFNNLETNRVILEKSSLEHATEKSTANDTCSSAAIQEDIYPQEIDASSNYTPQDPARNEIHSDKAPVLYLHDQLSELLKEFPYGIEAVNTREGSVGQQTTYQTSEDQTADKTSSDSKDPADQIQITILSSEQMKEIFPEQDDQPYVVDKLAEPQKEEPITEVVSQCDLQAPAAGQSRDSVILDSEKDDIHCCALGWLSMVYEGVPQCQCNSIKNSSSEEEKQKEQCSPLDTNSCKQGERTSDRDVTVVQFKSLVNNPKTPPDGKSHFPELQDDSRKDTPKTKHKSLPRTEQELVAGQFSSKCDKLNPLQNHKRKKLRFHEVTFHSSNKMTASYEQASQETRQKKHVTQNSRPLKTKTAFLPNKDVYKKHSSLGQSLSPEKIKLKLKSVSFKQKRKLDQGNVLDMEVKKKKHDKQEQKGSVGATFKLGDSLSNPNERAIVKEKMVSNTKSVDTKASSSKFSRILTPKEYLQRQKHKEALSNKASKKICVKNVPCDSEHMRPSKLAVQVESCGKSNEKHSSGVQTSKESLNGLTSHGKNLKIHHSQESKTYNILRNVKEKVGGKQPDKIWIDKTKLDKLTNISNEAQFSQMPPQVKDQKKLYLNRVGFKCTERESISLTKLESSPRKLHKDKRQENKHKTFLPVKGNTEKSNMLEFKLCPDILLKNTNSVEERKDVKPHPRKEQAPLQVSGIKSTKEDWLKFVATKKRTQKDSQERDNVNSRLSKRSFSADGFEMLQNPVKDSKEMFQTYKQMYLEKRSRSLGSSPVK

SEQ ID NO: 272504 - protein, 675 aa, Artificial Sequence
  derived and/or modified sequence
MNWNEKPKSATLPPLYPKSQPPFLHQSLINQITTTSQSSFSYPGSNQEACMYPGNSNPISQPLLNIQNYPQQISVSDMHNGTVVASHTSVERITYANVNGPKQLTHNLQMSSGVTQNVWLNSPMRNPVHSHIGATVSHQTDFGANVPNMPALQSQLITSDTYSMQMQMIPSNSTRLPVAYQGNQGLNQSFSEQQVDWTQQCISKGLTYPDYRPPPKLYRYSPQSFLPDSTIQKQNFIPHTSLQVKNSQLLNSVLTLPSRQTSAVPSQQYATQTDKRPPPPPYNCRYGSQPLQSTQHITKHLSMEVPQSREMLSSEIRTSFQQQWQNPNENVSTIGNFTNLKVNTNSKQPFNSPIRSSVDGVQTLAQTNEEKIMDSCNPTSNQVLDTSVAKEKLVRDIKTLVEIKQKFSELARKIKINKDLLMAAGCIKMTNTSYSEPAQNSKLSLKQTAKIQSGPQITPVMPENAERQTPTVVESAETNKTQCMLNSDIQEVNCRRFNQVDSVLPNPVYSEKRPMPDSSHDVKVLTSKTSAVEMTQAVLNTQLSSENVTKVEQNSPAVCETISVPKSMSTEEYKSKIQNENMLLLALLSQARKTQKTVLKDANQTIQDSKPDSCEMNPNTQMTGNQLNLKNMETPSTSNVSGRVLDNSFCSGQESSTKGMPAKSDSSCSMEVLAT

SEQ ID NO: 272505 - protein, 35 aa, Artificial Sequence
  derived and/or modified sequence
MNWNEKPKSATLPPLYPKSQPPFLHQSLINQITTT

SEQ ID NO: 272506 - DNA, 6228 bp, Artificial Sequence
  derived and/or modified sequence
gacttaaactctggggcccgggaggccgccggttttctccccgcttgccggggtggtcctcttccctttgtcggaccaaagaagtaaacactgtgtggagagggactgacgtgtttggagggaaatgggaatgtacacgataattaaagagtaaagttgtgctcaacgctgtttacttctaattatttcctgattcacaaattaatttttgcaattcacaacttcaagaatacttggactattggattcaatccatagtaatctgcaaaagaagagaagcagaattatacctagaagtctactaatggacagttagtcacccacctacatgttgagattcctgacattcagacaactgacttgtaactgacttataactgacttgtaatacactgctactatatcaaaccgacaatgaattggaatgaaaaaccaaagagtgctacattaccaccactgtatcctaaaagccagccaccttttttgcaccagtctttaataaaccaaattaccacaacatctcagagttctttcagctatcctggaagtaaccaagaagcatgcatgtatcccggtaattcaaatccaatttcacagccactgctgaatatccaaaattatcctcaacaaatttctgtttctgatatgcataatgggacagttgtggcctcacacacttcagtagaaagaataacatatgcaaatgttaatggacccaaacaactaactcacaatttgcagatgtcttcaggagttacccaaaacgtatggttgaactcaccaatgaggaatcctgtgcattctcatataggggcaactgtatctcatcaaactgattttggagctaacgtacccaatatgccggcactacagagtcaactgataacatcagatacctattctatgcaaatgcagatgatcccttctaattctacacgacttcctgtagcttaccaaggaaatcagggacttaaccagtctttttcagagcaacaggttgattggacacaacagtgtatatctaagggactgacttacccagattacagaccacctccaaagctataccgttactcaccacaaagctttttaccagattctaccattcaaaaacaaaactttataccacatacatcattgcaagttaaaaatagtcagcttctaaattctgtattaactttaccatcaaggcagacctcagctgtaccatcacagcagtatgccacgcaaactgacaaaagacctcctcctcctccttacaactgtagatatggaagccagcctttgcaaagtactcagcatattactaaacacttgtctatggaagttcctcagagtcgagaaatgctgtcatctgaaataaggaccagctttcaacagcagtggcaaaaccctaatgaaaatgtcagcacaattggaaatttcactaacttgaaagtaaataccaacagcaaacagccttttaacagtcccattagatcttctgtggatggtgttcagactcttgctcaaactaatgaagagaaaataatggattcttgcaatccaacttcaaatcaagtactggacacaagtgttgcaaaagaaaagctagtaagggatattaaaacattagtagagataaaacagaagttttcagaacttgcaaggaaaattaaaatcaataaagatcttttgatggcagcaggttgtattaaaatgactaatacttcttatagtgaaccagctcagaattctaaattgtctctaaaacaaactgccaaaatccagtctggaccccagataactccagtaatgccagagaatgcagagagacaaacaccaacagtagtggaatctgcagaaacaaataagactcaatgtatgttgaattctgacattcaggaagtcaattgcagaaggtttaaccaagttgattctgttttaccaaatcctgtctattctgaaaagcggccaatgccagactcatctcatgatgtgaaagttctcacttcaaagacatcagctgttgagatgacccaggcagtattgaatactcagctttcatcagaaaatgttaccaaagttgagcaaaattcaccagcagtttgtgaaacaatttctgttcccaagtccatgtccactgaggaatataaatcaaaaattcaaaatgaaaatatgctacttctcgctttgctttcacaggcacgtaagactcagaagacagtattaaaagatgctaatcaaactattcaggattctaaaccagacagttgtgaaatgaatccaaatacccaaatgactggtaaccaactgaatttgaagaacatggaaactccaagtacttctaatgtaagtggcagggttttggacaactccttttgcagtggacaagaatcctcaacaaaaggaatgcctgctaaaagtgacagtagctgttccatggaagtgctagcaacctgtctttccctgtggaaaaagcaaccttcagatactgcaaaagaaaaggagtgtgataaactcagaacaaacacaacagcagttggaatttcaaagcctgctaacatccacgttaagagtccttgttcagttgtgggaaattcaaattctcagaataaaataagtaatccctcacagcagacagctttgtcgatggtaatgcacaattatgagtcttcaggtataaatataacaaagggaacagaacttcagatagctgtagtgtcaccgttagttctgtcagaggtcaaaacattgtctgtcaaaggaataacacctgcagtgttacctgaaacagtgtatcccgttattaaagaaggcagtgtttgtagtttacaaaatcaattggcagaaaatgcaaaggcaactgctgctttgaaagttgatgttagtggaccagtagcaagtacagcaacatcaaccaagatttttccactaactcagaaggaaaagcagaatgagtcaactaatggtaattcagaagtcacacctaatgtcaatcaaggaaagcataacaaattagagtcagctatccattctcctatgaacgatcagcaaatctcacaggagtcaaggaatagtactgttgtgagtagtgatacattacagattgacaatatttgttctctggttgaaggtgatacctcttacaattcccaaatagcaaagatattcagctctcttcccttgaaaatggttgagccacagaaaccttctctacccaatcagcaagggattggcagcagagaaccagaaaaacaattagataataccactgaaaataaagactttggttttcaaaaagataaacctgtacagtgcacagatgtttcacataaaatatgtgatcagtcaaagtcagagccacccttagagtcatcttttaacaatcttgaaacaaacagagttattctagagaaaagtagtttggagcatgccactgaaaaaagcacagctaacgatacgtgctcgtcagctgctattcaggaggatatttaccctcaggaaatagatgcatccagcaactatactccccaagatcctgcaagaaatgaaatccacagtgataaggcacctgtcttatacctacatgaccagctgtcagaacttctaaaagagtttccttatggcattgaggctgtgaatacacgtgaaggttctgtgggccagcaaactacataccagacctcagaagatcaaactgctgataaaaccagttctgactccaaagacccagcagatcaaatacaaattacaatattaagctcagagcaaatgaaagaaatatttcctgaacaggatgatcaaccctatgtagtagacaagttggcagaacctcagaaagaagagcccatcacagaagtagttagccagtgtgacctgcaggcacctgcagctggacaaagtcgtgattctgtgatactggactctgagaaagatgatatccactgctgtgcattgggctggctctccatggtttacgaaggagtaccccagtgtcagtgtaattccatcaagaactcatcttcagaggaagagaaacaaaaagagcagtgttctcctttggataccaacagttgtaaacaaggagagagaacttctgatagagatgtcactgttgttcaatttaagagccttgtaaataatccaaagactcctccagatgggaaaagtcattttcctgaactacaagacgacagtagaaaagatacacccaaaacaaaacataaaagcttaccaaggacagaacaagaattagttgctggtcagttttcatctaaatgtgataaactaaatcccttgcaaaatcacaaaagaaaaaaattgaggtttcacgaggtaacctttcactccagtaataaaatgacagcatcttatgaacaagcttctcaggaaacccgacagaagaaacatgtaacacagaactcacgtccactaaaaacaaaaacagcttttttgccaaataaagatgtgtataagaagcatagttctttgggacagtcattatcaccagaaaagataaaattgaaactcaaatcagttagcttcaaacaaaaacgaaagttagaccaagggaacgtattagatatggaagtaaagaaaaagaaacatgataaacaagaacagaaaggaagtgtgggagctacattcaaattaggtgactctttgtcaaacccaaacgaaagagccattgttaaagaaaagatggtatcaaatactaagtctgtagacacgaaagcgagttcatctaaatttagtagaattctaactcctaaggagtatttacaaaggcagaagcataaagaagctctgagtaataaagcatcgaagaaaatctgtgtgaaaaacgtgccatgtgattctgaacatatgagaccaagtaaacttgccgtgcaggttgaaagttgtgggaaatcaaatgagaaacacagcagcggcgtgcagacctctaaagaatcattaaatggcttgacaagccatggtaaaaacctcaaaatccaccattctcaggagtctaaaacatacaacattctaaggaatgttaaagaaaaagttggtgggaagcagcctgataaaatatggattgataagactaaattagacaaattaaccaatataagcaacgaagctcaattcagccaaatgcctccccaagtaaaggatcaaaagaaattatatctgaatagagttgggtttaaatgcactgaacgtgaaagcatttctctcaccaaattagaaagttcacccaggaagcttcataaagataagagacaggaaaataaacataagacctttttaccggtgaaaggtaacacagaaaaatcaaacatgctggagtttaaattatgtccagatatcttactaaagaatacaaactctgtggaagaacggaaggatgtaaagcctcatcctaggaaggagcaagcccctctgcaagtttcaggaataaaaagtacaaaagaagactggttaaaatttgttgctacaaagaaaaggacacagaaagacagccaagagagagataatgttaattcaagactctcgaagagaagcttcagtgcagatggatttgagatgctacaaaacccagtaaaagattcaaaagaaatgtttcaaacctacaaacagatgtacctggagaagagaagcagaagccttggtagcagtcctgtaaaataattacaagatgtggttttgtaattgccactgggaaatttctttccttttctgttcaaaatatttcgctgaaactaatgagaaatgccatgataaagatttctcagagtttggttcccactttcattgtatttcattgaaagtgcttaattaaaatggcttgagaactttgggtagccatgtgtaagaaatggatggtattcaccggggaaacaaggtatttgaatttctactttattgaaccagatttaccattattttaaaaggaatgcttatacaaatcaatttgaaattctacccatcttgagggaggaccgttcctcagttaaggacttgtttatttaaatgggactgtaaatatgttttggtttctaagctatattagcaaaatttatttttcaaaaatgcccactgtgatgtgaatgtcaaaatatattcttaagtgttttataactaattgtaaactttttttcagaagtcttattttatacttgtgaaactgaacacaattttgggacaacgtttaaacattacttttcatacttgaaataaacatttattttttaaaaaact

SEQ ID NO: 272507 - DNA, 5244 bp, Artificial Sequence
  derived and/or modified sequence
atgaactggaacgagaagcccaagagcgccaccctgccccccctgtaccccaagagccagccccccttcctgcaccagagcctgatcaaccagatcaccaccaccagccagagcagcttcagctaccccggcagcaaccaggaggcctgcatgtaccccggcaacagcaaccccatcagccagcccctgctgaacatccagaactacccccagcagatcagcgtgagcgacatgcacaacggcaccgtggtggccagccacaccagcgtggagagaatcacctacgccaacgtgaacggccccaagcagctgacccacaacctgcagatgagcagcggcgtgacccagaacgtgtggctgaacagccccatgagaaaccccgtgcacagccacatcggcgccaccgtgagccaccagaccgacttcggcgccaacgtgcccaacatgcccgccctgcagagccagctgatcaccagcgacacctacagcatgcagatgcagatgatccccagcaacagcaccagactgcccgtggcctaccagggcaaccagggcctgaaccagagcttcagcgagcagcaggtggactggacccagcagtgcatcagcaagggcctgacctaccccgactacagacccccccccaagctgtacagatacagcccccagagcttcctgcccgacagcaccatccagaagcagaacttcatcccccacaccagcctgcaggtgaagaacagccagctgctgaacagcgtgctgaccctgcccagcagacagaccagcgccgtgcccagccagcagtacgccacccagaccgacaagagaccccccccccccccctacaactgcagatacggcagccagcccctgcagagcacccagcacatcaccaagcacctgagcatggaggtgccccagagcagagagatgctgagcagcgagatcagaaccagcttccagcagcagtggcagaaccccaacgagaacgtgagcaccatcggcaacttcaccaacctgaaggtgaacaccaacagcaagcagcccttcaacagccccatcagaagcagcgtggacggcgtgcagaccctggcccagaccaacgaggagaagatcatggacagctgcaaccccaccagcaaccaggtgctggacaccagcgtggccaaggagaagctggtgagagacatcaagaccctggtggagatcaagcagaagttcagcgagctggccagaaagatcaagatcaacaaggacctgctgatggccgccggctgcatcaagatgaccaacaccagctacagcgagcccgcccagaacagcaagctgagcctgaagcagaccgccaagatccagagcggcccccagatcacccccgtgatgcccgagaacgccgagagacagacccccaccgtggtggagagcgccgagaccaacaagacccagtgcatgctgaacagcgacatccaggaggtgaactgcagaagattcaaccaggtggacagcgtgctgcccaaccccgtgtacagcgagaagagacccatgcccgacagcagccacgacgtgaaggtgctgaccagcaagaccagcgccgtggagatgacccaggccgtgctgaacacccagctgagcagcgagaacgtgaccaaggtggagcagaacagccccgccgtgtgcgagaccatcagcgtgcccaagagcatgagcaccgaggagtacaagagcaagatccagaacgagaacatgctgctgctggccctgctgagccaggccagaaagacccagaagaccgtgctgaaggacgccaaccagaccatccaggacagcaagcccgacagctgcgagatgaaccccaacacccagatgaccggcaaccagctgaacctgaagaacatggagacccccagcaccagcaacgtgagcggcagagtgctggacaacagcttctgcagcggccaggagagcagcaccaagggcatgcccgccaagagcgacagcagctgcagcatggaggtgctggccacctgcctgagcctgtggaagaagcagcccagcgacaccgccaaggagaaggagtgcgacaagctgagaaccaacaccaccgccgtgggcatcagcaagcccgccaacatccacgtgaagagcccctgcagcgtggtgggcaacagcaacagccagaacaagatcagcaaccccagccagcagaccgccctgagcatggtgatgcacaactacgagagcagcggcatcaacatcaccaagggcaccgagctgcagatcgccgtggtgagccccctggtgctgagcgaggtgaagaccctgagcgtgaagggcatcacccccgccgtgctgcccgagaccgtgtaccccgtgatcaaggagggcagcgtgtgcagcctgcagaaccagctggccgagaacgccaaggccaccgccgccctgaaggtggacgtgagcggccccgtggccagcaccgccaccagcaccaagatcttccccctgacccagaaggagaagcagaacgagagcaccaacggcaacagcgaggtgacccccaacgtgaaccagggcaagcacaacaagctggagagcgccatccacagccccatgaacgaccagcagatcagccaggagagcagaaacagcaccgtggtgagcagcgacaccctgcagatcgacaacatctgcagcctggtggagggcgacaccagctacaacagccagatcgccaagatcttcagcagcctgcccctgaagatggtggagccccagaagcccagcctgcccaaccagcagggcatcggcagcagagagcccgagaagcagctggacaacaccaccgagaacaaggacttcggcttccagaaggacaagcccgtgcagtgcaccgacgtgagccacaagatctgcgaccagagcaagagcgagccccccctggagagcagcttcaacaacctggagaccaacagagtgatcctggagaagagcagcctggagcacgccaccgagaagagcaccgccaacgacacctgcagcagcgccgccatccaggaggacatctacccccaggagatcgacgccagcagcaactacaccccccaggaccccgccagaaacgagatccacagcgacaaggcccccgtgctgtacctgcacgaccagctgagcgagctgctgaaggagttcccctacggcatcgaggccgtgaacaccagagagggcagcgtgggccagcagaccacctaccagaccagcgaggaccagaccgccgacaagaccagcagcgacagcaaggaccccgccgaccagatccagatcaccatcctgagcagcgagcagatgaaggagatcttccccgagcaggacgaccagccctacgtggtggacaagctggccgagccccagaaggaggagcccatcaccgaggtggtgagccagtgcgacctgcaggcccccgccgccggccagagcagagacagcgtgatcctggacagcgagaaggacgacatccactgctgcgccctgggctggctgagcatggtgtacgagggcgtgccccagtgccagtgcaacagcatcaagaacagcagcagcgaggaggagaagcagaaggagcagtgcagccccctggacaccaacagctgcaagcagggcgagagaaccagcgacagagacgtgaccgtggtgcagttcaagagcctggtgaacaaccccaagaccccccccgacggcaagagccacttccccgagctgcaggacgacagcagaaaggacacccccaagaccaagcacaagagcctgcccagaaccgagcaggagctggtggccggccagttcagcagcaagtgcgacaagctgaaccccctgcagaaccacaagagaaagaagctgagattccacgaggtgaccttccacagcagcaacaagatgaccgccagctacgagcaggccagccaggagaccagacagaagaagcacgtgacccagaacagcagacccctgaagaccaagaccgccttcctgcccaacaaggacgtgtacaagaagcacagcagcctgggccagagcctgagccccgagaagatcaagctgaagctgaagagcgtgagcttcaagcagaagagaaagctggaccagggcaacgtgctggacatggaggtgaagaagaagaagcacgacaagcaggagcagaagggcagcgtgggcgccaccttcaagctgggcgacagcctgagcaaccccaacgagagagccatcgtgaaggagaagatggtgagcaacaccaagagcgtggacaccaaggccagcagcagcaagttcagcagaatcctgacccccaaggagtacctgcagagacagaagcacaaggaggccctgagcaacaaggccagcaagaagatctgcgtgaagaacgtgccctgcgacagcgagcacatgagacccagcaagctggccgtgcaggtggagagctgcggcaagagcaacgagaagcacagcagcggcgtgcagaccagcaaggagagcctgaacggcctgaccagccacggcaagaacctgaagatccaccacagccaggagagcaagacctacaacatcctgagaaacgtgaaggagaaggtgggcggcaagcagcccgacaagatctggatcgacaagaccaagctggacaagctgaccaacatcagcaacgaggcccagttcagccagatgcccccccaggtgaaggaccagaagaagctgtacctgaacagagtgggcttcaagtgcaccgagagagagagcatcagcctgaccaagctggagagcagccccagaaagctgcacaaggacaagagacaggagaacaagcacaagaccttcctgcccgtgaagggcaacaccgagaagagcaacatgctggagttcaagctgtgccccgacatcctgctgaagaacaccaacagcgtggaggagagaaaggacgtgaagccccaccccagaaaggagcaggcccccctgcaggtgagcggcatcaagagcaccaaggaggactggctgaagttcgtggccaccaagaagagaacccagaaggacagccaggagagagacaacgtgaacagcagactgagcaagagaagcttcagcgccgacggcttcgagatgctgcagaaccccgtgaaggacagcaaggagatgttccagacctacaagcagatgtacctggagaagagaagcagaagcctgggcagcagccccgtgaagtag

SEQ ID NO: 272508 - DNA, 108 bp, Artificial Sequence
  derived and/or modified sequence
atgaactggaacgagaagcccaagagcgccaccctgccccccctgtaccccaagagccagccccccttcctgcaccagagcctgatcaaccagatcaccaccacctag

SEQ ID NO: 272509 - DNA, 5244 bp, Artificial Sequence
  derived and/or modified sequence
atgaactggaacgagaagcctaaatcagccaccttacccccattatatcccaagagccagccaccctttcttcaccagagcctcattaaccagatcacgacgacaagccagtctagcttctcataccctggctctaatcaggaggcgtgcatgtatcccggaaactctaatcctatctcccagcctctgctcaatatccagaattacccccaacagatctctgtttcggacatgcacaatggcaccgttgtcgcttctcatacatcagtggaacgcatcacctacgctaatgtgaacggaccgaagcaactgacacataacctgcagatgtctagtggcgtgacccagaacgtctggctgaacagccctatgaggaatcccgttcattctcatatcggggccacggtctcccaccagaccgactttggcgcgaacgtgccgaacatgcccgccctgcagtctcagctgatcacctccgatacttactccatgcagatgcaaatgattcccagtaacagtacaaggttgccggttgcctaccaaggaaatcagggcctgaatcagagcttttcagagcagcaggtagattggacccaacagtgcattagtaaaggcctcacataccctgattatcgacccccacccaaactgtaccggtattcaccacaatcatttttgccggattcaacaatccagaagcaaaacttcatcccccataccagcctgcaggtcaagaactcacagttgcttaactctgtattgacccttccatcaaggcagacctcagctgtaccctcacagcaatacgctacccagaccgacaagaggccccctccccctccctataattgtcggtacgggagtcagcccctccagagtacacagcatatcaccaagcatctctccatggaggtcccccaaagccgcgaaatgctgtcaagcgaaattaggacaagttttcagcagcaatggcagaaccctaacgagaacgtcagtaccatcggcaatttcaccaacctgaaggtgaacactaattctaaacaaccattcaactcacccattaggtcaagcgttgacggagtgcaaaccctggcccaaaccaacgaggagaagattatggatagctgcaacccgacatcaaaccaggtgttggacacgagtgtcgctaaggaaaagctggttagagacatcaaaacgctcgtggagattaagcagaagttttcagagctggcacgtaagatcaagatcaacaaggatctgctgatggctgctgggtgcatcaagatgacaaacaccagctatagcgagcccgcgcagaattccaagttgtccctgaaacagacagcaaaaattcagtcaggaccacagatcactccagtgatgcccgaaaatgcggagagacagactccaacggtagtggagtcagccgaaactaacaagacacagtgcatgcttaattcagacatacaagaggtgaactgcaggcgtttcaaccaggtggacagcgtcctgccgaatcccgtatattccgagaagcgtcctatgcctgattctagtcacgacgtgaaagtgctcacctccaaaacatctgctgtagagatgacccaggccgtcctgaacacccagctttcatctgagaacgtcactaaggtggaacagaactccccggccgtgtgtgaaactatatccgtgccaaagtccatgtcaaccgaggaatacaagagtaaaatccaaaacgagaacatgctgcttctggcactgttgtcacaggcgcgcaagacacagaaaacagtgctgaaagacgctaaccagacaattcaagattcaaagccagatagctgtgaaatgaacccgaacacccagatgacagggaatcagctgaacctcaagaacatggagaccccttccactagtaatgtgtccggacgcgttctggataattctttctgcagtggacaggaatctagcacaaaagggatgcccgcaaagtcagacagctcgtgtagtatggaggtcctggccacatgcctttctctgtggaaaaaacagccctccgataccgccaaggagaaagagtgcgataagttgcggacgaatacaactgccgtgggtatcagcaaaccagccaacattcacgtcaaaagtccatgctccgtcgtaggcaattcaaatagccagaataagatctctaatcccagccagcagaccgcgctgagcatggtgatgcacaattacgaaagtagtggtatcaacatcaccaaaggaactgaactgcagattgccgtggtctctcccttggtattgtctgaagtaaaaaccctgagcgtgaagggcattacacctgcagtcctgccagaaaccgtgtacccggttattaaggaaggctccgtttgcagcctgcagaatcagctggctgagaatgctaaggccacggcagccctgaaggtcgacgttagcggcccggtagccagcaccgcgacaagtaccaaaatcttccctctgacccaaaaggaaaaacagaatgaatcaactaacgggaattctgaagtcacccccaatgtgaaccagggaaaacacaataaactcgaaagcgcaattcattcacctatgaacgaccagcagatctcgcaggagtcccggaactccactgttgttagtagtgatacactacagatcgacaacatttgtagcctggtcgagggagacacaagttataactcccagatcgctaagatttttagcagcctgccattaaaaatggtggagccacaaaagccatctctgcctaaccagcagggcatcggatcgcgcgagccagagaagcagttagacaacacaacagaaaataaagactttggcttccagaaggacaaaccagtgcaatgtactgacgtctcacacaagatctgtgaccagtcaaagtcggagcctccactcgagtcctccttcaacaatctcgaaactaaccgcgtcatcctcgagaagagcagtctggagcacgccactgagaagtccaccgccaacgacacatgctcctcagctgcgattcaggaggatatttacccccaggagatcgatgccagctcaaattacaccccacaagaccccgcgagaaatgaaattcacagtgataaggcaccagtgttgtatcttcatgatcagctctctgagctcctgaaggagtttccgtacggcatcgaggcagtcaacacccgggagggatccgttggacagcaaaccacttaccagaccagcgaggaccaaactgcggataagacgagcagtgacagtaaggaccctgcagatcagatccagataactattctgtcaagcgaacagatgaaggagattttcccagaacaggacgatcagccgtatgtggtggataagttagcagagccccagaaagaagagcctatcactgaggtggtctcccagtgtgacttgcaagctccagccgccggccagagccgcgactcggtaattctggactccgaaaaggatgacatccactgttgtgccctggggtggctttccatggtgtatgaaggggtacctcaatgccagtgcaactccatcaaaaacagctcgtccgaagaggagaagcaaaaggaacagtgtagccctctggatactaacagctgcaagcagggcgagagaacaagtgatcgcgatgtcactgtcgtacaatttaagtcattagtcaacaatcccaaaacaccaccagatggtaaatctcattttcctgagctgcaggacgactcaagaaaggacacaccaaaaaccaagcacaagtctctgcctcgcaccgaacaggaattggtcgccggtcaattttccagcaagtgcgataaacttaacccactgcagaatcacaaacgtaagaaactacgcttccatgaggtaactttccactcatccaataagatgaccgcctcttatgaacaggcctctcaagagaccagacagaagaagcatgtaacgcagaacagccgcccactgaaaactaaaaccgccttcttgcctaacaaagatgtgtacaaaaaacactccagcctcggacagagtctatcaccagagaaaattaaactaaagcttaagtcggtatccttcaaacaaaaacggaagctggatcagggaaatgtcctggacatggaggtaaaaaagaaaaaacacgacaagcaagagcagaaaggctccgtgggcgctacgtttaaattgggggactctctgtccaaccctaatgagagagcgatcgtcaaagagaagatggtatccaacactaagagcgtcgatactaaggccagttcctccaaattcagccgtatacttaccccaaaggagtacctccagagacagaaacataaagaagctcttagcaacaaggcttctaaaaagatttgcgtcaagaatgtgccttgcgatagcgagcacatgaggccaagtaagctagccgttcaggtggagtcttgtgggaaatcgaacgaaaaacatagttccggcgtccagacaagcaaggagagcttgaatgggctgacaagccacggaaaaaacttgaaaattcatcattctcaagagtctaagacgtataacattctgcgcaacgtcaaggaaaaggtcggtggtaaacagcccgataagatctggatcgacaagacgaaactggataaactgacaaacatatccaatgaggcccagttctcacaaatgcccccccaggtaaaagaccagaaaaagctttacttgaatcgcgtcgggtttaaatgtacagagcgagagtccatttccctcacaaaattggagtccagtcccagaaaactgcacaaagataagaggcaagaaaataaacacaaaaccttcctgcccgtgaagggaaatacggaaaaaagcaatatgctcgagttcaagctctgccctgacattctgcttaaaaacaccaacagcgtcgaagaacgaaaggatgtaaagccccaccccagaaaggagcaggcccctctgcaggtctctggcattaagtcaacgaaggaggattggttgaaatttgttgcaactaaaaaaaggacacaaaaggactctcaagaaagggacaatgttaatagccgtcttagtaagaggtccttcagcgccgatggctttgaaatgctgcagaaccctgtgaaagacagtaaggagatgtttcagacatataagcaaatgtatctcgagaagcggtctaggtcacttggatctagcccagtaaagtag

SEQ ID NO: 272510 - DNA, 108 bp, Artificial Sequence
  derived and/or modified sequence
atgaactggaacgaaaaacctaagtccgccaccctgccccctctctaccccaaatcccaacccccctttcttcaccagtctctaatcaatcagatcactactacctag

SEQ ID NO: 272511 - DNA, 5244 bp, Artificial Sequence
  derived and/or modified sequence
atgaactggaatgagaagcccaagagcgccaccctgccccccctgtaccccaagagccagccccccttcctgcaccagagcctcatcaaccagatcaccaccaccagccagagcagcttctcctacccaggcagcaaccaggaggcctgcatgtacccaggcaacagcaaccccatcagccagcccctgctgaacatccagaactacccccagcagatctctgtgtctgacatgcacaacggcaccgtggtggccagccacacctctgtggagcgcatcacctacgccaacgtgaatggccccaagcagctgacccacaacctgcagatgagcagcggcgtgacccagaatgtgtggctgaacagccccatgagaaatcctgtgcacagccacatcggggccaccgtgagccaccagacagactttggagccaacgtgcccaacatgcctgccctgcagagccagctgatcaccagtgacacctacagcatgcagatgcagatgatccccagcaacagcacccggctgcctgtggcctaccagggcaaccagggcctgaaccagagcttcagcgagcagcaggtggactggacccagcagtgcatcagcaagggcctgacctacccagactacagacctccacccaagctgtaccgctacagcccccagagcttcctgcctgacagcaccatccagaagcagaacttcatcccccacaccagcctgcaggtgaagaacagccagctgctgaacagcgtgctgaccctgcccagccggcagaccagcgctgtgcccagccagcagtatgccacccagacagacaagaggcctcctcctccaccctacaactgccgctatggcagccagcccctgcagagcacccagcacatcaccaagcacctgtccatggaggtgccccagagccgggagatgctgagcagcgagatccgcaccagcttccagcagcagtggcagaaccccaatgaaaatgtgtccaccatcggcaacttcaccaacctgaaggtgaacaccaacagcaagcagcccttcaacagccccatccgcagctctgtggatggagtgcagaccctggcccagaccaatgaggagaagatcatggacagctgcaaccccaccagcaaccaggtgctggacacctctgtggccaaggagaagctggtgcgggacatcaagaccctggtggagatcaagcagaagttcagcgagctggccaggaagatcaagatcaacaaggacctgctgatggccgccggctgcatcaagatgaccaacaccagctacagcgagcccgcccagaacagcaagctgagcctgaagcagacagccaagatccagagcggcccccagatcacccctgtgatgccagaaaatgctgagcggcagacccccaccgtggtggagagcgctgagaccaacaagacccagtgcatgctgaacagcgacatccaggaggtgaactgccgccgcttcaaccaggtggacagcgtgctgcccaaccctgtgtacagcgagaagaggcccatgccagacagcagccatgatgtgaaggtgctgaccagcaagaccagcgctgtggagatgacccaggccgtgctgaacacccagctgagcagtgaaaatgtgaccaaggtggagcagaacagccctgctgtgtgtgagaccatctctgtgcccaagtccatgagcacagaggagtacaagagcaagatccagaatgaaaacatgctgctgctggccctgctgagccaggccaggaagacccagaagacagtgctgaaggatgccaaccagaccatccaggacagcaagccagacagctgtgagatgaaccccaacacccagatgactggaaaccagctgaacctgaagaacatggagacccccagcaccagcaatgtgtctggccgggtgctggacaacagcttctgcagcggccaggagagcagcaccaagggcatgcctgccaagagtgacagcagctgcagcatggaggtgctggccacctgcctgagcctgtggaagaagcagcccagcgacacagccaaggagaaggaatgtgacaagctgcggaccaacaccacagctgtgggcatcagcaagccagccaacatccacgtgaagagcccctgcagcgtggtgggcaacagcaacagccagaacaagatcagcaaccccagccagcagacagccctgtccatggtgatgcacaactatgagagcagcggcatcaacatcaccaagggcacagagctgcagattgctgtggtgagccccctggtgctgtctgaggtgaagaccctgtctgtgaagggcatcaccccagctgtgctgcctgagaccgtgtaccctgtgatcaaggagggctctgtgtgcagcctgcagaaccagctggccgagaatgccaaggccacagctgccctgaaggtggatgtgtctggccctgtggccagcacagccaccagcaccaagatcttccccctgacccagaaggagaagcagaatgaaagcaccaatggaaacagcgaggtgaccccaaatgtgaaccagggcaagcacaacaagctggagagcgccatccacagccccatgaatgaccagcagatcagccaggagagcaggaacagcacagtggtgtccagtgacaccctgcagattgacaacatctgcagcctggtggagggggacaccagctacaacagccagatcgccaagatcttcagcagcctgcccctgaagatggtggagccccagaagcccagcctgcccaaccagcagggcatcggcagccgggagcctgagaagcagctggacaacaccacagagaacaaggactttggcttccagaaggacaagcctgtgcagtgcacagatgtgagccacaagatctgtgaccagagcaagtctgagccccccctggagagcagcttcaacaacctggagaccaacagagtcatcctggagaagagcagcctggagcacgccacagagaagagcacagccaatgacacctgcagcagcgctgccatccaggaggacatctacccccaggagattgatgccagcagcaactacaccccccaggaccctgccagaaatgagatccacagcgacaaggcccctgtgctgtacctgcatgaccagctgtctgagctgctgaaggagttcccctacggcatcgaggccgtgaacacccgggagggctctgtgggccagcagaccacctaccagaccagcgaggaccagacagctgacaagaccagcagtgacagcaaggaccctgctgaccagatccagatcaccatcctgagcagcgagcagatgaaggagatcttccctgagcaggatgaccagccctacgtggtggacaagctggccgagccccagaaggaggagcccatcacagaggtggtgtcccagtgtgacctgcaggccccagctgctggccagagccgggacagcgtcatcctggacagcgagaaggatgacatccactgctgtgccctgggctggctgtccatggtgtatgagggcgtgccccagtgccagtgcaacagcatcaagaacagcagcagcgaggaggagaagcagaaggagcagtgcagccccctggacaccaacagctgcaagcagggcgagaggaccagtgacagagatgtgacagtggtgcagttcaagagcctggtgaacaaccccaagaccccaccagatggcaagagccacttccctgagctgcaggatgacagcaggaaggacacccccaagaccaagcacaagagcctgcccaggacagagcaggagctggtggccggccagttcagcagcaaatgtgacaagctgaaccccctgcagaaccacaagaggaagaagctgcgcttccacgaggtgaccttccacagcagcaacaagatgacagccagctatgagcaggccagccaggagacccggcagaagaagcacgtgacccagaacagccggcccctgaagaccaagacagccttcctgcccaacaaggatgtgtacaagaagcacagcagcctgggccagagcctgagccctgagaagatcaagctgaagctgaagtctgtgtccttcaagcagaagaggaagctggaccagggcaatgtgctggacatggaggtgaagaagaagaagcatgacaagcaggagcagaagggctctgtgggcgccaccttcaagctgggggacagcctgagcaaccccaatgaaagagccatcgtgaaggagaagatggtgagcaacaccaagtctgtggacaccaaggccagcagcagcaagttcagccgcatcctgacccccaaggagtacctgcagaggcagaagcacaaggaggccctgagcaacaaggccagcaagaagatctgtgtgaagaatgtgccctgtgacagcgagcacatgaggcccagcaagctggccgtgcaggtggagagctgtgggaagagcaatgagaagcacagcagcggcgtgcagaccagcaaggagagcctgaatggcctgaccagccacggcaagaacctgaagatccaccacagccaggagagcaagacctacaacatcctgagaaatgtgaaggagaaggtgggcggcaagcagcctgacaagatctggattgacaagaccaagctggacaagctgaccaacatcagcaatgaggcccagttcagccagatgccaccccaggtgaaggaccagaagaagctgtacctgaacagagtgggcttcaagtgcacagagcgggagagcatcagcctgaccaagctggagagcagccccaggaagctgcacaaggacaagaggcaggagaacaagcacaagaccttcctgcctgtgaagggcaacacagagaagagcaacatgctggagttcaagctgtgcccagacatcctgctgaagaacaccaacagcgtggaggagaggaaggatgtgaagccccaccccaggaaggagcaggcccccctgcaggtgtctggcatcaagagcaccaaggaggactggctgaagtttgtggccaccaagaagaggacccagaaggacagccaggagcgggacaacgtgaacagccggctgagcaagaggagcttcagcgcagatggctttgagatgctgcagaaccctgtgaaggacagcaaggagatgttccagacctacaagcagatgtacctggagaagaggagccgcagcctgggcagcagccctgtgaagtag

SEQ ID NO: 272512 - DNA, 108 bp, Artificial Sequence
  derived and/or modified sequence
atgaactggaatgagaagcccaagagcgccaccctgccccccctgtaccccaagagccagccccccttcctgcaccagagcctcatcaaccagatcaccaccacctag

SEQ ID NO: 272513 - DNA, 5244 bp, Artificial Sequence
  derived and/or modified sequence
atgaactggaacgagaagcccaagagcgccaccctgccccccctgtacccgaaaagccagcctcctttccttcatcagtcgttgataaatcagataaccactacctcccagtcaagcttcagctaccccggcagcaaccaggaggcctgcatgtatccaggaaattctaatcccatctcccagccactcttaaacattcagaattaccctcagcaaatttcggtctccgatatgcataatgggacggttgtggcgagccacactagcgtcgagcggatcacctacgccaacgtgaacggacctaagcagttgactcataacctgcagatgtcctccggtgtgacgcaaaacgtatggttaaacagccctatgagaaatccagtacactcccacatcggagccacagtgagtcaccagacggatttcggggccaatgtgccaaatatgcctgccttacagtctcaactaattacaagtgatacttattctatgcagatgcaaatgatcccatccaattccactcgcctcccagtagcatatcaggggaatcagggcctcaatcaatccttttcggagcagcaggtggattggacccagcagtgtatctccaaaggtctcacctaccccgactatcggccaccccctaagttgtacagatactcccctcaatcctttttacccgactccaccatccaaaagcagaatttcatcccgcacacaagcttacaggttaagaactcccagctcctcaacagtgtactgaccttaccatcacggcagacctctgcagtgccatctcagcagtatgccacacagacagataagaggccccccccccctccgtacaactgcagatatggatcccaaccgctacagagcacccagcatataactaaacatctgtccatggaggtgccccagtctcgagagatgctgagcagcgagatcagaacctccttccaacagcagtggcaaaatccgaacgaaaacgttagcacaatcgggaactttacaaatctcaaagtgaataccaatagcaagcagcctttcaacagcccaattagatcttccgtagatggcgtgcaaacactggcccagactaacgaggagaagatcatggatagctgcaaccctacatccaaccaggttctggacacatctgtggctaaggagaagctggttcgggacattaaaacgctcgtcgagattaagcaaaaattctctgaactcgctcggaagattaaaatcaacaaggacctgctgatggcggcgggatgcatcaaaatgactaatacctcgtatagcgagcccgcccagaactctaaattgtccctcaaacaaactgctaaaatacagagtggtccccagataacaccagttatgcccgagaacgctgagcgccaaacccccaccgttgttgagagtgccgagactaataaaacacaatgcatgctcaattccgacatccaggaggttaactgtcgacgctttaaccaggtagacagcgtgcttcctaaccccgtatactcggagaaacgcccaatgcctgactctagccacgacgtaaaggtcctcacttctaaaacctcagccgtggagatgacccaagcagtcttgaacacgcaactcagctccgagaacgtaactaaggttgagcagaactctcctgccgtctgcgagactatatccgttccaaagtccatgagtacagaggagtataagtccaagatccaaaatgaaaacatgcttctgttggctctcctgtcgcaggctcgtaagactcagaaaactgtactgaaggatgccaatcagacaatacaggatagcaaaccagacagttgtgagatgaaccctaatacgcagatgacaggcaaccaactgaacctgaagaacatggaaacaccaagcacgagtaatgtaagtggtagggttttggataactcattttgttcggggcaggagtcctcgaccaaaggaatgcccgcaaagtcagatagctcatgctccatggaggttctggccacttgcctcagcttgtggaagaagcaacccagcgatacagccaaagaaaaggaatgtgataaactcaggactaatacaaccgccgtaggcatatctaaaccagctaatatccatgtgaagtctccgtgtagcgtagtgggcaacagtaacagtcagaataaaatctcaaatccttctcagcaaacagctctgtcaatggtaatgcacaactacgaatcaagcggaatcaacataacaaagggcacagagctgcaaatcgcggtagtatcccctctcgtcctcagcgaggtgaaaacgttgagcgtgaaaggaatcacaccagctgtcctaccagagaccgtatatccagtgattaaagagggctcagtatgtagtctccagaatcagctcgctgaaaatgctaaagcaaccgcagctctgaaggtcgacgtgtctggacctgtcgcttcaaccgccacttcaaccaagatattccccctgacccaaaaagagaagcaaaatgagagcacaaacggtaactctgaagtcacccctaatgtgaatcagggcaaacacaacaagttagagtccgccattcacagccccatgaatgaccagcagatctcccaggaaagtaggaattccacagtggttagttcagatacactgcagatagataacatctgctccctggtggagggcgacacatcttataattctcaaattgcaaaaatcttttccagcttgccactcaaaatggtagagccccagaagccctccctgccaaatcagcaggggattgggagccgagaacccgaaaagcaattggacaacaccacggagaataaggatttcggatttcagaaggataaacctgtccagtgtactgatgtctctcataaaatctgtgatcagtcaaaaagcgaaccccccctggaatcctcattcaacaatctggagactaacagggttatcctcgaaaagtcctctctggagcatgcaacggaaaaaagcaccgctaatgacacttgcagttcggcagcaatccaggaagacatatacccacaagaaatcgacgcctcttccaattacactccacaagaccctgcgcgaaatgagattcacagcgataaggcaccagtcttgtacctccacgatcagttgagcgagctgctcaaggaattcccatatggaatcgaagcagtgaacacaagagaggggagcgttggccaacagaccacctaccaaactagtgaggaccagactgctgataagacaagctcagactcaaaagaccctgccgaccagatacagataaccatactcagctctgagcagatgaaagagatatttcccgagcaagatgaccaaccttacgtagtggataaactcgccgagccccagaaggaggaacccataacagaggtcgttagtcaatgtgacttgcaggcgcctgctgccggacagagccgagattcagtgattctggattccgagaaagatgatattcattgttgtgcactaggatggctgagtatggtgtacgaaggcgtaccacagtgccagtgcaactcgatcaagaacagtagctctgaagaggagaaacaaaaagaacagtgctctcccttggacaccaactcctgtaaacaaggggaaagaacatccgacagagacgtgactgtagtgcagtttaaatcacttgttaacaatcctaagacaccacctgatggaaagtcacactttcccgaactgcaggatgactcacgcaaagacactcctaagactaaacacaaatcacttcctcgaacagagcaagaactcgtggccggacagttctcctccaaatgcgataagcttaacccactgcagaaccacaagcgaaagaaattacgctttcatgaagtgacattccacagcagtaacaagatgacagcctcttacgagcaagcctcccaggagactaggcagaagaaacatgtaacccaaaatagccggccgctgaaaacaaaaacggccttcctaccaaataaggatgtctacaagaagcacagtagtctgggccagtctttaagtccagaaaagattaagttaaaattgaagtctgtttcattcaaacagaaacgaaagctggatcaggggaacgtactggacatggaggtcaaaaagaaaaaacacgacaagcaagaacagaagggctccgttggcgccacgttcaaattgggcgatagcctgagtaatcccaacgagcgagctatagtgaaagaaaagatggtctctaacaccaaaagtgtcgacacgaaagccagctccagcaagttcagtagaatcctgaccccaaaagaatacttacagagacagaagcataaggaagccctctcaaataaagcaagcaaaaagatctgcgtcaagaatgtcccctgcgacagtgagcatatgaggccaagcaagctggctgtgcaggtggaatcttgtggaaaaagcaatgaaaaacactcctccggcgtacagactagtaaggaatctttaaacgggcttacaagccacgggaagaatcttaaaatacatcattcgcaagagagcaagacatataacatcctcaggaacgtcaaagagaaggtgggaggcaagcagcccgacaagatttggatcgacaagaccaagttggataaattgacgaatattagtaatgaagcgcagttctcgcaaatgccaccccaggtaaaggatcagaagaagctgtatttaaaccgggtcggcttcaagtgcacagagagagagtcaatctctctaaccaagctggaaagcagtccgcgaaagctgcataaagataagcggcaggaaaacaaacacaaaaccttcctgccagtcaaaggcaataccgagaagtccaacatgctggaatttaagttgtgcccagatattctcctcaaaaacacaaattctgtggaagagcggaaggacgtgaagcctcaccctcggaaagagcaagcacctcttcaggtatcaggcatcaagtccactaaggaggactggctgaaattcgtggcaaccaagaagcggacacagaaagactctcaggaacgcgataacgtcaacagtcgtctctccaaacgctcgttctcagccgatgggttcgagatgttacagaatccggtgaaagatagcaaagagatgtttcagacctacaagcagatgtacctggaaaaacggagtcggagcctggggagcagtcctgttaagtag

SEQ ID NO: 272514 - DNA, 108 bp, Artificial Sequence
  derived and/or modified sequence
atgaactggaacgagaagcccaagagcgccaccctgccccccctgtatcccaagtctcaaccccctttcctccaccaatctctgattaaccaaatcaccacaacctag

SEQ ID NO: 272515 - DNA, 5244 bp, Artificial Sequence
  derived and/or modified sequence
atgaattggaatgagaaaccaaaatctgccaccctcccccctttgtatcccaagtctcagcccccatttctccaccagtcattaattaatcagatcacgacgacatcacagagctctttctcatacccgggtagcaaccaagaggcatgcatgtaccctggcaacagcaatcccatttcccagcctctactgaatatacaaaattatccccagcagatttctgtctctgacatgcataacggaaccgtggttgcatcccatacaagtgtggaaagaattacctatgcgaatgtgaatggccctaaacagttaactcataaccttcagatgtcatctggcgttacacagaatgtgtggctcaacagcccgatgcgcaatccagtgcattcacacatcggtgccaccgtttctcatcaaaccgacttcggcgctaacgtgccgaacatgcctgcactccagagccagctcatcacgagtgacacttactccatgcaaatgcagatgatcccttcaaactccactagacttccagtcgcataccaggggaatcagggattgaatcagtctttctctgagcaacaggtggattggacccagcaatgcatatctaagggactgacttaccctgactaccggccacctcccaaactttatagatatagtccacagtcatttctgcctgactcaaccatccagaagcagaacttcatcccacatacgtcgctgcaggtgaaaaacagccagctattgaactccgtcctcacgcttccttctcggcagacatctgcagtgccaagtcaacagtatgctacccagactgataagcgacctcctccacctccctacaattgtcggtatgggagtcagccactacagtctactcagcatatcaccaagcatctatctatggaagtgccacagtcccgggagatgttgtcatccgagatccgcacatccttccaacagcagtggcaaaacccgaatgaaaacgtgtcaaccatcgggaatttcactaacctcaaagtcaacactaatagcaagcagcccttcaacagcccaattagatcaagcgtagacggagtgcagacactggcgcaaaccaacgaggagaagattatggattcgtgtaatccaacttcaaatcaagtgctggacacctcagtggctaaggaaaagcttgttagagatatcaagacgctcgtagaaatcaagcagaagttctccgaactggccaggaagatcaaaataaacaaggatctacttatggccgcaggctgtatcaagatgacgaatacgagctacagcgagcctgctcaaaacagcaagttatcactgaagcagactgccaagatacagtcgggccctcagatcacgccagtgatgcccgaaaacgcggaaagacagacccccacagtcgtagagtcagccgagacaaataaaactcaatgcatgttgaattctgatatccaggaggtaaattgtaggagatttaaccaggttgatagcgtgttgcctaatcccgtatacagcgagaagcgtcctatgcccgacagttcccacgatgttaaggtgctcacttccaaaacctctgctgtcgaaatgacccaagccgtcctgaatacacagctttcttcagagaatgtaaccaaggtcgaacagaatagtcccgctgtgtgtgaaacgatttctgtgcccaagtctatgtcaacggaagagtataaaagtaagatccagaatgagaatatgctcttgttggctctactgagccaggccaggaaaacacagaagacagtgcttaaggatgcaaaccagaccattcaggactccaagcctgactcatgtgaaatgaacccaaacacacagatgactggaaaccagctgaacctgaaaaacatggaaactcccagcacctctaatgtgagcggacgcgtactggataatagtttttgttcagggcaagagtccagtactaaaggaatgcccgcaaaatctgatagttcttgtagcatggaagtcctggctacatgcctaagcctctggaagaagcagccgagtgataccgccaaggagaaagaatgcgataaactccgaacaaataccacagccgttgggatctccaagcctgcaaacatacatgtcaaatccccttgttccgtcgtcggtaattcaaactctcagaacaagatctctaatccttcccagcagacggcgctctcaatggtgatgcacaattatgaatccagcggcatcaacattactaagggcaccgaattgcaaatcgctgtggtctcgcccttggtgcttagcgaggtgaaaacgctatccgtaaagggcatcacccccgcagtgctgcccgagactgtctaccctgtcataaaagaagggtcagtgtgtagcctacagaatcagctggccgagaacgccaaagccaccgccgcactgaaagtcgacgtaagcggacccgttgccagcactgcaacaagtaccaaaatttttcccctcacccagaaagaaaaacaaaatgaaagcaccaacggcaactcggaggtcacccctaacgtgaaccaagggaaacacaacaagctggagagtgctatccacagtcccatgaatgaccagcagatctcacaggagagccgcaactccaccgtggtgtcaagtgatactctgcagattgataatatttgttccctcgtagagggagacactagctacaattcccagatagcgaagatctttagcagtctgcccctgaagatggtggaaccccagaaaccaagtctccctaatcaacagggtattgggtcaagggagcccgaaaaacagctcgacaacactaccgaaaacaaggattttggtttccagaaggataagcctgttcagtgcaccgacgtctctcataagatctgcgatcagtccaagtcagagcccccattggagtcgtcctttaataatttagagacaaatagggtcattctggaaaaatcatccctcgagcacgctacagaaaagtccaccgcgaatgatacttgttcatcggcagccatccaggaggacatctacccgcaggagatcgacgcatcctccaactacactccgcaagacccggcaaggaatgaaatccactcagataaggcaccggtgctgtaccttcatgatcagctgtcggagctgctgaaagagtttccttacggcatcgaggccgtcaacactcgggagggctccgtggggcagcaaacaacctaccagacaagtgaggaccagaccgctgataaaacaagctccgactccaaagatccagcagaccaaatccagattacaatcctatccagcgagcagatgaaagagattttcccagagcaggatgatcagccgtatgtcgtggacaagctggctgaacctcaaaaagaagagcctatcacagaagtggtctcccagtgcgacctgcaagcgcctgcagccggacagagcagggattcagtcatactggattctgaaaaagacgacattcactgctgcgcactgggatggctttcaatggtgtacgaaggggtcccacaatgtcagtgcaactccattaagaacagtagctccgaggaagaaaagcaaaaagaacaatgttctcctttggatactaacagttgcaaacagggggagagaaccagcgatagagacgtcactgtagtgcagtttaagagccttgtgaataaccccaaaacacccccagatgggaagagtcattttccggaactgcaggacgatagccggaaggatacgcctaaaacaaagcacaagtccctgcccaggacagaacaggagctcgtcgcagggcagttcagctctaaatgcgacaagctgaacccattgcaaaatcacaagcggaagaagctgagattccacgaggtcaccttccattcatccaacaagatgaccgcaagctatgaacaggcttcccaagaaacccgccaaaagaagcacgtaacccagaattcacgaccccttaagacaaagacggcctttctgccaaataaagacgtatataagaagcattcgagcctggggcagtcgctctcccccgagaagattaaactgaagctgaagagcgtctcatttaaacagaagagaaaactggaccaggggaacgtccttgacatggaggttaagaagaagaaacacgataagcaagaacagaagggttctgttggcgctacattcaagctcggagatagcctctccaacccaaatgagcgagcgattgtaaaagagaaaatggtgagcaacacaaagtcagtcgataccaaagcttcatcttctaagttcagtagaattcttacgcccaaagagtacctgcaacgtcagaaacacaaggaagcactgtcaaataaggcttctaaaaaaatttgcgtgaaaaatgtgccgtgcgactctgagcacatgcgtccatccaagctggccgtgcaggtcgagagctgcggtaaaagcaatgaaaagcacagcagcggagtgcagacatcaaaagagagcctgaatggtctaacgagtcacggaaaaaatctgaaaatccatcatagtcaggaatctaaaacctacaacatcctcaggaatgttaaagagaaagttggcggaaagcagccagataaaatttggatcgacaagaccaagttggataagttgacaaatatcagtaacgaggcccagttcagtcagatgccaccgcaggtgaaagatcaaaaaaagctctatttgaatcgcgtcggttttaagtgtaccgagagggaatctatctctttgaccaagttggagagcagtccaagaaagttgcataaggacaagcgacaggagaacaagcataaaacctttctgccagtcaaaggaaacaccgagaagtcaaacatgctcgagttcaagctgtgccccgatatcctcctgaaaaatactaattccgtggaggagcgaaaagacgtgaagccacatccccgaaaagaacaggcacctcttcaggtgagtgggattaagtcaacaaaagaggactggttgaaattcgtcgctaccaaaaaacgcacccagaaggactcacaagaacgcgataatgtgaattctaggctaagcaagaggtcttttagcgctgacggattcgagatgcttcagaatccagtcaaagacagtaaggagatgtttcagacatacaagcagatgtacctagagaagaggagccgatctcttggaagtagccccgtcaagtag

SEQ ID NO: 272516 - DNA, 108 bp, Artificial Sequence
  derived and/or modified sequence
atgaattggaatgagaagccaaaatctgccacactcccacctctataccctaagtctcagcccccttttcttcaccagtcgttaatcaatcagataaccaccacatag

SEQ ID NO: 272517 - protein, 436 aa, Artificial Sequence
  derived and/or modified sequence
MERLEIQRIEKEKWHRLEAKDLERRNEELEELYLLERCFPEAEKLKQETKLLSQWKHYIQCDGSPDPSVAQEMNTFISLWKEYTSAVTELVKDDVKNVEKAISKEVEEESKQQERGSHLIQEEEIKVEEEQGDIEVKMSSAEEESEAIKCEREMKVLSETVSAAQLLLVENSSEKPDFFEDNVVDLCQFTTLGGVYHLDILELPPQCKPVKGWMIVEILKEGLQKYTYPPETTEEFETENAFPPIEVTLEVHENVIFFEDPVVVRWDAEGKHWRTDGISNVSYKPKERLVTFSLDTFGPVTLIQDAHINMPYQSWELRPLDVNKVLLTVTTVFTEIQIQIKENLCMLSSIKLKDKKHISILEGTWMTPIPFIIALKEAGLNIFPTRHSHFYVIINNKVPLVEVKAYRQMALLSSAFAFGWSKWNLLCNSTKVVFKW

SEQ ID NO: 272518 - protein, 422 aa, Artificial Sequence
  derived and/or modified sequence
MGMTRMLLECSLSDKLCVIQEKQYEVIIVPTLLVTIFLILLGVILWLFIREQRTQQQRSGPQGIAPVPPPRDLSWEAGHGGNVALPLKETSVENFLGATTPALAKLQVPREQLSEVLEQICSGSCGPIFRANMNTGDPSKPKSVILKALKEPAGLHEVQDFLGRIQFHQYLGKHKNLVQLEGCCTEKLPLYMVLEDVAQGDLLSFLWTCRRDVMTMDGLLYDLTEKQVYHIGKQVLLALEFLQEKHLFHGDVAARNILMQSDLTAKLCGLGLAYEVYTRGAISSTQTIPLKWLAPERLLLRPASIRADVWSFGILLYEMVTLGAPPYPEVPPTSILEHLQRRKIMKRPSSCTHTMYSIMKSCWRWREADRPSPRELRLRLEAAIKTADDEAVLQVPELVVPELYAAVAGIRVESLFYNYSML

SEQ ID NO: 272519 - DNA, 1269 bp, Artificial Sequence
  derived and/or modified sequence
atgggcatgaccagaatgctgctggagtgcagcctgagcgacaagctgtgcgtgatccaggagaagcagtacgaggtgatcatcgtgcccaccctgctggtgaccatcttcctgatcctgctgggcgtgatcctgtggctgttcatcagagagcagagaacccagcagcagagaagcggcccccagggcatcgcccccgtgcccccccccagagacctgagctgggaggccggccacggcggcaacgtggccctgcccctgaaggagaccagcgtggagaacttcctgggcgccaccacccccgccctggccaagctgcaggtgcccagagagcagctgagcgaggtgctggagcagatctgcagcggcagctgcggccccatcttcagagccaacatgaacaccggcgaccccagcaagcccaagagcgtgatcctgaaggccctgaaggagcccgccggcctgcacgaggtgcaggacttcctgggcagaatccagttccaccagtacctgggcaagcacaagaacctggtgcagctggagggctgctgcaccgagaagctgcccctgtacatggtgctggaggacgtggcccagggcgacctgctgagcttcctgtggacctgcagaagagacgtgatgaccatggacggcctgctgtacgacctgaccgagaagcaggtgtaccacatcggcaagcaggtgctgctggccctggagttcctgcaggagaagcacctgttccacggcgacgtggccgccagaaacatcctgatgcagagcgacctgaccgccaagctgtgcggcctgggcctggcctacgaggtgtacaccagaggcgccatcagcagcacccagaccatccccctgaagtggctggcccccgagagactgctgctgagacccgccagcatcagagccgacgtgtggagcttcggcatcctgctgtacgagatggtgaccctgggcgcccccccctaccccgaggtgccccccaccagcatcctggagcacctgcagagaagaaagatcatgaagagacccagcagctgcacccacaccatgtacagcatcatgaagagctgctggagatggagagaggccgacagacccagccccagagagctgagactgagactggaggccgccatcaagaccgccgacgacgaggccgtgctgcaggtgcccgagctggtggtgcccgagctgtacgccgccgtggccggcatcagagtggagagcctgttctacaactacagcatgctgtag

SEQ ID NO: 272520 - DNA, 1269 bp, Artificial Sequence
  derived and/or modified sequence
atgggtatgacccgaatgctcttggaatgctcactttctgacaagttatgcgtgattcaggagaaacagtatgaggtgataattgtgccgacccttctggtgactatcttcctcattctgcttggtgttatcctgtggctgttcatcagagaacagcggacgcaacagcagaggtcaggtccccagggcattgctcccgtgccccctccccgcgacctgtcctgggaggccgggcatggaggtaacgtggcactgcccctgaaggagacatccgttgaaaacttcctgggggcgaccacccctgcactggcaaaactgcaagtgcctagggaacagctatcagaagtgcttgagcaaatctgctcgggctcctgcggcccaatcttccgtgcaaacatgaacaccggcgaccccagcaagccaaagtctgtgatcctcaaagccttaaaggagcccgctggcctgcatgaggttcaggattttctgggcagaatccagtttcatcaatacctcggcaaacacaagaacttagtgcaactagagggttgttgtactgaaaaactgccgctctacatggtgttagaggacgtggcacagggagacctcctgtcctttctctggacctgccgcagagatgtcatgaccatggatggattgctttatgacttgacagagaaacaggtctatcatatcggaaagcaggttttactggccctggaattcttgcaggagaaacacctgttccacggcgatgttgctgcccgcaacatcctcatgcagtcagatctcacagctaaactctgtgggttgggtctggcttacgaagtttacactcgtggcgctatcagcagcacccagactatcccacttaaatggctcgctccagaaagacttctgctccggcccgctagtatccgggccgacgtgtggtcgttcggcatcctgctgtacgagatggtaacccttggggctcccccatatcctgaggtacccccaacatccattttagaacaccttcagcgacggaagatcatgaagaggccgtcgagctgtactcacactatgtacagcataatgaaaagttgttggcggtggcgggaagcagaccgtccatctccaagagagctcaggcttagactggaggcagccattaaaacagctgacgacgaggcagttttacaggtacctgagttggtagtgcccgagctgtacgccgccgtcgctggaatacgggtggagtccttgttttacaactactctatgttgtag

SEQ ID NO: 272521 - DNA, 1269 bp, Artificial Sequence
  derived and/or modified sequence
atgggcatgaccaggatgctgctggagtgcagcctgagtgacaagctgtgtgtgatccaggagaagcagtatgaggtgatcatcgtgcccaccctgctggtgaccatcttcctgatcctgctgggcgtcatcctgtggctgttcatccgggagcagaggacccagcagcagaggagcggcccccagggcatcgcccctgtgcccccaccccgggacctgtcctgggaggccggccatggaggaaatgtggccctgcccctgaaggagacctctgtggagaacttcctgggcgccaccaccccagccctggccaagctgcaggtgccccgggagcagctgtctgaggtgctggagcagatctgcagcggcagctgtggccccatcttccgggccaacatgaacacaggagaccccagcaagcccaagagcgtcatcctgaaggccctgaaggagcctgctggcctgcacgaggtgcaggacttcctgggccgcatccagttccaccagtacctgggcaagcacaagaacctggtgcagctggagggctgctgcacagagaagctgcccctgtacatggtgctggaggatgtggcccagggcgacctgctgtccttcctgtggacctgcagaagagatgtgatgaccatggatggcctgctgtatgacctgacagagaagcaggtgtaccacatcggcaagcaggtgctgctggccctggagttcctgcaggagaagcacctgttccatggagatgtggccgccaggaacatcctgatgcagagcgacctgacagccaagctgtgtggcctgggcctggcctatgaggtgtacaccaggggggccatcagcagcacccagaccatccccctgaagtggctggcccctgagcggctgctgctgcggcctgccagcatccgggcagatgtgtggagctttggcatcctgctgtatgagatggtgaccctgggcgccccaccctacccagaggtgccccccaccagcatcctggagcacctgcagaggaggaagatcatgaagaggcccagcagctgcacccacaccatgtacagcatcatgaagagctgctggcgctggagggaggccgaccggcccagcccccgggagctgcggctgcggctggaggccgccatcaagacagcagatgatgaagctgtgctgcaggtgcctgagctggtggtgcctgagctgtatgctgctgtggccggcatccgggtggagagcctcttctacaactacagcatgctgtag

SEQ ID NO: 272522 - DNA, 1269 bp, Artificial Sequence
  derived and/or modified sequence
atgggcatgacccggatgctgctggagtgcagcctgagcgacaagctttgcgtgattcaggaaaagcagtatgaggtgataatcgttcccactctgctggtgaccatatttcttattcttctgggcgtcatcctttggctgttcatcagagagcagcgtacacagcaacagcgatccggtcctcaagggatcgctcctgtgcctcccccgcgcgatctgtcctgggaagccggacatgggggtaatgtcgccctccccctgaaggagacatcagtagaaaactttctgggagcaacaacccccgctctggccaaacttcaggtacctcgtgagcaattgagtgaggtgctggaacagatttgtagcggatcctgcggcccgatatttcgggctaacatgaacacaggtgacccctcaaaaccaaagtcagttatcctcaaggccctaaaagagcctgccggtttgcatgaggtccaagactttctcggacgaattcagttccaccagtacctggggaaacataagaacctcgtccagctagaaggctgctgtacagagaaactacctctctatatggttcttgaggatgttgcacagggggacctgctgagctttctgtggacctgcagacgggatgtgatgacaatggatggacttctttatgacctgactgaaaagcaagtctaccatatcggcaaacaggtcctgctggccctcgaatttttacaggaaaagcacctattccacggggacgtggcggccagaaacattcttatgcagagcgatttgactgctaaactgtgcggacttgggttagcttacgaagtatacacaagaggggccatcagttcaactcaaaccatcccacttaagtggctggctcctgagaggctgctattgaggcctgccagcatcagggctgacgtttggtcatttgggatcctcctgtatgaaatggtaacattaggggcaccaccctatcctgaagtgcctcccaccagtatactcgagcacttacagcgaagaaagatcatgaagaggccttcctcctgcacgcatacaatgtatagcatcatgaagtcctgttggaggtggcgggaagcagacaggccaagccctagagagctgagactgaggcttgaggctgcaattaagaccgccgacgacgaagctgtcctgcaagtccctgagcttgtcgtccccgagctgtatgccgcagtggccggtatacgggtagagtcccttttttataattatagcatgctgtag

SEQ ID NO: 272523 - DNA, 1269 bp, Artificial Sequence
  derived and/or modified sequence
atgggcatgactcgaatgttactcgagtgttctttgtctgataaattatgtgtgatccaagagaagcagtatgaggtgatcattgtacccactcttctcgtgacaatctttctgatccttctgggggttatcctctggctgttcattagagagcagcgcactcagcagcagcgcagtggaccccagggcattgcaccggtgcccccacccagagacttgtcctgggaggcgggtcacggcggaaacgtcgcactcccgcttaaggaaacgtccgtagagaattttctaggagccacaactccagcgctagcaaagctgcaggtccccagagagcagctgagcgaagtgttagagcagatttgtagtggcagctgtggtcctatttttagggcaaacatgaatactggggatccttcaaagccaaagtctgtgattctaaaagctctgaaagaaccagctgggctacacgaggttcaggactttctaggacgtattcagtttcatcagtatctaggcaagcataagaacctcgtgcagctggaaggctgttgtaccgaaaagctccctttatacatggtcctggaagatgtggctcagggtgacctgttgtcttttttgtggacttgtagaagggacgtgatgacaatggacggcctcttgtatgacctcaccgagaagcaagtttaccatatcggcaagcaagtcttgcttgcactggaatttctccaagagaagcatctctttcacggcgatgtggctgcaaggaatatcctgatgcagagcgatttaactgcaaaactgtgtggcctgggtctcgcctacgaggtctacacgcggggagctatatcatccacccagacaattcctctcaagtggctcgcccctgagcgattactgctgcgtcctgctagtatccgagccgacgtgtggtccttcggtattctcctgtatgagatggtaaccttgggcgcaccaccttatcccgaagtgcctccaaccagtattctcgagcacctgcagcgccgaaagataatgaagcggccatcttcctgcacacacactatgtactcaatcatgaagtcctgttggcgctggcgtgaggcagatcgcccaagccccagggagttgcgcctgaggctggaggccgcaatcaagacggcagacgatgaagccgtgctacaggtgcccgagttggttgtacctgaactctacgctgccgttgcaggcatccgagtcgaaagcctgttctataattattcaatgctgtag

SEQ ID NO: 272524 - DNA, 1269 bp, Artificial Sequence
  derived and/or modified sequence
atgggtatgacaagaatgttattagaatgctcccttagcgacaagttgtgcgttatccaggagaaacagtatgaggtcataatcgttcccacacttcttgtgaccattttcctcatccttctcggcgtgatactctggctgtttattcgagaacaacggacccagcagcagcggtcgggcccacagggcattgcgccagttcctcccccccgggatctgagctgggaagctgggcacggcggcaatgtggctctgccgctcaaggagacatcagtggaaaatttcctgggtgccaccacacccgcgctggccaagctacaagttcccagggagcagctttccgaggttctggaacagatatgttcaggtagctgtggccccatctttagggctaatatgaataccggtgatccatcaaagccaaagtccgtgattctgaaggcgctgaaagagccagccggactgcatgaggtgcaggactttctgggcaggatccagtttcatcagtacctcggtaaacacaaaaaccttgtccaactggaaggatgctgcacggagaagctgcctctatacatggtcctcgaagatgtcgcccagggggatctgctgtccttcctgtggacgtgtcgtagagacgtcatgacaatggacggtctgctatatgatctgaccgagaagcaggtttatcacataggcaaacaggtactgctcgccctggaatttctgcaggaaaagcacctgttccacggtgacgtcgccgccagaaacatcctgatgcaatctgacttgacagcgaagctatgcgggctgggattggcttatgaagtttacacacgcggcgccattagcagtacacagactatccctctgaaatggttagcaccagaacgactcctgctgcgccccgctagcatacgcgctgatgtgtggtcatttggtattctgctgtacgaaatggtaacattgggcgcacccccatatccagaagtcccccccacaagcattctcgagcatttgcagcggcgaaaaattatgaagaggccttcatcttgcacgcatacaatgtacagtatcatgaagagctgttggcgttggcgggaagcggatcgcccatctcctcgggaactcagactcagactggaggcggccattaagacagctgatgacgaggcagtgcttcaggtgccagaacttgtagtccctgaactctacgccgcggttgcaggcatccgagtagaatctcttttctataattactctatgctgtag

SEQ ID NO: 272525 - DNA, 1269 bp, Artificial Sequence
  derived and/or modified sequence
atgggcatgacaagaatgctgctggaatgctctcttagcgacaaactgtgtgtgattcaagaaaagcagtacgaagtaattattgttcctacactcctggtaaccatattcctgattttattaggagtcattttatggctcttcataagggaacagcgaactcagcagcagcggagcggacctcaaggaattgccccggttcccccacctcgcgatctgtcttgggaagctggtcatggcggcaacgtcgcactacctctgaaagaaaccagcgtggaaaattttctgggtgctacgacgcccgctcttgccaaactgcaggtcccacgcgaacagctttcggaagtcctagagcagatctgcagtgggtcctgcggccctattttccgcgccaatatgaatactggtgacccctccaaaccaaaatcagtgattctcaaagcgctgaaagaaccagcaggtcttcacgaagttcaagacttcctgggaaggattcaatttcaccaatacttaggaaaacataaaaacttagttcagctggaaggttgttgcaccgaaaagcttccactctatatggtactcgaagatgttgctcagggcgacctcctgagttttctttggacttgtcgccgggacgttatgacaatggatggactgctctacgacctgacagagaagcaagtgtaccatatcggtaaacaggttctgctggctctggaattcctgcaagagaagcacctattccacggagacgtggctgcgcgcaatatcctcatgcaaagtgacctgactgccaagctgtgtggactcggacttgcttatgaggtttacacaagaggagccatatcatcgacgcaaactatcccactgaaatggttggcccctgaaaggctcttattacgcccagcctcaatacgcgcagacgtctggagctttggcattctcttgtacgaaatggtgacactgggagcacccccctatcctgaagtgccccccaccagcatcctcgagcatttacaacgcagaaaaatcatgaaaagaccctcctcttgcactcacactatgtacagtattatgaaatcttgttggcggtggcgagaggccgaccgcccatctcctcgggagcttagactgagacttgaggccgccataaaaacagctgacgacgaggcagtactccaggttcccgagctcgtggtgccagaattatatgcagccgtcgcggggatccgggtcgaatctctcttttataattattccatgttgtag

SEQ ID NO: 272526 - DNA, 2995 bp, Artificial Sequence
  derived and/or modified sequence
ggagtcaccgtgatacctgacatctagcaatcactagagtaggaaatgagtatagatcagcaacaagtccagcctttacagttgcagcagaggtttcctgtggctcgagtgtggcgagtcccggaaacctcggagcccgcagacttcccttcgcgggagcccgcccgaactccatcctttgccggcagccacgccccgcagtgggaaggagggactgaaaagcatttccttgaggctggcacaccttgccctacccaaccctgtcattatttcccctccgactgggccggtgccatcggaaaccggagtgaccagaggagggacacgcatccaatttcactgggctgcaagatatcaataagccttgcctctttaaactacttatgtacaaataaaagtgatggtgagaacctggctcaggaaatgcagtagcaggccatattgcatccaaaggaattactcacagctgtgctgtgtgcattctctgtgggcctagcagggaaggggacagccctgtggcaatgggcatgacacggatgctcctggaatgcagtctcagtgacaagttgtgtgtcatccaggagaagcagtatgaagtgattatcgtcccaactttgttggttactatcttcctcatccttcttggggtcatcctgtggctttttatcagagaacaaagaactcaacagcagcgttctggacctcaaggcattgcccctgttcctccacctagggacctaagctgggaagcaggacatggaggaaatgtggctttgccacttaaggagacatccgtggaaaactttctgggagctaccacacctgccctggctaagctgcaggtgccgcgggagcaactctctgaagttctggagcagatttgcagtggtagctgtgggcccatctttcgagccaatatgaacactggggacccttctaagcccaagagtgttattctcaaggctttaaaagaaccagctgggctccatgaggtacaagatttcttagggcgaatccaattccatcaatacctggggaaacacaaaaacctggtgcagctggaaggctgctgcactgaaaagctgccactctatatggtgttggaggatgtggcccagggggacctgctcagctttctctggacctgtcggcgggatgtgatgactatggatggtcttctctatgatctcacagaaaaacaagtatatcacatcggaaagcaggtccttttggcgctggaattcctgcaggagaagcatttgttccatggggatgtggcagccaggaatattctgatgcaaagtgatctcactgctaagctctgtggattaggcctggcttatgaagtttacacccgaggggccatctcctctactcaaaccatacctctcaagtggcttgccccagaacggcttctcctgagacctgctagcatcagagcagatgtctggtcttttgggatcctgctctatgagatggtgactctaggagcaccaccgtatcctgaagtccctcctaccagcatcctagagcatctccaaagaaggaaaatcatgaagagacccagtagctgcacacataccatgtacagtatcatgaagtcctgctggcgctggcgtgaggctgaccgcccctcacctagagagctgcgcttgcgcctagaagctgccattaaaactgcagatgacgaggctgtgttacaagtaccagagttggtggtacctgaactgtatgcagctgtggccggcatcagagtggagagcctcttctacaactatagcatgctttgaagagtctcgggcaagaaacattcatgcatgagtatatgttcttggaatcaattcctctaagaacagagaatggtctttcccagggacacaaagggagaaatgggacatggattcttgatcttcctttacacatttctcgggaaatctgaaatgatgctggatgggactctacacatcctgagctaagacatactgtcagtctcacttctgctgtcccagtcctagaaatcctgggtagaagtggtggacctgtgcaaaggaggttttagaactctgcagtatttgttggggcatggcacaaataagctcatccctcccgtccgaggctagtttcctctggaaccacatttttatctagatgaaaatttggaatgaaatgaaggaatagaaatccaataaaagagttgaagggaaagaaaatttaaggttcttcttgctcaggattacagatatggaccaacacctccttcaagaaaaggtggtaggacacaaagttcttcagtcctgagccctacatgtggggttggaggagaactataacggaaaaacctctgagtttcaccttaggtatagataaaagaaagatggtccccttttatctgattctgagacaggtaaattctgtttgttactacgtttaattagaaggtggaggagtcatttcatgattaagaacattcaacatgtattgttcattaagctagcttcctagttccgattagactaaggagactaagcctagagagtcaatgttagaacagtgaaaagaattctgtgtgtgtgtgtgtgtgtgtgcacaataaataggaaatgtagaaaccaagcaagaaggcttagtagctcagtctttaacaagggctagaaaagaatgtaatctgatatggaaggatagcagcttctaattttcaatcatctgttgatatactgtgaaacttattttattaaattaatatttattaaatggaaatatgcttttctggtttataactactaaaaatatcatagggaggataaaagtaaataagtgaaagttaatgccaatagaaaaattcaagagataatgtacaatgtcagaaaagggattctttatgtgtaaatggggataatacctatttcacaaggttgttctgaggattgatacgttttgagtatgtatttgtacactatctggcacatatgcgctcaataaacgtgtttctcctttt

SEQ ID NO: 272527 - RNA, 1269 nt, Artificial Sequence
  derived and/or modified sequence
auggguaugacaagaauguuauuagaaugcucccuuagcgacaaguugugcguuauccaggagaaacaguaugaggucauaaucguucccacacuucuugugaccauuuuccucauccuucucggcgugauacucuggcuguuuauucgagaacaacggacccagcagcagcggucgggcccacagggcauugcgccaguuccucccccccgggaucugagcugggaagcugggcacggcggcaauguggcucugccgcucaaggagacaucaguggaaaauuuccugggugccaccacacccgcgcuggccaagcuacaaguucccagggagcagcuuuccgagguucuggaacagauauguucagguagcuguggccccaucuuuagggcuaauaugaauaccggugauccaucaaagccaaaguccgugauucugaaggcgcugaaagagccagccggacugcaugaggugcaggacuuucugggcaggauccaguuucaucaguaccucgguaaacacaaaaaccuuguccaacuggaaggaugcugcacggagaagcugccucuauacaugguccucgaagaugucgcccagggggaucugcuguccuuccuguggacgugucguagagacgucaugacaauggacggucugcuauaugaucugaccgagaagcagguuuaucacauaggcaaacagguacugcucgcccuggaauuucugcaggaaaagcaccuguuccacggugacgucgccgccagaaacauccugaugcaaucugacuugacagcgaagcuaugcgggcugggauuggcuuaugaaguuuacacacgcggcgccauuagcaguacacagacuaucccucugaaaugguuagcaccagaacgacuccugcugcgccccgcuagcauacgcgcugauguguggucauuugguauucugcuguacgaaaugguaacauugggcgcacccccauauccagaagucccccccacaagcauucucgagcauuugcagcggcgaaaaauuaugaagaggccuucaucuugcacgcauacaauguacaguaucaugaagagcuguuggcguuggcgggaagcggaucgcccaucuccucgggaacucagacucagacuggaggcggccauuaagacagcugaugacgaggcagugcuucaggugccagaacuuguagucccugaacucuacgccgcgguugcaggcauccgaguagaaucucuuuucuauaauuacucuaugcuguag

SEQ ID NO: 272528 - RNA, 1269 nt, Artificial Sequence
  derived and/or modified sequence
augggcaugacaagaaugcugcuggaaugcucucuuagcgacaaacugugugugauucaagaaaagcaguacgaaguaauuauuguuccuacacuccugguaaccauauuccugauuuuauuaggagucauuuuauggcucuucauaagggaacagcgaacucagcagcagcggagcggaccucaaggaauugccccgguucccccaccucgcgaucugucuugggaagcuggucauggcggcaacgucgcacuaccucugaaagaaaccagcguggaaaauuuucugggugcuacgacgcccgcucuugccaaacugcaggucccacgcgaacagcuuucggaaguccuagagcagaucugcaguggguccugcggcccuauuuuccgcgccaauaugaauacuggugaccccuccaaaccaaaaucagugauucucaaagcgcugaaagaaccagcaggucuucacgaaguucaagacuuccugggaaggauucaauuucaccaauacuuaggaaaacauaaaaacuuaguucagcuggaagguuguugcaccgaaaagcuuccacucuauaugguacucgaagauguugcucagggcgaccuccugaguuuucuuuggacuugucgccgggacguuaugacaauggauggacugcucuacgaccugacagagaagcaaguguaccauaucgguaaacagguucugcuggcucuggaauuccugcaagagaagcaccuauuccacggagacguggcugcgcgcaauauccucaugcaaagugaccugacugccaagcuguguggacucggacuugcuuaugagguuuacacaagaggagccauaucaucgacgcaaacuaucccacugaaaugguuggccccugaaaggcucuuauuacgcccagccucaauacgcgcagacgucuggagcuuuggcauucucuuguacgaaauggugacacugggagcaccccccuauccugaagugccccccaccagcauccucgagcauuuacaacgcagaaaaaucaugaaaagacccuccucuugcacucacacuauguacaguauuaugaaaucuuguuggcgguggcgagaggccgaccgcccaucuccucgggagcuuagacugagacuugaggccgccauaaaaacagcugacgacgaggcaguacuccagguucccgagcucguggugccagaauuauaugcagccgucgcggggauccgggucgaaucucucuuuuauaauuauuccauguuguag

SEQ ID NO: 272529 - DNA, 882 bp, Artificial Sequence
  derived and/or modified sequence
atggtggtgctgttctactggaacaaccacgagagccaggtgctgaagagcctggtgatctgcctggtggccatggaggagagattcctgcacgtgctgagcagcagcagaagcatcctggaggacccccccagcatcagcgagggctgcggcggcagagtgaccgactacagaatcaccgtggtgcccctggccagcgtgatcgtgaaggagagcctgaccgaggaggacgtgctgaactgccagaagaccatctacaacctggtggacatggagagaaagaacgaccccctgcccatcagcaccgtgggcaccagaggcaagggccccaagagagacgagcagtacagaatcatgtggaacgagctggagaccctggtgagagcccacatcaacaacagcgagaagcaccagagagtgctggagtgcctgatggcctgcagaagcaagccccccgaggaggaggagagaaagaagagaggcagaaagagagaggacaaggaggacaagagcgagaaggccgtgaaggactacgagcaggagaagagctggcaggacagcgagagactgaagggcatcctggagagaggcaaggaggagctggccgaggccgagatcatcaaggacagccccgacagccccgagccccccaacaagaagcccctggtggagatggacgagaccccccaggtggagaagagcaagggccccgtgagcctgctgagcctgtggagcaacagaatcaacaccgccaacagcagaaagcaccaggagttcgccggcagactgaacagcgtgaacaacagagccgagctgtaccagcacctgaaggaggagaacggcatggagaccaccgagaacggcaaggccagcagacagtag

SEQ ID NO: 272530 - DNA, 882 bp, Artificial Sequence
  derived and/or modified sequence
atggtcgttctcttctattggaataaccacgagtctcaggtgcttaaatctttggtgatatgtctggttgcgatggaagagcgttttctgcacgtcctaagcagttccagaagcatcttggaagaccctccaagcatctcagagggttgtggaggtagagtcacagactacagaatcaccgtggtcccccttgcatcagttatagtcaaggagtctctgactgaagaagatgtcctgaattgtcagaagacgatttacaatctagtggatatggagcgcaagaatgacccactgccgattagtaccgttgggacccgcggcaaaggccctaagagagacgaacaatatcgcatcatgtggaatgagctcgaaaccctggtgagagcccatattaataacagcgagaagcaccagagggtgttggaatgcctgatggcctgtcgatccaagcctccagaagaggaggagcgcaagaagcgagggaggaagagagaagacaaggaggataagagcgaaaaggccgtcaaagactacgagcaagaaaaatcctggcaggacagtgaaaggctcaagggcatactagagcgcggtaaggaagagctcgccgaggcagaaattatcaaagactcgccggactcccctgagccacccaataagaagccactggttgagatggacgagaccccacaggtggaaaagtcaaaaggcccagtttcgctgctgagcctatggagcaaccgcattaacaccgctaacagtagaaagcatcaggaatttgcgggcaggctgaatagtgtgaacaatagagccgaactctaccagcatctaaaagaagaaaacggaatggaaaccaccgaaaacggtaaggcttccaggcagtag

SEQ ID NO: 272531 - DNA, 882 bp, Artificial Sequence
  derived and/or modified sequence
atggtggtgctcttctactggaacaaccacgagagccaggtgctgaagagcctggtgatctgcctggtggccatggaggagcgcttcctgcacgtgctgagcagcagccgcagcatcctggaggaccccccatccatcagcgagggctgcggcggccgggtgacagactaccgcatcaccgtggtgcccctggccagcgtcatcgtgaaggagagcctgacagaggaggatgtgctgaactgccagaagaccatctacaacctggtggacatggagaggaagaatgaccccctgcccatcagcacagtgggcacccggggcaagggccccaagagagatgagcagtaccgcatcatgtggaatgagctggagaccctggtgcgggcccacatcaacaacagcgagaagcaccagagggtgctggagtgcctgatggcctgccgcagcaagcccccagaggaggaggagaggaagaagaggggcaggaagcgggaggacaaggaggacaagtctgagaaggctgtgaaggactatgagcaggagaagtcctggcaggacagcgagcggctgaagggcatcctggagcggggcaaggaggagctggccgaggccgagatcatcaaggacagcccagacagccctgagccccccaacaagaagcccctggtggagatggatgagaccccccaggtggagaagagcaaaggacctgtgtccctgctgagcctgtggagcaaccgcatcaacacagccaacagcaggaagcaccaggagtttgctggccgcctgaacagcgtgaacaacagagctgagctgtaccagcacctgaaggaggagaatggcatggagaccacagaaaatggcaaggccagccggcagtag

SEQ ID NO: 272532 - DNA, 882 bp, Artificial Sequence
  derived and/or modified sequence
atggtggtgctgttctactggaacaaccacgagagccaggtgctgaagtccttagtgatttgcctggtggcaatggaggaaaggtttctacacgttctgtccagttcacgctccatcctggaagatcccccatccatctcagagggctgcggagggagagttaccgattacagaatcactgtcgtgccactggcctccgtaatcgtgaaggagtcactgactgaggaagacgttttgaactgtcaaaagactatttataatctggttgatatggagcgaaagaatgacccacttcccatatccactgttggcacgagagggaaagggcctaaaagggacgaacaataccgcatcatgtggaacgagctggaaacccttgtgcgagcccatatcaacaattctgagaaacatcagcgagtgctggagtgcctgatggcttgtcggtcaaagccgccggaagaagaggagaggaagaagcgcggtcgaaagcgggaggataaagaggacaaatccgaaaaagccgtgaaagactatgagcaggagaagagttggcaggattcggagagactgaagggaatcctggaaagagggaaggaggagttagccgaggctgaaattataaaagactctcccgacagtccagagccccccaacaaaaagcccctggtggagatggatgaaaccccacaggttgaaaaatcaaaaggtccagttagcctcctcagcctgtggagcaatagaatcaacacggcgaatagtcgaaaacatcaggagtttgctggccgcctaaactctgtgaataaccgcgcagaactgtaccaacatcttaaggaggaaaatggtatggagaccacggaaaacggaaaggcatcccggcagtag

SEQ ID NO: 272533 - DNA, 882 bp, Artificial Sequence
  derived and/or modified sequence
atggtcgtacttttttattggaataatcatgagtcccaggtgctgaaatctctggtgatctgcctagtcgccatggaagagcggttcctgcatgtgctctcttcttccagaagcattcttgaggaccctccaagcattagtgagggctgcggaggacgggttactgactacagaatcacagtggtgcccctcgcttctgtaattgtcaaggaatcactcactgaagaggacgtactgaactgtcagaaaacaatttacaacctggtcgacatggaaaggaagaatgaccccctgccaattagtacagtaggcactcggggaaaagggccaaagcgagacgagcagtataggatcatgtggaacgagttggaaaccctggttcgcgcacacatcaacaatagcgagaagcaccagcgcgtgcttgagtgcctgatggcctgtcgcagcaaacccccagaggaggaggagagaaagaagcggggtagaaagagggaggataaggaggataaaagcgaaaaggccgtcaaggactacgagcaggagaagagctggcaagatagtgagaggcttaaaggaattttggagaggggtaaagaggaactggccgaagccgagataatcaaagatagtccggactcaccggaacctcccaacaagaaaccgctggtagagatggacgagacaccccaagtagaaaaatccaaaggtccagtatcactgctgtcactttggagtaaccgaatcaatactgccaactcacgcaagcaccaggagtttgcaggaaggctgaacagcgtaaataatcgggctgaactgtatcagcacctgaaggaggagaatggcatggaaaccaccgaaaatggtaaggcttctcgtcagtag

SEQ ID NO: 272534 - protein, 602 aa, Artificial Sequence
  derived and/or modified sequence
MAMRELVEAECGGANPLMKLAGHFTQDKALRQEGLRPGPWPPGAPASEAASKPLGVASEDELVAEFLQDQNAPLVSRAPQTFKMDDLLAEMQQIEQSNFRQAPQRAPGVADLALSENWAQEFLAAGDAVDVTQDYNETDWSQEFISEVTDPLSVSPARWAEEYLEQSEEKLWLGEPEGTATDRWYDEYHPEEDLQHTASDFVAKVDDPKLANSEGTSDAWVDQFTRPVNTSALDMEFERAKSAIESDVDFWDKLQAELEEMAKRDAEAHPWLSDYDDLTSATYDKGYQFEEENPLRDHPQPFEEGLRRLQEGDLPNAVLLFEAAVQQDPKHMEAWQYLGTTQAENEQELLAISALRRCLELKPDNQTALMALAVSFTNESLQRQACETLRDWLRYTPAYAHLVTPAEEGAGGAGLGPSKRILGSLLSDSLFLEVKELFLAAVRLDPTSIDPDVQCGLGVLFNLSGEYDKAVDCFTAALSVRPNDYLLWNKLGATLANGNQSEEAVAAYRRALELQPGYIRSRYNLGISCINLGAHREAVEHFLEALNMQRKSRGPRGEGGAMSENIWSTLRLALSMLGQSDAYGAADARDLSTLLTMFGLPQ

SEQ ID NO: 272535 - DNA, 1809 bp, Artificial Sequence
  derived and/or modified sequence
atggccatgcgggagctagtggaggccgagtgtggcggcgcaaatcccctaatgaaactggcaggtcacttcacccaagacaaggccctgcgtcaggaaggactgcgacccggcccatggccacccggggccccagcttccgaggccgcgtcgaagcctctgggggtagcgtcagaggatgagttggtggcggaatttctgcaggatcagaacgccccactagtgagtagggccccacagacatttaaaatggacgatctgctcgcggaaatgcagcagattgagcagtctaatttccgacaagcaccccagagggctcctggcgtcgccgacctggcgttaagtgagaattgggcacaggaatttctggcagccggggacgctgttgatgttacccaagactataatgagactgattggagccaggaattcatcagtgaggtgactgacccactatccgtatcccctgctcgttgggccgaagagtacctcgagcagtccgaagaaaagttatggctgggtgaaccggaagggactgccacggatagatggtacgacgaataccatccagaggaggatttgcaacacacagccagtgacttcgtggctaaagtcgacgacccaaagttggctaactccgaaggaacatctgacgcatgggtggaccagttcaccagaccagtgaacacctccgcattagacatggaattcgagcgagcaaaatctgcgatcgaaagcgacgtcgatttttgggacaaactccaggcggagctggaagagatggctaaaagggatgctgaggcgcatccatggctgagtgactatgatgacctgacatcagctacatatgacaagggatatcagtttgaggaagagaaccccttgcgagaccatccccagccatttgaggagggactgaggcggctccaagagggggaccttcctaatgctgtgttgttgtttgaggctgccgtgcagcaggaccctaagcacatggaagcgtggcagtaccttggtacaacccaggccgaaaatgagcaagagctgctggctatcagcgccctgcgtcgctgcctggaacttaagccggataatcagacggccttaatggccctagccgttagcttcactaatgagtctctccaaagacaggcctgtgagaccctgcgcgactggcttagatacaccccagcctatgcccatttggtaacccccgccgaagagggggcaggaggcgctggactgggaccatctaagagaatcttgggttctctactcagcgatagtctcttcttggaagtgaaagagctctttctggctgcagtgagacttgacccgactagcatagaccccgacgtccagtgtggtctgggtgttctgttcaatctgtctggcgaatacgacaaggccgtggattgcttcaccgccgccctaagtgtgcgcccgaatgactacctactgtggaacaagctgggagccactctggcgaatgggaaccagagcgaagaggcggtagcagcatatagacgtgctctggaactacagccgggatatattaggtctagatataatctggggatctcttgtatcaatttgggcgcccatagggaagctgtggagcattttcttgaggcactgaatatgcagagaaagtctagaggcccacggggggagggaggtgctatgtctgagaatatatggtcgactctgcgattggcactgtccatgctggggcagtctgatgcatacggcgcagccgacgcgcgagatctgtcaaccctactgacaatgtttggacttccccagtag

SEQ ID NO: 272536 - DNA, 1809 bp, Artificial Sequence
  derived and/or modified sequence
atggccatgagggagctggtggaggccgagtgtggcggggccaaccccctgatgaagctggccggccacttcacccaggacaaggccctgcggcaggagggcctgcggcccggcccctggcccccaggggccccagccagcgaggccgccagcaagcccctgggcgtggcctctgaagatgagctggtggccgagttcctgcaggaccagaatgcccccctggtgtcccgggccccccagaccttcaagatggatgacctgctggccgagatgcagcagatcgagcagagcaacttccggcaggccccccagagggcccctggggtggccgacctggccctgtctgagaactgggcccaggagttcctggccgctggagatgctgtggatgtgacccaggactacaatgaaacagactggagccaggagttcatcagcgaggtgacagaccccctgtctgtgtccccagcccgctgggccgaggagtacctggagcagagcgaggagaagctgtggctgggggagcctgagggcacagccacagaccgctggtatgatgagtaccaccctgaggaggacctgcagcacacagccagtgactttgtggccaaggtggatgaccccaagctggccaacagcgagggcaccagtgatgcctgggtggaccagttcaccaggcctgtgaacaccagcgccctggacatggagtttgagcgggccaagagcgccatcgagagtgatgtggacttctgggacaagctgcaggccgagctggaggagatggccaagagagatgctgaggcccacccctggctgagtgactatgatgacctgaccagcgccacctatgacaagggctaccagtttgaggaggagaaccccctgcgggaccacccccagccctttgaggagggcctgcggcggctgcaggagggggacctgcccaatgctgtgctgctgtttgaagctgctgtgcagcaggaccccaagcacatggaggcctggcagtacctgggcaccacccaggccgagaatgagcaggagctgctggccatcagcgccctgcggcgctgcctggagctgaagccagacaaccagacagccctgatggccctggccgtgtccttcaccaatgaaagcctgcagaggcaggcctgtgagaccctgcgggactggctgcgctacaccccagcctatgcccacctggtgaccccagctgaggagggcgctgggggcgccggcctgggccccagcaagaggatcctgggcagcctgctgagtgacagcctcttcctggaggtgaaggagctgttcctggccgctgtgcggctggaccccaccagcattgatcctgatgtgcagtgtggcctgggcgtgctcttcaacctgagcggggagtatgacaaggctgtggactgcttcaccgctgccctgtctgtgcggcccaatgactacctgctgtggaacaagctgggcgccaccctggccaatggaaaccagagcgaggaggccgtggccgcctacagaagagccctggagctgcagcccggctacatccgcagccgctacaacctgggcatcagctgcatcaacctgggcgcccaccgggaggccgtggagcacttcctggaggccctgaacatgcagaggaagagccggggccccagaggagagggcggggccatgtctgagaacatctggagcaccctgcggctggccctgtccatgctgggccagagtgatgcctatggagctgctgatgcccgggacctgagcaccctgctgaccatgtttggcctgccccagtag

SEQ ID NO: 272537 - DNA, 1809 bp, Artificial Sequence
  derived and/or modified sequence
atggccatgcgggagctggtggaggccgagtgcggcggcgccaacccgttaatgaagctggccgggcacttcacacaggacaaggctctcagacaagagggactgaggcctggcccatggccaccaggcgcccctgcttctgaagctgcatccaagccactaggagtcgccagcgaggacgaactggttgcagaattcctgcaagatcagaacgcacccttggttagccgggcgccccagacctttaagatggatgatctcctggccgaaatgcaacagatcgaacaatccaatttccgacaggccccgcaacgtgccccgggggtggcggacctggcgctctcagagaactgggcccaagagttccttgccgctggtgacgcagtcgacgttacccaagactacaatgaaacagactggtctcaggaattcataagtgaggtaactgatcccctgtccgtttccccggccagatgggccgaagaatatttggagcagagtgaagagaagctatggttgggagaaccagaaggcacggccaccgacagatggtacgacgagtatcacccggaagaggatcttcagcacactgcatctgacttcgtggctaaggtagatgatccaaagctggccaacagcgagggtacttcagacgcgtgggttgatcaattcacaaggcctgtgaacacttccgctttggacatggagttcgagagggccaaaagcgctattgaatctgacgtggatttttgggataagctgcaagccgagctggaggaaatggcaaagcgcgatgcagaagcccacccctggctgtcggattatgacgacctgacctcagccacgtacgataagggatatcaatttgaggaggagaatccgttacgagaccaccctcagcctttcgaggagggtctccggcggctccaggagggggatcttccgaatgccgtgttgctgttcgaagccgcagtgcagcaagacccaaaacatatggaggcctggcaatacctgggcactacacaggctgagaatgagcaagaactgctggcaatatccgcacttagacgttgccttgagttgaaacctgacaaccaaacagctctcatggcgcttgccgtcagtttcacaaatgagtctctccagcgacaggcctgtgaaacgctgagagattggctgagatacacacccgcctacgctcacctggtcacgcctgccgaagagggggccgggggggccgggctcggcccgtcaaagcggattctaggttctctactaagtgacagccttttcctggaagtgaaggagctgtttttggcggcagttcggctggaccccaccagcatcgatcccgacgtacagtgtggcctgggcgttctatttaacctgagtggcgagtatgataaagccgtggactgcttcaccgccgccctgtctgtccgaccgaacgattaccttttatggaataagctgggtgctaccttggccaatggcaaccagagtgaagaggccgtcgccgcatatagacgggccctggagctacagccaggctacatcaggtcccggtataacctgggaataagttgcatcaatttgggcgcccatagagaagcagtagagcactttctggaagccctcaatatgcagcgaaagtccagaggaccacggggggagggtggggctatgtccgagaacatctggagcacactgcggctggccctgtcaatgctgggtcagtccgacgcatatggggctgctgacgccagagatctctccaccttgctcacgatgttcggcctgccacaatag

SEQ ID NO: 272538 - DNA, 3252 bp, Artificial Sequence
  derived and/or modified sequence
cttaaggccccgccttttcagacagcttccgctgggcctgggccgctgcggggcggtcacggcccctttaagcctgagccccgccccctggctccccgccccctcttctcccctcccccaagccagcacctggtgccccggcgggtcgtgcggcgcggcgctccgcgagagctggcggtcaccatggcaatgcgggagctggtggaggccgaatgcgggggtgccaacccgctcatgaagctcgccgggcacttcacccaggacaaggcccttcggcaggagggattgaggcctggcccctggccccccggagccccggcctctgaggcagcctccaagcctttgggagtagcttctgaagatgagttggtggctgaattcctgcaggaccagaatgcaccccttgtgtcccgtgcccctcagaccttcaagatggatgacctcctggctgagatgcagcagattgagcagtcaaacttccgccaggctccccagagagcccctggtgtggcagacttggccttgtctgagaactgggcccaggagtttcttgcagctggagatgctgtggatgtaactcaggattataatgagactgactggtcccaagaattcatctctgaagttacagaccccttgtctgtgtcccctgcccgctgggctgaggaatatttggagcaatcagaggagaagctgtggctgggagaacctgagggaacagccaccgatcgctggtatgatgaatatcatcctgaggaggatctgcagcacacggccagtgactttgtggccaaagtggatgaccccaaattggctaattctgagggtacatcagatgcctgggttgaccagttcacaagaccagtaaacacatctgcccttgatatggagtttgaacgagccaagtcagctatagagtctgatgtcgatttctgggacaagttgcaggcagagttggaggagatggcaaaacgggatgctgaggcccacccctggctttctgactatgatgaccttacgtcagctacctatgataaggggtaccagtttgaggaggagaaccccttgcgtgatcaccctcagccttttgaagaagggctgcggcgccttcaggagggggacctgccaaatgctgtgctgctttttgaggcagctgtgcagcaggatcctaagcacatggaagcttggcagtatctgggtaccacccaggcagagaatgaacaagaactattagccatcagtgcattgcggaggtgtctggagctaaagccagataaccagacagcactgatggcgctggctgtgagcttcaccaacgagtccctgcagcgacaggcctgtgaaaccctacgagactggctgcggtacacaccagcctatgcccatctggtgacacctgctgaagaaggggctggtggggcaggactgggccccagcaagcgtatcctgggatctctcttgtctgactccctgtttcttgaagtgaaagagctcttcctggcagctgtgcggctggaccctacctccattgaccctgatgtgcagtgtggcttgggagtccttttcaacctgagtggggagtatgacaaggccgtggactgcttcacagctgccctcagcgttcgtcccaatgactatttgctgtggaataagctaggcgccaccctggccaatggaaaccagagtgaagaagcagtagctgcgtaccgccgggccctcgagctccagcctggctatatccggtcccgctataacctgggcatcagctgcatcaacctcggggctcaccgggaggctgtggagcactttctggaggccctgaacatgcagaggaaaagccggggcccccggggtgaaggaggtgccatgtcggagaacatctggagcaccctgcgtttggcattgtctatgttaggccagagcgatgcctatggggcagccgacgcgcgggatctgtccaccctcctaactatgtttggcctgccccagtgacagtgggacgggctgccctgtgagtgtccacctggagggatccccgctttggatgtgattccctctccccaaatgggcctaccaagggggcgggctgatgaccataagcggtacggcctttcaggagctgcctcaacgtaggggtgggtagtctgtgttctagttcctacataattgtaggaaaatgagctgtgtcatctctgagtcccttggtaattcaagggctgtacatccagctacagatctctctgctcatcatgccctttcttggtgctgctttttgggtaggaccccacgatttagggtaactgttatcatcagctgccatttctgatagggtctaccacatctgtaatgtctgtcctttcccccacttttactgggaattgatagtccagcttccttgggcagtgtaagtaggaggttcatctgctgtgcgcctctaatgtctgtctggatgggatgtgttaggagttggcctgttgggttgaattgttgatttggctgagcagagctgagttttggtaggagtgctcatggttctgtcattcttggacctctcctggctgagctctgattccctgtgagcacgatgctgatgcaatagtcctgtgtcatcactgcagcggtcctcaggagctgccagggccaattgctacagagtgtctgggtgtgtggcataggaggaaggtttgcttgtgaaatgaggctgggtgggagcggggagggactagatcagaagagatcaagggctctattcaggaacgttggtgggaggacagagcaagtgggaagggggtatggtgagtgcggcaatccctcatcctcttagaagcacctgtgaatgggaattgagccaactgttatagaaaattggttcagaaagtgcaatcttgccagatttctagcaaataggttcagtgttaccataagcctttgctgtacttcttgaaatgtttctaggggagagcattggaaaatccccttcccccatctagatcgaaggaagatgagggagcagcttggattcttctcagttgtcccctgcatggggagatacactaacccccagaaatgactgctaagcctcttgccttgtctttagtagctaatgatcagagagattttttttttaaactaccatggtcccaggattccatcctgaaatttatttttctttgtatgaatatgtgtaaatgatttaaaaataaaactgtaaaatatttgtacgaagaataaatggaactgatgtgggtatga

SEQ ID NO: 272539 - DNA, 567 bp, Artificial Sequence
  derived and/or modified sequence
aagcggtggcctttgaggggggcggcaggagagagtaccgacctccctcgaactcctggcagaggtgggggtcgcagcaaaagcactggggtggagggcggccagtgtggggcagacgcctgtgtgccttcctcagatacgggcagagttgtggatgtgagaagggtctggcttgggtacctcagttccaaacctcctgtgtccatcagagagctggcggtcaccatggcaatgcgggagctggtggaggccgaatgcgggggtgccaacccgctcatgaagctcgccgggcacttcacccaggacaaggcccttcggcaggagggattgaggcctggcccctggccccccggagccccggcctctgaggcagcctccaagcctttgggagtagcttctgaagatgagttggtggctgaattcctgcaggaccagaatgcaccccttgtgtcccgtgcccctcagaccttcaagatggatgacctcctggctgagatgcagcagattgagcagtcaaacttccgccaggctccccagagagcccctggtgtggcagacttggccttg

SEQ ID NO: 272540 - DNA, 641 bp, Artificial Sequence
  derived and/or modified sequence
gaagaaggcttcggactggactccccagcccctggtgttagggcttttctctttcttgggcttgggaacattagccagccccattttagaggggaaaactgaggctcagaaagggcactgaatccccttaggtcacaatgcgcccaagggaagaggcaggatcgactgagcctaggatctcgcgtcttcggctttcccccagagcctgggaagcccttcttagctccactcttctttgagctttccgtcaaacaaatcctagggcccgtggccttttcgagcgctcctaaaggcgactctccaagacccgctctctaagagagctggcggtcaccatggcaatgcgggagctggtggaggccgaatgcgggggtgccaacccgctcatgaagctcgccgggcacttcacccaggacaaggcccttcggcaggagggattgaggcctggcccctggccccccggagccccggcctctgaggcagcctccaagcctttgggagtagcttctgaagatgagttggtggctgaattcctgcaggaccagaatgcaccccttgtgtcccgtgcccctcagaccttcaagatggatgacctcctggctgagatgcagcagattgagcagtcaaacttccgccaggct

SEQ ID NO: 272541 - DNA, 579 bp, Artificial Sequence
  derived and/or modified sequence
tcccccaagccagcacctggtgccccggcgggtcgtgcggcgcggcgctccgcgtgtcgccgtccagcctggttgttgaagcgtccccgtggtcccccggggtccaggcccctttgtggaggcagctgctggcccccagcccatgggaccgtagtcgcggaggcctctgcagaggcgcaggctggaagcggtggcctttgaggggggcggcaggagagagtaccgacctccctcgaactcctggcagagagagctggcggtcaccatggcaatgcgggagctggtggaggccgaatgcgggggtgccaacccgctcatgaagctcgccgggcacttcacccaggacaaggcccttcggcaggagggattgaggcctggcccctggccccccggagccccggcctctgaggcagcctccaagcctttgggagtagcttctgaagatgagttggtggctgaattcctgcaggaccagaatgcaccccttgtgtcccgtgcccctcagaccttcaagatggatgacctcctggctgagatgcagcagattgagcagtcaaacttccgccaggctccccagag

SEQ ID NO: 272542 - DNA, 1809 bp, Artificial Sequence
  derived and/or modified sequence
atggccatgcgagagctggtcgaagccgaatgtggcggtgcaaatccactaatgaagctggctggacattttactcaggataaagctctgaggcaggagggcttgagaccaggaccatggccccctggagcgccagctagcgaggccgcatcaaagcccttaggggtcgcctcagaggatgaattggtagccgagttcctccaagaccagaacgctccgctggtatctcgagctccacagacatttaagatggacgatctgttggccgaaatgcagcagatcgagcagagcaattttagacaggcaccacagcgcgctccaggagtggcggatctcgcactgtcggaaaactgggctcaggagtttctcgccgcaggcgatgctgtcgacgtcactcaagattacaacgaaactgactggtctcaggaattcattagcgaagtgacagatccactaagcgtatccccagccaggtgggccgaagagtacctggagcaatccgaagaaaagttgtggctgggcgaacctgagggcacagcaaccgacagatggtacgatgagtatcaccctgaagaagacctccagcacacggctagtgacttcgttgctaaggtcgatgatcctaagctggccaattccgagggcacatccgatgcttgggtggaccagttcactcgaccagtgaacacgtccgctttagacatggaatttgagcgagctaaaagtgccatcgagagcgacgttgatttctgggataaactacaggcagaacttgaggaaatggctaagagggatgccgaagcccatccctggctatctgactatgacgatcttacttcagcgacatacgacaaggggtatcaattcgaagaagagaatccgctgcgcgaccacccgcagccttttgaagaagggctaaggcggttacaggagggtgatctgccaaacgcagtcctgctgtttgaagcggctgtacaacaggatcctaagcacatggaagcatggcaatatctcgggaccacacaggctgagaatgagcaggagttgctggccatcagcgcattacgccgttgtctggagcttaaacccgataaccagaccgcccttatggccctggctgtgtcctttaccaatgagagcctccagaggcaagcctgtgagacactgagggattggctgaggtacaccccagcctatgcccatttggtgacccccgctgaggagggagccggaggggctggactcgggcctagtaagcggatcctgggatcactcctctctgatagtttatttttggaggtgaaagagctgttcctagccgcagtgcgactggatccaacatcaattgaccctgatgtgcagtgcggtttaggggtgctgtttaacctgtcaggtgagtacgacaaggccgtggactgttttaccgccgctttaagcgtgaggcctaatgattacctcctctggaataaattgggtgccactctcgccaacggcaatcagagtgaggaagccgtcgccgcatacaggagggcgctcgagctccagcccggatatatccgcagccgctataatctgggcatcagttgtattaacttgggtgctcaccgtgaagcggtggagcacttcctggaggctctgaacatgcagcgcaagtcccggggaccaaggggggaggggggagccatgagtgaaaatatctggtctaccttgaggctggccttgagcatgctgggccagtccgacgcatatggagctgctgacgcccgagaccttagcacgctcttgacaatgttcggcctgccccagtag

SEQ ID NO: 272543 - DNA, 1809 bp, Artificial Sequence
  derived and/or modified sequence
atggccatgagagagctggtggaggccgagtgcggcggcgccaaccccctgatgaagctggccggccacttcacccaggacaaggccctgagacaggagggcctgagacccggcccctggccccccggcgcccccgccagcgaggccgccagcaagcccctgggcgtggccagcgaggacgagctggtggccgagttcctgcaggaccagaacgcccccctggtgagcagagccccccagaccttcaagatggacgacctgctggccgagatgcagcagatcgagcagagcaacttcagacaggccccccagagagcccccggcgtggccgacctggccctgagcgagaactgggcccaggagttcctggccgccggcgacgccgtggacgtgacccaggactacaacgagaccgactggagccaggagttcatcagcgaggtgaccgaccccctgagcgtgagccccgccagatgggccgaggagtacctggagcagagcgaggagaagctgtggctgggcgagcccgagggcaccgccaccgacagatggtacgacgagtaccaccccgaggaggacctgcagcacaccgccagcgacttcgtggccaaggtggacgaccccaagctggccaacagcgagggcaccagcgacgcctgggtggaccagttcaccagacccgtgaacaccagcgccctggacatggagttcgagagagccaagagcgccatcgagagcgacgtggacttctgggacaagctgcaggccgagctggaggagatggccaagagagacgccgaggcccacccctggctgagcgactacgacgacctgaccagcgccacctacgacaagggctaccagttcgaggaggagaaccccctgagagaccacccccagcccttcgaggagggcctgagaagactgcaggagggcgacctgcccaacgccgtgctgctgttcgaggccgccgtgcagcaggaccccaagcacatggaggcctggcagtacctgggcaccacccaggccgagaacgagcaggagctgctggccatcagcgccctgagaagatgcctggagctgaagcccgacaaccagaccgccctgatggccctggccgtgagcttcaccaacgagagcctgcagagacaggcctgcgagaccctgagagactggctgagatacacccccgcctacgcccacctggtgacccccgccgaggagggcgccggcggcgccggcctgggccccagcaagagaatcctgggcagcctgctgagcgacagcctgttcctggaggtgaaggagctgttcctggccgccgtgagactggaccccaccagcatcgaccccgacgtgcagtgcggcctgggcgtgctgttcaacctgagcggcgagtacgacaaggccgtggactgcttcaccgccgccctgagcgtgagacccaacgactacctgctgtggaacaagctgggcgccaccctggccaacggcaaccagagcgaggaggccgtggccgcctacagaagagccctggagctgcagcccggctacatcagaagcagatacaacctgggcatcagctgcatcaacctgggcgcccacagagaggccgtggagcacttcctggaggccctgaacatgcagagaaagagcagaggccccagaggcgagggcggcgccatgagcgagaacatctggagcaccctgagactggccctgagcatgctgggccagagcgacgcctacggcgccgccgacgccagagacctgagcaccctgctgaccatgttcggcctgccccagtag

SEQ ID NO: 272544 - protein, 827 aa, Artificial Sequence
  derived and/or modified sequence
MAAEEVLQTVDHYKTEIERLTKELTETTHEKIQAAEYGLVVLEEKLTLKQQYDELEAEYDSLKQELEQLKEAFGQSFSIHRKVAEDGETREETLLQESASKEAYYLGKILEMQNELKQSRAVVTNVQAENERLTAVVQDLKENNEMVELQRIRMKDEIREYKFREARLLQDYTELEEENITLQKLVSTLKQNQVEYEGLKHEIKRFEEETVLLNSQLEDAIRLKEIAEHQLEEALETLKNEREQKNNLRKELSQYISLNDNHISISVDGLKFAEDGSEPNNDDKMNGHIHGPLVKLNGDYRTPTLRKGESLNPVSDLFSELNISEIQKLKQQLMQVEREKAILLANLQESQTQLEHTKGALTEQHERVHRLTEHVNAMRGLQSSKELKAELDGEKGRDSGEEAHDYEVDINGLEILECKYRVAVTEVIDLKAEIKALKEKYNKSVENYTDEKAKYESKIQMYDEQVTSLEKTTKESGEKMAHMEKELQKMTSIANENHSTLNTAQDELVTFSEELAQLYHHVCLCNNETPNRVMLDYYRQSRVTRSGSLKGPDDPRGLLSPRLARRGVSSPVETRTSSEPVAKESTEASKEPSPTKTPTISPVITAPPSSPVLDTSDIRKEPMNIYNLNAIIRDQIKHLQKAVDRSLQLSRQRAAARELAPMIDKDKEALMEEILKLKSLLSTKREQIATLRAVLKANKQTAEVALANLKNKYENEKAMVTETMTKLRNELKALKEDAATFSSLRAMFATRCDEYVTQLDEMQRQLAAAEDEKKTLNTLLRMAIQQKLALTQRLEDLEFDHEQSRRSKGKLGKSKIGSPKTIFTFPL

SEQ ID NO: 272545 - DNA, 2484 bp, Artificial Sequence
  derived and/or modified sequence
atggcagccgaggaagtgctccagacagtggatcactataagacagagatcgagcgcctcactaaggagctcacagaaaccacgcacgagaaaatacaggccgccgaatatggcctggtcgttctcgaagagaaactgaccctcaagcaacaatacgacgaacttgaagccgaatacgacagcctgaaacaagaactcgagcagttaaaggaagcctttggccaaagcttttccattcatcggaaggtggccgaagacggggagactcgcgaggaaaccctcctgcaggaaagtgccagcaaagaagcctactacctgggtaaaattttggagatgcaaaatgaacttaaacagagtcgcgctgtggtcaccaacgtgcaggctgagaatgagcgcctaacggccgtggtgcaggatctaaaggagaataatgaaatggtggagttacaaaggattcgcatgaaggacgaaatccgagaatacaaattcagggaagcccgtttactacaggactatacggaactcgaagaggaaaatattacactccagaagctggtgagcacactaaaacagaatcaggtggagtatgaggggctaaagcacgaaattaagcggtttgaggaagagacagtcctcttaaacagccaactggaagatgccatccgtctgaaggaaatcgcagagcatcagctggaggaggccctggaaactttaaagaatgaaagagaacagaagaacaatctccgaaaggagctgtcacagtatattagcctcaacgataatcacatatccatctctgtagacggcctcaagtttgcagaggatggatcagagccgaacaacgatgacaagatgaacggacatatacacggtccactcgtgaaactaaatggcgactatcgtacacctactctgaggaaaggtgaaagcttgaacccagtgagtgatctattttcagagctcaatatcagcgaaatacaaaagctgaagcagcagctcatgcaggtcgaacgggaaaaagcgattttactggcaaacttgcaagaaagccagacacagctggagcatactaagggcgcattgacagaacaacatgaaagggtgcacagactgacagaacatgtgaacgctatgcggggattacaatcttccaaggagctgaaggctgaactggacggggagaagggcagggactccggggaagaggcgcatgactacgaggtggatatcaacggcttggagattttagagtgcaagtacagagttgctgttaccgaagttatcgatctcaaggctgaaattaaagcactcaaggagaagtataataagtccgttgagaattacacagacgagaaggccaagtacgaatccaaaattcaaatgtacgacgagcaggttacctctctcgaaaagacgactaaggagtccggagaaaaaatggctcatatggaaaaagagctgcagaaaatgacctctattgccaatgaaaaccatagcacactgaacacagcacaggacgagttagtaacgttcagcgaagagctcgcacagctgtaccatcacgtatgtctgtgcaacaacgagacaccaaatcgtgtaatgctggactactacaggcagagccgagttacccgatcgggaagtctgaaaggcccggatgaccccaggggattgttgtcacctagactggctcgacggggggtatcgtctccagtggaaaccaggacatcttccgagcccgtagctaaagagtccaccgaggcctcaaaggaaccatctcccacgaaaaccccaaccatcagcccagtgatcaccgccccaccttcgtcacccgttctggatacctccgacattcgaaaggaacctatgaacatctataacctcaacgccataatcagggatcaaatcaaacacctgcagaaggcagtggacagaagcttgcaactgtcgcggcagcgagcggcggcgcgcgaactagccccaatgatcgacaaagacaaagaagccctaatggaggagatccttaagctcaaatcccttcttagtactaagcgggaacagatcgccactctccgcgccgtgcttaaagccaacaaacaaaccgctgaggtggctttagccaacctcaaaaacaagtacgagaacgagaaggcaatggttactgagacaatgacaaaattgaggaacgagttgaaggccttgaaagaggacgcggccaccttttctagtcttcgcgccatgttcgcaaccaggtgcgatgagtatgtcacccaattagacgaaatgcagcgacagctggccgctgccgaggatgaaaaaaaaaccttgaacacgctgctgcggatggcgatccaacagaagctagccctcacccaaagactggaggacctggagtttgatcacgagcagtctcggcgcagtaagggcaagcttggaaagtcaaagatcggatcaccaaagaccatttttacttttcctctctag

SEQ ID NO: 272546 - DNA, 2484 bp, Artificial Sequence
  derived and/or modified sequence
atggctgctgaggaggtgctgcagacagtggaccactacaagacagaaattgagcggctgaccaaggagctgacagagaccacccatgagaagatccaggccgcagaatatggcctggtggtgctggaggagaagctgaccctgaagcagcagtatgatgagctggaggccgagtatgacagcctgaagcaggagctggagcagctgaaggaggccttcggccagagcttcagcatccacaggaaggtggctgaagatggagagacccgggaggagaccctgctgcaggagagcgccagcaaggaggcctactacctgggcaagatcctggagatgcagaatgagctgaagcagagcagagctgtggtgaccaacgtgcaggctgaaaatgaaaggctgacagctgtggtgcaggacctgaaggagaacaatgagatggtggagctgcagaggatccgcatgaaggatgagatccgggagtacaagttccgggaggcccggctgctgcaggactacacagagctggaggaggagaacatcaccctgcagaagctggtgtccaccctgaagcagaaccaggtggagtatgagggcctgaagcatgagatcaagagatttgaggaggagaccgtgctgctgaacagccagctggaggatgccatccggctgaaggagattgctgagcaccagctggaggaggccctggagaccctgaagaatgaaagagagcagaagaacaacctgaggaaggagctgagccagtacatcagcctgaatgacaaccacatcagcatctctgtggatggcctgaagtttgctgaagatggcagcgagcccaacaatgatgacaagatgaatggccacatccacggccccctggtgaagctgaatggagactaccgcacccccaccctgaggaaaggagagagcctgaaccctgtgtctgacctcttcagcgagctgaacatcagcgagatccagaagctgaagcagcagctgatgcaggtggagcgggagaaggccatcctgctggccaacctgcaggagagccagacccagctggagcacaccaagggggccctgacagagcagcacgagcgggtgcaccggctgacagagcacgtgaatgccatgaggggcctgcagagcagcaaggagctgaaggccgagctggatggagagaagggccgggacagcggggaggaggcccatgactatgaggtggacatcaatggcctggagatcctggagtgcaagtacagagtggccgtgacagaggtgattgacctgaaggccgagatcaaggccctgaaggagaagtacaacaagtctgtggagaactacacagatgagaaggccaagtatgagagcaagatccagatgtatgatgagcaggtgaccagcctggagaagaccaccaaggagagcggggagaagatggcccacatggagaaggagctgcagaagatgaccagcatcgccaatgaaaaccacagcaccctgaacacagcccaggatgagctggtgaccttcagcgaggagctggcccagctgtaccaccacgtgtgcctgtgcaacaatgagacccccaacagagtgatgctggactactaccggcagagccgggtgaccaggagcggcagcctgaagggcccagatgacccccggggcctgctgagcccccggctggccaggagaggagtgagcagccctgtggagaccaggaccagcagcgagcctgtggccaaggagagcacagaggccagcaaggagcccagccccaccaagacccccaccatcagccctgtgatcacagccccacccagcagccctgtgctggacaccagtgacatcaggaaggagcccatgaacatctacaacctgaatgccatcatccgggaccagatcaagcacctgcagaaggctgtggacaggagcctgcagctgagccggcagagagctgctgcccgggagctggcccccatgattgacaaggacaaggaggccctgatggaggagatcctgaagctgaagagcctgctgagcaccaagcgggagcagatcgccaccctgcgggctgtgctgaaggccaacaagcagacagctgaggtggccctggccaacctgaagaacaagtatgaaaatgagaaggccatggtgacagagaccatgaccaagctgagaaatgagctgaaggccctgaaggaggatgctgccaccttcagcagcctgcgggccatgtttgccacccgctgtgatgaatatgtgacccagctggatgagatgcagaggcagctggccgctgctgaagatgagaagaagaccctgaacaccctgctgaggatggccatccagcagaagctggccctgacccagaggctggaggacctggagtttgaccacgagcagagcagaagaagcaagggcaagctgggcaagagcaagattggcagccccaagaccatcttcaccttccccctgtag

SEQ ID NO: 272547 - DNA, 2484 bp, Artificial Sequence
  derived and/or modified sequence
atggccgccgaggaggtgctgcagaccgtggaccactacaagaccgaaattgagagattgaccaaggagttgactgaaactacccacgaaaaaattcaggccgccgagtacgggctggtggtcttggaggagaaactcactcttaagcagcagtatgatgagctggaggccgagtacgacagtctgaagcaagagctggagcaactcaaggaagcatttggacagtcattttcaattcataggaaagtcgctgaggatggggagaccagagaggagacactactgcaggagtcggcctctaaggaggcctactaccttggcaagattctggagatgcagaacgagctgaagcagtctcgagcagtggtcacgaacgtgcaagctgagaacgagcgtctgacagccgtagtacaggacctgaaggagaataacgagatggtggagcttcagcgaatccggatgaaagatgagatcagggaatataagtttagggaagcaagattgctgcaggactataccgagctcgaggaggagaatatcactcttcagaagctggtatctacactcaagcagaaccaggtggagtacgagggcttaaagcacgagatcaagaggttcgaagaagagactgttcttttgaattcacagttagaggatgcaattcgactcaaggaaatcgctgagcaccaactggaagaggcgctggaaacactgaaaaacgagcgcgagcaaaagaataacctgagaaaagagttgagccagtacatctccctgaacgacaaccacatttcaatctcggtggatggcttgaagtttgccgaggacggcagcgaacccaacaacgatgataagatgaacgggcacattcatggtccattagtaaaattgaacggtgattatagaaccccgaccttgaggaagggcgagagtctgaacccagtatcagatctgttcagcgagctgaacatctctgagatccagaagttaaaacagcaacttatgcaggtcgagcgcgaaaaagccatcctgctggctaacctgcaggagtcccagactcaactcgagcatactaagggggcactcactgagcagcacgaaagggttcaccgcctaactgaacacgtgaacgccatgcggggactccagagctccaaagaacttaaagccgaactggacggggagaagggtagggatagtggtgaggaagctcacgactatgaagtggatattaatggattggagatacttgaatgcaaatacagagtcgccgtgaccgaagtgatcgatctcaaagccgagattaaggccctcaaagaaaagtacaataagtcagtcgagaattacaccgacgagaaggctaaatatgagtcaaagattcagatgtatgatgagcaagtgacttccttggagaagactaccaaggagagtggcgagaagatggcacatatggagaaggagctacaaaaaatgacctcaattgcaaatgaaaaccactccacactaaatacggcccaggatgaattggtcacattctctgaagagttggcccagctataccaccatgtgtgcctttgcaataacgaaactccaaatcgggtgatgctggactattataggcagtcacgcgtgacaagaagcgggtccctgaagggtccagatgacccaagagggctcttaagccctaggttggcccgccggggtgtgagttctcctgtggagacccggacctcctctgagcctgtagctaaggagtccacagaggcgtcaaaggagccttcacccaccaaaacgccaactatctcccccgtgatcactgctcctccttcttcccccgtcctggacaccagcgacatccgcaaggagccaatgaacatctataatctgaacgcgattattagggaccagattaaacacctccagaaggccgtcgaccgcagcttgcagttgtctagacaaagggcagcagcccgggagctcgccccaatgatcgataaggacaaggaggcactcatggaagagatactcaaacttaaatcccttctctcaaccaagagagagcagattgcaacgctgcgagctgtcttgaaggccaataagcagaccgctgaggtggctctggccaacctgaaaaataagtatgaaaacgagaaagctatggtaacggaaactatgacaaagctgcgcaatgaattaaaagccctaaaagaggacgctgccacgttctcttcactgagggccatgtttgccactagatgcgatgaatacgtcacccagctcgacgaaatgcagcggcagctggccgctgctgaggatgaaaaaaagacactcaacactctcctaagaatggcaatacagcagaaactggctttgactcagcggctcgaggatctggaatttgaccacgaacagtctcgccgctcaaagggcaaactgggtaagtcgaagatcgggagcccaaaaactatctttactttccccctctag

SEQ ID NO: 272548 - DNA, 2484 bp, Artificial Sequence
  derived and/or modified sequence
atggccgcagaggaagttctgcagacggtggatcactacaagactgagatagaaaggctcacgaaggagctgactgagactacccatgaaaaaatccaggcagcagagtacgggctcgtcgttcttgaggagaaactcacactgaaacagcagtacgatgagttggaagccgagtatgacagcctcaaacaagaattagagcaattgaaggaggctttcggacaaagcttttcaattcatcgaaaagtcgcggaagacggcgagactcgtgaagagaccctcttgcaggaatctgcatctaaggaggcatattaccttggtaagattttggagatgcaaaacgagcttaagcagagccgagcggttgtcacgaacgttcaggcagaaaatgagcgactcacagccgttgtccaggacctgaaggaaaacaacgagatggttgagctccaacgcataaggatgaaggacgaaattcgggaatataagttccgggaagctagactgctacaagattacacagagctcgaggaggagaacataactcttcagaaacttgtttcaacactgaaacagaaccaggtcgaatatgagggtctcaaacacgagatcaagcgctttgaggaagaaaccgtcctcctgaactcccaattagaggatgctatcaggttgaaagagatcgctgagcatcaactggaggaggctcttgagacgctaaagaatgagcgggagcagaaaaataatttgagaaaagaactctcacagtatatttctcttaatgacaaccacattagcatctcggttgatggcttgaaattcgcagaggatggatctgaacccaacaatgatgacaagatgaacggtcatatccatggcccacttgtgaagcttaacggggactataggacacccactctgcgaaagggtgagagcctgaaccctgtgtccgatctgtttagcgaactgaatatatcagaaatccaaaagcttaagcaacaactgatgcaagtcgagagggagaaagccattctgttagcaaatctgcaggaatcccagacccagctcgagcataccaaaggagctctgaccgagcaacacgaacgagtgcacaggcttaccgagcacgtgaatgccatgcggggactgcagtcaagcaaggaactgaaggccgagctggatggagagaaggggcgtgactccggagaggaggctcatgactatgaggtcgacatcaacgggctggaaatcctcgagtgcaaatatagagtggctgtcaccgaagtgattgatttgaaggccgagatcaaggcactgaaggagaagtacaacaagtccgtcgaaaattatacagacgagaaggccaagtacgagtctaaaatacagatgtatgacgaacaggtgacctcactggaaaagacaaccaaggagtctggggagaaaatggcccacatggaaaaggaactccagaaaatgacctccatcgctaacgagaatcattctacgctcaacactgcccaggatgagctggtaacatttagcgaggagttagcccagctttatcaccacgtgtgtctgtgtaataacgaaacacccaaccgggtcatgcttgattactacagacaaagcagagtcacaaggagcggaagtctcaaggggcctgacgatccaagagggttactgtccccccgtcttgcgagaaggggagtatctagtccagtcgagacccggaccagctccgagccggtggccaaggagtcaacagaagcctcaaaagagccgtctcctacgaaaacccctacaatcagccctgtaataaccgccccacctagctccccggtgctcgacacctccgatatcagaaaggagcccatgaacatatataatctgaatgcaatcatcagagaccagatcaagcatttgcagaaagctgttgataggtcgctgcagctgagccgccagcgagctgccgcacgcgagctggcacccatgattgacaaagacaaggaggctttgatggaagaaattttaaaactcaagtctctgctttcaacgaagagggagcagattgccacccttagagctgtcctcaaagctaataaacagaccgctgaagtcgcgctggctaatcttaaaaataagtatgaaaacgagaaagccatggtcacagaaaccatgaccaagctgagaaatgagcttaaggccctgaaggaagacgcggcaaccttctctagtctgcgtgccatgtttgccaccagatgcgacgaatacgtaacacaattagacgagatgcagagacagctcgcagcggcagaagacgagaaaaagaccctgaacactcttctcagaatggctatccagcagaaactggcgttgactcagcggcttgaggatctcgaatttgaccacgaacagtctcggagaagcaaaggaaaactggggaagagcaaaatcgggtctcctaagacaatcttcactttcccactatag

SEQ ID NO: 272549 - DNA, 2484 bp, Artificial Sequence
  derived and/or modified sequence
atggccgccgaggaggtgctgcagaccgtggaccactacaagaccgagatcgagagactgaccaaggagctgaccgagaccacccacgagaagatccaggccgccgagtacggcctggtggtgctggaggagaagctgaccctgaagcagcagtacgacgagctggaggccgagtacgacagcctgaagcaggagctggagcagctgaaggaggccttcggccagagcttcagcatccacagaaaggtggccgaggacggcgagaccagagaggagaccctgctgcaggagagcgccagcaaggaggcctactacctgggcaagatcctggagatgcagaacgagctgaagcagagcagagccgtggtgaccaacgtgcaggccgagaacgagagactgaccgccgtggtgcaggacctgaaggagaacaacgagatggtggagctgcagagaatcagaatgaaggacgagatcagagagtacaagttcagagaggccagactgctgcaggactacaccgagctggaggaggagaacatcaccctgcagaagctggtgagcaccctgaagcagaaccaggtggagtacgagggcctgaagcacgagatcaagagattcgaggaggagaccgtgctgctgaacagccagctggaggacgccatcagactgaaggagatcgccgagcaccagctggaggaggccctggagaccctgaagaacgagagagagcagaagaacaacctgagaaaggagctgagccagtacatcagcctgaacgacaaccacatcagcatcagcgtggacggcctgaagttcgccgaggacggcagcgagcccaacaacgacgacaagatgaacggccacatccacggccccctggtgaagctgaacggcgactacagaacccccaccctgagaaagggcgagagcctgaaccccgtgagcgacctgttcagcgagctgaacatcagcgagatccagaagctgaagcagcagctgatgcaggtggagagagagaaggccatcctgctggccaacctgcaggagagccagacccagctggagcacaccaagggcgccctgaccgagcagcacgagagagtgcacagactgaccgagcacgtgaacgccatgagaggcctgcagagcagcaaggagctgaaggccgagctggacggcgagaagggcagagacagcggcgaggaggcccacgactacgaggtggacatcaacggcctggagatcctggagtgcaagtacagagtggccgtgaccgaggtgatcgacctgaaggccgagatcaaggccctgaaggagaagtacaacaagagcgtggagaactacaccgacgagaaggccaagtacgagagcaagatccagatgtacgacgagcaggtgaccagcctggagaagaccaccaaggagagcggcgagaagatggcccacatggagaaggagctgcagaagatgaccagcatcgccaacgagaaccacagcaccctgaacaccgcccaggacgagctggtgaccttcagcgaggagctggcccagctgtaccaccacgtgtgcctgtgcaacaacgagacccccaacagagtgatgctggactactacagacagagcagagtgaccagaagcggcagcctgaagggccccgacgaccccagaggcctgctgagccccagactggccagaagaggcgtgagcagccccgtggagaccagaaccagcagcgagcccgtggccaaggagagcaccgaggccagcaaggagcccagccccaccaagacccccaccatcagccccgtgatcaccgccccccccagcagccccgtgctggacaccagcgacatcagaaaggagcccatgaacatctacaacctgaacgccatcatcagagaccagatcaagcacctgcagaaggccgtggacagaagcctgcagctgagcagacagagagccgccgccagagagctggcccccatgatcgacaaggacaaggaggccctgatggaggagatcctgaagctgaagagcctgctgagcaccaagagagagcagatcgccaccctgagagccgtgctgaaggccaacaagcagaccgccgaggtggccctggccaacctgaagaacaagtacgagaacgagaaggccatggtgaccgagaccatgaccaagctgagaaacgagctgaaggccctgaaggaggacgccgccaccttcagcagcctgagagccatgttcgccaccagatgcgacgagtacgtgacccagctggacgagatgcagagacagctggccgccgccgaggacgagaagaagaccctgaacaccctgctgagaatggccatccagcagaagctggccctgacccagagactggaggacctggagttcgaccacgagcagagcagaagaagcaagggcaagctgggcaagagcaagatcggcagccccaagaccatcttcaccttccccctgtag

SEQ ID NO: 272550 - DNA, 1935 bp, Artificial Sequence
  derived and/or modified sequence
ggtgggaaaagaggacttattgttgtcatggcccatgagatgattggaactcaaattgttactgagaggttggtggctctgctggaaagtggaacggaaaaagtgctgctaattgatagccggccatttgtggaatacaatacatcccacattttggaagccattaatatcaactgctccaagcttatgaagcgaaggttgcaacaggacaaagtgttaattacagagctcatccagcattcagcgaaacataaggttgacattgattgcagtcagaaggttgtagtttacgatcaaagctcccaagatgttgcctctctctcttcagactgttttctcactgtacttctgggtaaactggagaagagcttcaactctgttcacctgcttgcaggagctgatgcagcagaatgggattggttatgtgttaaatgccagcaatacctgtccaaagcctgactttatccccgagtctcatttcctgcgtgtgcctgtgaatgacagcttttgtgagaaaattttgccgtggttggacaaatcagtagatttcattgagaaagcaaaagcctccaatggatgtgttctagtgcactgtttagctgggatctcccgctccgccaccatcgctatcgcctacatcatgaagaggatggacatgtctttagatgaagcttacagatttgtgaaagaaaaaagacctactatatctccaaacttcaattttctgggccaactcctggactatgagaagaagattaagaaccagactggagcatcagggccaaagagcaaactcaagctgctgcacctggagaagccaaatgaacctgtccctgctgtctcagagggtggacagaaaagcgagacgcccctcagtccaccctgtgccgactctgctacctcagaggcagcaggacaaaggcccgtgcatcccgccagcgtgcccagcgtgcccagcgtgcagccgtcgctgttagaggacagcccgctggtacaggcgctcagtgggctgcacctgtccgcagacaggctggaagacagcaataagctcaagcgttccttctctctggatatcaaatcagtttcatattcagccagcatggcagcatccttacatggcttctcctcatcagaagatgctttggaatactacaaaccttccactactctggatgggaccaacaagctatgccagttctcccctgttcaggaactatcggagcagactcccgaaaccagtcctgataaggaggaagccagcatccccaagaagctgcagaccgccaggccttcagacagccagagcaagcgattgcattcggtcagaaccagcagcagtggcaccgcccagaggtcccttttatctccactgcatcgaagtgggagcgtggaggacaattaccacaccagcttccttttcggcctttccaccagccagcagcacctcacgaagtctgctggcctgggccttaagggctggcactcggatatcttggccccccagacctctaccccttccctgaccagcagctggtattttgccacagagtcctcacacttctactctgcctcagccatctacggaggcagtgccagttactctgcctacagctgcagccagctgcccacttgcggagaccaagtctattctgtgcgcaggcggcagaagccaagtgacagagctgactcgcggcggagctggcatgaagagagcccctttgaaaagcagtttaaacgcagaagctgccaaatggaatttggagagagcatcatgtcagagaacaggtcacgggaagagctggggaaagtgggcagtcagtctagcttttcgggcagcatggaaatcattgaggtctcctgagaagaaagacacttgtgacttctatagacaatttttttttcttgttcacaaaaaaattccctgtaaatctgaaa

SEQ ID NO: 272551 - protein, 574 aa, Artificial Sequence
  derived and/or modified sequence
MNPFYFHAVNIILHCLVTLVLMYTCDKTVFKNRGLAFVTALLFAVHPIHTEAVAGIVGRADVLACLLFLLAFLSYNRSLDQGCVGGSFPSTVSPFFLLLSLFLGTCAMLVKETGITVFGVCLVYDLFSLSNKQDKSSNGALCPRSPQQPGSPQPSSLPGHPHRENGKQQRFPHKGAWGGCHSPLPPEPKSSGFPVSPRAVWSMMRYLRASSNRNFLLTMRPFLKRAILVLSYVLVILYFRLWIMGGSMPLFSEQDNPASFSPYILTRFLTYSYLLAFNVWLLLAPVTLCYDWQVGSIPLVETIWDMRNLATIFLAVVMALLSLHCLAAFKRLEHKEVLVGLLFLVFPFIPASNLFFRVGFVVAERVLYMPSMGYCILFVHGLSKLCTWLNRCGATTLIVSTVLLLLLFSWKTVKQNEIWLSRESLFRSGVQTLPHNAKVHYNYANFLKDQGRNKEAIYHYRTALKLYPRHASALNNLGTLTRDTAEAKMYYQRALQLHPQHNRALFNLGNLLKSQEKKEEAITLLKDSIKYGPEFADAYSSLASLLAEQVIVSHSSFFQCYCYMYKLMLHRFLY

SEQ ID NO: 272552 - protein, 645 aa, Artificial Sequence
  derived and/or modified sequence
VTERDSVSKKKKKRYLRASSNRNFLLTMRPFLKRAILVLSYVLVILYFRLWIMGGSMPLFSEQDNPASFSPYILTRFLTYSYLLAFNVWLLLAPVTLCYDWQVGSIPLVETIWDMRNLATIFLAVVMALLSLHCLAAFKRLEHKEVLVGLLFLVFPFIPASNLFFRVGFVVAERVLYMPSMGYCILFVHGLSKLCTWLNRCGATTLIVSTVLLLLLFSWKTVKQNEIWLSRESLFRSGVQTLPHNAKVHYNYANFLKDQGRNKEAIYHYRTALKLYPRHASALNNLGTLTRDTAEAKMYYQRALQLHPQHNRALFNLGNLLKSQEKKEEAITLLKDSIKYGPEFADAYSSLASLLAEQERFKEAEEIYQTGIKNCPDSSDLHNNYGVFLVDTGLPEKAVAHYQQAIKLSPSHHVAMVNLGRLYRSLGENSMAEEWYKRALQVAHKAEILSPLGALYYNTGRYEEALQIYQEAAALQPSQRELRLALAQVLAVMGQTKEAEKMTNHIVSEETGCLECYRLLSAIYSKQENHDKALDAIDKALQLKPKDPKVISELFFTKGNQLREQNLLDKAFESYRVAVQLNPDQAQAWMNMGGIQHIKGKYVSARAYYERALQLVPDSKLLKENLAKLDRLEKRLQEVREKDQT

SEQ ID NO: 272553 - protein, 944 aa, Artificial Sequence
  derived and/or modified sequence
MVVTTSARGGGGDRTPSRRRGCGLAPAGAAALLAGASCLCYGRSLQGEFVHDDVWAIVNNPDVRPGAPLRWGIFTNDFWGKGMAENTSHKSYRPLCVLTFKLNIFLTGMNPFYFHAVNIILHCLVTLVLMYTCDKTVFKNRGLAFVTALLFAVHPIHTEAVAGIVGRADVLACLLFLLAFLSYNRSLDQGCVGGSFPSTVSPFFLLLSLFLGTCAMLVKETGITVFGVCLVYDLFSLSNKQDKSSNGALCPRSPQQPGSPQPSSLPGHPHRENGKQQRFPHKGAWGGCHSPLPPEPKSSGFPVSPRAVWSMMRYLRASSNRNFLLTMRPFLKRAILVLSYVLVILYFRLWIMGGSMPLFSEQDNPASFSPYILTRFLTYSYLLAFNVWLLLAPVTLCYDWQVGSIPLVETIWDMRNLATIFLAVVMALLSLHCLAAFKRLEHKEVLVGLLFLVFPFIPASNLFFRVGFVVAERVLYMPSMGYCILFVHGLSKLCTWLNRCGATTLIVSTVLLLLLFSWKTVKQNEIWLSRESLFRSGVQTLPHNAKVHYNYANFLKDQGRNKEAIYHYRTALKLYPRHASALNNLGTLTRDTAEAKMYYQRALQLHPQHNRALFNLGNLLKSQEKKEEAITLLKDSIKYGPEFADAYSSLASLLAEQERFKEAEEIYQTGIKNCPDSSDLHNNYGVFLVDTGLPEKAVAHYQQAIKLSPSHHVAMVNLGRLYRSLGENSMAEEWYKRALQVAHKAEILSPLGALYYNTGRYEEALQIYQEAAALQPSQRELRLALAQVLAVMGQTKEAEKMTNHIVSEETGCLECYRLLSAIYSKQENHDKALDAIDKALQLKPKDPKVISELFFTKGNQLREQNLLDKAFESYRVAVQLNPDQAQAWMNMGGIQHIKGKYVSARAYYERALQLVPDSKLLKENLAKLDRLEKRLQEVREKDQT

SEQ ID NO: 272554 - DNA, 1725 bp, Artificial Sequence
  derived and/or modified sequence
atgaaccccttctacttccacgccgtgaacatcatcctgcactgcctggtgaccctggtgctgatgtacacctgcgacaagaccgtgttcaagaacagaggcctggccttcgtgaccgccctgctgttcgccgtgcaccccatccacaccgaggccgtggccggcatcgtgggcagagccgacgtgctggcctgcctgctgttcctgctggccttcctgagctacaacagaagcctggaccagggctgcgtgggcggcagcttccccagcaccgtgagccccttcttcctgctgctgagcctgttcctgggcacctgcgccatgctggtgaaggagaccggcatcaccgtgttcggcgtgtgcctggtgtacgacctgttcagcctgagcaacaagcaggacaagagcagcaacggcgccctgtgccccagaagcccccagcagcccggcagcccccagcccagcagcctgcccggccacccccacagagagaacggcaagcagcagagattcccccacaagggcgcctggggcggctgccacagccccctgccccccgagcccaagagcagcggcttccccgtgagccccagagccgtgtggagcatgatgagatacctgagagccagcagcaacagaaacttcctgctgaccatgagacccttcctgaagagagccatcctggtgctgagctacgtgctggtgatcctgtacttcagactgtggatcatgggcggcagcatgcccctgttcagcgagcaggacaaccccgccagcttcagcccctacatcctgaccagattcctgacctacagctacctgctggccttcaacgtgtggctgctgctggcccccgtgaccctgtgctacgactggcaggtgggcagcatccccctggtggagaccatctgggacatgagaaacctggccaccatcttcctggccgtggtgatggccctgctgagcctgcactgcctggccgccttcaagagactggagcacaaggaggtgctggtgggcctgctgttcctggtgttccccttcatccccgccagcaacctgttcttcagagtgggcttcgtggtggccgagagagtgctgtacatgcccagcatgggctactgcatcctgttcgtgcacggcctgagcaagctgtgcacctggctgaacagatgcggcgccaccaccctgatcgtgagcaccgtgctgctgctgctgctgttcagctggaagaccgtgaagcagaacgagatctggctgagcagagagagcctgttcagaagcggcgtgcagaccctgccccacaacgccaaggtgcactacaactacgccaacttcctgaaggaccagggcagaaacaaggaggccatctaccactacagaaccgccctgaagctgtaccccagacacgccagcgccctgaacaacctgggcaccctgaccagagacaccgccgaggccaagatgtactaccagagagccctgcagctgcacccccagcacaacagagccctgttcaacctgggcaacctgctgaagagccaggagaagaaggaggaggccatcaccctgctgaaggacagcatcaagtacggccccgagttcgccgacgcctacagcagcctggccagcctgctggccgagcaggtgatcgtgagccacagcagcttcttccagtgctactgctacatgtacaagctgatgctgcacagattcctgtactag

SEQ ID NO: 272555 - DNA, 1938 bp, Artificial Sequence
  derived and/or modified sequence
gtgaccgagagagacagcgtgagcaagaagaagaagaagagatacctgagagccagcagcaacagaaacttcctgctgaccatgagacccttcctgaagagagccatcctggtgctgagctacgtgctggtgatcctgtacttcagactgtggatcatgggcggcagcatgcccctgttcagcgagcaggacaaccccgccagcttcagcccctacatcctgaccagattcctgacctacagctacctgctggccttcaacgtgtggctgctgctggcccccgtgaccctgtgctacgactggcaggtgggcagcatccccctggtggagaccatctgggacatgagaaacctggccaccatcttcctggccgtggtgatggccctgctgagcctgcactgcctggccgccttcaagagactggagcacaaggaggtgctggtgggcctgctgttcctggtgttccccttcatccccgccagcaacctgttcttcagagtgggcttcgtggtggccgagagagtgctgtacatgcccagcatgggctactgcatcctgttcgtgcacggcctgagcaagctgtgcacctggctgaacagatgcggcgccaccaccctgatcgtgagcaccgtgctgctgctgctgctgttcagctggaagaccgtgaagcagaacgagatctggctgagcagagagagcctgttcagaagcggcgtgcagaccctgccccacaacgccaaggtgcactacaactacgccaacttcctgaaggaccagggcagaaacaaggaggccatctaccactacagaaccgccctgaagctgtaccccagacacgccagcgccctgaacaacctgggcaccctgaccagagacaccgccgaggccaagatgtactaccagagagccctgcagctgcacccccagcacaacagagccctgttcaacctgggcaacctgctgaagagccaggagaagaaggaggaggccatcaccctgctgaaggacagcatcaagtacggccccgagttcgccgacgcctacagcagcctggccagcctgctggccgagcaggagagattcaaggaggccgaggagatctaccagaccggcatcaagaactgccccgacagcagcgacctgcacaacaactacggcgtgttcctggtggacaccggcctgcccgagaaggccgtggcccactaccagcaggccatcaagctgagccccagccaccacgtggccatggtgaacctgggcagactgtacagaagcctgggcgagaacagcatggccgaggagtggtacaagagagccctgcaggtggcccacaaggccgagatcctgagccccctgggcgccctgtactacaacaccggcagatacgaggaggccctgcagatctaccaggaggccgccgccctgcagcccagccagagagagctgagactggccctggcccaggtgctggccgtgatgggccagaccaaggaggccgagaagatgaccaaccacatcgtgagcgaggagaccggctgcctggagtgctacagactgctgagcgccatctacagcaagcaggagaaccacgacaaggccctggacgccatcgacaaggccctgcagctgaagcccaaggaccccaaggtgatcagcgagctgttcttcaccaagggcaaccagctgagagagcagaacctgctggacaaggccttcgagagctacagagtggccgtgcagctgaaccccgaccaggcccaggcctggatgaacatgggcggcatccagcacatcaagggcaagtacgtgagcgccagagcctactacgagagagccctgcagctggtgcccgacagcaagctgctgaaggagaacctggccaagctggacagactggagaagagactgcaggaggtgagagagaaggaccagacctag

SEQ ID NO: 272556 - DNA, 2835 bp, Artificial Sequence
  derived and/or modified sequence
atggtggtgaccaccagcgccagaggcggcggcggcgacagaacccccagcagaagaagaggctgcggcctggcccccgccggcgccgccgccctgctggccggcgccagctgcctgtgctacggcagaagcctgcagggcgagttcgtgcacgacgacgtgtgggccatcgtgaacaaccccgacgtgagacccggcgcccccctgagatggggcatcttcaccaacgacttctggggcaagggcatggccgagaacaccagccacaagagctacagacccctgtgcgtgctgaccttcaagctgaacatcttcctgaccggcatgaaccccttctacttccacgccgtgaacatcatcctgcactgcctggtgaccctggtgctgatgtacacctgcgacaagaccgtgttcaagaacagaggcctggccttcgtgaccgccctgctgttcgccgtgcaccccatccacaccgaggccgtggccggcatcgtgggcagagccgacgtgctggcctgcctgctgttcctgctggccttcctgagctacaacagaagcctggaccagggctgcgtgggcggcagcttccccagcaccgtgagccccttcttcctgctgctgagcctgttcctgggcacctgcgccatgctggtgaaggagaccggcatcaccgtgttcggcgtgtgcctggtgtacgacctgttcagcctgagcaacaagcaggacaagagcagcaacggcgccctgtgccccagaagcccccagcagcccggcagcccccagcccagcagcctgcccggccacccccacagagagaacggcaagcagcagagattcccccacaagggcgcctggggcggctgccacagccccctgccccccgagcccaagagcagcggcttccccgtgagccccagagccgtgtggagcatgatgagatacctgagagccagcagcaacagaaacttcctgctgaccatgagacccttcctgaagagagccatcctggtgctgagctacgtgctggtgatcctgtacttcagactgtggatcatgggcggcagcatgcccctgttcagcgagcaggacaaccccgccagcttcagcccctacatcctgaccagattcctgacctacagctacctgctggccttcaacgtgtggctgctgctggcccccgtgaccctgtgctacgactggcaggtgggcagcatccccctggtggagaccatctgggacatgagaaacctggccaccatcttcctggccgtggtgatggccctgctgagcctgcactgcctggccgccttcaagagactggagcacaaggaggtgctggtgggcctgctgttcctggtgttccccttcatccccgccagcaacctgttcttcagagtgggcttcgtggtggccgagagagtgctgtacatgcccagcatgggctactgcatcctgttcgtgcacggcctgagcaagctgtgcacctggctgaacagatgcggcgccaccaccctgatcgtgagcaccgtgctgctgctgctgctgttcagctggaagaccgtgaagcagaacgagatctggctgagcagagagagcctgttcagaagcggcgtgcagaccctgccccacaacgccaaggtgcactacaactacgccaacttcctgaaggaccagggcagaaacaaggaggccatctaccactacagaaccgccctgaagctgtaccccagacacgccagcgccctgaacaacctgggcaccctgaccagagacaccgccgaggccaagatgtactaccagagagccctgcagctgcacccccagcacaacagagccctgttcaacctgggcaacctgctgaagagccaggagaagaaggaggaggccatcaccctgctgaaggacagcatcaagtacggccccgagttcgccgacgcctacagcagcctggccagcctgctggccgagcaggagagattcaaggaggccgaggagatctaccagaccggcatcaagaactgccccgacagcagcgacctgcacaacaactacggcgtgttcctggtggacaccggcctgcccgagaaggccgtggcccactaccagcaggccatcaagctgagccccagccaccacgtggccatggtgaacctgggcagactgtacagaagcctgggcgagaacagcatggccgaggagtggtacaagagagccctgcaggtggcccacaaggccgagatcctgagccccctgggcgccctgtactacaacaccggcagatacgaggaggccctgcagatctaccaggaggccgccgccctgcagcccagccagagagagctgagactggccctggcccaggtgctggccgtgatgggccagaccaaggaggccgagaagatgaccaaccacatcgtgagcgaggagaccggctgcctggagtgctacagactgctgagcgccatctacagcaagcaggagaaccacgacaaggccctggacgccatcgacaaggccctgcagctgaagcccaaggaccccaaggtgatcagcgagctgttcttcaccaagggcaaccagctgagagagcagaacctgctggacaaggccttcgagagctacagagtggccgtgcagctgaaccccgaccaggcccaggcctggatgaacatgggcggcatccagcacatcaagggcaagtacgtgagcgccagagcctactacgagagagccctgcagctggtgcccgacagcaagctgctgaaggagaacctggccaagctggacagactggagaagagactgcaggaggtgagagagaaggaccagacctag

SEQ ID NO: 272557 - DNA, 1725 bp, Artificial Sequence
  derived and/or modified sequence
atgaacccattttattttcacgccgtgaatataatccttcactgtttggttacgttagtattaatgtacacctgcgataagaccgtttttaagaaccgtgggctcgcttttgttacagccctgctctttgccgtacatcccatccatacagaagctgtggcaggcatagtgggaagagctgatgtcttagcctgtcttctttttctcctggcctttctgagctataatcgaagcctagatcaaggttgtgtcggcgggagctttccgtccacagtgtccccattttttctgctgctgtctcttttcctagggacctgcgctatgttggtgaaagagacaggaatcacggtcttcggagtgtgcctggtgtacgacttattctcactgtctaacaagcaagacaaatcctcaaacggcgctctgtgtccccggagtccccagcagcccggatctcctcagccaagcagcctgcccggccaccctcatcgcgaaaatgggaagcagcaacgattcccccacaaaggcgcatgggggggctgccattctccactccccccggagcccaaatcttccggctttccagtgagcccaagagctgtatggagcatgatgagatatctgagagcatccagtaatcgcaactttctgctgactatgcggccatttcttaagcgcgctatactcgtactgagctacgtgcttgtgattctgtactttcgcctttggattatgggcggttccatgcctttattctctgaacaggacaatcccgcttcattctccccatacatcctgactagattcctcacttattcgtatctcctcgcattcaacgtgtggctcctgctggcccctgtcacgctgtgctacgattggcaagtcggcagtattccactggtggagaccatttgggatatgcgtaatctggcgaccattttcttggctgttgtgatggcactcctcagcctgcactgtctggcggcctttaagcgtctcgaacataaagaggttttggtgggcttgctgtttctcgtgtttcctttcattcctgcaagcaacctcttttttcgagtcggattcgtcgtcgctgagagggttctctacatgcccagtatgggctattgcatcctgtttgtccatggcctctccaagttgtgtacctggctcaaccggtgcggggcaactacactcatcgtaagcaccgtactcctgcttctcctgttctcttggaaaaccgttaagcagaacgagatctggctcagtcgtgagagcctgttcaggtccggagtgcagactctgccccataacgcgaaggtacattacaattatgccaactttctgaaagaccaggggcgcaataaagaggccatctatcattatcgcacagcgctgaagctgtaccctaggcacgctagcgccctgaacaatcttggcacgttaacccgggataccgcagaagcgaagatgtactaccaaagagcactgcagctgcacccgcagcacaatagagccctattcaatctcggaaaccttctgaaatctcaagagaagaaagaggaggccattaccttgctgaaggactctatcaaatatggcccggagttcgcagacgcctatagctcccttgcctccctgctcgccgaacaggttatagtctcgcacagttcatttttccagtgctattgttacatgtacaaactgatgctgcatcgattcctgtactag

SEQ ID NO: 272558 - DNA, 1938 bp, Artificial Sequence
  derived and/or modified sequence
gtgaccgaaagagactcagtttccaagaaaaagaaaaaacggtacttaagagcaagcagtaaccgtaatttcttgctgacaatgcgcccttttcttaagcgggccattttggtgctgtcatacgtcttggtgatcctctacttccggctgtggatcatgggtggtagcatgcctttgttttcagagcaggacaatccagcctccttcagtccatacattttgactcgcttcttaacctattcttacctgttggccttcaatgtctggttgcttctagcccctgtcaccttgtgctacgactggcaagtcggctctattccactggtggaaacgatttgggacatgcggaatttagctacaatatttctggctgtcgtcatggctcttctgtcccttcattgcctggccgcatttaaacgcctggagcataaagaggtcttggtgggtttgttgttcctggtgttcccgtttattcccgccagcaacctcttctttcgagtcgggtttgtggtcgccgagagggttttgtacatgccctctatgggctattgtatcctgtttgtccacggactgtcaaaactctgtacctggctgaaccggtgcggggccactacactgatagttagtacggtgctcctgcttctgttattttcttggaagacagtcaaacaaaatgagatttggctctctcgggagagcctgttcaggagcggagtgcagaccctcccacacaacgccaaagtgcattataactatgctaactttcttaaggaccaggggcgtaacaaggaggctatctatcactacaggacagccctaaaactctatcccagacacgcgagcgccctgaacaacctgggcactcttacgcgcgacaccgcggaagccaagatgtactatcagcgtgcccttcagctgcaccctcaacacaacagagccctctttaatcttggtaatctgctcaagtctcaagaaaagaaggaggaggccattacattgctgaaggacagtatcaaatatggcccggaatttgccgatgcgtattcatctctggcctctctcctagccgaacaagaacgcttcaaggaggctgaagaaatctaccagactggcataaaaaactgccctgattctagcgacctgcataataactatggggtgttcttagtagacacaggattgcccgaaaaagcagtcgctcactaccagcaggccataaagctgagtcccagtcaccatgttgccatggtgaacctgggccgcctctatcggtcattaggcgaaaattcgatggccgaggaatggtacaaacgtgccctccaggtggctcacaaggcagagattctgtcccccctgggagcactgtactacaatacaggtcgttatgaggaggcacttcaaatctatcaggaagctgccgctctgcagccaagtcagcgcgagcttcggctggcacttgcccaggtgttagcagtaatgggacagacgaaggaggccgaaaagatgactaaccacatagtttcagaagaaaccggttgcctggaatgttatcggctcctgtcagcgatttactccaagcaggagaatcatgacaaagccctcgatgcaattgacaaggccttacagttgaaaccaaaggaccccaaagtgatttccgagttgttcttcactaagggtaatcagctcagggaacagaaccttctggataaagcattcgagtcctacagggtggccgtccagctgaaccctgatcaagctcaggcttggatgaatatgggtgggattcagcatatcaaggggaagtatgtgagcgcgagagcctactacgagagagcactgcagctcgtcccggattccaagttactcaaggagaatctcgcgaagttagacaggctggagaagcggttacaggaagtgagagaaaaagatcagacatag

SEQ ID NO: 272559 - DNA, 2835 bp, Artificial Sequence
  derived and/or modified sequence
atggttgtgactaccagcgcaaggggggggggaggagacaggacgcctagccgcaggcgaggctgtggactcgctcctgccggcgctgccgcccttcttgcaggagcctcttgtctgtgttacgggcgcagcctgcagggcgagtttgtgcacgacgatgtgtgggcgatcgtaaacaatccggatgtgcggccgggagcccccctgaggtgggggattttcacaaatgacttctggggcaaaggaatggccgagaatactagccataagagttatcgacctctctgcgtgttgactttcaagctaaacatcttcctcaccggaatgaaccctttctacttccacgctgtcaatatcatcctacattgcttagttaccctggtgctgatgtatacatgtgacaaaaccgtgttcaaaaacagaggcttggccttcgtcactgcccttttatttgccgttcatcccatacacaccgaggctgtcgccggaatcgtaggtagagctgacgtccttgcttgtctcctgtttctgttagcattcctgagctacaaccgcagtctggatcaggggtgtgtgggcgggtctttccctagtacggtgagccctttctttctcttgcttagccttttcctcggcacctgcgccatgttggtgaaagagacaggcattaccgtgtttggggtttgcctagtttacgacctgtttagtttaagcaataaacaggataaaagtagtaacggtgctctttgtccacgaagtccacagcagcccggctcgccgcagcctagctcgttgcccgggcatcctcaccgagaaaatgggaagcagcagagattccctcataagggagcatggggcggttgtcacagtccattaccacccgagcctaagagttccggcttccctgtttcacctagagccgtgtggagcatgatgcgatacctccgagcgtccagtaacaggaatttccttctcacgatgcgccccttcttgaaacgggcaattctggtgctctcttacgtgctcgtgatcctttatttcaggctgtggataatgggtggtagtatgcctctcttcagtgaacaggataaccctgcctccttcagcccttatattctgacccgctttttgacctacagctacctattagcctttaatgtgtggcttctgttggctccagtcacgctatgttacgactggcaggtggggagcatcccactcgttgagacaatctgggatatgcgaaatctcgctaccattttcctggccgtagtgatggctctgctgtccttgcactgcctagctgcctttaagaggctcgagcacaaagaagtcttagtcggcttgctgttcctagttttccctttcatccctgcctccaacctgtttttcagagttggctttgtggtggctgagagggtgctgtacatgccctctatgggctactgcatcttattcgtgcacggactttcaaaattgtgtacatggctgaaccgttgtggggcgacgaccttgatcgtgtccacggtgctcctactcctcctgttttcttggaagaccgttaagcaaaatgagatctggctgtccagggaaagtctgtttcgatccggcgtccagacgctaccacataacgcaaaggttcactataattatgcaaatttcctgaaggaccagggaaggaacaaggaggcaatataccattataggacggctctgaaactctaccctagacacgcttctgcactcaataatctcggaaccttgactcgcgacactgcagaggctaaaatgtattatcagagggcactccaactgcatccacaacacaatagagccctgttcaaccttggaaatttgcttaagtcacaggagaagaaggaggaagctataaccctgctcaaagatagtatcaaatacggtccggagtttgccgatgcatacagcagtctggccagtctgttggcagagcaggagaggtttaaggaagccgaggaaatctatcagacgggcattaagaattgcccagactcctctgacctgcataacaactacggagtgtttttggtcgatactggcctccctgagaaggctgtggcccactaccagcaggcaatcaagctgtctccatctcaccatgtggccatggtaaatcttgggagactctaccgctcccttggggagaactccatggctgaggaatggtacaaaagggctctgcaggttgcccataaggctgagatcctgagcccattaggagcgttgtactacaatactgggagatacgaggaagcacttcagatataccaggaagctgcagcgcttcagccttcccagcgagagctccgcctggccctggctcaggtcctcgcagtgatgggtcagactaaggaagcggagaagatgacaaatcatatagtgtctgaggagacgggttgcctggagtgttatcgactgttaagcgctatttattctaagcaggagaaccacgataaggcactcgatgcaatcgataaagcactgcaattgaaacctaaggaccccaaagtcattagtgagctctttttcaccaaagggaatcagttgagggaacaaaacttgctcgataaggcttttgaatcttatcgagtggccgttcagctgaaccctgaccaggcccaggcctggatgaatatgggtgggattcagcatatcaagggaaagtacgttagtgcgcgggcttactatgagcgcgctctgcagctggtacctgactcaaaactcctcaaagaaaatttggccaagctggacaggctggaaaagcggctgcaggaggttcgcgagaaggatcagacgtag

SEQ ID NO: 272560 - DNA, 1725 bp, Artificial Sequence
  derived and/or modified sequence
atgaaccccttctacttccacgctgtgaacatcatcctgcactgcctggtgaccctggtgctgatgtacacctgtgacaagacagtgttcaagaacagaggcctggcctttgtgacagccctgctgtttgctgtgcaccccatccacacagaggccgtggccggcatcgtgggccgggcagatgtgctggcctgcctgctcttcctgctggccttcctgagctacaacagaagcctggaccagggctgtgtgggcggcagcttccccagcacagtgagccccttcttcctgctgctgagcctcttcctgggcacctgtgccatgctggtgaaggagaccggcatcaccgtgtttggagtgtgcctggtgtatgacctcttcagcctgagcaacaagcaggacaagagcagcaatggagccctgtgccccaggagcccccagcagcccggcagcccccagcccagcagcctgcccggccacccccaccgggagaatggcaagcagcagcgcttcccccacaagggggcctggggcggctgccacagccccctgcccccagagcccaagagcagcggcttccctgtgagccccagggctgtgtggagcatgatgagatacctgcgggccagcagcaacagaaacttcctgctgaccatgaggcccttcctgaagagggccatcctggtgctgtcctatgtgctggtgatcctgtacttccggctgtggatcatgggcggctccatgcccctcttcagcgagcaggacaacccagccagcttcagcccctacatcctgacccgcttcctgacctacagctacctgctggccttcaacgtgtggctgctgctggcccctgtgaccctgtgctatgactggcaggtgggcagcatccccctggtggagaccatctgggacatgaggaacctggccaccatcttcctggccgtggtgatggccctgctgagcctgcactgcctggccgccttcaagaggctggagcacaaggaggtgctggtgggcctgctcttcctggtgttccccttcatcccagccagcaacctcttcttccgggtgggctttgtggtggccgagcgggtgctgtacatgcccagcatgggctactgcatcctgtttgtgcacggcctgagcaagctgtgcacctggctgaacagatgtggggccaccaccctcatcgtgtccacagtgctgctgctgctgctcttctcctggaagacagtgaagcagaatgagatctggctgagccgggagagcctcttccgcagcggcgtgcagaccctgccccacaatgccaaggtgcactacaactatgccaacttcctgaaggaccagggcaggaacaaggaggccatctaccactacagaacagccctgaagctgtaccccaggcatgccagcgccctgaacaacctgggcaccctgacccgggacacagctgaggccaagatgtactaccagagggccctgcagctgcacccccagcacaacagagccctcttcaacctgggcaacctgctgaagagccaggagaagaaggaggaggccatcaccctgctgaaggacagcatcaagtatggccctgagtttgctgatgcctacagcagcctggccagcctgctggccgagcaggtgattgtgagccacagcagcttcttccagtgctactgctacatgtacaagctgatgctgcaccgcttcctgtactag

SEQ ID NO: 272561 - DNA, 1938 bp, Artificial Sequence
  derived and/or modified sequence
gtcacagagcgggacagcgtgtccaagaagaagaagaagcgctacctgcgggccagcagcaacagaaacttcctgctgaccatgaggcccttcctgaagagggccatcctggtgctgtcctatgtgctggtgatcctgtacttccggctgtggatcatgggcggctccatgcccctcttcagcgagcaggacaacccagccagcttcagcccctacatcctgacccgcttcctgacctacagctacctgctggccttcaacgtgtggctgctgctggcccctgtgaccctgtgctatgactggcaggtgggcagcatccccctggtggagaccatctgggacatgaggaacctggccaccatcttcctggccgtggtgatggccctgctgagcctgcactgcctggccgccttcaagaggctggagcacaaggaggtgctggtgggcctgctcttcctggtgttccccttcatcccagccagcaacctcttcttccgggtgggctttgtggtggccgagcgggtgctgtacatgcccagcatgggctactgcatcctgtttgtgcacggcctgagcaagctgtgcacctggctgaacagatgtggggccaccaccctgattgtgtccacagtgctgctgctgctgctcttctcctggaagacagtgaagcagaatgagatctggctgagccgggagagcctcttccgctctggagtgcagaccctgccccacaatgccaaggtgcactacaactatgccaacttcctgaaggaccagggcaggaacaaggaggccatctaccactacagaacagccctgaagctgtaccccaggcatgccagcgccctgaacaacctgggcaccctgacccgggacacagctgaggccaagatgtactaccagagggccctgcagctgcacccccagcacaacagagccctcttcaacctgggcaacctgctgaagagccaggagaagaaggaggaggccatcaccctgctgaaggacagcatcaagtatggccctgagtttgctgatgcctacagcagcctggccagcctgctggccgagcaggagcgcttcaaggaggccgaggagatctaccagacaggcatcaagaactgcccagacagcagtgacctgcacaacaactatggagtcttcctggtggacaccggcctgcctgagaaggctgtggcccactaccagcaggccatcaagctgagccccagccaccacgtggccatggtgaacctgggccgcctgtaccgcagcctgggggagaacagcatggccgaggagtggtacaagagggccctgcaggtggcccacaaggccgagatcctgagccccctgggcgccctgtactacaacacaggccgctatgaggaggccctgcagatctaccaggaggccgccgccctgcagcccagccagcgggagctgcggctggccctggcccaggtgctggccgtgatgggccagaccaaggaggccgagaagatgaccaaccacatcgtgtctgaggagaccggctgcctggagtgctaccgcctgctgagcgccatctacagcaagcaggagaaccacgacaaggccctggatgccatcgacaaggccctgcagctgaagcccaaggaccccaaggtgatcagcgagctgttcttcaccaagggcaaccagctgcgggagcagaacctgctggacaaggcctttgagagctacagagtggccgtgcagctgaacccagaccaggcccaggcctggatgaacatgggcggcatccagcacatcaagggcaagtatgtgtctgcccgggcctactatgagcgggccctgcagctggtgcctgacagcaagctgctgaaggagaacctggccaagctggaccggctggagaagaggctgcaggaggtgcgggagaaggaccagacctag

SEQ ID NO: 272562 - DNA, 2835 bp, Artificial Sequence
  derived and/or modified sequence
atggtggtgaccaccagcgcccggggcggcggcggggacaggacccccagcagaagaagaggctgcggcctggccccagctggagctgctgccctgctggccggggccagctgcctgtgctacggccgcagcctgcagggcgagtttgtgcatgatgatgtgtgggccatcgtgaacaacccagatgtgcggcctggggcccccctgcgctggggcatcttcaccaatgacttctggggcaagggcatggccgagaacaccagccacaagagctaccggcccctgtgtgtgctgaccttcaagctgaacatcttcctgaccggcatgaaccccttctacttccacgctgtgaacatcatcctgcactgcctggtgaccctggtgctgatgtacacctgtgacaagacagtgttcaagaacagaggcctggcctttgtgacagccctgctgtttgctgtgcaccccatccacacagaggccgtggccggcatcgtgggccgggcagatgtgctggcctgcctgctcttcctgctggccttcctgagctacaacagaagcctggaccagggctgtgtgggcggcagcttccccagcacagtgagccccttcttcctgctgctgagcctcttcctgggcacctgtgccatgctggtgaaggagaccggcatcaccgtgtttggagtgtgcctggtgtatgacctcttcagcctgagcaacaagcaggacaagagcagcaatggagccctgtgccccaggagcccccagcagcccggcagcccccagcccagcagcctgcccggccacccccaccgggagaatggcaagcagcagcgcttcccccacaagggggcctggggcggctgccacagccccctgcccccagagcccaagagcagcggcttccctgtgagccccagggctgtgtggagcatgatgagatacctgcgggccagcagcaacagaaacttcctgctgaccatgaggcccttcctgaagagggccatcctggtgctgtcctatgtgctggtgatcctgtacttccggctgtggatcatgggcggctccatgcccctcttcagcgagcaggacaacccagccagcttcagcccctacatcctgacccgcttcctgacctacagctacctgctggccttcaacgtgtggctgctgctggcccctgtgaccctgtgctatgactggcaggtgggcagcatccccctggtggagaccatctgggacatgaggaacctggccaccatcttcctggccgtggtgatggccctgctgagcctgcactgcctggccgccttcaagaggctggagcacaaggaggtgctggtgggcctgctcttcctggtgttccccttcatcccagccagcaacctcttcttccgggtgggctttgtggtggccgagcgggtgctgtacatgcccagcatgggctactgcatcctgtttgtgcacggcctgagcaagctgtgcacctggctgaacagatgtggggccaccaccctcatcgtgtccacagtgctgctgctgctgctcttctcctggaagacagtgaagcagaatgagatctggctgagccgggagagcctcttccgcagcggcgtgcagaccctgccccacaatgccaaggtgcactacaactatgccaacttcctgaaggaccagggcaggaacaaggaggccatctaccactacagaacagccctgaagctgtaccccaggcatgccagcgccctgaacaacctgggcaccctgacccgggacacagctgaggccaagatgtactaccagagggccctgcagctgcacccccagcacaacagagccctcttcaacctgggcaacctgctgaagagccaggagaagaaggaggaggccatcaccctgctgaaggacagcatcaagtatggccctgagtttgctgatgcctacagcagcctggccagcctgctggccgagcaggagcgcttcaaggaggccgaggagatctaccagacaggcatcaagaactgcccagacagcagtgacctgcacaacaactacggcgtcttcctggtggacaccggcctgcctgagaaggctgtggcccactaccagcaggccatcaagctgagccccagccaccacgtggccatggtgaacctgggccgcctgtaccgcagcctgggagaaaattccatggccgaggagtggtacaagagggccctgcaggtggcccacaaggccgagatcctgagccccctgggcgccctgtactacaacacaggccgctatgaggaggccctgcagatctaccaggaggccgccgccctgcagcccagccagcgggagctgcggctggccctggcccaggtgctggccgtgatgggccagaccaaggaggccgagaagatgaccaaccacatcgtgtctgaggagaccggctgcctggagtgctaccgcctgctgagcgccatctacagcaagcaggagaaccacgacaaggccctggatgccatcgacaaggccctgcagctgaagcccaaggaccccaaggtgatcagcgagctgttcttcaccaagggcaaccagctgcgggagcagaacctgctggacaaggcctttgagagctacagagtggccgtgcagctgaacccagaccaggcccaggcctggatgaacatgggcggcatccagcacatcaagggcaagtatgtgtctgcccgggcctactatgaaagagccctgcagctggtgcctgacagcaagctgctgaaggagaacctggccaagctggaccggctggagaagaggctgcaggaggtgcgggagaaggaccagacctag

SEQ ID NO: 272563 - DNA, 1725 bp, Artificial Sequence
  derived and/or modified sequence
atgaaccccttctacttccacgccgtgaacatcatcctgcactgcctggtgactctggtcctgatgtacacctgcgacaaaactgtgttcaaaaatcggggccttgctttcgtgacagctcttctcttcgccgtgcacccgattcacaccgaagccgtggcagggattgtgggccgggcagatgtattagcctgcctcctattcctgttagccttcctctcatataatcggtcactcgatcagggatgcgttggcggaagcttcccaagcacggtcagtccattcttcctactgctgagcctgtttctggggacctgtgcaatgctggtcaaagaaacaggaatcaccgtctttggcgtctgcttagtatacgatctttttagcttaagtaacaagcaggataagtcaagcaacggcgcactgtgcccgcggtccccccaacagcccggtagtccccaacctagctcacttccaggacacccccatagggagaacggaaagcagcagaggtttccgcacaaaggtgcatggggaggttgccactccccccttcctccagagcctaagtccagtggattcccggtcagcccaagagctgtgtggagtatgatgcggtatctgagagcctcttccaaccgtaatttcctgcttacaatgcggcctttccttaagcgcgctatactggtcctttcttacgtgctcgtcatcctgtatttcagactttggatcatgggcggctccatgcccctattctcagagcaggataatcctgcgtccttttcaccctacatcctgactcgtttcctcacttactcttatctgctcgccttcaatgtgtggttgctgttggccccggtgactctctgttacgactggcaggtcggttcaatcccactggtggaaacgatttgggatatgcggaatctggctaccatttttctagcagttgtcatggctcttctatcacttcattgtctggccgctttcaaacgcctggaacacaaggaggtcctcgtcggactcctttttctggttttcccttttattcccgcaagcaacttattcttcagagtcggctttgttgttgctgaaagggtgctgtacatgccgtctatggggtattgcatcctcttcgtgcacggtctgtctaaactttgcacatggttgaacagatgcggagcaacaacattaatcgttagcacggtgcttctactgctgcttttttcctggaaaaccgttaaacaaaatgagatctggctctctagagaaagcctgttccgatccggggtgcagactctaccacataatgccaaggtccactataactatgccaactttctgaaggatcagggccggaacaaagaagccatttatcactataggacagcactgaaactgtatccccggcatgccagcgcgctgaataatttggggacattgactcgggacaccgccgaggcaaagatgtactatcaacgtgctcttcagctgcacccgcagcacaaccgggcactcttcaacctgggcaacctgctgaagagccaggagaaaaaagaagaggccatcactctgctcaaggattcgattaagtacgggcctgagttcgccgacgcttactctagcctggcctctttgctagccgagcaggtaatagtttcccattcaagcttttttcagtgctattgctatatgtacaagctgatgttacaccgcttcttgtactag

SEQ ID NO: 272564 - DNA, 1938 bp, Artificial Sequence
  derived and/or modified sequence
gtgaccgagcgggacagcgtgagcaagaagaagaagaagcggtacttacgggcgagttcgaaccggaacttcctgttgacaatgcgaccttttctcaaaagggccattcttgtactttcctatgtgcttgtcatcctgtacttccgtctgtggatcatgggcggatcaatgcctctgttttcagagcaggataacccggctagtttttcgccctacatcctgacacgatttctgacttacagctaccttctggcgtttaatgtgtggctgctgctggctcccgtgactctctgctatgactggcaggttggcagcataccactggttgaaacgatctgggatatgaggaatctggcaacaatatttttggccgtcgttatggcactcttaagtctgcactgtctggcagcttttaagcggttggaacataaggaggtactggtgggcttgttattcctcgtgttcccttttatcccagcttctaacctgttctttcgcgtcggttttgttgtggccgaacgcgtcctgtatatgccctcaatgggttactgcattctctttgtgcatggccttagcaaactgtgtacctggcttaaccggtgtggcgccacaacactgatagtttctaccgtcctgctactgttgctattcagttggaagaccgtcaaacaaaatgagatctggctgagccgggaaagtctgtttaggtcaggggtgcagaccttgccccacaatgccaaagtgcattacaactacgccaacttcctcaaggaccagggcagaaacaaagaggccatttaccactacaggacagctctgaaactttaccctcgccatgctagcgccctcaacaatttgggtacccttacaagggataccgcagaggccaaaatgtattaccagagagcactgcaactgcatccacagcataatcgcgccctcttcaacttgggaaacttactaaagagccaggagaagaaggaggaggccatcacactccttaaggattcaatcaaatacggaccagagttcgcggacgcctattcctcactcgcatctctgcttgccgaacaagagaggtttaaggaggcagaggagatctaccagactgggattaaaaattgtccggattccagcgaccttcataataattacggggtcttcctcgtcgacacggggctacctgaaaaggccgtggcacattaccagcaagcgattaagttgtctccaagtcatcatgtagccatggtaaatctgggccgcctatacagaagtttgggcgagaatagcatggcagaagagtggtacaaaagagctttacaagtggctcacaaagccgagattcttagtcctctcggggccctgtactacaacaccgggagatacgaagaggctctgcagatctatcaggaggctgccgcgttgcagcctagccagcgggagctgcgtctggccctggctcaagtactggccgtgatggggcaaaccaaagaagctgagaagatgaccaatcacattgtgagcgaagagaccggttgcctcgagtgttataggctcttgagcgctatctatagtaaacaggaaaatcacgataaggccctggatgcaattgataaagctctgcagctgaagcccaaagatccaaaagttatttctgaactgttctttacaaagggaaaccaattgagggaacagaatttgttggacaaggcgtttgagtcctaccgcgttgctgtacagctaaatcctgatcaggctcaggcctggatgaacatgggcggcattcaacacattaaaggaaaatacgtctccgcgagagcatactatgaacgagcgctgcagcttgttcctgatagtaaattactaaaagagaacctggcaaagcttgatcggctggaaaagcggctacaggaggtcagagagaaagaccaaacttag

SEQ ID NO: 272565 - DNA, 2835 bp, Artificial Sequence
  derived and/or modified sequence
atggtggtgaccaccagcgcccggggcggcggcggcgaccggacccctagcaggcgcagaggctgcggtctggctcccgctggcgccgcagccctcctggccggagcctcttgtctttgttacggacgctcgttgcagggcgaatttgtacacgacgacgtgtgggctattgtgaataatccggacgtccggcctggggcccctctgcgatggggtatattcactaatgatttctggggcaaaggaatggcagaaaacacctcgcataagagttatagacccctctgcgtgcttacctttaagctgaacatattcctgacaggtatgaatccattttatttccacgccgtgaacattatcctacactgtctggttactctggtgcttatgtacacctgtgataaaacagtgttcaagaaccgaggactggcattcgtgacagcccttctgttcgctgtgcaccctatccataccgaagccgttgccggcattgtggggagagccgatgtcctcgcatgcctgttgtttctgctggctttcctgagctacaatagatctctcgaccaggggtgcgtcggaggatcattcccttccacggtctctcctttctttttgctcttgagccttttcctcgggacgtgtgcgatgcttgtaaaagagaccggcatcacagtgttcggtgtgtgcttggtgtatgacctgttttcgctctccaacaagcaggataaatctagcaacggcgcactgtgtcctcgatccccccagcagcccgggtcgccccagccatcctcacttccggggcaccctcacagagagaacggcaaacagcagcggtttcctcacaagggcgcttggggcggatgccattctccactccccccggagcctaagagctccggatttcctgtgagcccccgggccgtctggtctatgatgcggtacctgagggcctcctcaaatagaaactttctattaaccatgcgaccatttctaaaaagggccatcttggtgctttcctatgtgcttgtaattctgtactttcgcttatggattatggggggcagtatgcccctttttagcgagcaggacaaccccgcctcattctctccttacatacttactcggtttctcacctacagctatttgctggcctttaatgtttggctgctactagcccctgtgactctgtgttatgactggcaggtcgggtcaatccccttggttgaaactatctgggacatgcggaatttggccacaatctttcttgcggttgtgatggccctgctcagtttgcactgccttgcggctttcaagagactggagcataaagaggtgctcgtcggcctgctgtttctggtcttcccgtttatcccggcgagcaatctgttcttccgcgtggggtttgtcgtggccgagagggtgctctatatgccatctatggggtactgtatcttgtttgtgcacggactgtcaaagctgtgcacgtggctgaatagatgtggggcaaccaccctcatagtcagcaccgtgctgttgttacttctttttagttggaagacagtgaagcagaatgagatttggctctccagggagtccctattccgatccggggtccagacactgccgcataacgcgaaagtgcattataactatgctaacttcctgaaggaccaaggcagaaataaggaagccatttaccattatagaaccgcgctcaagctgtatccgcgccacgccagcgctctgaacaatctgggaaccctgacacgcgataccgctgaagcgaaaatgtactaccagcgggctctccagcttcacccccaacacaacagagccttgttcaatctagggaacctactgaagtctcaggagaagaaagaagaggctatcaccctgctgaaggactccatcaagtatggacccgaattcgctgacgcatatagttctctcgcatccctgttggctgagcaggagagattcaaggaggcagaggaaatttaccaaacgggaatcaaaaactgcccagactcgagtgatctccataacaactacggcgtattcctcgtagataccggcttgcccgaaaaagctgtcgcccattaccaacaggcaatcaaactgtcccccagccaccacgtcgccatggtaaatctaggccgtctgtacagatccctgggcgagaattcaatggcagaagaatggtacaaacgcgcgctccaggtggcccataaagctgaaatcttatcccctctcggcgctctctattacaacaccgggagatacgaggaggccctgcaaatttatcaagaggcagctgcactccaaccttctcagcgcgagctacgcttggcattggcacaggtgttagctgttatggggcagactaaggaggcggagaagatgacaaatcatattgtcagcgaggagactgggtgtttggagtgctaccgcctgctgtctgcaatttattccaagcaagaaaaccacgacaaggcactggacgctatcgacaaagctctccagctgaagcctaaagatcctaaggtaatcagtgaactgttcttcacaaaaggcaaccagctgcgcgagcaaaatttgctcgacaaagcattcgagagttacagagtcgcggttcagctgaatccagatcaagcccaggcctggatgaatatgggaggcatccagcatatcaaaggaaagtacgtatccgcacgagcatattacgaacgcgctctccagctcgtccccgactccaagctgctgaaggaaaatctggccaagctggatcgcctggaaaagcgccttcaggaagtcagagagaaggatcagacatag

SEQ ID NO: 272566 - DNA, 1725 bp, Artificial Sequence
  derived and/or modified sequence
atgaaccccttttatttccacgccgtcaacattatcctgcattgtctcgtgacactcgtgctaatgtacacatgcgacaagacagtgttcaagaatcggggtctggcgtttgtgaccgccctgctgtttgccgtgcatcctattcataccgaagctgttgctgggattgtggggagagctgacgtgcttgcatgcctgctctttctgctcgccttcctcagttacaaccgttcattggaccaggggtgcgtgggaggctcttttccatcaaccgtgtcacccttctttctcctcctgagccttttccttggcacatgcgccatgctagtaaaggagacagggatcaccgtgttcggggtgtgcctggtctacgatttattcagcctgagtaacaaacaggataaatcttctaatggggctctttgcccacgaagcccgcagcagccaggtagcccacaaccgagctccctgcccggtcacccacaccgtgaaaatggcaaacagcagaggttcccacataagggggcatggggaggctgccactcaccactcccacctgaaccgaaaagctctggcttccctgtcagccctagagcagtgtggtccatgatgcgttacctgagagcgtcctccaatcgcaactttcttctgacaatgaggccgttcctcaagagggccattctggttctcagctacgtacttgtgatcctgtattttagattgtggatcatgggcggatccatgccgctcttctcagaacaggataaccctgctagtttttccccctatatcctcactagatttctaacatatagttatctgctcgccttcaacgtttggctactgctggctcccgtgaccctgtgttacgattggcaggttggctctattcccctggtagaaaccatttgggatatgcgtaacctggcgactatattcctggcagtcgtcatggcattgttgagcctgcactgcctggcagcgttcaagagactcgaacacaaggaggtgctggtaggcctactctttttagtgtttcctttcattccagcttcaaatctttttttccgggttggctttgtcgtggcagagcgagtgttatacatgcctagtatgggctactgtattctgtttgttcacggactttctaagctgtgtacatggcttaaccggtgcggggctactaccctgatcgtgtccaccgtgctgctcctgcttctgttctcatggaaaactgtcaagcagaacgaaatatggctaagccgtgaaagcttattcaggtccggggttcagacactcccccataacgcgaaggtgcattacaactacgcaaattttttaaaggatcagggcagaaacaaggaggctatctatcattataggactgctctcaagctttatcctaggcacgcttccgcgctgaacaatttgggcaccctcacgcgggataccgccgaggccaagatgtactaccagcgggcactccagctccaccctcagcacaaccgcgctctctttaacctgggaaatttgctcaagtcccaggagaagaaggaagaagccattactctgcttaaagattccatcaaatacggccctgagttcgcggacgcctatagcagtctggcctccctgttggcagagcaggtgattgtgtcccacagtagttttttccagtgctattgttatatgtacaaattgatgcttcatcgcttcctgtactag

SEQ ID NO: 272567 - DNA, 1938 bp, Artificial Sequence
  derived and/or modified sequence
gtaactgagagagactcagtttccaaaaagaaaaaaaagcgttacctgcgggcatcaagcaaccgtaacttcttgctgacaatgcgcccttttttgaagcgggcaattctggtgctctcatacgtcctagttatcctgtattttcgactatggattatgggtggttccatgcccctgttctcggagcaagacaatcccgcttccttcagcccatacattctgaccagattcctgacatattcctacctacttgccttcaatgtttggctgctcctggccccagtcacactgtgctacgattggcaggttgggtccataccattggtggagaccatctgggacatgcgcaacctggccacgattttcctggcggttgtgatggcgttattgagtctgcattgtcttgccgcttttaagcgacttgaacataaggaagtgctcgtgggcctgctgttcttagtctttccattcatcccggcttccaacttgttctttcgagtaggcttcgtagtagctgaacgggtgctttacatgcctagcatgggatactgcatcctgttcgtgcatggactgagtaagctgtgcacctggcttaatcgatgcggcgctacaacccttattgtcagcacagttcttctgttgctgcttttttcatggaaaacagtgaagcagaatgagatctggttgtctagagaatcactgtttagaagcggagttcagacgttaccacacaatgcgaaggtgcattacaattacgctaatttccttaaggatcagggccgaaacaaagaagctatctatcattatcggaccgccctgaaactgtatcctcggcatgctagtgccctgaataatttgggtactctgacacgggacaccgccgaggctaagatgtattaccaaagagccctgcaactccacccccagcacaatagggctctgtttaatctgggcaatcttctgaagtcgcaggagaagaaggaagaggcaattacccttctgaaggactccatcaagtacggaccggaatttgccgacgcctattcgtctttggccagtctgctagcagagcaggagagattcaaggaagccgaggaaatataccagactggaataaagaactgtccagacagcagtgacctccacaataactacggtgtcttcttagtggacactggactccccgagaaggctgtggcccactatcagcaagccataaaactgtcaccgtcccatcacgtcgccatggttaatctgggtagactatacagatctctcggggagaacagtatggcagaggagtggtataaacgagccctgcaagtggcccataaggctgaaatcctctctccgctaggagcattgtactataataccggcagatacgaggaggctctgcagatttatcaggaagccgctgcacttcagccttctcaaagagagctcagactggccctggcccaggtcttggcagttatgggccagacgaaagaggctgaaaagatgacaaaccatattgtttcagaagagactggttgcctagagtgctacagactcctatctgctatttacagcaagcaggaaaatcacgacaaggcattggatgcgatagataaagccctccagttaaagccaaaagatccaaaggtgatctcagagttgttctttacaaagggaaatcaactacgagaacagaacctcctagacaaagctttcgagtcctacagggtggcagtccagctgaatccagaccaggcccaggcatggatgaatatgggaggaattcagcacattaaagggaaatatgtgagtgccagggcttattatgaaagagctctccaacttgtgccggattcgaaactgctgaaagagaatttagcgaaactggaccgccttgaaaagcggttacaagaagttagggagaaggaccaaacctag

SEQ ID NO: 272568 - DNA, 2835 bp, Artificial Sequence
  derived and/or modified sequence
atggtggtaaccaccagcgctaggggcggtggaggcgatagaacgccaagcaggaggcgtggttgcgggttggcgcctgcgggagcagctgccttgctggctggcgctagttgtttgtgctacggaaggtccctgcagggggagttcgtacacgatgatgtgtgggcgatcgtaaataaccctgatgtccgacctggggctccgttgcgttggggcatcttcaccaacgatttttggggtaaaggaatggctgagaatacttctcataagtcttatagacctctttgcgtcctcaccttcaagcttaacatcttcctgaccggtatgaatcctttttatttccatgcagtcaacatcatccttcactgtctggtgacccttgtgctaatgtatacttgcgataaaaccgtgtttaagaatagaggtctggctttcgtgacagccctcttgtttgcagtgcatcccattcatactgaagctgtcgccggaattgtcgggagagccgacgttctggcatgtcttctcttcctgctagcattcctgtcctacaataggagcctagatcaaggctgcgtggggggttctttccccagcactgtcagtccattctttcttcttttgtcactcttcctggggacctgtgcgatgctggttaaggaaacaggtatcaccgtctttggtgtgtgtctcgtttatgatctgtttagcctgagtaacaagcaagacaagagtagcaacggtgccctgtgtcctcgctctccccaacagccaggatcacctcagccgtcaagcctcccgggacaccctcaccgggagaatgggaagcagcagcgatttccccacaagggcgcatgggggggatgccacagccccctcccccctgaaccaaaaagttctggctttccggtctcccccagggcagtttggtcgatgatgcgttacctgcgggcaagttccaatagaaattttctgttgacaatgcggccattcctgaaacgggcaattctggtgctgagttacgttcttgtcatactttacttccggctgtggataatgggcggaagcatgcctttgttctcagaacaagataatcccgcatcgttttccccctacatcctaacacgtttcctcacctattcttatctgctcgctttcaatgtgtggctcctcttggccccagtgactctctgttacgattggcaggtcggatccatcccccttgtggaaaccatttgggacatgagaaatctggccaccattttcctagccgtcgtgatggctctgctaagcctgcactgccttgccgctttcaagagactggagcataaagaagtccttgtggggctgttgttcttggtgtttccttttatcccggcatcgaatctttttttccgagtagggtttgttgttgctgagagggttctgtacatgccctccatggggtattgtatattattcgttcacggactgtcaaagttgtgcacatggctgaacagatgcggagcgaccactttgatcgtgagcacggtgctccttttgctgctgttctcgtggaagactgtgaagcagaatgaaatttggttaagcagagagagcctttttagaagtggagtgcagacattgccccacaatgctaaggtgcattacaactacgccaactttctgaaagaccaagggaggaacaaagaagcgatctaccattaccggaccgctctgaagttgtatcctcggcatgcttcggccctgaacaatttgggcacactgactcgggataccgcagaggccaaaatgtactaccagcgggctctgcagctccacccccaacataatagggccctatttaacctgggcaacctgctgaaatcgcaggagaagaaagaagaggccattacgctgctaaaagacagcatcaagtacggacctgaatttgcagacgcttactcttcgcttgcatctcttttagctgaacaggaaaggtttaaggaagccgaggaaatttaccaaactggaataaagaattgtcctgactctagtgatctccacaacaactacggagtgttcctggtggacacgggtctgccagaaaaggccgtggcgcactatcaacaggccataaaattgagcccttcccatcacgtggccatggtcaatctagggagattataccggtcccttggcgaaaattccatggccgaggagtggtacaagcgagctctccaggtagcacacaaggctgaaatcctttcacccctaggcgcactgtattacaatacggggagatacgaagaggcactgcagatctaccaagaagcagccgcactccagcctagtcagcgagagctgagacttgcacttgctcaggtgttggccgtcatgggccagacaaaggaggccgagaaaatgactaaccacattgtgagtgaggagacaggatgtttggagtgctatcggctactgagcgccatttattctaaacaggaaaaccatgataaagcactggacgcgatcgacaaggctctgcaactcaagcctaaggacccaaaagtgataagcgagctattttttaccaaaggaaatcaactgcgagaacagaaccttctggataaagcttttgagagttaccgcgtcgctgtccagctgaacccagaccaggcgcaggcttggatgaacatgggtggcatacaacatatcaaggggaaatatgtgtccgctcgcgcatactatgagcgggcattgcaactggtgcccgactcaaagctcttaaaggaaaaccttgccaaattggaccggctcgagaagcgtctccaagaagtgagagagaaagaccagacctag

SEQ ID NO: 272569 - DNA, 2199 bp, Artificial Sequence
  derived and/or modified sequence
agatagaaaaagtagtttgcttggcatctcccaaattatcttgagcaaacaataaaataagaaatgtttcagaagacaattcggctcccaggcccaaaccaaaactcgaacctggtactttttgtaagtgcgggccaagaaaggggctgtaaagttaaagagccggtggcgcctctgaacacacccgggcagggcgagcaggatgtccttgtccagggagaccccttctcctggctttgaggaaggtgctccctatccccgcgggttcctccgccaagcgggacgccgcgccgggcgggtgagagaaagcccgggcaggagagcacagagccggcgactggacgcgagcgcggggcgggtggagagcgtctctccgggcgccgctgctgttgtcccgggtgctgaaaagccgggaacttcccgggaagcagcggcacttttctccctggaaggctaaacatatttttgactggtatgaacccattctactttcatgcagtaaatataattttacactgcttagtgactcttgtgctgatgtacacctgtgataaaactgtcttcaagaatcgtggacttgcttttgtaacggcattgctttttgctgtacatcctattcatactgaggcggtggctgggatcgttggcagagcggacgtgttagcgtgtctgctgtttctattggcctttctctcgtacaacaggagtctggatcagggctgtgttgggggaagtttcccttccacggtgtctcccttcttcttgctgctcagtttgtttctggggacctgtgcgatgctggtgaaagagacaggcatcacggtgtttggagtgtgcttggtttatgacctcttttccctttccaacaagcaagacaagtcgagcaatggggccctctgtccacgcagcccacagcagcccgggagcccccagccctcctcactgccaggccatcctcaccgggagaatgggaagcagcagcggttccctcacaaaggagcttggggtggctgccactctccactgccaccagaacccaagagcagtggattcccagtgtccccacgagctgtgtggtccatgatgaggtatctgagagcaagcagcaatagaaatttcctgcttaccatgagaccatttttaaaaagggccattttggtcctaagttatgtgcttgtcattttgtacttccgtctgtggataatgggaggatctatgcccctcttttcagagcaggataatccagcttcattttcgccttacattcttacgagattcctcacctattcctacctcttggccttcaatgtgtggcttctgcttgcacccgtgaccctgtgctatgactggcaggtcggcagtattcctctggtagagaccatatgggacatgcggaacttagccaccatctttctggcggttgtgatggccttattgagcctgcactgcttagcagcctttaagagactggagcacaaggaggttttagtcggcttgttgttcctggtgttcccgttcattccagccagcaacctcttcttcagggtgggttttgtggtggcggagagagtcctttacatgcctagcatgggctactgcatcctttttgtgcatggactgagcaagctctgcacttggctgaatcgatgtggggccaccaccctgattgtgtccactgtgttgctgctgttgcttttctcttggaaaactgtgaaacagaatgaaatttggctgtcaagagagtccctattcaggtctggagttcaaactctgccccacaatgccaaggttcactacaactatgccaatttcctgaaggaccaaggtcggaacaaggaagcgatctaccactacagaacagctctcaagttgtatccacgccatgcaagtgcgctcaacaaccttggaacactgacgagagacacagcagaggcaaagatgtactatcagagggctctccagctccatccacagcataaccgggctcttttcaatctggggaatctcctcaagtcccaggagaaaaaggaagaagctatcaccttactgaaggattccatcaaatatggtccagagtttgcagatgcatattcaagcttagcttcgttattggctgagcaggtaattgtttcacacagtagtttttttcaatgttattgttacatgtataaattaatgttacacagatttttgtactaa

SEQ ID NO: 272570 - DNA, 7960 bp, Artificial Sequence
  derived and/or modified sequence
gtgacagagcgagactccgtctccaaaaaaaaaaaaaaaaggtatctgagagcaagcagcaatagaaatttcctgcttaccatgagaccatttttaaaaagggccattttggtcctaagttatgtgcttgtcattttgtacttccgtctgtggataatgggaggatctatgcccctcttttcagagcaggataatccagcttcattttcgccttacattcttacgagattcctcacctattcctacctcttggccttcaatgtgtggcttctgcttgcacccgtgaccctgtgctatgactggcaggtcggcagtattcctctggtagagaccatatgggacatgcggaacttagccaccatctttctggcggttgtgatggccttattgagcctgcactgcttagcagcctttaagagactggagcacaaggaggttttagtcggcttgttgttcctggtgttcccgttcattccagccagcaacctcttcttcagggtgggttttgtggtggcggagagagtcctttacatgcctagcatgggctactgcatcctttttgtgcatggactgagcaagctctgcacttggctgaatcgatgtggggccaccaccctgattgtgtccactgtgttgctgctgttgcttttctcttggaaaactgtgaaacagaatgaaatttggctgtcaagagagtccctattcaggtctggagttcaaactctgccccacaatgccaaggttcactacaactatgccaatttcctgaaggaccaaggtcggaacaaggaagcgatctaccactacagaacagctctcaagttgtatccacgccatgcaagtgcgctcaacaaccttggaacactgacgagagacacagcagaggcaaagatgtactatcagagggctctccagctccatccacagcataaccgggctcttttcaatctggggaatctcctcaagtcccaggagaaaaaggaagaagctatcaccttactgaaggattccatcaaatatggtccagagtttgcagatgcatattcaagcttagcttcgttattggctgagcaggagcggtttaaagaagctgaagaaatataccaaactggaataaagaactgtccagacagctcagatttacacaacaactatggggttttcttagttgatactggcttaccagaaaaggcagtggcccattaccagcaggccatcaaacttagccccagtcatcacgtggccatggtgaacttgggaagactctacaggtcactgggagagaacagcatggctgaagaatggtacaagcgcgccctgcaggtggcacacaaagctgagatattgtcacctttgggagcactgtattacaacactggccgatacgaagaggctttgcagatttaccaggaagctgcagcacttcagccttctcagagggagctccgcttggcactggctcaggttttggccgtgatgggtcagacaaaagaagctgaaaagatgaccaatcacattgtgtcagaggagaccggatgccttgaatgctatcgcctcttgtcagccatctatagcaagcaggagaaccacgacaaggcacttgatgctatagacaaggctctccagctgaaaccaaaggacccaaaagtcatttctgaactttttttcacaaaaggaaaccaattaagagagcagaaccttctcgacaaagcttttgagagctatagagtggctgtgcaactaaacccagaccaagcacaggcctggatgaacatgggtggcatccaacacatcaagggaaaatatgtgtctgcaagagcttattatgagagagccttacagctggttccagacagcaaactgctgaaggaaaatcttgccaaattggatcgcctagaaaaacgattacaagaagttcgagaaaaggatcaaacatagcaccaccgtctgacccaacctcataggataatgtggtgcctctgaaaggggagtgatggaagccttgctttcacatcagcaggggcacaactaatgagattttctctcattccgagttcagggtgacacattttgggacatctgctggtagcccagtgctgaaggacttgcttttccatgaagaagacgaaaacagcaaacaagggcaagaaggtctgagagggaaggagaatgacatttacacattttacagatttttgtttggtttaactccagatttctcttgatatatctctgtgcttttgagacctggagatctaattctgtttagacattttttgtcccagaaatacagaagcttgaaatgctatgaaggcagagcttctattctttatgggatgaaatatttcaaaagaggataaatcctctgtggtaagccatttggaaaatcctaccaagaattggcttatttaattttccagaaccaggaatgagtatctaatagcttttgtagaaccttccagaatatgtggggaaaaagggctattgctaagtgagctttatctaatatcctcctaagagttttactagtgcttttttgaggaattacagggaagctcctggaattgtacatggatatctttatccctagggggaaatcaaggagctgggcacccctaattctttatggaagtgtttaaaactattttaattttattacaagtattactagagtggtggttctactctaagatttcaaaagtgcatttaaaatcatacatgttcccgcctgcaaatatattgttattttggtggagaaaaaaatagtatattctacataaaaaattaaagatattaactaagagaaatgtcctactttattatcttaatgttcagacatcatgagatttattatttttttgaaaaatatattgaaccattgaggaacctttatgatgtatcacagaaatcttcatagattctaactagatggaaaaagagctctatttatttgtgttcctaggcttaatgagaattctgggcttagaacatcaacgattaatacccagaattctttgttttgagaatattatggagaatgctctaaaaatctagggtaaagatctaaattcaaattttaaatatatatttatatttaagaaataggaaaggcaaagttgaactcacaatttgacatttatttttagtgttatttatttcataacttataaaatatttaatatatacatacacactcttcttttttctctgtacaaagtggttttaatatcagctttcaaaactgatcttataaaatgtaaatctaaattgtaaaatagttaagttttaacagtccctcccaaactttgtgttgattattcacttgctaaagagatgtgaggaatcagccttcagttttttggcagtagtatattttggaagtgaagaaattggaacacctgtttctaatttggtcttcatcattagagacaaaaccaaaacactccaggcagtactgtttatagtgctgagccaggtagcacacagacatagtagcctaaaggctcacataattcgcatgctcaggccagggcagggtaaaaatagccttctgcttctttcaacccagtatcaggaagcactaccccagtgttattatttgttttgtcaaggtaagtctaaataaacaagaaaaacttcttcggaaggcatggcgaagggagtattttaaatgaaaatgattacagaatttgaattagcatgcatctctttgtgtgcaacagtaatccaagaatgtatatgttaccactacaaccatttgtttctaatagttttttcatgttatataacataaatgtatccacaaccttaattaagaactattcttcccccaaaatcatagtcctagtgtcaagaaacatactccagtgtttattgtaaaataacaaccacaccctcaaattgaaaaaagtgaatgtctaggactttattacaacttttcagaataatctgtaatgaaaactcatgcttaaaaatttaatggaaaagactgagccccaaattttgaatagtgattacgccttacttgaagtgctaataaaggtaggagagtacatttgttggaataacagaaatggtgatttcagcctaaaagtttctgagggtaaaggatcacatgaccttcaggaaactctctgcctcctgtaggtgctttcctatctcccccatccttccctaccccttttcccttttccttcctctctttttctctcactgtcactctgtctacacacactggcatcttttgaacactaaaagtaagcactgttttttaaaaaagtaattatttgttggatcagatacttttatcccaagtgaataccttcactgagatgtggccaatgcaatagtttcacagtaaaaacagtgcctataagaaaatagatcacatactatttttcaatgatattaagtgtattttgtaactattttcatttggtccttgtaacatgaaataatacatggaacttacctttataataaaaatggagtgccctggttcatcatagaggtgcatctagtttgcccttaatggaagtatacttgctgtgtggattgatagcaccttcttgaaatggaggagctcagctggcctcatggatgtgcaatttttgcagtcccacagggccttgcatacagaagcaccccgagctcagttgaatgtctgtttgattttttcttatttatttttttgagacacagttccactttgtctttttgtcacccaggatggagttcagtggcacaaacatggctcactgtagcctcgacctccctggctgaagggatcctcccacctcagcctcccaagtaaccgagactacaggcatatgccagcatgtccagctaatttttgtattttttgtagagacagggtttcaccatgttgcccaggctggtctcaaactcctgggctcaagcgatctgcccacctctgcctcccaaagtgctgggattaaaggcataagccaccatgtccaactgaaattcttaataattaataatttttgagcaagaggtccacactttcattttgcactgggttcccaaacaggtcctgggtaggaaggatggctgaggataaaacaggagttgctttggcctggctgaacatttgaaccaatgatcagagtttcattttatgattgtgttactctgaacagatttgctatttttttccagctacatttagagttcctcatgtatatatcacccctctttttccagtccatctaacctctccttttttttgtgcctagaatcagttctccttgccttcaaaatccctgataagtgtccatttctttttgtatcctttgatgtagaagccacaagaatggctttagcagcttattttaatcttatgaattattcattcaggattttttaaatgattcagatgctttcaatctgttaacagtatttataaaacatgtttcagtgatacaacataggtgaactaaaccaaagatgcaaatgccttggaggaaaagaaattgtattatagagaatcctgagatatatccttttgggttgtttaatttaaagcctatcacaaaacaaagagaattgtcgcactttaattccaacctcctgcagtacttcacaacccttagcataagattctgaaatttgtaataggtggtacctagtttgatgcagggttttgcagcagttgtgcgaatgcctctgcgcaacggcctttcagtcagactaaatgagaaaatccaaactgtcctatcaaaactgacccacaataactgtactctgaggcgaaacagagcaaatgtgggtttcctgttttcattgtaaaacattccaggttctcagattgaagagctacattcagctgatagttgacatctgttccctcacacgtagtggctctcaacacgggctgcactttggaatcacctgaggacctttcggaatcttcggttgaatcatcctggctgtcctggtgatgcttcttatgtgcagctaggctggagaaccactacagggctgacacctggaatgggagcttgtaacttttacaaaataatagatgtttatcatcttttgcaatttttacttttaagtctatactaaaatgagccaaagaagtcttaacaatgatgtatggcacaattggttggttgaggctatcattccatgattacaaataggtggttatgtggggtggttttgcacttgtggcaattggactgcaatttggccttaaaatgacacaattcctcgttctcagatggagaggaattgccttgaaatttgcatgtaccagactaagtgccagtatatatatgactgatattttcgtgactcatagaaggtgtccatggtatagagtttatgcctacatctctatctttattttgggcacacatgagcttttgttaattatttctttgtacttgttagaatctgtttttgaaaaaaaaaaaaacttttgctttgatttgtggtggattcaccttcttaaaataataaatttagaggatattaggaatgacattcaaaacaaatatagtgagaggtgattttttaaaaatttttgttcctggtttccaaattatgtttactttgatttgattatatgttggtatctcccaaatataggttaacttagctatttaaatggtatcttttgacatttaaaaagaattaagtacctgtcaaatctagcattgaggttgcagttgaataagataaaagcttaggatgtcaaaaaataatatagagaaatattataagattttatgattattcttgacgtttttgatgcaaaaggaaaatatgctgaatagttcttccaaaaaatattatttccctcaatattttatttgtagccatgtaatttaaagagaacagaaaataactgcaatcaaaagtatggtttaatatcaatcaaagtggcacaacagaattgataagatctttataacaatcaattggctgatattaaaatattgattttaattgatcttttcaattaaaatctttagggcctgtaactcataaaatcagcatccaccacaatatatggtcattattggtttgtaagcatagatcaccattgactcctacctggagagacatgtctatttctaaaaatccagtagtttctttgcattctcagtagtacacgttgtatatatatatatgtaacaaatttggtagttttcagtatgtgtgatgtcctttgggggttatttatcttgctggtccataggaggggtacactaccccaagaatcaagacatctgagttctagttctagttctagctctgccactgaagagccaccttacctggggcaagttagccattgtctcccagtcatgtttaccacccatgaaaggactcgtcggtttgatgtttccattaagctcaatgagtaactctaatagttactcttgaatctggattgaaaaacaccatgcatctgatgagataattcataaatgttgccccttttttaaatgatacaaccctaaaagtgactgaattgcccaagtgcttgaacatggcagaggtagttactcctattttgcagtttgtgcacttaaaaattcctacagtgattgttactttactggggaaaaaagatgaggtgaaacttcctcccaaggaattaaaatatctgtagaagccatggcttgcttttataatgtggaaatcatttgatttgctgtaattcacgcagatccctccttttgtcagggggaaatgatttgcatcatgttcttttttcataatgcttttacttcctgtttggatcagttgtatgtaaatgtacatttttgttactttggctgtgcccgttagaatttatcttccataaagtatttctcccattgagtctaatgatgtatactttgcctaggtctttccaaaattaaatttatgtaaatgtctattttatataaaatatgattaaaataagtatgtctggtttcaa

SEQ ID NO: 272571 - DNA, 4228 bp, Artificial Sequence
  derived and/or modified sequence
gcgcggggagctcgcggcgggtccagctgccgcagcaccatgcccgagcccccctccgggcagacgccgcgcgccgccggggccccggtaggggaggatgccagacgcccgggagaggccagggcagcagcggcggcggcggcgcgatggtggtgaccacctctgcccgaggcggcggcggggaccgcacaccctcccggcggcggggctgcgggctagcgccggccggggccgcggcgctgctggccggggcaagctgcctgtgctacggccgctccctgcagggcgagttcgtgcacgacgacgtgtgggcgatcgtgaacaaccccgacgtgcggcccggcgccccgctccgctggggcatcttcaccaacgacttctggggcaagggcatggccgagaacaccagccacaagtcctaccggccgctctgcgtcctcaccttcaagctaaacatatttttgactggtatgaacccattctactttcatgcagtaaatataattttacactgcttagtgactcttgtgctgatgtacacctgtgataaaactgtcttcaagaatcgtggacttgcttttgtaacggcattgctttttgctgtacatcctattcatactgaggcggtggctgggatcgttggcagagcggacgtgttagcgtgtctgctgtttctattggcctttctctcgtacaacaggagtctggatcagggctgtgttgggggaagtttcccttccacggtgtctcccttcttcttgctgctcagtttgtttctggggacctgtgcgatgctggtgaaagagacaggcatcacggtgtttggagtgtgcttggtttatgacctcttttccctttccaacaagcaagacaagtcgagcaatggggccctctgtccacgcagcccacagcagcccgggagcccccagccctcctcactgccaggccatcctcaccgggagaatgggaagcagcagcggttccctcacaaaggagcttggggtggctgccactctccactgccaccagaacccaagagcagtggattcccagtgtccccacgagctgtgtggtccatgatgaggtatctgagagcaagcagcaatagaaatttcctgcttaccatgagaccatttttaaaaagggccattttggtcctaagttatgtgcttgtcattttgtacttccgtctgtggataatgggaggatctatgcccctcttttcagagcaggataatccagcttcattttcgccttacattcttacgagattcctcacctattcctacctcttggccttcaatgtgtggcttctgcttgcacccgtgaccctgtgctatgactggcaggtcggcagtattcctctggtagagaccatatgggacatgcggaacttagccaccatctttctggcggttgtgatggccttattgagcctgcactgcttagcagcctttaagagactggagcacaaggaggttttagtcggcttgttgttcctggtgttcccgttcattccagccagcaacctcttcttcagggtgggttttgtggtggcggagagagtcctttacatgcctagcatgggctactgcatcctttttgtgcatggactgagcaagctctgcacttggctgaatcgatgtggggccaccaccctgattgtgtccactgtgttgctgctgttgcttttctcttggaaaactgtgaaacagaatgaaatttggctgtcaagagagtccctattcaggtctggagttcaaactctgccccacaatgccaaggttcactacaactatgccaatttcctgaaggaccaaggtcggaacaaggaagcgatctaccactacagaacagctctcaagttgtatccacgccatgcaagtgcgctcaacaaccttggaacactgacgagagacacagcagaggcaaagatgtactatcagagggctctccagctccatccacagcataaccgggctcttttcaatctggggaatctcctcaagtcccaggagaaaaaggaagaagctatcaccttactgaaggattccatcaaatatggtccagagtttgcagatgcatattcaagcttagcttcgttattggctgagcaggagcggtttaaagaagctgaagaaatataccaaactggaataaagaactgtccagacagctcagatttacacaacaactatggggttttcttagttgatactggcttaccagaaaaggcagtggcccattaccagcaggccatcaaacttagccccagtcatcacgtggccatggtgaacttgggaagactctacaggtcactgggagagaacagcatggctgaagaatggtacaagcgcgccctgcaggtggcacacaaagctgagatattgtcacctttgggagcactgtattacaacactggccgatacgaagaggctttgcagatttaccaggaagctgcagcacttcagccttctcagagggagctccgcttggcactggctcaggttttggccgtgatgggtcagacaaaagaagctgaaaagatgaccaatcacattgtgtcagaggagaccggatgccttgaatgctatcgcctcttgtcagccatctatagcaagcaggagaaccacgacaaggcacttgatgctatagacaaggctctccagctgaaaccaaaggacccaaaagtcatttctgaactttttttcacaaaaggaaaccaattaagagagcagaaccttctcgacaaagcttttgagagctatagagtggctgtgcaactaaacccagaccaagcacaggcctggatgaacatgggtggcatccaacacatcaagggaaaatatgtgtctgcaagagcttattatgagagagccttacagctggttccagacagcaaactgctgaaggaaaatcttgccaaattggatcgcctagaaaaacgattacaagaagttcgagaaaaggatcaaacatagcaccaccgtctgacccaacctcataggataatgtggtgcctctgaaaggggagtgatggaagccttgctttcacatcagcaggggcacaactaatgagattttctctcattccgagttcagggtgacacattttgggacatctgctggtagcccagtgctgaaggacttgcttttccatgaagaagacgaaaacagcaaacaagggcaagaaggtctgagagggaaggagaatgacatttacacattttacagatttttgtttggtttaactccagatttctcttgatatatctctgtgcttttgagacctggagatctaattctgtttagacattttttgtcccagaaatacagaagcttgaaatgctatgaaggcagagcttctattctttatgggatgaaatatttcaaaagaggataaatcctctgtggtaagccatttggaaaatcctaccaagaattggcttatttaattttccagaaccaggaatgagtatctaatagcttttgtagaaccttccagaatatgtggggaaaaagggctattgctaagtgagctttatctaatatcctcctaagagttttactagtgcttttttgaggaattacagggaagctcctggaattgtacatggatatctttatccctagggggaaatcaaggagctgggcacccctaattctttatggaagtgtttaaaactattttaattttattacaagtattactagagtggtggttctactctaagatttcaaaagtgcatttaaaatcatacatgttcccgcctgcaaatatattgttattttggtggagaaaaaaatagtatattctacataaaaaattaaagatattaactaagagaaatgtcctactttattatcttaatgttcagacatcatgagatttattatttttttgaaaaatatattgaaccattgaggaacctttatgatgtatcacagaaatcttcatagattctaactagatggaaaaagagctctatttatttgtgttcctaggcttaatgagaattctgggcttagaacatcaacgattaatacccagaattctttgttttgagaatattatggagaatgctctaaaaatctagggtaaagatctaaattcaaattttaaatatatatttatatttaagaaataggaaaggcaaagttgaactcacaatttgacatttatttttagtgttatttatttcataacttataaaatatttaatatata

SEQ ID NO: 272572 - protein, 86 aa, Artificial Sequence
  derived and/or modified sequence
MMSDASDMLAAALEQMDGIIAGSKALEYSNGIFDCQSPTSPFMGSLRALHLVEDLRGLLEMMETDEKEGLRCQIPDSTAETLVEWL

SEQ ID NO: 272573 - protein, 283 aa, Artificial Sequence
  derived and/or modified sequence
MMSDASDMLAAALEQMDGIIAGSKALEYSNGIFDCQSPTSPFMGSLRALHLVEDLRGLLEMMETDEKEGLRCQIPDSTAETLVEWLQSQMTNGHLPGNGDVYQERLARLENDKESLVLQAMVSVLTDQVEAQGEKIRDLEFCLEEHREKVNATEEMLQQELLSRTSLETQKLDLMAEISNLKLKLTAVEKDRLDYEDKFRDTEGLIQEINDLRLKVSEMDSERLQYEKKLKSTKDELASLKEQLEEKESEVKRLQEKLVCKMKGEGVEIVDRDENFKKKLKEK

SEQ ID NO: 272574 - protein, 1154 aa, Artificial Sequence
  derived and/or modified sequence
MSKLRMVLLEDSGSADFRRHFVNLSPFTITVVLLLSACFVTSSLGGTDKELRLVDGENKCSGRVEVKVQEEWGTVCNNGWSMEAVSVICNQLGCPTAIKAPGWANSSAGSGRIWMDHVSCRGNESALWDCKHDGWGKHSNCTHQQDAGVTCSDGSNLEMRLTRGGNMCSGRIEIKFQGRWGTVCDDNFNIDHASVICRQLECGSAVSFSGSSNFGEGSGPIWFDDLICNGNESALWNCKHQGWGKHNCDHAEDAGVICSKGADLSLRLVDGVTECSGRLEVRFQGEWGTICDDGWDSYDAAVACKQLGCPTAVTAIGRVNASKGFGHIWLDSVSCQGHEPAIWQCKHHEWGKHYCNHNEDAGVTCSDGSDLELRLRGGGSRCAGTVEVEIQRLLGKVCDRGWGLKEADVVCRQLGCGSALKTSYQVYSKIQATNTWLFLSSCNGNETSLWDCKNWQWGGLTCDHYEEAKITCSAHREPRLVGGDIPCSGRVEVKHGDTWGSICDSDFSLEAASVLCRELQCGTVVSILGGAHFGEGNGQIWAEEFQCEGHESHLSLCPVAPRPEGTCSHSRDVGVVCSSKTQKTSLIGSHTVKGTGLGSHSCLFLKPCLLPGYTEIRLVNGKTPCEGRVELKTLGAWGSLCNSHWDIEDAHVLCQQLKCGVALSTPGGARFGKGNGQIWRHMFHCTGTEQHMGDCPVTALGASLCPSEQVASVICSGNQSQTLSSCNSSSLGPTRPTIPEESAVACIESGQLRLVNGGGRCAGRVEIYHEGSWGTICDDSWDLSDAHVVCRQLGCGEAINATGSAHFGEGTGPIWLDEMKCNGKESRIWQCHSHGWGQQNCRHKEDAGVICSEFMSLRLTSEASREACAGRLEVFYNGAWGTVGKSSMSETTVGVVCRQLGCADKGKINPASLDKAMSIPMWVDNVQCPKGPDTLWQCPSSPWEKRLASPSEETWITCDNKIRLQEGPTSCSGRVEIWHGGSWGTVCDDSWDLDDAQVVCQQLGCGPALKAFKEAEFGQGTGPIWLNEVKCKGNESSLWDCPARRWGHSECGHKEDAAVNCTDISVQKTPQKATTGRSSRQSSFIAVGILGVVLLAIFVALFFLTKKRRQRQRLAVSSRGENLVHQIQYREMNSCLNADDLDLMNSSGGHSEPH

SEQ ID NO: 272575 - DNA, 3465 bp, Artificial Sequence
  derived and/or modified sequence
atgtcaaagctgcggatggtgctgcttgaggatagcgggagtgctgattttcgtagacactttgtcaacctatccccctttactattacggtggtactgctgctctcagcctgttttgttacaagctcacttggcgggacagacaaggagctgcgcttggtggatggcgagaacaaatgcagcggacgagtcgaagtaaaggtacaagaggaatggggaactgtctgtaacaatggctggagcatggaggccgtgagcgtgatatgcaaccaattaggctgccctaccgcaattaaagccccaggatgggccaatagctccgcgggatccggccgaatttggatggaccatgtctcctgcagggggaatgaatctgccctctgggactgcaagcatgatggttgggggaagcacagcaactgtacacatcagcaggacgccggagtgacgtgcagcgacgggtcaaatctcgaaatgcgcctgacgagaggagggaacatgtgctctggtcgcattgagataaagtttcaaggccggtggggcacggtttgcgatgacaactttaacatagatcacgcctctgttatctgtcggcaactcgagtgcggctctgcggtctctttctctggttccagcaacttcggggagggatccgggccgatttggttcgatgatctgatatgtaatgggaacgaatccgcgctttggaactgcaaacatcaaggatgggggaagcacaattgcgaccatgctgaggacgcaggcgtaatctgtagtaaaggggccgacctttcgttaagactcgtcgatggagtaactgaatgctccggaaggctggaggtcaggtttcaaggagagtggggcaccatttgtgatgatggttgggatagttacgatgctgctgttgcctgcaagcagcttggctgtcctacagctgtcactgcaatcggccgcgttaacgccagtaagggcttcggacatatttggctggattccgtttcctgtcaagggcacgaaccagcaatctggcagtgcaaacaccacgaatggggcaaacattattgcaatcataatgaggatgctggtgtgacttgtagtgatgggtcagacctggaactaagattgaggggagggggatcccgatgcgcgggtacggtggaggtcgaaatacagagactattgggtaaagtttgcgacagaggatggggccttaaggaggcggacgtcgtatgccgacaactcgggtgtggctctgcactgaagacatcatatcaggtgtacagtaagatccaggcaactaatacctggttgtttctgtccagctgtaatggcaacgaaacctccctgtgggactgcaagaattggcagtggggaggactgacatgtgaccattacgaggaggccaagataacatgcagcgctcatcgggagcccaggctcgtgggcggagacatcccatgctccggccgtgtggaggtcaagcacggcgatacttgggggtccatatgtgattccgattttagcctcgaggcagccagtgtcctatgtcgagagctgcagtgtggcaccgtggtctcaatcttgggaggcgcacactttggggaggggaacggccaaatttgggcagaagaattccaatgcgaaggccatgaatctcacctgtccctgtgtcccgtggctccccgcccagaaggaacttgttcacatagccgcgacgttggggtagtatgtagtagcaaaactcagaagacatctctgatcggtagccacactgtcaagggcacgggattgggatcccacagctgcctcttccttaagccatgcctgttgcccggctataccgaaatcagattggttaatggcaaaacaccttgtgagggccgggtggagcttaagactctaggagcttggggctctctatgcaacagtcactgggacatcgaggatgcccacgtgctgtgtcagcaactgaaatgcggggtggctctgagcacacctggcggtgctcggtttggcaagggaaacggtcagatctggcggcatatgttccattgcactgggactgaacagcacatgggcgactgccccgtcactgctctgggcgcctccctatgcccatctgagcaggttgccagcgtcatatgtagcggaaaccaaagccaaacgctgtcaagctgcaacagcagttctctgggccctacaaggccaaccatcccagaggagtcagccgtggcctgcatagagtccggccaactgcgactggtcaatggcggcggaaggtgtgccggaagagtggagatttaccacgaaggatcatggggaactatctgcgatgactcatgggacctgtctgacgctcacgttgtgtgccggcagctgggctgcggggaagctatcaacgcaacgggttcagcgcattttggagagggaaccgggccaatttggctagacgaaatgaaatgcaacggaaaggagagtcggatttggcagtgtcactcacatggttggggtcagcaaaattgccgacacaaggaagatgcaggggtgatttgcagtgaatttatgtcactcaggctgacaagcgaggcgagccgcgaagcatgcgccggaagacttgaggtgttctacaatggggcatgggggaccgttgggaaaagctccatgagtgagaccactgtgggagtggtctgccgacaactcggctgtgccgacaaggggaagataaatcccgcgtccctggataaggcaatgagtattcctatgtgggtggataacgtgcagtgccctaaaggtcctgatactttatggcagtgtcccagcagtccctgggaaaagcggctggcgagtccaagtgaagaaacatggataacgtgcgataacaagattcggctccaggaggggcccacaagctgcagtggtcgcgtagaaatctggcatggaggttcttggggcaccgtgtgcgacgactcctgggacctggacgacgctcaggtcgtctgccagcaactaggatgcggacccgcactaaaggcttttaaggaggcggagtttgggcagggtactggcccaatctggctcaacgaggtgaagtgcaagggaaatgagtcgtcactctgggactgccctgcccggcggtggggccactcagaatgcggccacaaggaagacgctgctgtgaactgtactgacatctccgtccagaagacacctcagaaagctactactggccggagcagtcggcagtctagcttcattgctgtgggcatactaggggtggtgcttctggcaatctttgtggcgctgttcttcctcaccaagaaacgccgtcaacggcaacgcctcgccgtttcttctaggggagaaaatctagtgcatcagatacagtacagagaaatgaatagttgtctgaatgctgacgacctggacctgatgaattcatcaggcggccatagcgagccacattag

SEQ ID NO: 272576 - DNA, 3465 bp, Artificial Sequence
  derived and/or modified sequence
atgagcaagctgaggatggtgctgctggaggacagcggcagcgctgacttccgccgccactttgtgaacctgagccccttcaccatcaccgtggtgctgctgctgagcgcctgctttgtgaccagcagcctgggcggcacagacaaggagctgcggctggtggatggagaaaataaatgttctggccgggtggaggtgaaggtgcaggaggagtggggcaccgtgtgcaacaacggctggagcatggaggccgtgtctgtcatctgcaaccagctgggctgccccacagccatcaaggcccctggctgggccaacagcagcgctggcagcggccgcatctggatggaccacgtgtcctgcagaggaaatgaaagtgccctgtgggactgcaagcatgatggctggggcaagcacagcaactgcacccaccagcaggatgctggggtgacctgcagtgatggcagcaacctggagatgaggctgacccggggcggcaacatgtgcagcggccgcatcgagatcaagttccagggccgctggggcaccgtgtgtgatgacaacttcaacatcgaccacgccagcgtcatctgccggcagctggagtgtggcagcgctgtgtccttcagcggcagcagcaactttggagagggcagcggccccatctggtttgatgacctgatctgcaatggaaatgaaagtgccctgtggaactgcaagcaccagggctggggcaagcacaactgtgaccatgctgaagatgctggggtcatctgcagcaaaggagctgacctgagcctgcggctggtggatggagtgacagagtgcagcggccgcctggaggtgcgcttccagggcgagtggggcaccatctgtgatgatggctgggacagctatgatgctgctgtggcctgcaagcagctgggctgccccacagctgtgacagccatcggccgggtgaatgccagcaaaggatttggccacatctggctggacagcgtgtcctgccagggccacgagcccgccatctggcagtgcaagcaccacgagtggggcaagcactactgcaaccacaatgaagatgctggggtgacctgcagtgatggcagtgacctggagctgcggctgcggggcggcggcagccgctgtgccggcaccgtggaggtggagatccagaggctgctgggcaaggtgtgtgaccggggctggggcctgaaggaggctgatgtggtgtgccggcagctgggctgcggcagcgccctgaagaccagctaccaggtgtacagcaagatccaggccaccaacacctggctgttcctgagcagctgcaatggaaatgagaccagcctgtgggactgcaagaactggcagtggggcggcctgacctgtgaccactatgaggaggccaagatcacctgcagcgcccaccgggagccccggctggtgggcggggacatcccctgcagcggccgggtggaggtgaagcatggagacacctggggcagcatctgtgacagcgacttcagcctggaggccgcctctgtgctgtgccgggagctgcagtgtggcaccgtggtgtccatcctgggcggggcccactttggagagggcaatggccagatctgggccgaggagttccagtgtgagggccacgagagccacctgagcctgtgccctgtggcccccaggcctgagggcacctgcagccacagcagagatgtgggcgtggtgtgcagcagcaagacccagaagaccagcctgattggcagccacacagtgaagggcaccggcctgggcagccacagctgcctcttcctgaagccctgcctgctgcccggctacacagagatccggctggtgaatggcaagaccccctgtgagggccgggtggagctgaagaccctgggcgcctggggcagcctgtgcaacagccactgggacattgaagatgcccacgtgctgtgccagcagctgaagtgtggggtggccctgagcacccctgggggcgccaggtttggaaaaggaaatggccagatctggaggcacatgttccactgcaccggcacagagcagcacatgggagactgccctgtgacagccctgggcgccagcctgtgccccagcgagcaggtggccagcgtcatctgcagcggcaaccagagccagaccctgagcagctgcaacagcagcagcctgggccccacccggcccaccatccctgaggagagcgctgtggcctgcattgaaagtggccagctgcggctggtgaatggaggcggccgctgtgccggccgggtggagatctaccacgagggctcctggggcaccatctgtgatgacagctgggacctgagtgatgcccacgtggtgtgccggcagctgggctgtggggaggccatcaatgccaccggcagcgcccactttggagagggcaccggccccatctggctggatgagatgaagtgcaatggcaaggagagccgcatctggcagtgccacagccacggctggggccagcagaactgccgccacaaggaggatgctggggtcatctgcagcgagttcatgagcctgcggctgaccagcgaggccagccgggaggcctgtgccggccgcctggaggtgttctacaatggagcctggggcaccgtgggcaagagctccatgtctgagaccaccgtgggcgtggtgtgccggcagctgggctgtgccgacaagggcaagatcaacccagccagcctggacaaggccatgagcatccccatgtgggtggacaacgtgcagtgccccaagggccctgacaccctgtggcagtgccccagcagcccctgggagaagaggctggccagccccagcgaggagacctggatcacctgtgacaacaagatccggctgcaggagggccccaccagctgcagcggccgggtggagatctggcatggaggctcctggggcaccgtgtgtgatgacagctgggacctggatgatgcccaggtggtgtgccagcagctgggctgcggccctgccctgaaggccttcaaggaggccgagtttggccagggcaccggccccatctggctgaatgaggtgaagtgcaagggaaatgaaagcagcctgtgggactgcccagcccggcgctggggccacagtgaatgtggccacaaggaggatgctgctgtgaactgcacagacatctctgtgcagaagaccccccagaaggccaccaccggccgcagcagccggcagagcagcttcatcgctgtgggcatcctgggcgtggtgctgctggccatctttgtggccctcttcttcctgaccaagaagaggcggcagaggcagaggctggccgtgagcagcagaggagagaacctggtgcaccagatccagtaccgggagatgaacagctgcctgaatgctgatgacctggacctgatgaacagcagcggcggccacagcgagccccactag

SEQ ID NO: 272577 - DNA, 3465 bp, Artificial Sequence
  derived and/or modified sequence
atgagcaagctgcggatggtgctgctggaggacagcggcagcgccgatttcaggagacacttcgtgaatcttagccccttcacgattacagtggttctattgctatctgcctgtttcgtcacatcatctctgggtggcacagacaaagaattacgtctcgtcgacggcgaaaacaagtgcagcgggagggtggaagttaaggtgcaggaagaatggggcaccgtttgtaataatggatggtcaatggaagcagtgagtgttatatgtaaccagctgggatgccccaccgcaataaaagcaccaggatgggcgaactcctcagcagggagcgggagaatctggatggaccacgtgagctgtcgtggaaacgagtccgcactatgggactgcaagcacgatggctggggaaagcactcaaactgtacccatcagcaggacgccggcgtgacctgtagcgacgggtctaatttggagatgcgcctgacccgaggggggaatatgtgcagcggcagaattgaaattaagttccagggcaggtggggaactgtgtgcgacgataacttcaatatcgatcatgccagcgtaatatgtcgccagttggagtgtggctccgcggtttctttctccggctcctctaacttcggggaggggtctggcccaatttggttcgatgatttaatctgtaacggcaatgaatctgccttatggaactgcaagcaccagggctgggggaagcacaactgtgaccatgccgaagatgccggggtgatctgcagcaagggtgccgatctgtcactgcggttggtggatggtgtgacggaatgttccgggcggctcgaggtccgatttcagggggagtggggcaccatctgcgacgatggatgggactcatatgatgcagcggtggcctgcaagcagctgggttgcccaactgccgttactgcaattgggagagtgaatgccagtaagggctttgggcatatctggttggacagcgtgagctgccaaggccatgagcctgccatttggcagtgtaaacaccatgagtggggaaagcattactgtaaccataacgaggatgccggggtgacttgctccgatggaagtgatctcgaactcagactgaggggcggcgggagccgctgcgccgggacggtagaggtggaaatccaaagactgcttggaaaagtgtgtgatcgggggtggggactgaaggaggctgatgtggtttgccgtcaattaggctgtggctccgccctgaagacttcctaccaggtgtactcaaagatccaggctactaacacttggctcttcctgagcagctgcaatggcaatgagacctcgctttgggattgcaaaaactggcagtggggcggcctaacttgcgatcattatgaagaggcaaagattacatgttcggctcacagggaaccacgcctggtcggaggtgacattccctgtagcgggcgagtcgaggtgaaacacggggacacatggggatcaatttgtgacagcgacttctccctggaggcagctagcgtgctctgtcgagagctgcagtgtggaaccgtggtgagtatcctggggggcgcgcattttggagaggggaatggacagatatgggctgaggaattccagtgtgagggtcatgaatcccacctctccttgtgccctgtggccccaaggcccgaaggtacatgctcccactcgagagatgtgggagtggtttgctcgagcaagacgcagaagacctctctcattggctcacatacagttaagggaaccgggctgggtagccatagctgcctgttcctgaagccatgtctgctgcctggctacacagagattaggctggtgaacggtaagacaccctgcgaaggccgggttgagttgaaaactctgggcgcatggggaagtttatgcaactcccactgggatatcgaggacgcccatgttctgtgtcaacagctgaagtgcggcgttgctttgagcaccccgggcggagctaggttcggcaaggggaatggtcagatatggcgacacatgtttcattgtacaggaacagagcagcacatgggcgattgccctgtgactgcccttggagccagtctatgccctagcgaacaagtggctagcgtgatctgtagcgggaatcaatcacagacactgagctcttgcaattcatcctcactcggaccgacgagacctactatccccgaagaatctgccgttgcctgtatcgagagcggccagctgcggcttgtcaatggaggtggtcggtgcgcgggccgggtggagatctatcacgagggtagttggggaactatttgcgacgacagctgggatctgtctgacgcgcacgtagtctgtagacagttaggctgcggtgaggccatcaatgccaccggtagtgcccacttcggtgagggaaccgggcctatctggttggatgagatgaaatgtaatggcaaagaatcccgcatatggcagtgtcattcccatggttggggccaacaaaattgcaggcacaaggaggacgctggtgtgatctgttcggaattcatgagcctaaggttgacatcggaagccagccgagaggcatgcgctggacggctggaagtattttataacggcgcctggggaaccgtggggaaaagttctatgagcgagaccacagtgggggtagtttgcaggcagctcggatgcgccgacaagggaaagattaacccagccagcttggacaaggccatgagtattcctatgtgggtagataacgtacagtgtccaaagggaccggataccctatggcaatgcccgagctctccatgggagaagaggcttgcctcccccagcgaggagacgtggataacctgtgacaataagattcgcctgcaggaaggaccaacttcgtgtagcggtcgggtggaaatctggcatggaggttcatgggggaccgtgtgcgacgacagctgggacttagatgacgcgcaggtcgtctgtcagcaattgggttgcggcccagcactgaaagcttttaaggaggccgagttcggtcagggcaccgggcccatctggctgaacgaggtgaaatgcaaaggcaacgagtcttccctgtgggattgccccgcccgtcgctggggacactctgagtgcggtcacaaagaagacgcggccgtgaactgtaccgatatcagcgtccagaagacaccccagaaagctacaacaggacggtcatcgcgccagtcgagcttcatcgccgtggggattttgggagtcgttcttttagctatcttcgtcgccctcttctttctaaccaaaaaacggagacagcgccagcggctggccgtgtcctcacgcggcgaaaatctggtgcaccagatccagtacagggaaatgaattcatgcctaaacgctgatgaccttgaccttatgaacagctccggtggacactctgagcctcattag

SEQ ID NO: 272578 - DNA, 3465 bp, Artificial Sequence
  derived and/or modified sequence
atgagcaaattgcgtatggtcctcctcgaggacagcggctctgccgattttagacgccatttcgtaaatttgagcccgttcactatcacagttgtcctcctcctgtctgcctgtttcgtgacatcatcactgggtgggacagacaaagagttgaggcttgtggacggtgagaacaaatgcagcggaagagtagaagtcaaggtccaggaggaatggggtacagtatgtaacaacggttggtcaatggaagccgtaagcgtgatctgtaaccagcttggatgcccaacagccatcaaggctcccggatgggctaactcaagcgctggttccggtaggatctggatggatcatgttagttgccggggtaatgaatccgcattatgggactgcaagcatgacggctgggggaaacatagtaattgcacgcaccaacaggacgctggagtgacctgttccgacggctctaacttggaaatgaggctgaccaggggcggaaacatgtgcagtggccgaatcgagatcaagtttcagggccgatggggtacagtgtgcgatgataactttaacatcgatcacgctagcgtcatttgcagacagctggagtgtggctcagcagtatccttctctggctcttccaactttggagaaggttcgggcccaatttggttcgacgacctgatctgtaatgggaatgaaagtgctctctggaattgcaagcatcagggctggggcaagcataactgtgaccatgctgaggacgctggtgtcatttgttcaaagggcgcagacctatctctcaggctagttgacggagtgactgaatgtagtgggagactcgaagtgcggttccagggcgagtggggcacaatctgcgacgatgggtgggattcctatgatgcagctgtcgcatgcaaacagctgggctgtcctaccgcagtgactgccatcggccgtgtcaacgcctcgaaaggatttggtcacatttggctggattctgttagttgtcaaggacacgagcctgcaatctggcagtgcaagcaccacgagtggggcaagcattactgtaaccacaatgaggacgcaggcgtgacctgttcagacggcagcgacttagagctgcgcctgcgcggaggaggatctcgctgcgccggaaccgtggaagttgagattcaacggttgcttggaaaggtgtgtgatcggggatggggtctgaaagaggcagacgtggtgtgcaggcagctgggatgtggttccgcgttaaagacgtcctaccaggtgtattctaagatccaggctaccaatacctggctgtttctaagttcttgcaatggaaacgagacttcattatgggattgtaaaaactggcagtggggaggcctcacttgtgaccactacgaagaagccaagatcacctgctccgcacacagggagccccgactcgtcgggggtgacattccttgttcaggccgtgtcgaagtaaaacatggggacacatggggctcaatttgtgactctgatttttcactcgaggcggcaagcgtcctctgccgcgaactccagtgcggaactgtggtctccatcctcggcggagctcactttggcgagggcaatggacagatttgggccgaggagttccaatgcgaaggccacgaatctcatttaagcctttgcccagtcgctcctcggcctgaaggtacttgtagccatagtagggacgttggagttgtgtgctcctctaagacacaaaagacctctctgattggatcacataccgtgaaggggacagggttggggagtcattcttgcctctttctcaagccttgccttctccccggttacactgaaatcaggttggtgaacggcaagaccccgtgtgaggggcgagtagagctaaaaactcttggagcttgggggtccctctgtaactctcactgggacattgaagatgcccacgttctgtgccagcaactgaagtgtggtgtcgcactgtcaacccctggaggggcaagattcggcaagggaaatgggcagatctggcgccacatgttccattgcacaggaactgagcagcacatgggcgactgccctgtcacagcgctgggagcatcactatgcccgtccgagcaagtcgcgtctgtcatttgttccgggaatcagagtcagaccctaagtagctgtaactccagttcactgggcccaacccgtcccaccattccagaggagagcgccgtggcatgcatagagtcagggcaactgcggctcgtgaatggaggcggtcgctgtgctgggcgtgtggagatttatcatgagggctcctggggtacaatctgtgacgactcttgggatctgtcagatgctcatgttgtctgtcgacagctcgggtgtggtgaggccataaatgctacagggagtgcccatttcggggaagggactggcccaatttggctagatgagatgaagtgcaacggaaaagagtcaagaatctggcagtgtcactcgcacggctgggggcagcagaattgccggcacaaagaggatgctggcgtgatctgcagcgaatttatgtctctgcgcttgactagcgaggctagccgcgaggcctgcgccggtaggctggaagtgttctataacggagcttgggggaccgttgggaagagcagcatgagcgagacaactgtcggggtcgtctgccgccagctgggttgcgcagacaaagggaaaatcaacccagccagcttagacaaagcgatgtccatacccatgtgggtagacaacgtacagtgcccaaaaggacccgacacactttggcagtgcccgagcagtccgtgggagaagcgcctggctagcccgagcgaagagacatggatcacatgtgacaacaagatcaggctgcaggagggtcctacctcctgtagtggcagagtggaaatctggcatgggggatcatggggtacggtttgtgatgatagctgggatttagacgatgcccaggtcgtgtgccagcagcttggctgcgggcctgctcttaaggcgtttaaggaagcggaattcggccagggcacgggccctatttggcttaatgaggttaagtgcaagggcaatgaaagttccttgtgggattgccccgcacggaggtgggggcactctgaatgtgggcacaaagaagacgctgccgtgaattgtacagacatctcagtccaaaagacgccgcaaaaagccacaacaggcagatcatccaggcaatcctcattcatcgcagtcgggattctgggcgtggtcctgcttgccatctttgttgctttgttcttcctgacaaagaagcggcgacagcgccagaggcttgccgtatctagtcgcggtgaaaacttggtccaccagatccagtaccgtgaaatgaattcctgcctgaacgccgacgacctggacctaatgaatagttcagggggacatagcgagccacattag

SEQ ID NO: 272579 - DNA, 3800 bp, Artificial Sequence
  derived and/or modified sequence
gaattcttagttgttttctttagaagaacatttctagggaataatacaagaagatttaggaatcattgaagttataaatctttggaatgagcaaactcagaatggtgctacttgaagactctggatctgctgacttcagaagacattttgtcaacttgagtcccttcaccattactgtggtcttacttctcagtgcctgttttgtcaccagttctcttggaggaacagacaaggagctgaggctagtggatggtgaaaacaagtgtagcgggagagtggaagtgaaagtccaggaggagtggggaacggtgtgtaataatggctggagcatggaagcggtctctgtgatttgtaaccagctgggatgtccaactgctatcaaagcccctggatgggctaattccagtgcaggttctggacgcatttggatggatcatgtttcttgtcgtgggaatgagtcagctctttgggattgcaaacatgatggatggggaaagcatagtaactgtactcaccaacaagatgctggagtgacctgctcagatggatccaatttggaaatgaggctgacgcgtggagggaatatgtgttctggaagaatagagatcaaattccaaggacggtggggaacagtgtgtgatgataacttcaacatagatcatgcatctgtcatttgtagacaacttgaatgtggaagtgctgtcagtttctctggttcatctaattttggagaaggctctggaccaatctggtttgatgatcttatatgcaacggaaatgagtcagctctctggaactgcaaacatcaaggatggggaaagcataactgtgatcatgctgaggatgctggagtgatttgctcaaagggagcagatctgagcctgagactggtagatggagtcactgaatgttcaggaagattagaagtgagattccaaggagaatgggggacaatatgtgatgacggctgggacagttacgatgctgctgtggcatgcaagcaactgggatgtccaactgccgtcacagccattggtcgagttaacgccagtaagggatttggacacatctggcttgacagcgtttcttgccagggacatgaacctgctatctggcaatgtaaacaccatgaatggggaaagcattattgcaatcacaatgaagatgctggcgtgacatgttctgatggatcagatctggagctaagacttagaggtggaggcagccgctgtgctgggacagttgaggtggagattcagagactgttagggaaggtgtgtgacagaggctggggactgaaagaagctgatgtggtttgcaggcagctgggatgtggatctgcactcaaaacatcttatcaagtgtactccaaaatccaggcaacaaacacatggctgtttctaagtagctgtaacggaaatgaaacttctctttgggactgcaagaactggcaatggggtggacttacctgtgatcactatgaagaagccaaaattacctgctcagcccacagggaacccagactggttggaggggacattccctgttctggacgtgttgaagtgaagcatggtgacacgtggggctccatctgtgattcggacttctctctggaagctgccagcgttctatgcagggaattacagtgtggcacagttgtctctatcctggggggagctcactttggagagggaaatggacagatctgggctgaagaattccagtgtgagggacatgagtcccatctttcactctgcccagtagcaccccgcccagaaggaacttgtagccacagcagggatgttggagtagtctgctcaagtaagacccagaaaacatctttaattggttctcatactgtgaaagggacagggttagggagtcatagctgtctttttctaaagccctgtctccttccaggatacacagaaattcgcttggtgaatggcaagaccccgtgtgagggcagagtggagctcaaaacgcttggtgcctggggatccctctgtaactctcactgggacatagaagatgcccatgttctttgccagcagcttaaatgtggagttgccctttctaccccaggaggagcacgttttggaaaaggaaatggtcagatctggaggcatatgtttcactgcactgggactgagcagcacatgggagattgtcctgtaactgctctaggtgcttcattatgtccttcagagcaagtggcctctgtaatctgctcaggaaaccagtcccaaacactgtcctcgtgcaattcatcgtctttgggcccaacaaggcctaccattccagaagaaagtgctgtggcctgcatagagagtggtcaacttcgcctggtaaatggaggaggtcgctgtgctgggagagtagagatctatcatgagggctcctggggcaccatctgtgatgacagctgggacctgagtgatgcccacgtggtttgcagacagctgggctgtggagaggccattaatgccactggttctgctcattttggggaaggaacagggcccatctggctggatgagatgaaatgcaatggaaaagaatcccgcatttggcagtgccattcacacggctgggggcagcaaaattgcaggcacaaggaggatgcgggagttatctgctcagaattcatgtctctgagactgaccagtgaagccagcagagaggcctgtgcagggcgtctggaagttttttacaatggagcttggggcactgttggcaagagtagcatgtctgaaaccactgtgggtgtggtgtgcaggcagctgggctgtgcagacaaagggaaaatcaaccctgcatctttagacaaggccatgtccattcccatgtgggtggacaatgttcagtgtccaaaaggacctgacacgctgtggcagtgcccatcatctccatgggagaagagactggccagcccctcggaggagacctggatcacatgtgacaacaagataagacttcaggaaggacccacttcctgttctggacgtgtggagatctggcatggaggttcctgggggacagtgtgtgatgactcttgggacttggacgatgctcaggtggtgtgtcaacaacttggctgtggtccagctttgaaagcattcaaagaagcagagtttggtcaggggactggaccgatatggctcaatgaagtgaagtgcaaagggaatgagtcttccttgtgggattgtcctgccagacgctggggccatagtgagtgtgggcacaaggaagacgctgcagtgaattgcacagatatttcagtgcagaaaaccccacaaaaagccacaacaggtcgctcatcccgtcagtcatcctttattgcagtcgggatccttggggttgttctgttggccattttcgtcgcattattcttcttgactaaaaagcgaagacagagacagcggcttgcagtttcctcaagaggagagaacttagtccaccaaattcaataccgggagatgaattcttgcctgaatgcagatgatctggacctaatgaattcctcaggaggccattctgagccacactgaaaaggaaaatgggaatttataacccagtgagttcagcctttaagataccttgatgaagacctggactattgaatggagcagaaattcacctctctcactgactattacagttgcatttttatggagttcttcttctcctaggattcctaagactgctgctgaatttataaaaattaagtttgtgaatgtgactacttagtggtgtatatgagactttcaagggaattaaataaataaataagaatgtta

SEQ ID NO: 272580 - DNA, 3465 bp, Artificial Sequence
  derived and/or modified sequence
atgagcaagctgagaatggtgctgctggaggacagcggcagcgccgacttcagaagacacttcgtgaacctgagccccttcaccatcaccgtggtgctgctgctgagcgcctgcttcgtgaccagcagcctgggcggcaccgacaaggagctgagactggtggacggcgagaacaagtgcagcggcagagtggaggtgaaggtgcaggaggagtggggcaccgtgtgcaacaacggctggagcatggaggccgtgagcgtgatctgcaaccagctgggctgccccaccgccatcaaggcccccggctgggccaacagcagcgccggcagcggcagaatctggatggaccacgtgagctgcagaggcaacgagagcgccctgtgggactgcaagcacgacggctggggcaagcacagcaactgcacccaccagcaggacgccggcgtgacctgcagcgacggcagcaacctggagatgagactgaccagaggcggcaacatgtgcagcggcagaatcgagatcaagttccagggcagatggggcaccgtgtgcgacgacaacttcaacatcgaccacgccagcgtgatctgcagacagctggagtgcggcagcgccgtgagcttcagcggcagcagcaacttcggcgagggcagcggccccatctggttcgacgacctgatctgcaacggcaacgagagcgccctgtggaactgcaagcaccagggctggggcaagcacaactgcgaccacgccgaggacgccggcgtgatctgcagcaagggcgccgacctgagcctgagactggtggacggcgtgaccgagtgcagcggcagactggaggtgagattccagggcgagtggggcaccatctgcgacgacggctgggacagctacgacgccgccgtggcctgcaagcagctgggctgccccaccgccgtgaccgccatcggcagagtgaacgccagcaagggcttcggccacatctggctggacagcgtgagctgccagggccacgagcccgccatctggcagtgcaagcaccacgagtggggcaagcactactgcaaccacaacgaggacgccggcgtgacctgcagcgacggcagcgacctggagctgagactgagaggcggcggcagcagatgcgccggcaccgtggaggtggagatccagagactgctgggcaaggtgtgcgacagaggctggggcctgaaggaggccgacgtggtgtgcagacagctgggctgcggcagcgccctgaagaccagctaccaggtgtacagcaagatccaggccaccaacacctggctgttcctgagcagctgcaacggcaacgagaccagcctgtgggactgcaagaactggcagtggggcggcctgacctgcgaccactacgaggaggccaagatcacctgcagcgcccacagagagcccagactggtgggcggcgacatcccctgcagcggcagagtggaggtgaagcacggcgacacctggggcagcatctgcgacagcgacttcagcctggaggccgccagcgtgctgtgcagagagctgcagtgcggcaccgtggtgagcatcctgggcggcgcccacttcggcgagggcaacggccagatctgggccgaggagttccagtgcgagggccacgagagccacctgagcctgtgccccgtggcccccagacccgagggcacctgcagccacagcagagacgtgggcgtggtgtgcagcagcaagacccagaagaccagcctgatcggcagccacaccgtgaagggcaccggcctgggcagccacagctgcctgttcctgaagccctgcctgctgcccggctacaccgagatcagactggtgaacggcaagaccccctgcgagggcagagtggagctgaagaccctgggcgcctggggcagcctgtgcaacagccactgggacatcgaggacgcccacgtgctgtgccagcagctgaagtgcggcgtggccctgagcacccccggcggcgccagattcggcaagggcaacggccagatctggagacacatgttccactgcaccggcaccgagcagcacatgggcgactgccccgtgaccgccctgggcgccagcctgtgccccagcgagcaggtggccagcgtgatctgcagcggcaaccagagccagaccctgagcagctgcaacagcagcagcctgggccccaccagacccaccatccccgaggagagcgccgtggcctgcatcgagagcggccagctgagactggtgaacggcggcggcagatgcgccggcagagtggagatctaccacgagggcagctggggcaccatctgcgacgacagctgggacctgagcgacgcccacgtggtgtgcagacagctgggctgcggcgaggccatcaacgccaccggcagcgcccacttcggcgagggcaccggccccatctggctggacgagatgaagtgcaacggcaaggagagcagaatctggcagtgccacagccacggctggggccagcagaactgcagacacaaggaggacgccggcgtgatctgcagcgagttcatgagcctgagactgaccagcgaggccagcagagaggcctgcgccggcagactggaggtgttctacaacggcgcctggggcaccgtgggcaagagcagcatgagcgagaccaccgtgggcgtggtgtgcagacagctgggctgcgccgacaagggcaagatcaaccccgccagcctggacaaggccatgagcatccccatgtgggtggacaacgtgcagtgccccaagggccccgacaccctgtggcagtgccccagcagcccctgggagaagagactggccagccccagcgaggagacctggatcacctgcgacaacaagatcagactgcaggagggccccaccagctgcagcggcagagtggagatctggcacggcggcagctggggcaccgtgtgcgacgacagctgggacctggacgacgcccaggtggtgtgccagcagctgggctgcggccccgccctgaaggccttcaaggaggccgagttcggccagggcaccggccccatctggctgaacgaggtgaagtgcaagggcaacgagagcagcctgtgggactgccccgccagaagatggggccacagcgagtgcggccacaaggaggacgccgccgtgaactgcaccgacatcagcgtgcagaagaccccccagaaggccaccaccggcagaagcagcagacagagcagcttcatcgccgtgggcatcctgggcgtggtgctgctggccatcttcgtggccctgttcttcctgaccaagaagagaagacagagacagagactggccgtgagcagcagaggcgagaacctggtgcaccagatccagtacagagagatgaacagctgcctgaacgccgacgacctggacctgatgaacagcagcggcggccacagcgagccccactag

SEQ ID NO: 272581 - protein, 346 aa, Artificial Sequence
  derived and/or modified sequence
MRLLFLAVLRPHTGNAVTAQRVRAHLEAAGHVCVLKDAFDFESRSEIANLILAENCEAALALHLYRGGRLLQGHRIPFGVIFGGTDVNEDANQAEKNTVMGRVLEEARFAVAFTESMKEMAQAQWPHAKGKVYVQSQGIATTPNAAFNWNTFLQRSEINQSADNLHIFLLICGLRQVKDPLYLVDAFSAWHQEEPNVHLVIVGPEVDPVFTREVKAKVKRAAGVRLIGEMPQEDLHAVVKNCFAVVNSSVSEGMSAAILEAMDLEVPVLARNIPGNAAVVKHEVTGLLFSNPQEFVHLAKRLVSDPALEKEIVVNGREYVRMYHSWQVERDTYQQLIRKLEGSTED

SEQ ID NO: 272582 - DNA, 1041 bp, Artificial Sequence
  derived and/or modified sequence
atgcgcctgctgttcttagccgtgcttaggccacatacaggcaacgcggtcaccgcccaacgggtgcgggctcatctggaggccgcaggccacgtgtgtgtgctcaaggacgcatttgacttcgaaagtcgctccgaaatcgctaatctgattctggccgaaaattgtgaggctgcccttgctcttcacctctaccgcggaggcaggttgctgcaaggccaccggatccctttcggtgttatcttcgggggtaccgacgtcaacgaagacgccaatcaggccgagaagaatactgtcatggggagagtattagaagaagccaggtttgcggtggccttcacagaaagcatgaaagaaatggctcaagctcaatggcctcatgctaaggggaaggtctatgtgcagtcacagggtattgccacgactccaaacgctgcctttaactggaacacttttttacagagatccgagattaaccagtcagcagataacctccacatctttttgcttatatgcggattgcggcaggttaaagaccccctttatctggtggacgccttttccgcgtggcatcaagaggaaccaaatgttcatctcgtgatagtggggccagaggtggatccagtgttcactagggaggtcaaagccaaagttaaaagggccgcaggggtgcgactcatcggtgagatgccccaggaagatctgcacgccgtggtgaagaattgctttgctgtagtgaattccagtgtgtcggaaggaatgtccgccgcaatcttggaagcaatggacctggaagtgccagtgctcgccagaaatatccccggtaatgccgctgtggtcaaacatgaggttactggtctgctattcagtaacccgcaggagttcgtccatctggccaaacgattagtcagtgatcccgcacttgaaaaagagatcgtggtaaatggaagagagtacgtgcggatgtatcacagttggcaggttgagagagatacttatcaacagctgattcggaaactggaagggagcaccgaggattag

SEQ ID NO: 272583 - DNA, 1041 bp, Artificial Sequence
  derived and/or modified sequence
atgcgcctgcttttccttgcggttttaagaccacataccggaaacgcggtgacagcccagagagtgcgtgctcatctggaggccgccggacatgtgtgcgtgttgaaagatgcctttgattttgagagtcggagtgaaattgccaacctcattttagctgaaaattgcgaggccgcactggctttacacctctaccgaggcggccggcttctgcagggtcacagaatcccctttggcgtaatcttcggcggaactgacgtgaacgaagatgctaatcaggcagagaaaaataccgtgatggggagagtactggaggaagcccgttttgctgtggctttcaccgagtctatgaaagaaatggcccaggcgcagtggccccacgcaaagggcaaggtgtacgtccagagccaaggaatcgcgaccacccctaatgccgcttttaattggaatacttttctgcagcgcagcgaaattaaccagagtgcagacaatctgcacatttttctgcttatctgtggcttgaggcaggttaaggatccactgtacttagtcgacgcatttagtgcctggcaccaggaggagcccaatgtgcacttagtgatcgtgggacccgaagtagacccggtcttcaccagagaagttaaagctaaggtgaaaagagctgcaggcgtgcgcctgattggagagatgccccaggaggatctgcatgctgtcgtaaagaactgctttgctgtagtgaacagctccgtgtccgaagggatgagcgcagccattctggaggccatggatttggaagtgcctgtgctcgcacgaaacattccaggaaacgccgcagtagtgaagcatgaggtcactggtttgctgttttctaaccctcaggagttcgtccacctggcaaagcgccttgtctctgaccctgctctcgagaaggaaattgtggtaaatggaagggagtacgtgcggatgtaccactcatggcaggttgaacgtgatacttatcaacaactgatacgaaaattagaagggagtactgaagactag

SEQ ID NO: 272584 - DNA, 2995 bp, Artificial Sequence
  derived and/or modified sequence
cggctcccccgccgtccgcgtctgcgccggccccggggcctggtcggcggcggcggggccggtcgatggcccgggcggcggcggcggcatgcggctcctgttcctggcggtgctgcggccacacaccggcaacgcggtcacggcccagcgcgttcgggcccatctagaggctgcagggcacgtgtgcgttttgaaggatgcctttgactttgaaagccgatctgagattgcaaacctcatcttggctgagaactgcgaggctgccctggctcttcatctctataggggaggcaggcttttgcaaggccaccgaatcccttttggagtcatctttggtggaactgatgtaaatgaagatgccaaccaggcggaaaaaaacacagtcatgggcagagttcttgaggaagccagatttgctgtcgctttcacagagtcaatgaaggaaatggcacaagcgcagtggccgcatgctaagggtaaggtctatgtccagagtcaaggaattgcaacaacaccaaacgccgcttttaactggaatacctttcttcaacgctctgagattaaccaaagtgctgataatttgcacatatttcttctgatatgtggacttcgacaagttaaggatcctctctatctggtggacgcattttcagcctggcatcaggaggagcccaatgtgcacctggtgattgtgggtcctgaagtcgatccagtgtttacaagggaagtgaaagccaaagtgaaaagagccgctggggtacgattgattggagagatgcctcaagaagatctgcacgcggtggtgaagaattgcttcgcggtggtgaatagctctgtctctgaaggcatgtcagctgcaattttggaggcaatggatttagaagtaccggtattggccaggaacatccccgggaatgctgccgtggtgaagcatgaagtcacagggctactgttttccaatcctcaggagtttgttcatctggcaaagagactggttagtgatcctgcattagaaaaggaaatcgtagtgaacggaagggaatacgtgagaatgtatcattcatggcaggtggaaagagacacctaccaacagctcatcaggaagctggaaggaagcactgaagattgagggccccgcctcatcagacacctgctctctgacacacagctctgggtgcacactcagagacagagttctggatcacgtgggcccagtgcagttcaaataaaaccagcctcagcggaatcctagaaaatgttagtcgtgagtccccagagccactgcattcatcccatatccttctgtgcgttcagatgctgtcccaggcgtgttcaccagccagtcctgatggaggtgcatgagtgactgggttgactgggacagggaaaggggaactggttttcagggaatttgggagagaatttgattacctgccttagggctttggtgtggacaatagaggcttattttcaagcagtcatggttcagactcctcccgcctgccttctgaccaacctctccccatcgttgccagtttgaaaggcaaaagcaaaacagacgtgtcagctgagccgagtcctcgcaggatttttgttgtgatctcaggactctgacaggcacgtgggtgacccgaggcttctctgaacactagaaagcgctgtgagtgagctcacgcccggcacagctcacttttcaatggtggaattgaaagttgtgctttttagaaaagtggccaggctgcccgcaggccccgcccacctcttggctgaatttgagtggaaaaccaggaaggaacaagcgccacgtcacgcatagcctgcaaatcgcccgcgtgaccctgagatggaggcctgaggctttgggtccagggtgggctcttccccttcccacatcagggacccggggatggatgtcggaagggtcaccagcctccagcctttggcaggatggagcttgggtctgcagggctttgcagccacacagcgaggtcagtccggggccagccgcgccatcatggtaatggtggcctcgccccatccatgtcatccatgtcacatgaggacgtgcagtcttccttgtcctctcctagtggaatttgcctgggagaacctccactgaatactgaaattgttgcatgcctgtggattccttacgacaatggggaacgcggtgtttcccacctcttgtgggtagaaagcagtctgctttgaggaggcgagaaggcaaagccagggcagggcgttgctgtgggaagcgttcggtgaaagcgggtttcgacgcttaggagggccgagggagaagattccaccagcattgtccttgcttcaagttttaggatgtctgaactttcagctttcatgttttcaaccatcatttttttaatggcacaacctacatcttgtttttaaaagaagtagcctcaaattaaactccttaaactctgatgccctggggatgagaacaactagcttggatctcgtgccgtgtaattcaatgtttcattccgctgcctccatcatgtaatagaatcgctttccagaaaggcagttaactggaagcagcagaggctcccagccgtgagaggactgctcaacaatgccccccatcgccgcccccccacccctcgcaccccttgtgttttccctctgaggggcccaagggttatggctttcatgtctaggtgtggggacagaggagggagaggcagatcctgggccgggagaggatggcctggtctgaatctggagtaattaatgccacccaaagaaaaggccctgccaggtccaatgttgtcttagatctgatgatgctgctatttacaaaacactgatcgtccgaaagcttgaatctgttcctcctcgaatgaccctgtagatgcctgacctccaccgtacctccacatcactattcatgtccttctaggaaaatgtgcacatgcctcacgcactatgtgggaagggcgtgtttttaaattaataaagtgtgtcaccatta

SEQ ID NO: 272585 - DNA, 1041 bp, Artificial Sequence
  derived and/or modified sequence
atgaggctcttatttctagcagtactgcggccgcacactggaaacgccgtcactgcccaacgcgtacgagcccacctggaagccgcaggacacgtgtgcgtgctgaaagacgccttcgattttgaatcccgatctgagatcgccaatttgattctagccgaaaattgtgaggccgcactcgccctccacctgtatcggggcggcagattgcttcaagggcacagaatccccttcggagtcatttttggagggaccgacgtcaacgaggatgctaaccaggccgaaaagaatactgtaatgggcagggtcttggaggaggctaggtttgcggtcgcttttactgagtctatgaaggagatggcacaggcccagtggccccacgcaaaaggaaaagtttacgttcagtcccagggaattgccaccacccccaacgcggctttcaattggaatactttcctgcaaagatcagaaatcaatcagagcgccgacaatctacatatttttctgcttatctgcggcctcaggcaggtcaaagatcccttgtatttagtggatgcattctccgcctggcatcaagaggagccgaacgtgcatctggtaatcgtgggaccagaagttgacccagtttttactcgggaagttaaggctaaagtcaaaagggccgcaggagtgagactcattggcgagatgccccaggaagatctccatgccgtggtcaaaaactgctttgcggtggtgaacagctctgtatcagaaggtatgtctgctgcaatattagaagcgatggacttagaagtgccagttctcgctaggaatataccgggaaacgcagcagtcgttaagcacgaagtgaccggcctgctattctcaaatccacaggagttcgtgcacctggccaagcgccttgtctctgaccctgctctcgagaaggaaattgtggtaaatggaagggagtacgtgcggatgtaccactcatggcaggttgaacgtgatacttatcaacaactgatacgaaaattagaagggagtactgaagactag

SEQ ID NO: 272586 - DNA, 1041 bp, Artificial Sequence
  derived and/or modified sequence
atgagactgctgttcctggccgtgctgagaccccacaccggcaacgccgtgaccgcccagagagtgagagcccacctggaggccgccggccacgtgtgcgtgctgaaggacgccttcgacttcgagagcagaagcgagatcgccaacctgatcctggccgagaactgcgaggccgccctggccctgcacctgtacagaggcggcagactgctgcagggccacagaatccccttcggcgtgatcttcggcggcaccgacgtgaacgaggacgccaaccaggccgagaagaacaccgtgatgggcagagtgctggaggaggccagattcgccgtggccttcaccgagagcatgaaggagatggcccaggcccagtggccccacgccaagggcaaggtgtacgtgcagagccagggcatcgccaccacccccaacgccgccttcaactggaacaccttcctgcagagaagcgagatcaaccagagcgccgacaacctgcacatcttcctgctgatctgcggcctgagacaggtgaaggaccccctgtacctggtggacgccttcagcgcctggcaccaggaggagcccaacgtgcacctggtgatcgtgggccccgaggtggaccccgtgttcaccagagaggtgaaggccaaggtgaagagagccgccggcgtgagactgatcggcgagatgccccaggaggacctgcacgccgtggtgaagaactgcttcgccgtggtgaacagcagcgtgagcgagggcatgagcgccgccatcctggaggccatggacctggaggtgcccgtgctggccagaaacatccccggcaacgccgccgtggtgaagcacgaggtgaccggcctgctgttcagcaacccccaggagttcgtgcacctggccaagagactggtgagcgaccccgccctggagaaggagatcgtggtgaacggcagagagtacgtgagaatgtaccacagctggcaggtggagagagacacctaccagcagctgatcagaaagctggagggcagcaccgaggactag

SEQ ID NO: 272587 - DNA, 1041 bp, Artificial Sequence
  derived and/or modified sequence
atgaggctgctgtttctggccgtgctgagaccacacaccggcaatgctgtaacagcacagcgggtccgagcccatctggaggcggccggccacgtgtgtgtgctgaaggacgcgtttgactttgagagtagatccgagattgcaaatttgattctcgctgagaattgcgaagccgccctcgctctccacctctaccgaggcggtcgccttctccaggggcaccgaattcctttcggggtgatcttcggcggcacggacgtcaacgaggacgccaaccaggccgagaagaatacagtcatggggcgagtgctggaggaagcgagattcgccgtcgccttcactgaatctatgaaggagatggcacaggcccaatggccccacgcaaagggaaaagtgtacgtgcagtcccagggcatcgccacaacacctaacgcggccttcaactggaacactttccttcagcgctcagagatcaatcagtccgcggacaatctccatatcttcctgctgatctgcgggctccggcaggtgaaagatcccctgtatctggtggacgcgttctcggcctggcaccaggaggagcccaatgttcacctggtaatcgtgggacctgaggttgatccggtcttcacccgggaggtgaaggctaaggtaaagcgggcagctggggtccggctgatcggagagatgccccaagaagacttacacgccgtggtgaaaaattgcttcgccgtggtgaattcctccgtgagtgaggggatgagcgcagcaattttggaagcaatggacctggaggtccctgtgttagccaggaacatccccggcaatgctgccgtggtcaaacatgaggttaccggattacttttttctaacccacaagagtttgtacatttggctaagcgtttagtatctgatcctgcattagagaaggagatcgtggtgaatggaagggaatacgttagaatgtatcacagctggcaggtcgagcgcgatacttatcaacaactgatccgaaagttggagggctccacagaggactag

SEQ ID NO: 272588 - DNA, 1041 bp, Artificial Sequence
  derived and/or modified sequence
atgaggctgctcttcctggccgtgctgcggccccacactggaaatgctgtgacagcccagagggtgcgggcccacctggaggccgccggccacgtgtgtgtgctgaaggatgcctttgattttgagagccgctcagaaattgccaacctgatcctggccgagaactgtgaggccgccctggccctgcacctgtacagaggaggccgcctgctgcagggccaccgcatcccctttggagtcatctttggaggaacagatgtgaatgaagatgccaaccaggccgagaagaacacagtgatgggccgggtgctggaggaggccaggtttgctgtggccttcacagagagcatgaaggagatggcccaggcccagtggccccacgccaagggcaaggtgtatgtgcagagccagggcatcgccaccaccccaaatgctgccttcaactggaacaccttcctgcagaggtctgagatcaaccagagcgctgacaacctgcacatcttcctgctgatctgtggcctgcggcaggtgaaggaccccctgtacctggtggatgccttcagcgcctggcaccaggaggagcccaacgtgcacctggtgattgtgggccctgaggtggaccccgtcttcacccgggaggtgaaggccaaggtgaagagagctgctggggtgcggctgattggagagatgccccaggaggacctgcatgctgtggtgaagaactgctttgctgtggtgaacagctctgtgtctgagggcatgtctgctgccatcctggaggccatggacctggaggtgcctgtgctggccaggaacatccctggaaatgctgctgtggtgaagcatgaggtgacaggcctgctcttcagcaacccccaggagtttgtgcacctggccaagaggctggtgtctgaccctgccctggagaaggagatcgtggtgaatggccgggagtatgtgaggatgtaccacagctggcaggtggagcgggacacctaccagcagctgatcaggaagctggagggcagcacagaagattag

SEQ ID NO: 272589 - DNA, 1041 bp, Artificial Sequence
  derived and/or modified sequence
atgcggctgctgttcctggccgtgctgcggccccacaccggcaacgcggtcaccgcccagcgcgttcgagctcatcttgaggcagcagggcacgtgtgcgttttaaaagatgcattcgacttcgagtctcgttccgagattgctaatcttatcctggctgagaactgtgaagcagccctggccttacacttatacagaggcggtagattgctgcaaggacacagaatccccttcggcgtaatcttcggaggcacagatgtcaatgaagacgccaaccaggcagagaagaacacggtgatgggacgcgtgctggaggaggccaggtttgccgtagcttttactgagtcaatgaaagagatggctcaggcacaatggccccatgcaaaggggaaggtgtacgtgcaaagccagggaatagctacgacgccaaacgccgctttcaactggaatacgtttctgcagagatccgagatcaatcaaagcgcagataatctccatatcttcctacttatctgtggcctgaggcaagtgaaagacccactgtacctcgtagatgccttttcagcttggcaccaggaggagcctaacgtccacctcgttatagtaggaccagaagtggaccctgtgtttaccagagaggtcaaggcaaaagtgaagcgggccgctggcgtcaggctcatcggagagatgccacaggaggatcttcacgccgtggtgaagaactgcttcgcagtggtgaatagttcagtcagtgagggcatgtctgctgctattctggaagctatggacctggaagtacccgtcttggctaggaatataccgggcaacgcagccgtggtgaaacacgaagtgacaggtctgcttttttccaatccgcaagaatttgtccatctcgccaagcggctggtgagtgaccctgcactggaaaaggagatcgtcgtcaacggccgtgagtacgtcaggatgtaccattcttggcaggtggagcgtgacacataccagcagctcattagaaaactggaggggtcgacagaggactag

SEQ ID NO: 272590 - RNA, 1041 nt, Artificial Sequence
  derived and/or modified sequence
augcgccugcuuuuccuugcgguuuuaagaccacauaccggaaacgcggugacagcccagagagugcgugcucaucuggaggccgccggacaugugugcguguugaaagaugccuuugauuuugagagucggagugaaauugccaaccucauuuuagcugaaaauugcgaggccgcacuggcuuuacaccucuaccgaggcggccggcuucugcagggucacagaauccccuuuggcguaaucuucggcggaacugacgugaacgaagaugcuaaucaggcagagaaaaauaccgugauggggagaguacuggaggaagcccguuuugcuguggcuuucaccgagucuaugaaagaaauggcccaggcgcaguggccccacgcaaagggcaagguguacguccagagccaaggaaucgcgaccaccccuaaugccgcuuuuaauuggaauacuuuucugcagcgcagcgaaauuaaccagagugcagacaaucugcacauuuuucugcuuaucuguggcuugaggcagguuaaggauccacuguacuuagucgacgcauuuagugccuggcaccaggaggagcccaaugugcacuuagugaucgugggacccgaaguagacccggucuucaccagagaaguuaaagcuaaggugaaaagagcugcaggcgugcgccugauuggagagaugccccaggaggaucugcaugcugucguaaagaacugcuuugcuguagugaacagcuccguguccgaagggaugagcgcagccauucuggaggccauggauuuggaagugccugugcucgcacgaaacauuccaggaaacgccgcaguagugaagcaugaggucacugguuugcuguuuucuaacccucaggaguucguccaccuggcaaagcgccuugucucugacccugcucucgagaaggaaauugugguaaauggaagggaguacgugcggauguaccacucauggcagguugaacgugauacuuaucaacaacugauacgaaaauuagaagggaguacugaagacuag

SEQ ID NO: 272591 - RNA, 1041 nt, Artificial Sequence
  derived and/or modified sequence
augaggcucuuauuucuagcaguacugcggccgcacacuggaaacgccgucacugcccaacgcguacgagcccaccuggaagccgcaggacacgugugcgugcugaaagacgccuucgauuuugaaucccgaucugagaucgccaauuugauucuagccgaaaauugugaggccgcacucgcccuccaccuguaucggggcggcagauugcuucaagggcacagaauccccuucggagucauuuuuggagggaccgacgucaacgaggaugcuaaccaggccgaaaagaauacuguaaugggcagggucuuggaggaggcuagguuugcggucgcuuuuacugagucuaugaaggagauggcacaggcccaguggccccacgcaaaaggaaaaguuuacguucagucccagggaauugccaccacccccaacgcggcuuucaauuggaauacuuuccugcaaagaucagaaaucaaucagagcgccgacaaucuacauauuuuucugcuuaucugcggccucaggcaggucaaagaucccuuguauuuaguggaugcauucuccgccuggcaucaagaggagccgaacgugcaucugguaaucgugggaccagaaguugacccaguuuuuacucgggaaguuaaggcuaaagucaaaagggccgcaggagugagacucauuggcgagaugccccaggaagaucuccaugccguggucaaaaacugcuuugcgguggugaacagcucuguaucagaagguaugucugcugcaauauuagaagcgauggacuuagaagugccaguucucgcuaggaauauaccgggaaacgcagcagucguuaagcacgaagugaccggccugcuauucucaaauccacaggaguucgugcaccuggccaagcgccuugucucugacccugcucucgagaaggaaauugugguaaauggaagggaguacgugcggauguaccacucauggcagguugaacgugauacuuaucaacaacugauacgaaaauuagaagggaguacugaagacuag

SEQ ID NO: 272592 - protein, 288 aa, Artificial Sequence
  derived and/or modified sequence
MRDRLPDLTACRKNDDGDTVVVVEKDHFMDDFFHQVEEIRNSIDKITQYVEEVKKNHSIILSAPNPEGKIKEELEDLNKEIKKTANKIRAKLKAIEQSFDQDESGNRTSVDLRIRRTQHSVLSRKFVEAMAEYNEAQTLFRERSKGRIQRQLEITGRTTTDDELEEMLESGKPSIFTSDIISDSQITRQALNEIESRHKDIMKLETSIRELHEMFMDMAMFVETQGEMINNIERNVMNATDYVEHAKEETKKAIKYQSKARRKKWIIIAVSVVLVAIIALIIGLSVGK

SEQ ID NO: 272593 - DNA, 867 bp, Artificial Sequence
  derived and/or modified sequence
atgagagacagactgcccgacctgaccgcctgcagaaagaacgacgacggcgacaccgtggtggtggtggagaaggaccacttcatggacgacttcttccaccaggtggaggagatcagaaacagcatcgacaagatcacccagtacgtggaggaggtgaagaagaaccacagcatcatcctgagcgcccccaaccccgagggcaagatcaaggaggagctggaggacctgaacaaggagatcaagaagaccgccaacaagatcagagccaagctgaaggccatcgagcagagcttcgaccaggacgagagcggcaacagaaccagcgtggacctgagaatcagaagaacccagcacagcgtgctgagcagaaagttcgtggaggccatggccgagtacaacgaggcccagaccctgttcagagagagaagcaagggcagaatccagagacagctggagatcaccggcagaaccaccaccgacgacgagctggaggagatgctggagagcggcaagcccagcatcttcaccagcgacatcatcagcgacagccagatcaccagacaggccctgaacgagatcgagagcagacacaaggacatcatgaagctggagaccagcatcagagagctgcacgagatgttcatggacatggccatgttcgtggagacccagggcgagatgatcaacaacatcgagagaaacgtgatgaacgccaccgactacgtggagcacgccaaggaggagaccaagaaggccatcaagtaccagagcaaggccagaagaaagaagtggatcatcatcgccgtgagcgtggtgctggtggccatcatcgccctgatcatcggcctgagcgtgggcaagtag

SEQ ID NO: 272594 - DNA, 867 bp, Artificial Sequence
  derived and/or modified sequence
atgcgagatcgcctgcccgatttgacagcttgccggaaaaatgacgacggtgataccgtggtggtcgtcgagaaggatcatttcatggatgacttttttcatcaagtagaggaaataagaaactctattgataagatcacgcaatacgttgaggaagtgaagaagaaccatagtatcattctgagcgcacccaatcccgagggcaagatcaaggaagaattggaggaccttaacaaggagattaaaaagaccgccaacaagattagagcaaagctcaaagccatagaacaatcattcgaccaggatgaatcgggcaaccgcacctccgtggatttgagaattagacgcactcaacactccgtgctctcgagaaaatttgtcgaagcaatggctgagtacaacgaggcgcaaaccctttttcgtgagcgatcgaagggccgcattcagagacaactggagataaccggacgcacaaccaccgatgatgaactggaggaaatgcttgaaagcggcaagcccagcatatttacatcggacatcatttcagatagccagattaccaggcaggcccttaacgagattgagagtagacataaggatattatgaaactcgagacatcaatccgtgagctgcacgaaatgttcatggacatggctatgttcgtggaaactcagggggaaatgatcaataatatcgaacgtaacgtcatgaatgccacggactacgttgaacatgccaaagaggagacaaaaaaggctatcaaataccagagtaaggcgagacggaagaagtggattatcatagctgtctccgtggttcttgtggccatcattgcacttattataggcttaagtgttgggaagtag

SEQ ID NO: 272595 - DNA, 867 bp, Artificial Sequence
  derived and/or modified sequence
atgagggaccggctgcctgacctgacagcctgcaggaagaatgatgatggagacacagtggtggtggtggagaaggaccacttcatggatgacttcttccaccaggtggaggagatccggaacagcattgacaagatcacccagtatgtggaggaggtgaagaagaaccacagcatcatcctgagcgcccccaaccctgagggcaagatcaaggaggagctggaggacctgaacaaggagatcaagaagacagccaacaagatccgggccaagctgaaggccatcgagcagagctttgaccaggatgagagcggcaacagaacatctgtggacctgcgcatccggaggacccagcacagcgtgctgagcaggaagtttgtggaggccatggccgagtacaatgaggcccagaccctcttccgggagaggagcaagggccgcatccagaggcagctggagatcactggaagaaccaccacagatgatgagctggaggagatgctggagagcggcaagcccagcatcttcaccagtgacatcatcagtgacagccagatcacccggcaggccctgaatgaaattgagagccgccacaaggacatcatgaagctggagaccagcatccgggagctgcacgagatgttcatggacatggccatgtttgtggagacccagggcgagatgatcaacaacatcgagagaaatgtgatgaatgccacagattatgtggagcacgccaaggaggagaccaagaaggccatcaagtaccagagcaaggcccggaggaagaagtggatcatcatcgctgtgtctgtggtgctggtggccatcatcgccctgatcatcggcctgtctgtgggcaagtag

SEQ ID NO: 272596 - DNA, 867 bp, Artificial Sequence
  derived and/or modified sequence
atgcgggaccggctgcccgacctgaccgcctgccggaagaacgacgacggagacaccgtcgtcgtcgtcgaaaaggaccacttcatggatgacttttttcaccaggtggaggaaatacgcaatagtatcgataaaatcactcagtacgtggaggaagtgaagaagaatcacagcataatactctctgctcctaatcctgagggaaaaatcaaggaagagctggaagacctgaacaaagaaatcaagaaaacagcgaataaaatccgtgcaaagctgaaagctatcgagcagagcttcgaccaggacgagtccggaaatcgtacatcggttgatctccgaatcagacggactcaacactcggttctgtctcgtaaatttgtcgaagccatggccgaatacaacgaggctcaaacactgtttcgggagagaagcaagggtagaattcaaaggcagctcgaaatcacaggaagaacaaccaccgatgacgagcttgaagagatgctggagagtggaaaaccctctatttttacttctgatatcatctctgatagtcagatcactcgccaggcccttaacgaaatcgaatctcgccacaaagatattatgaagctggaaaccagtatccgggaacttcatgagatgtttatggacatggcaatgtttgtcgaaacccaaggagagatgatcaataatatcgagaggaacgttatgaatgcgacagattacgtggaacatgcaaaagaggagaccaagaaggccatcaagtaccaaagcaaggctcgtagaaagaagtggatcatcatcgccgtgtctgtggtgctggttgccattatagcgctcatcataggactgtcggttgggaaatag

SEQ ID NO: 272597 - DNA, 867 bp, Artificial Sequence
  derived and/or modified sequence
atgcgcgatagactcccagacctgacagcctgccggaagaacgacgatggcgatactgttgtagtggtggagaaggaccatttcatggatgactttttccaccaggtggaggagatacgtaattctatcgacaagataacccagtacgtagaggaggtgaaaaaaaatcactctattatcctgagcgctccgaaccctgagggaaaaatcaaggaggaacttgaagacctgaacaaggaaattaagaaaaccgctaataagatcagagccaaattaaaagccattgagcaaagcttcgatcaggatgaaagcggaaaccgaacgagtgtggacctgcggatccgtagaacgcagcactctgttctcagccgcaagttcgtggaggccatggcagagtataacgaagcccaaacattgttccgcgagagatctaaagggcgtatccagcgccagttggagattaccggtagaaccactactgatgacgagttggaggagatgctggaatctggaaaaccttctatttttacgagcgacatcatctcagattcccagataactagacaggctttgaatgaaatcgaatctcgtcacaaggatattatgaaactagagacgtcaattcgcgaactccacgagatgttcatggacatggccatgtttgtggagacccagggggaaatgattaataacatcgagcgcaacgtgatgaatgccactgactatgttgagcacgccaaagaggagaccaagaaagctattaaatatcagagtaaagcacgtcggaagaagtggatcataatcgcggtgtcggtcgtgctggtggcaatcatcgccctgattatcggtctgtccgtcggaaaatag

SEQ ID NO: 272598 - DNA, 2151 bp, Artificial Sequence
  derived and/or modified sequence
gcggggcctgaggcggagaccggagagcccgaggcccggccggaggcagctcgggacaggcttgagcggcggggcgcgctgcccggccggcggggatgcgggaccggctgccagacctgacggcgtgtaggaagaatgatgatggagacacagttgttgtggttgagaaagatcatttcatggatgatttcttccatcaggtggaggagattagaaacagtattgataaaataactcaatatgttgaagaagtaaagaaaaaccacagcatcattctttctgcaccaaacccggaaggaaaaataaaagaagagcttgaagatctgaacaaagaaatcaagaaaactgcgaataaaattcgagccaagttaaaggctattgaacaaagttttgatcaggatgagagtgggaaccggacttcagtggatcttcggatacgaagaacccagcattcggtgctgtctcggaagtttgtggaagccatggcggagtacaatgaggcacagactctgtttcgggagcggagcaaaggccgcatccagcgccagctggagataactgggagaaccaccacagacgacgagctagaagagatgctggagagcgggaagccatccatcttcacttccgacattatatcagattcacaaattactagacaagctctcaatgaaatcgagtcacgtcacaaggacatcatgaagctggagaccagcatccgagagttgcatgagatgttcatggacatggctatgtttgtggagactcagggtgaaatgatcaacaacatagaaagaaatgttatgaatgccacagactatgtagaacacgctaaagaagaaacaaaaaaagctatcaaatatcagagcaaggcaagaaggaaaaagtggataattattgctgtgtcagtggttctggttgccataatcgctctaattattggcttgtcagttggcaaatgatggtgtggataacgtcagtgtgcatgcctctctgccagggtgggaaaattgatgttcattattatttgtgtaattgttttgcttgtgatccttggaattatcctagcaacaacattgtcctagcaaccatatcccaagagccatttatccttgagactcagaccacatctgcaaccaaatcagcatcctgtcatttcgtgaatgaatctcagacgctgtaacccggcatcgagtgctgaccttgtaatgtatgagttcacggaagaagcacaaccgaacgtcttgttcagtgacagcgccgtaagcacagtgggtgtgatgcgtgaccctgaatgacacactacagaatgtgagcagtgtgagacttctctcactggccttgaaataagaaaatattgaacattttaatattaaaaatatttcagtgttaacaaatgtgcatgaagtttaattaggaaggaatgctttatgttatgaaggcttttttttttttttttgagacggagtctcgctttgtcatccaggctggagtgcagtggtgcgatctcagctcactgcaacctcggcctcccgggttcaagcaattctcctgcctcagcctcccgagtagctgggattacaggcatgggccaccacacccagctaattttttgtgttttctttttagtagagacggggttttaccatgctggccaggctggcctcaaactcctgaccttgtgatccacccacctcagcctcccaaagtgctgggattacaggcgtgagtcaccgggcaggctgttctgaagcttttagatctcaggtctaaggcttcctttccctccctctcccagctagtttgtgctaattaagagaccttttatactgttttattgcctgtttgaagaaataatttttatcacgtttttgtaagatatctataattttaaatgtttataaattgtttaatttattagcatcttaatgtaccccatttttatatactgaatgtggccttttgagtgaaataggaagcttcatggtgttggagccacctttgtacagttgtttaaagtttcccattgtcacggaaaacattggctgcaaagcccctcaaagccctcaagtgccttctgtgagtttaaatgtgctggtgccctccagaaaagcctcggcctcagctccgtttccgcctgttccctccccc

SEQ ID NO: 272599 - protein, 372 aa, Artificial Sequence
  derived and/or modified sequence
MGSLFRSETMCLAQLFLQSGTAYECLSALGEKGLVQFRDLNQNVSSFQRKFVGEVKRCEELERILVYLVQEINRADIPLPEGEASPPAPPLKQVLEMQEQLQKLEVELREVTKNKEKLRKNLLELIEYTHMLRVTKTFVKRNVEFEPTYEEFPSLESDSLLDYSCMQRLGAKLGFVSGLINQGKVEAFEKMLWRVCKGYTIVSYAELDESLEDPETGEVIKWYVFLISFWGEQIGHKVKKICDCYHCHVYPYPNTAEERREIQEGLNTRIQDLYTVLHKTEDYLRQVLCKAAESVYSRVIQVKKMKAIYHMLNMCSFDVTNKCLIAEVWCPEADLQDLRRALEEGSVRLPSSPLPGTEERLMELINSEKKRK

SEQ ID NO: 272600 - DNA, 1119 bp, Artificial Sequence
  derived and/or modified sequence
atgggctccctcttcaggagcgaaacgatgtgtctggcccagctgttccttcaatcaggaacagcctacgagtgtctgagcgcccttggcgaaaagggtctcgtccagttccgcgacctgaatcagaatgtatctagctttcagagaaagtttgtgggcgaagtgaagaggtgcgaggaactggagaggattctggtttatctagtacaggaaattaaccgcgccgacatccccttaccagagggagaggccagcccccccgcacccccgctgaaacaggttttagaaatgcaagaacaactgcagaaactggaggtcgagctccgggaggtgaccaaaaataaagagaaactgcgcaagaatctactggaacttatagaatacactcatatgctcagggtcacaaaaactttcgtgaaacggaacgtggaattcgagccaacatatgaagagtttccgtcgcttgagagcgattccctcctggactatagttgcatgcaacgtttaggtgcaaagttgggattcgtttcaggacttataaatcaggggaaagtggaagcctttgagaagatgttgtggcgggtctgcaagggctacaccatagtgagctacgccgagctagatgaaagcctggaggacccagagacaggcgaagtgattaagtggtacgtatttcttatttctttctggggcgagcaaatcggacacaaagttaaaaaaatatgcgattgctatcattgccacgtgtacccttaccctaataccgctgaagaacgacgggaaatccaggagggcttgaatacccggatccaagacctgtacacagtcctgcataaaaccgaagactacttgcggcaggtgctctgcaaagccgcagagagtgtgtactcccgagtcattcaggtgaagaaaatgaaagcgatttatcacatgctgaacatgtgtagcttcgacgtaacgaataagtgcctcatagccgaggtgtggtgtcctgaggctgatcttcaagatctccgcagggctttagaagagggttctgtgcgcctgccctcttctccgctgcctggaaccgaggaacgccttatggagctgattaattccgagaagaagagaaagtag

SEQ ID NO: 272601 - DNA, 1119 bp, Artificial Sequence
  derived and/or modified sequence
atgggcagcctcttccgctctgagaccatgtgcctggcccagctgttcctgcagagcggcacagcctatgagtgcctgagcgccctgggggagaagggcctggtgcagttccgggacctgaaccagaatgtgagcagcttccagaggaagtttgtgggggaggtgaagagatgtgaggagctggagcgcatcctggtgtacctggtgcaggagatcaacagagctgacatccccctgcctgagggggaggccagccccccagccccacccctgaagcaggtgctggagatgcaggagcagctgcagaagctggaggtggagctgcgggaggtgaccaagaacaaggagaagctgaggaagaacctgctggagctgattgagtacacccacatgctgcgggtgaccaagacctttgtgaagagaaatgtggagtttgagcccacctatgaggagttccccagcctggagagtgacagcctgctggactacagctgcatgcagaggctgggcgccaagctgggctttgtgtctggcctcatcaaccagggcaaggtggaggcctttgagaagatgctgtggagggtgtgcaagggctacaccatcgtgtcctatgcagagctggatgagagcctggaggaccctgagaccggggaggtgatcaagtggtacgtgttcctgatctccttctggggcgagcagatcggccacaaggtgaagaagatctgtgactgctaccactgccacgtgtacccctaccccaacacagctgaggagcggcgggagatccaggagggcctgaacacccgcatccaggacctgtacacagtgctgcacaagacagaggactacctgcggcaggtgctgtgcaaggctgctgagagcgtgtacagcagggtcatccaggtgaagaagatgaaggccatctaccacatgctgaacatgtgcagctttgatgtgaccaacaagtgcctgattgctgaggtgtggtgcccagaggccgacctgcaggacctgcggcgggccctggaggagggctctgtgcggctgcccagcagccccctgcctggaacagaggagcggctgatggagctgatcaacagcgagaagaagaggaagtag

SEQ ID NO: 272602 - DNA, 1119 bp, Artificial Sequence
  derived and/or modified sequence
atgggcagcctgttccggagcgagaccatgtgcctggcccagctgttcctgcaatccggcactgcgtacgagtgtttgtccgccctgggcgagaaaggcctggtgcagttccgggatctgaaccagaacgtgtctagctttcaaaggaagttcgtcggtgaagtcaagcggtgtgaggaactggaaaggatattggtgtaccttgtgcaggagatcaacagagctgatatacctcttcctgagggcgaagccagtccccctgccccaccactaaaacaagttctcgagatgcaagaacaattacagaagctggaggtcgaattaagggaggttaccaagaataaagaaaagcttcgaaaaaatctgcttgagctgatcgaatacacccacatgctaagagtcaccaagacctttgtgaaacggaatgtggaattcgaacctacttacgaggaattcccatcacttgagtcagacagtctcttggattacagctgcatgcaacgcctgggcgccaagctcggcttcgtctccggactgatcaaccaagggaaggttgaggctttcgagaaaatgctgtggagagtttgtaaggggtacacaatcgtgtcttacgccgaactggacgagtctctggaagatcccgagaccggtgaagttatcaaatggtatgtctttctgatctcattttggggcgaacaaatcggccataaagtgaaaaaaatatgtgattgctatcactgccatgtttacccttatccgaatactgccgaagaacgccgtgaaattcaggaagggctaaacacccgtatccaggacttgtacacagtgttgcacaagaccgaagactatctgcgtcaggtcctgtgcaaagccgccgaaagcgtgtactctcgggtcattcaggtcaaaaaaatgaaagccatctatcacatgctgaatatgtgttccttcgatgtaacaaacaagtgcttgattgcagaagtctggtgtcctgaggccgatttacaggatttgaggcgcgctctggaggaggggagcgtgagattgccatctagccctctgccaggcactgaagaaaggctgatggagctcattaactcggagaagaagcgcaagtag

SEQ ID NO: 272603 - DNA, 1119 bp, Artificial Sequence
  derived and/or modified sequence
atgggcagtctattccgaagtgagaccatgtgtcttgctcagcttttcctacagtctgggaccgcgtatgagtgcctgagcgcgctcggcgagaaaggcctcgtgcagtttcgcgacctgaatcagaatgtgtctagtttccaacgcaaattcgttggggaagttaagcggtgtgaagagctcgagagaatcctagtttatctggtccaagaaattaaccgagctgacatccctcttccagaaggcgaggcatctccaccggcaccaccactgaaacaggtgttggagatgcaggagcagttgcaaaaattggaggtggagctgagagaagtcacaaaaaataaggaaaagctgcggaagaatctgctggaactaatcgaatacacacacatgctgcgggtgaccaaaaccttcgtcaagcggaacgtggagttcgagccaacatacgaagagttccctagcctggaaagcgactcattgctggactatagctgcatgcagcggctgggtgccaaactgggtttcgtgtccgggcttatcaatcagggaaaggtggaagcattcgagaagatgctttggcgcgtgtgtaagggctacacaatcgtatcctacgccgaactagacgaaagcttagaggatccagaaacaggggaggtgattaagtggtatgtcttcttaatctctttctggggggagcagattggacacaaggttaaaaaaatttgtgactgctatcattgtcatgtctacccctaccctaatactgccgaggaaagaagggagattcaggaagggctaaacactagaattcaagatctctatactgttcttcacaaaacagaggattacctccgtcaagtgctctgcaaagcagcagagtcagtttattctagggtgattcaggtgaagaagatgaaggcaatctaccatatgttgaacatgtgcagctttgacgtgacaaataagtgtctgatagccgaagtctggtgtcctgaggctgaccttcaggatttgcgcagggccttggaggagggctcagtgagactgcccagttccccccttccaggaaccgaggaacgcctgatggagctgatcaattcagagaagaagaggaagtag

SEQ ID NO: 272604 - DNA, 1620 bp, Artificial Sequence
  derived and/or modified sequence
acctcgcggactgctgtggcggcagctggagcggcggccgcggtggcagaaccgggggcggccgctgcagtctggagccccatagtgcggggccgcggccaggccacaggaagagctcgaggcccgggccgcaccggctgagtgtgcgggcccgcgcggctcggagccgccgccgcccatcgagcccctccgggcgcgggtcggcccgccatggggtccctgttccggagcgagaccatgtgcctggcgcagctcttcctgcagtcgggcacggcctacgagtgcctcagcgccctgggcgagaaaggcctggtccagttccgagacctcaaccagaacgtaagttctttccaaagaaaatttgttggtgaggtgaagaggtgtgaagagctagagcgaatattggtgtatttggtacaggaaattaatagagctgatattccccttcctgaaggagaggccagccctcctgcgccacccctgaaacaggttctagaaatgcaggagcagttgcagaagctcgaggttgaactgagagaagtcactaagaacaaggagaaactgaggaaaaacttgctggaactgatagagtacactcacatgctgagagtgacaaagacctttgtgaaacgcaatgttgagtttgaacccacttatgaagaattcccttccttagagagtgattctttgttggattacagctgtatgcagaggctgggagcaaaactgggatttgtgtctggcctaattaaccaaggaaaagtggaagcatttgaaaaaatgttgtggagagtctgcaaagggtacaccatcgtgtcctatgcagaactggatgaatcccttgaagaccctgaaacaggggaagtcataaaatggtatgtctttttaatatccttttggggagagcagattggccacaaggttaagaagatatgtgattgctaccactgccacgtgtacccctatccaaacacagccgaggagcggagggagatccaggaggggctgaacacccgcatccaggatctctacactgtactgcacaaaaccgaggactatttgaggcaagtgctatgtaaagccgccgagtctgtctacagccgtgtgatccaggtgaagaaaatgaaggccatctatcacatgctgaacatgtgcagctttgacgtgaccaacaagtgcctcattgctgaggtctggtgtcccgaggcggatctgcaggacctgcgccgggcactggaggagggctcggtaaggctgccttcctctcctctgccaggaacagaagagagactgatggaactgataaattcagagaaaaaaaggaagtgagaatttcatagagtaatgagaatgcagtgtgttgactcttcttttgtttttttaaaatattaattaacaaaattaaaatagagatggggttttgctgtgttgcccaggctggtctcaaactcctggccccgagcgatcctcctgcctcagccttggctctgtttttgaactgaaattatggtgagctggtcattcaaagctgtatgtgagtacatgtgtttttaaattgctcttttgagtaattcattcacatggtgtaaaagtgaaaagaaataaaagagtatgaaagac

SEQ ID NO: 272605 - DNA, 1119 bp, Artificial Sequence
  derived and/or modified sequence
atgggcagcctgttcagaagcgagaccatgtgcctggcccagctgttcctgcagagcggcaccgcctacgagtgcctgagcgccctgggcgagaagggcctggtgcagttcagagacctgaaccagaacgtgagcagcttccagagaaagttcgtgggcgaggtgaagagatgcgaggagctggagagaatcctggtgtacctggtgcaggagatcaacagagccgacatccccctgcccgagggcgaggccagcccccccgccccccccctgaagcaggtgctggagatgcaggagcagctgcagaagctggaggtggagctgagagaggtgaccaagaacaaggagaagctgagaaagaacctgctggagctgatcgagtacacccacatgctgagagtgaccaagaccttcgtgaagagaaacgtggagttcgagcccacctacgaggagttccccagcctggagagcgacagcctgctggactacagctgcatgcagagactgggcgccaagctgggcttcgtgagcggcctgatcaaccagggcaaggtggaggccttcgagaagatgctgtggagagtgtgcaagggctacaccatcgtgagctacgccgagctggacgagagcctggaggaccccgagaccggcgaggtgatcaagtggtacgtgttcctgatcagcttctggggcgagcagatcggccacaaggtgaagaagatctgcgactgctaccactgccacgtgtacccctaccccaacaccgccgaggagagaagagagatccaggagggcctgaacaccagaatccaggacctgtacaccgtgctgcacaagaccgaggactacctgagacaggtgctgtgcaaggccgccgagagcgtgtacagcagagtgatccaggtgaagaagatgaaggccatctaccacatgctgaacatgtgcagcttcgacgtgaccaacaagtgcctgatcgccgaggtgtggtgccccgaggccgacctgcaggacctgagaagagccctggaggagggcagcgtgagactgcccagcagccccctgcccggcaccgaggagagactgatggagctgatcaacagcgagaagaagagaaagtag

SEQ ID NO: 272606 - protein, 65 aa, Artificial Sequence
  derived and/or modified sequence
MVEAADREKVELLNQLEEEKRKVEDLQFRVEEESITKGDLEQKSQISEDPENVATVSEKSRIMEL

SEQ ID NO: 272607 - protein, 428 aa, Artificial Sequence
  derived and/or modified sequence
MSMLKPSGLKAPTKILKPGSTALKTPTAVVAPVEKTISSEKASSTPSSETQEEFVDDFRVGERVWVNGNKPGFIQFLGETQFAPGQWAGIVLDEPIGKNDGSVAGVRYFQCEPLKGIFTRPSKLTRKVQAEDEANGLQTTPASRATSPLCTSTASMVSSSPSTPSNIPQKPSQPAAKEPSATPPISNLTKTASESISNLSEAGSIKKGERELKIGDRVLVGGTKAGVVRFLGETDFAKGEWCGVELDEPLGKNDGAVAGTRYFQCQPKYGLFAPVHKVTKIGFPSTTPAKAKANAVRRVMATTSASLKRSPSASSLSSMSSVASSVSSRPSRTGLHVLELEAKMDQLRTMVEAADREKVELLNQLEEEKRKVEDLQFRVEEESITKGDLEQKSQISEDPENVRGHLTVWIFPLLTKIDHRLKCLLIYS

SEQ ID NO: 272608 - DNA, 327 bp, Artificial Sequence
  derived and/or modified sequence
atgagcatgctgaagcccagcggcctgaaggcccccaccaagatcctgaagcccggcagcaccgccctgaagacccccaccgccgtggtggcccccgtggagaagaccatcagcagcgagaaggccagcagcacccccagcagcgagacccaggaggagttcgtggacgacttcagagtgggcgagagagtgtgggtgaacggcaacaagcccggcttcatccagttcctgggcgagacccagttcgcccccggccagtgggccggcatcgtgctggacgagcccatcggcaagaacgacggcagcgtggccggcgtgagatactag

SEQ ID NO: 272609 - DNA, 327 bp, Artificial Sequence
  derived and/or modified sequence
atgtcaatgttgaaaccatcgggactgaaggcacccacaaaaatactgaaacccggtagcaccgccctcaagacccctaccgctgtcgtcgcccccgttgaaaaaacaatcagtagtgaaaaggcttccagcacaccatcgtccgagacccaagaggaattcgtggatgacttcagagtgggagaaagggtgtgggttaacggcaacaagcccggcttcatccagtttctgggagagactcagttcgccccgggtcagtgggcgggaattgtgctggatgaacccatcggcaaaaacgatggctctgtggcaggcgtcaggtattag

SEQ ID NO: 272610 - DNA, 327 bp, Artificial Sequence
  derived and/or modified sequence
atgtccatgctgaagcccagcggcctgaaggcccccaccaagatcctgaagccaggcagcacagccctgaagacccccacagctgtggtggcccctgtggagaagaccatcagcagcgagaaggccagcagcacccccagcagcgagacccaggaggagtttgtggatgacttccgggtgggggagcgggtgtgggtgaatggaaacaagccaggcttcatccagttcctgggggagacccagtttgcccctggccagtgggccggcatcgtgctggatgagcccatcggcaagaatgatggctctgtggccggcgtgcgctactag

SEQ ID NO: 272611 - DNA, 3528 bp, Artificial Sequence
  derived and/or modified sequence
gatgtgatagctctatggaagtccaaactggagactgccatcgcatcccaccagcaggcgatggaagaactgaaggtatctttcagcaaagggcttggaacagagacggcagaatttgctgaactaaaaacacaaatagagaaaatgagactagattaccaacacgaaatagaaaatttgcagaatcaacaagactctgaacgggctgcccatgctaaagagatggaagccttgagggctaaactgatgaaagttattaaagaaaaggaaaacagtctggaagccatcaggtcgaaactggacaaagcagaagaccagcatctcgtagaaatggaagacacgttaaacaaattacaggaagctgaaataaagaaagaaaagtttgctgaagcttcagaggaggcagtctctgttcagagaagtatgcaagaaactgtaaataagttacaccaaaaggaggaacagtttaacatgctgtcttctgacttggagaagctgagagaaaacttagcagatatggaggcaaaatttagagagaaagatgagagagaagagcagctgataaaggcaaaggaaaaactggaaaatgacattgcagaaataatgaagatgtcaggagataactcttctcagctgacaaaaatgaacgatgaattacgtctgaaagaaagagatgtagaagaattacagctaaaacttacaaaggctaatgaaaatgcaagttttctgcaaaagtattgaggacatgactgtcaaagctgaacagagccagcaagaagcagctaaaaagcatgaggaagaaaagaaagaattggagaggaaattgtcggacctggaaaagaaaatggaaacaagccacaaccagtgtcaggagctgaaagccaggtatgagagagccacttctgagacaaaaaccaagcatgaagaaatcctacagaacctccagaagacgctgctggacacagaggacaagctgaagggcgcacgggaggagaacagtggcttgctgcaggagctggaggagctgagaaagcaagccgacaaagccaaagctgctcaaacagcggaagatgccatgcagataatggaacagatgaccaaagagaagactgagactctggcctccttggaggacaccaagcaaacaaatgcaaaactacagaatgaattggacacacttaaagaaaacaacttgaaaaatgtggaagagctgaacaaatcaaaagaactcctgactgtagagaatcaaaaaatggaagaatttaggaaagaaatagaaaccctaaagcaggcagcagctcagaagtcccagcagctttcagcgttgcaagaagagaacgttaaacttgctgaggagctggggagaagcagggacgaagtcacaagtcatcaaaagctggaagaagaaagatctgtgctcaataatcagttgttagaaatgaaaaaaagagaatccaagttcataaaagacgcagatgaagagaaagcttccttgcagaaatccatcagtataactagtgccttactcacagaaaaggatgccgagctggagaaactgagaaatgaggtcacagtgctcaggggagaaaacgcctctgccaagtccttgcattcagttgttcagactctagagtctgataaggtgaagctcgagctcaaggtaaagaacttggagcttcaactcaaagaaaacaagaggcagctcagcagctcctcaggtaatacagacactcaggcagacgaggatgaaagagcccaggagagtcaggtaatgattgatttcctaaattcagtaatagtggaccttcaaaggaagaatcaagacctcaagatgaaggtggagatgatgtcagaagcagccctgaatgggaacggggatgacctaaacaattatgacagtgatgatcaggagaaacagtccaagaagaaacctcgcctcttctgtgacatttgtgactgctttgatctccacgacacagaggattgtcctacccaggcacagatgtcagaggaccctccccattccacacaccatggcagtcggggtgaggaacgcccatactgtgaaatctgtgagatgtttggacactgggccaccaactgcaatgacgacgaaaccttctgatgaagcctccagtggagaactgggcttgctcagacgcactcgcattgacacaacgtaacaccagcattgtgtgtgcagacttcaggagaactcatgttattttttaaccccgtcaacaaatctaggaaaatattttgatcttcaacaaattgccctttagtctccccgtatgagttagaataataaatatttagtaggtgagttttcacctcgaattttgttttcttgatttttacgtttgaagacattgcaccagatgccattacatttattggccccccgaccttgtagaaaaacccctaccctcacaataccttatttaagtaactttaaattatgccgttacttttcatatttgcactaagatatttccaggctgcatttgtatatttagattttttggttaagctttgacactggaatgagttgaaaaaatgtgccattttgcattttcatctactcatttaaagtattttattcttattcaaagaaatatctgagctctttgcactacctgttatcagtagtgcctttacttcaggcttgataatacttaggtgtgattataaaatcatgaagcaggtaaagggaggggcaagcccccaaactgctgtggggacattttataatctatatgctgcacccacttaatctactgtggtgttttgtttattagttttgcataatttcagcttctatatattgtatgtatatattttttaaaaatctatattttgggaaaaaaacatacacaatgtgtctttctttttggacatttacctttttgaaaaagaaaacacttaaaatgatcattaggacataacagactaggccagacatagcatcttgtggctttgcaaccattttcatttgtttgttttccttttatttcttcaccagatttaaataactggaggaattttctccaatttttttttccttctctggcaggtatccccagcagtcaattaacaataagccagtataaaacacctaaataaccaatctacaatctcccttcacaagtttttttactgtttttagatgaatgtacgatgagaaattcaacgttaataattctggattttcttatcacaaaaaagaaaatgaaggacctcaaagcacctgaacagtttatcgaccagtttgaatctatttatcttcatttgaatgtcttctagaatatgtaaaaagtcataaaatgtatcttccatgctacatgtacaataagaacttctataattgtatatatgcctttgatgtattttcccctcaagattatcaactgtgtgttcgacagtgaatattcaatctggtaccagttgaaatttttggttataaatgtaatacgaattgtttcacaaacagaaaacatgtaaagcagtattaaaatttggccaaac

SEQ ID NO: 272612 - DNA, 327 bp, Artificial Sequence
  derived and/or modified sequence
atgagcatgctgaagcccagcggcctgaaggcccccaccaagatcctgaagccgggtagcaccgccctgaagacacctacagccgttgtcgcccccgtcgagaaaacaattagcagcgagaaagctagcagtactccatccagcgagacgcaggaagagttcgttgatgacttcagagtgggcgagcgcgtctgggtaaacggtaacaaacccggcttcatccaattcctgggagagactcaatttgcgcccggtcaatgggctggaatcgtgttagacgaaccaattggcaaaaacgatggctcggtggccggagtccggtattag

SEQ ID NO: 272613 - DNA, 327 bp, Artificial Sequence
  derived and/or modified sequence
atgagtatgcttaagccaagtggactgaaggctccaacaaagatacttaagccgggttcaacggccttgaagacaccaacagctgtggtggccccagtggagaaaacaatctccagcgaaaaagcttctagtacacccagttccgaaactcaggaggaattcgtggacgacttccgagtcggtgagcgtgtctgggtcaacggtaacaaaccgggtttcatacagttcctgggggagacacagtttgccccaggccaatgggctggcattgttttggacgagccaattggaaagaatgatggatctgttgctggcgtcagatactag

SEQ ID NO: 272614 - protein, 386 aa, Artificial Sequence
  derived and/or modified sequence
MKEENTGAGAEAKRTNFFLKQGRRHESKDKSSKKHKSEEHNDKEHSSDKGRERLNSSENGEDRHKRKERKSSRGRSHSRSRSRERRHRSRSRERKKSRSRSRERKKSRSRSRERKKSRSRSRERKRRIRSRSRSRSRHRHRTRSRSRTRSRSRDRKKRIEKPRRFSRSLSRTPSPPPFRGRNTAMDAQEALARRLERAKKLQEQREKEMVEKQKQQEIAAAAATGGSVLNVAALLASGTQVTPQIAMAAQMAALQAKALAETGIAVPSYYNPAAVNPMKFAEQEKKRKMLWQGKKEGDKSQSAEIWEKLNFGNKDQNVKFRKLMGIKSEDEAGCSSVDEESYKTLKQQEEVFRNLDAQYEMARSQTHTQRGMGLGFTSSMRGMDAV

SEQ ID NO: 272615 - protein, 599 aa, Artificial Sequence
  derived and/or modified sequence
MSKEERPGREEILECQVMWEPDSKKNTQMDRFRAAVGAACGLALESYDDLYHWSVESYSDFWAEFWKFSGIVFSRVYDEVVDTSKGIADVPEWFKGSRLNYAENLLRHKENDRVALYIAREGKEEIVKVTFEELRQEVALFAAAMRKMGVKKGDRVVGYLPNSEHAVEAMLAAASIGAIWSSTSPDFGVNGVLDRFSQIQPKLIFSVEAVVYNGKEHNHMEKLQQVVKGLPDLKKVVVIPYVSSRENIDLSKIPNSVFLDDFLATGTSEQAPQLEFEQLPFSHPLFIMFSSGTTGAPKCMVHSAGGTLIQHLKEHLLHGNMTSSDILLCYTTVGWMMWNWMVSLLATGAAMVLYDGSPLVPTPNVLWDLVDRIGITVLVTGAKWLSVLEEKAMKPVETHSLQMLHTILSTGSPLKAQSYEYVYRCIKSSILLGSISGGTDIISCFMGHNFSLPVYKGEIQARNLGMAVEAWNEEGKAVWGESGELVCTKPIPCQPTHFWNDENGNKYRKAYFSKFPGIWAHGDYCRINPKTGGIVMLGRSDGTLNPNGVRFGSSEIYNIVYAQRQESGSCRQTDHRWKSRGARRCFLEPRDPGSVPGHP

SEQ ID NO: 272616 - DNA, 1800 bp, Artificial Sequence
  derived and/or modified sequence
atgtctaaggaagagcgtcccgggagggaagagatccttgagtgtcaggtcatgtgggaacctgacagcaaaaagaacacccaaatggatcggtttcgggcagctgtgggggccgcgtgcggtttagccctcgaatcttacgatgatctctaccactggagtgtggagtcctatagcgacttctgggccgagttctggaaattcagcggtattgtgttttctcgcgtctatgacgaagtcgtggatacatcaaagggaattgcagatgtgcccgagtggttcaaaggctcccgcctgaactatgccgaaaatctgctgagacacaaggaaaacgaccgagtggctctgtacattgcccgtgaggggaaggaggagatcgtgaaagtgacttttgaggaactgcgacaggaggtggccctgttcgccgccgctatgagaaagatgggggtgaaaaagggagatagagtggtgggttatcttcctaatagcgagcacgctgttgaagccatgttggccgccgcctctattggtgctatctggtcgtcaacgtcacccgactttggcgtcaatggtgtgttagatcgcttcagccagatccagccaaaactgattttttccgtggaggctgtggtgtataatggtaaagaacacaaccatatggagaaacttcagcaggttgtgaaaggtcttccggacttaaaaaaagtcgtggtgatcccttatgttagttcaagggagaacattgacttgagtaagatccccaattcagtatttcttgatgacttcttggcaactggcaccagtgaacaggctcctcagttagaattcgagcagctcccgttttcacaccccctgttcataatgttttccagcgggaccaccggcgctcctaaatgtatggtgcactctgcggggggaaccttgatccaacatcttaaggagcatctgcttcacggaaacatgaccagttccgacatattattatgttacaccacagtaggctggatgatgtggaactggatggtgagcctgttagcaacaggcgccgccatggtattatacgatgggtcacccttggtgcccactcccaacgttctatgggacttagtcgaccgtattggaattactgtacttgtgacaggcgccaagtggctgagcgtactggaggagaaggctatgaagcccgtcgagacgcactccctgcagatgctgcacaccattctgtctaccggcagccctttaaaggcccaatcttatgagtacgtttatcgttgtatcaagagttctattctccttggctcgatcagcggggggacagatattatctcctgtttcatgggccataactttagcctgcctgtatacaagggagagatccaggctaggaacctaggaatggccgtggaggcttggaatgaagaggggaaagcggtgtggggcgagagcggcgaactggtgtgcaccaagcccattccatgtcaaccaacccacttctggaacgacgagaacggtaataagtaccggaaggcgtatttctccaagttccccggtatatgggcacacggagactattgcaggattaaccctaagaccggtggcatcgttatgctaggccggagcgacggcactcttaatcccaatggggtccgcttcggctcatcagaaatctataatattgtctatgcacagagacaagaatcagggtcttgtcgccagacggaccacaggtggaagagccgaggtgccaggaggtgtttcttggagccccgggatccaggctcggtgcccggccacccctag

SEQ ID NO: 272617 - DNA, 1800 bp, Artificial Sequence
  derived and/or modified sequence
atgagcaaggaggagaggcctggccgggaggagatcctggagtgccaggtgatgtgggagccagacagcaagaagaacacccagatggaccgcttccgggctgctgtgggcgccgcctgtggcctggccctggagagctatgatgacctgtaccactggagcgtggagagctacagcgacttctgggccgagttctggaagttctctggaattgtgttcagccgggtgtatgatgaggtggtggacaccagcaaaggaattgctgatgtgcctgagtggttcaagggcagccggctgaactatgcagagaacctgctgcggcacaaggaaaatgacagagtggccctgtacatcgcccgggagggcaaggaggagatcgtgaaggtgacctttgaggagctgcggcaggaggtggccctgtttgctgctgccatgaggaagatgggcgtgaagaagggggacagagtggtgggctacctgcccaacagcgagcacgctgtggaggccatgctggccgccgccagcatcggggccatctggagcagcaccagcccagactttggagtgaatggagtgctggaccgcttcagccagatccagcccaagctgatcttctctgtggaggccgtggtgtacaacgggaaggagcacaaccacatggagaagctgcagcaggtggtgaagggcctgcctgacctgaagaaggtggtggtgatcccctacgtgagcagccgggagaacatcgacctgagcaagatccccaacagcgtcttcctggatgacttcctggccaccggcaccagcgagcaggccccccagctggagtttgagcagctgcccttcagccaccccctcttcatcatgttcagcagcggcaccaccggggcccccaagtgcatggtgcacagcgctgggggcaccctcatccagcacctgaaggagcacctgctgcacggcaacatgaccagcagtgacatcctgctgtgctacaccaccgtgggctggatgatgtggaactggatggtgtccctgctggccactggagctgccatggtgctgtatgatggcagccccctggtgcccacccccaacgtgctgtgggacctggtggacagaattggcatcaccgtgctggtgactggagccaagtggctgtctgtgctggaggagaaggccatgaagcctgtggagacccacagcctgcagatgctgcacaccatcctgagcacaggcagccccctgaaggcccagagctatgaatatgtgtaccgctgcatcaagagcagcatcctgctgggcagcatcagcggcggcacagacatcatcagctgcttcatgggccacaacttcagcctgcctgtgtacaagggggagatccaggccaggaacctgggcatggctgtggaggcctggaatgaggagggcaaggctgtgtggggcgagagcggggagctggtgtgcaccaagcccatcccctgccagcccacccacttctggaatgatgaaaatggaaacaagtacaggaaggcctacttcagcaagtttcctggcatctgggcccatggagactactgccgcatcaaccccaagacaggaggcatcgtgatgctgggccgcagtgatggcaccctgaaccccaatggagtgcgcttcggcagcagcgagatctacaacatcgtgtatgcccagaggcaggagagcggcagctgccggcagacagaccaccgctggaagagcagaggagcccggcgctgcttcctggagccccgggaccccggctctgtgcccggccacccctag

SEQ ID NO: 272618 - DNA, 1800 bp, Artificial Sequence
  derived and/or modified sequence
atgagcaaggaggagcggcccggccgggaggagatcctggagtgccaggttatgtgggagcccgattcaaagaagaacacacagatggataggttccgagcagctgtaggcgcggcttgcgggttagccctggagtcttacgacgacctgtatcattggagcgttgagagctacagcgacttctgggccgaattttggaaattcagtgggatcgtcttcagtcgggtgtacgacgaagtcgttgataccagtaagggcatagcagatgtgcccgagtggttcaaaggtagtaggctgaactacgccgagaatctgctgcgccataaggagaatgatcgcgtcgcactatacattgcacgtgagggcaaggaggagatcgtgaaggttaccttcgaggagttaagacaggaagtggccctgttcgccgccgctatgagaaaaatgggtgttaaaaaaggcgaccgagtggtggggtacctcccaaactccgaacacgccgtcgaagctatgttggccgccgcctcgattggggcgatttggagcagcacttcacccgactttggggtgaacggcgtactggatcgcttttcccagatccagcccaagctaatctttagcgtggaggcagtggtgtacaatggcaaggagcataatcatatggaaaagttgcagcaagtggtgaaagggctgcctgacctgaaaaaagtggtcgtgataccatacgttagctctagagaaaacattgatttgtcaaagatccctaattcagtctttctggacgatttcctggccactggaaccagcgaacaggcgcctcagcttgaattcgaacagctgccattctcccaccccctcttcattatgttttcatctggaacaacaggtgcaccgaagtgcatggtgcacagcgcgggcggcaccctgattcagcacctgaaggagcatttgcttcacgggaacatgacctctagtgacattctgttatgctacacaactgtcggctggatgatgtggaattggatggtgtccttgctcgcaactggcgccgccatggtgctgtacgacggaagtcctctcgtgcctactcccaacgtgctatgggatctggtggaccggatcggtattaccgttctggtcaccggtgccaaatggctctccgtcctggaagaaaaggctatgaagcctgtggagacacattccctgcagatgctgcacaccattctatccacagggtcgccgctcaaggcacagagctacgaatacgtttacagatgtatcaagagctccatactgctcggctccattagtggaggtactgacattatctcatgttttatgggacataattttagcctgcccgtctataaaggtgagatccaagctcgtaatctgggaatggccgtcgaagcgtggaatgaggagggtaaagctgtgtggggtgagtcaggcgagctggtctgcacgaaacccatcccttgccaacccactcatttctggaacgacgagaatggaaataaatacaggaaggcatatttttccaaatttcctggcatttgggcgcacggtgactactgtcggattaaccctaaaacgggcggcatcgtgatgctgggacggtcggacggaactctgaacccaaatggggtgcgcttcggatcttctgagatatataatattgtatacgctcagcggcaggaatctggcagttgccgccagacggaccatagatggaaaagcagaggtgcacgcaggtgtttcctggaaccaagggacccaggctccgtccctgggcacccttag

SEQ ID NO: 272619 - DNA, 1800 bp, Artificial Sequence
  derived and/or modified sequence
atgtccaaggaagaacgccctggaagggaggaaattttggaatgccaggtgatgtgggaacccgattctaaaaagaatacccagatggaccgctttcgagcggctgttggggctgcctgcggacttgctctcgaatcatatgacgatttataccattggtctgtcgagtcttactcagatttctgggcagaattctggaaattcagcggcattgtgttctcgcgagtttacgatgaggtggtggacacaagcaagggaattgctgacgtcccggagtggttcaaaggtagcaggcttaactatgcggagaacttactccggcacaaagaaaacgatagggtcgcactttatatagcaagagaaggtaaggaagagattgtaaaggtcacatttgaggaactgagacaagaagtggccctgtttgcagccgctatgagaaagatgggcgtcaaaaagggtgatcgtgttgtgggatacctcccgaactccgaacacgctgtcgaagcgatgctggccgcagcgtctattggagcgatttggagtagtacgtcaccggactttggggttaacggagtgctagacaggttttcccagattcaacctaaactgatcttctcggtggaggctgtcgtctacaacggtaaagaacacaaccacatggagaagttgcagcaggtggtgaagggactcccggacctgaagaaagtcgttgttattccctacgtcagctcgcgggagaacatcgatctttctaagatcccaaactccgtcttcttagacgactttctcgccacaggcacctctgaacaagcccctcaactggagttcgagcagctgcctttttcccaccctctcttcattatgttttcttcaggcactacaggcgcaccgaaatgcatggtgcattccgccggtggcaccttgattcagcacttgaaagagcatctactgcacggcaacatgacaagctcggacatcctgctgtgttataccactgtagggtggatgatgtggaactggatggtgtcgctcctggcaacgggggctgctatggtcctatacgatggatcccctctggtgccaacccctaacgtgttgtgggatcttgttgatagaatcggaattactgtgctggttactggcgcaaaatggctgagcgtcctagaagaaaaggccatgaagccagtggaaacccattcactgcagatgctgcacacgatcctatctactggcagtccgctgaaggctcagtcttacgagtacgtctaccggtgcataaagtcttcgatcctgttggggtccattagcggtggcacggacattatttcttgctttatgggccataatttcagtctccccgtctataaaggggaaatccaggcccgaaatcttggcatggcggtggaagcgtggaacgaagaaggcaaagccgtttggggtgaatccggggaactggtatgcactaaaccgatcccctgtcagccaacccacttctggaatgacgagaacgggaacaaataccggaaagcctacttttccaagttccccggtatttgggcccacggtgattactgtagaattaatcccaagactgggggaatcgtgatgctaggacggtccgatggaacccttaatcctaacggagtgagattcgggtcctctgaaatatacaatatagtttacgcccagcgccaggagtctggcagctgcaggcagaccgatcaccggtggaaaagtcgcggagcccgtcgctgtttccttgaacccagagaccccggttccgtgcccggtcatccatag

SEQ ID NO: 272620 - DNA, 3046 bp, Artificial Sequence
  derived and/or modified sequence
ttgttccccgccgccgccgtcgctgacccagcccgccaggcgctcctgaccgtcgcttcctccggtcccaggtccccggccctcgcctcagccccggcccctggtccccagccctcgtcgcagccccggccgcccgccgccgccatgtccaaggaggagcgccccggtcgggaggagatcctggagtgccaggtgatgtgggagcctgacagtaagaagaacacgcagatggaccgcttccgggcggctgtgggcgccgcctgcggcctggcgctggagagttatgatgacttgtaccattggtccgttgagtcatattcagacttctgggcagagttctggaaattcagtggaattgtcttctcacgtgtgtatgatgaggttgtggacacatcgaaaggaatcgcagatgtccccgagtggttcaaaggcagtcggctcaactatgcagaaaacctcctgcggcacaaagagaatgacagagttgccctttacattgcaagggaaggcaaagaggaaattgtgaaggtgacttttgaagagctgaggcaagaagtggctttgtttgcagcagcaatgaggaaaatgggtgtgaagaaaggagatcgggttgttggttatttacccaacagtgagcacgctgtcgaggcgatgctggctgcggcaagcattggtgccatctggagctccacgtccccggacttcggtgtgaatggtgtgctggaccggttttctcaaattcagccaaagctcatcttctctgtggaggctgttgtctataatggcaaagagcacaaccacatggaaaagctgcagcaggtggttaaaggcctaccagacttgaagaaagtggtggtgattccttatgtgtcctccagagagaacatagacctttcaaagattccaaacagtgtgtttctggatgactttcttgccaccggcaccagtgagcaggccccgcagctggagttcgagcagctgcccttcagccacccactgttcatcatgttctcatcgggcaccacgggcgcacccaagtgcatggtgcattccgctgggggcaccctcatccagcatctgaaggagcacctgctgcacggcaacatgaccagcagtgacatcctcctgtgctacaccacggtcggctggatgatgtggaactggatggtgtcccttctggccacaggagcggccatggtcttgtacgatggctcccccctggtgcccacgcccaatgtgctctgggacctggttgacaggataggcatcactgtcctggtaactggggccaagtggctgtcagtgctggaagagaaggccatgaagccggtggaaacccacagtctccagatgctccacacgatcctgtccactggctccccactgaaagcccagagctacgagtatgtctacaggtgcatcaagagcagcatcctcctgggctccatctcaggaggcaccgacatcatctcctgcttcatgggccacaatttttctcttcctgtgtataaaggggagattcaggcccggaacctgggcatggccgtggaagcgtggaacgaggaaggaaaggcggtctggggagagagcggcgagctggtgtgtactaagccgatcccttgccagcccacacacttctggaacgatgagaacggcaacaagtacaggaaggcgtatttctccaaattcccaggtatctgggctcatggcgactactgcagaatcaaccccaagaccgggggcatcgtcatgcttggccggagtgacggcaccctcaaccccaacggggtgcggttcggcagctcggaaatctataacattgtatacgctcaacggcaagaaagtggaagttgccgtcaaacagatcatcgctggaaaagccgtggagcaaggaggtgctttctcgaaccccgagaccctggatctgtaccgggacatccctgagctgcagggcttctgagtcagactggctggcgtgtcactcagccgcacccgtgtgcactgtaacttttgtgtgctcaagaaattatacagaaacctacagctgttgtaaaaggatgctcgcaccaagtgttctgtaggcttggggagggatcgtttctctgttttgttaaatctggtgggtacctggatcttccacacgagtgggattctggccttcagagaccaggagggagtgtctgggccgcaggtgtggcactgtggtgagagtgtgtgtctttgcacacacagtgcagcgggaacggtggggctggctggtgctgaagacagacacactcctgagccaaggtcttgtcttcaacctccccgtcccgttgtcccattttgctctgtgaaggtgcaaatccctttcttcccttcccatctcaggctctcctgttttccctcagggtccagtatgcctttgagctttagctgttagaaaggaacccccgtgacttgacacagctttcacagctggctgctaggaccggcgggctgggtgttcacgtgtgtctgtgtcatggatgcaatgcaggccctggaggactgtgcgtcacccgtcaaccagagcgtgcctccgggccagcttccctccaaggaatgagtggatttcatacaggatctctttattgcacagactgaatggctttacatgtttctaatgtgaattaggcatgtgaagcagtgggtgtccacccgtgtccctcatgggtgagccctccagctgtgagcccaggcagtgtggtcaccgagtgaggaccctcctcaccaggaaccgcatccctgtgctgcctccacctgagagttgctagggggttcttgtcgagatcatgtcatcagcacccctaagtcaagtcacgggtttccatagccaggcagttggtatgtacaattcagttcagcgtatgaacttgtatctctaatctgatgtccatttttatattttttgaaactgagcacaatgaaatcctttcttgaatcattttccttttggattataaaaatatgggggaaagtgctatgatgaattttatgcaataaatgtatacatgtgtgcacatgc

SEQ ID NO: 272621 - DNA, 2279 bp, Artificial Sequence
  derived and/or modified sequence
gacacatcgaaaggaatcgcagatgtccccgagtggttcaaaggcagtcggctcaactatgcagaaaacctcctgcggcacaaagagaatgacagagttgccctttacattgcaagggaaggcaaagaggaaattgtgaaggtgacttttgaagagctgaggcaagaagtggctttgtttgcagcagcaatgaggaaaatgggtgtgaagaaaggagatcgggttgttggttatttacccaacagtgagcacgctgtcgaggcgatgctggctgcggcaagcattggtgccatctggagctccacgtccccggacttcggtgtgaatggtgtgctggaccggttttctcaaattcagccaaagctcatcttctctgtggaggctgttgtctataatggcaaagagcacaaccacatggaaaagctgcagcaggtggttaaaggcctaccagacttgaagaaagtggtggtgattccttatgtgtcctccagagagaacatagacctttcaaagattccaaacagtgtgtttctggatgactttcttgccaccggcaccagtgagcaggccccgcagctggagttcgagcagctgcccttcagccacccactgttcatcatgttctcatcgggcaccacgggcgcacccaagtgcatggtgcattccgctgggggcaccctcatccagcatctgaaggagcacctgctgcacggcaacatgaccagcagtgacatcctcctgtgctacaccacggtcggctggatgatgtggaactggatggtgtcccttctggccacaggagcggccatggtcttgtacgatggctcccccctggtgcccacgcccaatgtgctctgggacctggttgacaggatagggtatctgggctcatggcgactactgcagaatcaaccccaagaccgggggcatcgtcatgcttggccggagtgacggcaccctcaaccccaacggggtgcggttcggcagctcggaaatctataacattgtggaatccttcgaggaggtggaggacagcctgtgtgtcccccagtataacaagtacagggaggagagggtgatcctcttcctgaagatggcctccgggcacgccttccagcctgacttggttaagaggatccgtgacgccatccgcatgggcttgtctgcgcgacacgtgcccagcctcatcctggaaaccaagggcatcccgtatacgctcaacggcaagaaagtggaagttgccgtcaaacagatcatcgctggaaaagccgtggagcaaggaggtgctttctcgaaccccgagaccctggatctgtaccgggacatccctgagctgcagggcttctgagtcagactggctggcgtgtcactcagccgcacccgtgtgcactgtaacttttgtgtgctcaagaaattatacagaaacctacagctgttgtaaaaggatgctcgcaccaagtgttctgtaggcttggggagggatcgtttctctgttttgttaaatctggtgggtacctggatcttccacacgagtgggattctggccttcagagaccaggagggagtgtctgggccgcaggtgtggcactgtggtgagagtgtgtgtctttgcacacacagtgcagcgggaacggtggggctggctggtgctgaagacagacacactcctgagccaaggtcttgtcttcaacctccccgtcccgttgtcccattttgctctgtgaaggtgcaaatccctttcttcccttcccatctcaggctctcctgttttccctcagggtccagtatgcctttgagctttagctgttagaaaggaatgagtggatttcatacaggatctctttattgcacagactgaatggctttacatgtttctaatgtgaattaggcatgtgaagcagtgggtgtccacccgtgtccctcatgggtgagccctccagctgtgagcccaggcagtgtggtcaccgagtgaggaccctcctcaccaggaaccgcatccctgtgctgcctccacctgagagttgctagggggttcttgtcgagatcatgtcatcagcacccctaagtcaagtcacgggtttccatagccaggcagttggtatgtacaattcagttcagcgtatgaacttgtatctctaatctgatgtccatttttatattttttgaaactgagcacaatgaaatcctttcttgaatcattttccttttggattataaaaatatgggggaaagtgctatgatgaattttatgcaataaatgtatacatgtgtgcacatgc

SEQ ID NO: 272622 - DNA, 1800 bp, Artificial Sequence
  derived and/or modified sequence
atgagcaaggaggagagacccggcagagaggagatcctggagtgccaggtgatgtgggagcccgacagcaagaagaacacccagatggacagattcagagccgccgtgggcgccgcctgcggcctggccctggagagctacgacgacctgtaccactggagcgtggagagctacagcgacttctgggccgagttctggaagttcagcggcatcgtgttcagcagagtgtacgacgaggtggtggacaccagcaagggcatcgccgacgtgcccgagtggttcaagggcagcagactgaactacgccgagaacctgctgagacacaaggagaacgacagagtggccctgtacatcgccagagagggcaaggaggagatcgtgaaggtgaccttcgaggagctgagacaggaggtggccctgttcgccgccgccatgagaaagatgggcgtgaagaagggcgacagagtggtgggctacctgcccaacagcgagcacgccgtggaggccatgctggccgccgccagcatcggcgccatctggagcagcaccagccccgacttcggcgtgaacggcgtgctggacagattcagccagatccagcccaagctgatcttcagcgtggaggccgtggtgtacaacggcaaggagcacaaccacatggagaagctgcagcaggtggtgaagggcctgcccgacctgaagaaggtggtggtgatcccctacgtgagcagcagagagaacatcgacctgagcaagatccccaacagcgtgttcctggacgacttcctggccaccggcaccagcgagcaggccccccagctggagttcgagcagctgcccttcagccaccccctgttcatcatgttcagcagcggcaccaccggcgcccccaagtgcatggtgcacagcgccggcggcaccctgatccagcacctgaaggagcacctgctgcacggcaacatgaccagcagcgacatcctgctgtgctacaccaccgtgggctggatgatgtggaactggatggtgagcctgctggccaccggcgccgccatggtgctgtacgacggcagccccctggtgcccacccccaacgtgctgtgggacctggtggacagaatcggcatcaccgtgctggtgaccggcgccaagtggctgagcgtgctggaggagaaggccatgaagcccgtggagacccacagcctgcagatgctgcacaccatcctgagcaccggcagccccctgaaggcccagagctacgagtacgtgtacagatgcatcaagagcagcatcctgctgggcagcatcagcggcggcaccgacatcatcagctgcttcatgggccacaacttcagcctgcccgtgtacaagggcgagatccaggccagaaacctgggcatggccgtggaggcctggaacgaggagggcaaggccgtgtggggcgagagcggcgagctggtgtgcaccaagcccatcccctgccagcccacccacttctggaacgacgagaacggcaacaagtacagaaaggcctacttcagcaagttccccggcatctgggcccacggcgactactgcagaatcaaccccaagaccggcggcatcgtgatgctgggcagaagcgacggcaccctgaaccccaacggcgtgagattcggcagcagcgagatctacaacatcgtgtacgcccagagacaggagagcggcagctgcagacagaccgaccacagatggaagagcagaggcgccagaagatgcttcctggagcccagagaccccggcagcgtgcccggccacccctag

SEQ ID NO: 272623 - protein, 861 aa, Artificial Sequence
  derived and/or modified sequence
MTGRARARARGRARGQETAQLVGSTASQQPGYIQPRPQPPPAEGELFGRGRQRGTAGGTAKSQGLQISAGFQELSLAERGGRRRDFHDLGVNTRQNLDHVKESKTGSSGIIVRLSTNHFRLTSRPQWALYQYHIDYNPLMEARRLRSALLFQHEDLIGKCHAFDGTILFLPKRLQQKVTEVFSKTRNGEDVRITITLTNELPPTSPTCLQFYNIIFRRLLKIMNLQQIGRNYYNPNDPIDIPSHRLVIWPGFTTSILQYENSIMLCTDVSHKVLRSETVLDFMFNFYHQTEEHKFQEQVSKELIGLVVLTKYNNKTYRVDDIDWDQNPKSTFKKADGSEVSFLEYYRKQYNQEITDLKQPVLVSQPKRRRGPGGTLPGPAMLIPELCYLTGLTDKMRNDFNVMKDLAVHTRLTPEQRQREVGRLIDYIHKNDNVQRELRDWGLSFDSNLLSFSGRILQTEKIHQGGKTFDYNPQFADWSKETRGAPLISVKPLDNWLLIYTRRNYEAANSLIQNLFKVTPAMGMQMRKAIMIEVDDRTEAYLRVLQQKVTADTQIVVCLLSSNRKDKYDAIKKYLCTDCPTPSQCVVARTLGKQQTVMAIATKIALQMNCKMGGELWRVDIPLKLVMIVGIDCYHDMTAGRRSIAGFVASINEGMTRWFSRCIFQDRGQELVDGLKVCLQAALRAWNSCNEYMPSRIIVYRDGVGDGQLKTLVNYEVPQFLDCLKSIGRGYNPRLTVIVVKKRVNTRFFAQSGGRLQNPLPGTVIDVEVTRPEWYDFFIVSQAVRSGSVSPTHYNVIYDNSGLKPDHIQRLTYKLCHIYYNWPGVIRVPAPCQYAHKLAFLVGQSIHREPNLSLSNRLYYL

SEQ ID NO: 272624 - DNA, 2586 bp, Artificial Sequence
  derived and/or modified sequence
atgactggccgagccagagcccgtgcacgaggccgggcaagagggcaggagaccgcgcagctggtcgggtccacagcctctcagcagccaggctacatccaacctcgaccacagcctccccctgcagagggcgagttatttggaagaggtcggcagagggggactgccgggggcacagccaagagtcagggcctgcagatttcggctggttttcaggagctgtcactggccgagcgcggaggcaggagacgggatttccacgacctaggggtgaacacacgacaaaacctcgatcatgttaaggagagtaaaactgggtcctctggtattatcgtgcggctctccacgaaccacttccgactgacatcccgtccgcagtgggctctatatcagtatcacatcgactacaaccccctgatggaggcccggcggctgcggtcggccctgctgtttcagcatgaggacctgattgggaaatgccatgcgtttgatggcaccattctcttcctccctaaaagactgcaacagaaggtgactgaggtgttcagcaaaacccgaaacggtgaggacgtcagaatcacaatcaccctaactaacgagcttccccccactagcccaacatgcctgcagttttataatataatctttcgcaggctgctcaaaatcatgaatttgcagcagattgggcggaattactacaacccgaacgatcctatcgacatccctagtcatcggctcgtgatctggccaggattcactacttccatattacaatatgagaatagtatcatgctgtgtactgatgtctctcataaagtcttgaggtccgagactgtccttgacttcatgttcaatttctaccaccagacagaggagcacaaatttcaggagcaggtctcaaaagagctgatcggcctggttgtgctgaccaagtataacaacaaaacttatcgagtggacgatattgattgggatcagaatcccaagagcacctttaaaaaggccgacggctccgaagtttcctttctggaatattatcgtaaacagtataaccaagagattacggacttgaagcagcctgtcttggtgtctcagccaaaaagacgcagggggcccggcggaacattacctggaccggctatgcttattcctgaactctgttaccttaccggccttaccgataaaatgaggaatgactttaatgtcatgaaagatcttgccgtgcatacaagactcactcctgagcaaaggcagagggaagtgggccgtctgatcgactatattcataaaaacgacaacgtgcagcgggagctgcgagactggggccttagtttcgacagcaacctgctttctttctctggcaggattttgcagaccgaaaagattcaccaaggcggcaaaacctttgattacaacccacagttcgccgactggtcaaaggagacacgcggggcgcctctgattagcgtaaagcctctggataattggttgcttatttatacccgccggaactacgaagctgccaactccttgatccagaatttgttcaaggttacgcctgctatgggaatgcaaatgcgcaaggcgatcatgatcgaggtggacgaccggacagaggcttatctgcgggtccttcagcaaaaggtgaccgccgatacccagattgtcgtgtgcttgctttccagcaatcgcaaagacaagtacgatgcgattaaaaaatacctttgcactgactgtcccactccgagtcagtgcgtagttgctcgtaccctgggaaagcagcagacggttatggcaattgcaacaaagatcgctctgcagatgaattgcaaaatgggaggcgagctatggagagtggacatacccttgaagctggtgatgattgtggggatcgattgctaccacgacatgacagctggcaggcgttccattgcagggtttgtggctagcattaacgagggaatgactcggtggttcagtaggtgtatcttccaggacaggggccaggaattagtcgacggtctgaaagtctgcctgcaggctgctctgcgagcttggaactcctgtaacgagtacatgccttccagaattattgtttatcgggacggtgttggagatgggcagctgaagacgctcgtaaattacgaggtgcctcagtttctggattgccttaagtccatcggtcgagggtataatccaaggcttacggtgatcgtagtgaagaaacgggtgaatacaagatttttcgctcagtcaggaggccgactgcagaaccctctgcctggaacagtcattgatgtcgaggtgactagaccagaatggtacgactttttcatcgtctcacaggctgtgagaagtgggtcggtaagccccacacactacaatgtgatctacgacaactcggggctgaagcccgaccacatacagcgcttaacctacaaattgtgtcatatttactataactggcccggagtcatcagagtgcctgccccgtgccagtacgctcacaagttggcatttctcgtaggacagtccatccatagagagccaaacttgtccctgagtaatcggctgtactatctgtag

SEQ ID NO: 272625 - DNA, 2586 bp, Artificial Sequence
  derived and/or modified sequence
atgacaggccgggcccgggcccgggcccggggccgggcccggggccaggagacagcccagctggtgggcagcacagccagccagcagcccggctacatccagccccggccccagcccccacctgctgagggggagctgtttggccggggccggcagaggggcacagctgggggcacagccaagagccagggcctgcagatctctgctggcttccaggagctgagcctggccgagcggggcggcagaagaagagacttccatgacctgggcgtgaacacccggcagaacctggaccacgtgaaggagagcaagacaggcagcagcggcatcatcgtgcggctgagcaccaaccacttccggctgaccagccggccccagtgggccctgtaccagtaccacatcgactacaaccccctgatggaggcccggcggctgcggagcgccctgctcttccagcacgaggacctgattggaaaatgtcatgcctttgatggcaccatcctcttcctgcccaagaggctgcagcagaaggtgacagaggtgttcagcaagaccagaaatggagaagatgtgcgcatcaccatcaccctgaccaatgagctgccccccaccagccccacctgcctgcagttctacaacatcatcttccggcggctgctgaagatcatgaacctgcagcagatcggcaggaactactacaaccccaatgaccccatcgacatccccagccaccggctggtgatctggccaggcttcaccaccagcatcctgcagtatgagaacagcatcatgctgtgcacagatgtgagccacaaggtgctgcggtctgagaccgtgctggacttcatgttcaacttctaccaccagacagaggagcacaagttccaggagcaggtgtccaaggagctgattggcctggtggtgctgaccaagtacaacaacaagacctacagagtggatgacatcgactgggaccagaaccccaagagcaccttcaagaaggcagatggcagcgaggtgtccttcctggagtactacaggaagcagtacaaccaggagatcacagacctgaagcagcctgtgctggtgtcccagcccaagagaagaagaggccctgggggcaccctgcccggccctgccatgctgatccctgagctgtgctacctgaccggcctgacagacaagatgagaaatgacttcaacgtgatgaaggacctggccgtgcacacccggctgaccccagagcagaggcagcgggaggtgggccgcctgattgactacatccacaagaatgacaacgtgcagcgggagctgcgggactggggcctgagctttgacagcaacctgctgtccttcagcggccgcatcctgcagacagagaagatccaccagggcggcaagacctttgactacaacccccagtttgctgactggagcaaggagaccaggggggcccccctcatctctgtgaagcccctggacaactggctgctgatctacaccaggagaaattatgaagctgccaacagcctcatccagaacctcttcaaggtgaccccagccatgggcatgcagatgaggaaggccatcatgattgaggtggatgacagaacagaggcctacctgcgggtgctgcagcagaaggtgacagctgacacccagatcgtggtgtgcctgctgagcagcaacaggaaggacaagtatgatgccatcaagaagtacctgtgcacagactgccccacccccagccagtgtgtggtggcccggaccctgggcaagcagcagacagtgatggccatcgccaccaagatcgccctgcagatgaactgcaagatgggcggggagctgtggagggtggacatccccctgaagctggtgatgattgtgggcatcgactgctaccatgacatgacagctggaagaagaagcattgctggctttgtggccagcatcaatgaaggcatgacccgctggttcagccgctgcatcttccaggaccggggccaggagctggtggatggcctgaaggtgtgcctgcaggccgccctgcgggcctggaacagctgcaatgagtacatgcccagccgcatcatcgtgtacagagatggagtgggagatggccagctgaagaccctggtgaactatgaggtgccccagttcctggactgcctgaagagcatcggccggggctacaacccccggctgaccgtcatcgtggtgaagaagagggtgaacacccgcttctttgcccagagcggcggccgcctgcagaaccccctgcccggcaccgtgattgatgtggaggtgaccaggcctgagtggtatgacttcttcatcgtgtcccaggccgtgcgcagcggctctgtgagccccacccactacaacgtcatctatgacaacagcggcctgaagccagaccacatccagaggctgacctacaagctgtgccacatctactacaactggccaggagtcatccgggtgcctgccccctgccagtatgcccacaagctggccttcctggtgggccagagcatccaccgggagcccaacctgagcctgagcaaccggctgtactacctgtag

SEQ ID NO: 272626 - DNA, 2586 bp, Artificial Sequence
  derived and/or modified sequence
atgaccggccgggcccgggcccgggcccggggccgggcccggggccaggaaaccgcacagcttgtaggcagtacagcatctcaacagccaggctacatccagccgagaccacagccaccccccgcggagggtgagctctttggtcggggcaggcaacgtggcactgcaggaggaaccgccaaatctcagggactgcagataagcgctggttttcaggagctatctctagcagagcggggtgggagacggagagattttcacgacctgggggttaataccaggcaaaacctggaccacgtgaaagaatccaagaccggaagttctggcataatcgttcgcttgtctacaaatcactttagactgacctcgaggccccagtgggccctgtatcagtatcatattgattataatcccctgatggaggcacggcgactgcgaagcgccctgctgttccagcatgaggacctcattggcaaatgtcacgcttttgatggcactattctgttcttgcctaaaagactgcaacagaaggtcaccgaggtcttttccaagacccggaatggcgaagacgtgcgtatcaccattacactcactaatgaactgccgcccaccagcccgacttgcttgcagttctataatatcatcttccgcagactgctcaagattatgaacctacagcaaattggtcgcaattattacaaccctaatgaccctattgacataccatctcaccggttagtgatttggcccggcttcaccacaagcatcctacagtacgagaactccataatgctctgcactgacgtgagtcacaaggtgcttagatccgagaccgtgttagatttcatgtttaacttctaccatcaaaccgaggagcacaaattccaggagcaagtgagcaaggaacttattggccttgtcgttctgacaaagtacaacaataaaacttatagggtcgacgacatcgattgggatcagaaccctaagtctacattcaagaaagctgatggaagcgaggtaagttttctcgagtattaccggaagcagtacaatcaagaaatcaccgatctcaagcagcccgtgctggtgtcacaacccaagaggagaaggggccctggcggcaccctccccggacctgcaatgttaattcccgagctttgttacttgactggtctaacagataaaatgagaaacgatttcaatgttatgaaggatctggcagtgcatactaggctgaccccagagcagaggcagagggaagtgggccggctgatcgattacatccacaagaatgacaacgtgcagagagaactcagggattgggggctcagtttcgattccaacctgttatcattctctggaaggatcctgcagaccgaaaagatccaccagggaggaaagacgttcgactacaacccgcagttcgcagactggtccaaggagactaggggcgcccctctaatttctgtgaaacctctcgacaattggttgttgatctacacccggcggaactacgaggccgctaattccctgatccagaacctgtttaaagtaactcctgcgatggggatgcagatgcgaaaagcaattatgatcgaggtggacgaccggaccgaggcctacctgagggtcttacaacaaaaagttacggcggacacacagatagtggtgtgtctactctcttcaaacagaaaggacaagtacgacgctatcaagaaatacttgtgcacggactgtccaacacccagtcagtgcgttgtagcacggactctcggaaaacagcagaccgtcatggctatagcgaccaaaattgccctgcaaatgaactgcaaaatggggggagagttgtggcgtgtggatatccctctgaaactggttatgatagtgggaatcgactgttaccacgacatgactgcaggacggcgatccatcgcaggtttcgttgcttcaatcaatgaggggatgacccgttggtttagccggtgcatatttcaagaccggggccaggagttagtagatggactgaaggtttgcctgcaggcggcactccgggcctggaatagttgtaatgaatacatgccttcccgaattatcgtgtaccgggacggagtaggggacggccagttgaaaacactggtaaactatgaggtaccccagtttctcgattgtctcaagtcaatcgggcgaggatataatcctcgcttgaccgtgatagtggtgaagaaacgggtgaatacccgtttctttgctcaaagcggcggccgcttgcaaaacccactcccaggcaccgtcatcgatgtggaggtgaccaggcccgagtggtacgatttttttatagtgtctcaggcagttaggtccgggtctgtgagccctactcattataacgtcatctacgacaactctggcttgaaaccggaccacattcagcgattaacctataagctgtgtcacatatattacaactggcctggagtgattagagtacctgcaccatgtcagtatgctcacaaactcgcctttttggtagggcaaagtattcatcgcgaacccaacctgtcattaagtaataggttgtactacctgtag

SEQ ID NO: 272627 - DNA, 3897 bp, Artificial Sequence
  derived and/or modified sequence
gttactgggcgtatggcgtacagacacgaggccggcgcccgggaggcggtgttcatccgcccgggaaaagagcgcctgttgctcgctgcccgcgtgtccctggctctctcgggaacccagcgccgaaggcgaggtgggcgcgggccgaaggaggtcctgggaggtcggcggcgcggagggatctccgcgggagccgttggggctgttggcctcgggctgaggtgcaaggaccaggactagggcgagggcagcggtccaagaaatagaaaacaatgactgggagagcccgagccagagccagaggaagggcccgcggtcaggagacagcgcagctggtgggctccactgccagtcagcaacctggttatattcagcctaggcctcagccgccaccagcagagggggaattatttggccgtggacggcagagaggaacagcaggaggaacagccaagtcacaaggactccagatatctgctggatttcaggagttatcgttagcagagagaggaggtcgtcgtagagattttcatgatcttggtgtgaatacaaggcagaacctagaccatgttaaagaatcaaaaacaggttcttcaggcattatagtaaggttaagcactaaccatttccggctgacatcccgtccccagtgggccttatatcagtatcacattgactataacccactgatggaagccagaagactccgttcagctcttctttttcaacacgaagatctaattggaaagtgtcatgcttttgatggaacgatattatttttacctaaaagactacagcaaaaggttactgaagtttttagtaagacccggaatggagaggatgtgaggataacgatcactttaacaaatgaacttccacctacatcaccaacttgtttgcagttctataatattattttcaggaggcttttgaaaatcatgaatttgcaacaaattggacgaaattattataacccaaatgacccaattgatattccaagtcacaggttggtgatttggcctggcttcactacttccatccttcagtatgaaaacagcatcatgctctgcactgacgttagccataaagtccttcgaagtgagactgttttggatttcatgttcaacttttatcatcagacagaagaacataaatttcaagaacaagtttccaaagaactaataggtttagttgttcttaccaagtataacaataagacatacagagtggatgatattgactgggaccagaatcccaagagcacctttaagaaagccgacggctctgaagtcagcttcttagaatactacaggaagcaatacaaccaagagatcaccgacttgaagcagcctgtcttggtcagccagcccaagagaaggcggggccctggggggacactgccagggcctgccatgctcattcctgagctctgctatcttacaggtctaactgataaaatgcgtaatgattttaacgtgatgaaagacttagccgttcatacaagactaactccagagcaaaggcagcgtgaagtgggacgactcattgattacattcataaaaacgataatgttcaaagggagcttcgagactggggtttgagctttgattccaacttactgtccttctcaggaagaattttgcaaacagaaaagattcaccaaggtggaaaaacatttgattacaatccacaatttgcagattggtccaaagaaacaagaggtgcaccattaattagtgttaagccactagataactggctgttgatctatacgcgaagaaattatgaagcagccaattcattgatacaaaatctatttaaagttacaccagccatgggcatgcaaatgagaaaagcaataatgattgaagtggatgacagaactgaagcctacttaagagtcttacagcaaaaggtcacagcagacacccagatagttgtctgtctgttgtcaagtaatcggaaggacaaatacgatgctattaaaaaatacctgtgtacagattgccctaccccaagtcagtgtgtggtggcccgaaccttaggcaaacagcaaactgtcatggccattgctacaaagattgccctacagatgaactgcaagatgggaggagagctctggagggtggacatccccctgaagctcgtgatgatcgttggcatcgattgttaccatgacatgacagctgggcggaggtcaatcgcaggatttgttgccagcatcaatgaagggatgacccgctggttctcacgctgcatatttcaggatagaggacaggagctggtagatgggctcaaagtctgcctgcaagcggctctgagggcttggaatagctgcaatgagtacatgcccagccggatcatcgtgtaccgcgatggcgtaggagacggccagctgaaaacactggtgaactacgaagtgccacagtttttggattgtctaaaatccattggtagaggttacaaccctagactaacggtaattgtggtgaagaaaagagtgaacaccagattttttgctcagtctggaggaagacttcagaatccacttcctggaacagttattgatgtagaggttaccagaccagaatggtatgacttttttatcgtgagccaggctgtgagaagtggtagtgtttctcccacacattacaatgtcatctatgacaacagcggcctgaagccagaccacatacagcgcttgacctacaagctgtgccacatctattacaactggccaggtgtcattcgtgttcctgctccttgccagtacgcccacaagctggcttttcttgttggccagagtattcacagagagccaaatctgtcactgtcaaaccgcctttactacctctaacctgcagaagacgatgcagccgcttttctttttgaaatgactttgggatttttttaagcttttatttactttttttttaactgttatctttctggatgaaacttgggaaggggattaggagatctagcattttatttctagcattgctattcaccggcttccttattttatacgtaaaaattaagattttatattttatcttcttgtttctcatagatattttgtgagcatttttttgtttattttgaagaaatgtggataagatacttggtagtataaaacagactctctgagagtatttgaaatgtgtttggagatttacttaaacgtactttcaggagtgagcaagtcctacttataaacctatattaactttatttttgagatacctgttttgaatttaaaggagataagaggcgtaaagtaggatgctcactacaaccataggtggggtttcagctcatatcttaaagataaaaggtactattatataacctatacacaagatacaggagaaaatatgcttgatttttatttggcaggggggctaggttgtatgggagtaaaaaaaacattgaaaatttttaaattgtccaaagaaacattttaagactctttaacaaaaaaggccatgagtaaatctctatattaacattactatttattttgttttggaactgggacatgattctatttgttataaaataaaattgatgtgattgtcaccttatttgaataactgtaattcttgttttactgaaagtatgtgcgttttcttttcatttaatttttaaaagtgcatacaattccattcataaaagctaaattagcctgaccaacatggtgaaaccccatctctactaaaaatacaaaattagccagatgtggtgccaggaggctgaggcaggagaatcacttgaacctgagaggcggaggttgcagtgagcagagatcacgccactgcactccagcctgggcaacagagtgagactccgtctcaaaaaaaaaaaaaaaaaaaaaaaaaaaaaaaaaaaaaaaa

SEQ ID NO: 272628 - DNA, 2586 bp, Artificial Sequence
  derived and/or modified sequence
atgacaggccgtgctcgagcacgtgctcgaggtagagccaggggacaagagacagcacagcttgtgggctcgaccgccagccagcagccgggatacatacaaccgcgaccccagccgccacccgcagagggggaattattcggtagggggagacagagaggcaccgccggaggaactgcaaaatctcagggtctgcagattagcgctggcttccaggagctttcactcgctgagcggggtggaagaagacgcgattttcacgatctgggggtgaataccaggcagaacttagaccatgtgaaggaatccaaaaccggaagtagtggtataattgtcaggctgagcactaaccatttcagactcacgtcgcgtccccaatgggccttgtatcagtatcacatcgattataaccctctcatggaagctaggcggttgcgatcagccctgctgttccaacatgaggacctgattggtaagtgccatgccttcgatgggaccatcctgttcttgccaaagcgcctccagcagaaagttactgaggtgttctcaaaaacgcggaacggagaggatgtgagaataactattaccctgaccaacgaactccctccgacatcaccaacctgcctgcagttttacaatattatttttagaagattactgaagattatgaacttacagcagattgggaggaattactataaccctaacgacccaattgatatcccgtctcaccggttagtgatctggcccggatttacaaccagtattctccaatacgagaatagtattatgctgtgcactgacgtcagccacaaggtgctccgcagcgaaaccgttctcgactttatgtttaatttctatcaccagaccgaagaacacaagttccaagaacaggtgtctaaagagctgattggtcttgtagtgttaactaagtacaataacaagacttatcgagtcgacgatattgactgggaccagaatccaaagagtacgtttaaaaaagcagacggaagtgaagtgtccttccttgagtattacaggaagcaatacaaccaggagataaccgacctcaaacagcctgtgctggtcagtcagcccaaaaggcgtcgcggtccaggagggactctgccaggcccagctatgctgattcccgaattatgctatcttaccggattgaccgacaaaatgcgcaacgacttcaacgtcatgaaagatctggccgttcatacgcgactcacccctgaacagcgccagcgtgaggttgggagactgatcgactacattcacaagaacgacaacgtgcagagagaactgcgcgattgggggctcagcttcgatagtaatttgctgtctttttcgggcagaatcctccagaccgaaaagatccaccagggcggtaagactttcgactataaccctcaatttgctgattggtctaaagaaacgcgcggtgccccactgatatccgtcaaaccacttgacaattggctgctcatctacacccgaaggaactacgaagctgccaattctctcatccaaaaccttttcaaggtcactcccgctatggggatgcagatgcggaaagccattatgatcgaggtggacgacaggacagaggcatatctcagagtgttgcagcagaaagtgactgcggacacacagattgtggtgtgtttgctgtcttctaatagaaaagacaagtatgacgccataaaaaaatatctctgtaccgactgtcctactcccagccagtgtgtggtcgcaagaactctcggcaagcaacagaccgtgatggctattgccaccaagatcgcactacagatgaactgcaaaatgggcggagagttatggcgcgtggatattcctcttaaactcgtgatgatcgttggaattgattgctaccatgatatgactgccggacgcagatcaatagccggatttgttgcgtcgatcaatgagggcatgacccgatggttcagccgctgcatttttcaggaccggggacaggagctggtggacggactgaaggtttgcctgcaggctgcgctgcgggcatggaattcttgtaacgaatacatgcccagccggatcattgtctaccgcgacggggtcggcgacgggcagctcaagactctggttaattacgaagtacctcagtttctagattgcctgaaatccatcggtcgcggatataaccctcgcctgacagtgatcgtcgtaaagaagcgcgtgaacacgcgcttcttcgcccagtccgggggtaggcttcaaaacccacttcccggaactgtgatcgatgttgaagtgacacgcccagaatggtacgacttctttatagtcagccaggctgtgcggtcaggaagtgtaagtcctactcattacaatgtcatctacgacaactcaggcctgaaacctgatcatatccaacggttaacatataaattgtgccatatctattataattggcccggtgttattcgcgtccctgccccatgccagtacgcccacaaattggcttttctcgttggtcagtccatccaccgggagcccaacctatctctgagcaataggctctactacctgtag

SEQ ID NO: 272629 - DNA, 2586 bp, Artificial Sequence
  derived and/or modified sequence
atgaccggcagagccagagccagagccagaggcagagccagaggccaggagaccgcccagctggtgggcagcaccgccagccagcagcccggctacatccagcccagaccccagcccccccccgccgagggcgagctgttcggcagaggcagacagagaggcaccgccggcggcaccgccaagagccagggcctgcagatcagcgccggcttccaggagctgagcctggccgagagaggcggcagaagaagagacttccacgacctgggcgtgaacaccagacagaacctggaccacgtgaaggagagcaagaccggcagcagcggcatcatcgtgagactgagcaccaaccacttcagactgaccagcagaccccagtgggccctgtaccagtaccacatcgactacaaccccctgatggaggccagaagactgagaagcgccctgctgttccagcacgaggacctgatcggcaagtgccacgccttcgacggcaccatcctgttcctgcccaagagactgcagcagaaggtgaccgaggtgttcagcaagaccagaaacggcgaggacgtgagaatcaccatcaccctgaccaacgagctgccccccaccagccccacctgcctgcagttctacaacatcatcttcagaagactgctgaagatcatgaacctgcagcagatcggcagaaactactacaaccccaacgaccccatcgacatccccagccacagactggtgatctggcccggcttcaccaccagcatcctgcagtacgagaacagcatcatgctgtgcaccgacgtgagccacaaggtgctgagaagcgagaccgtgctggacttcatgttcaacttctaccaccagaccgaggagcacaagttccaggagcaggtgagcaaggagctgatcggcctggtggtgctgaccaagtacaacaacaagacctacagagtggacgacatcgactgggaccagaaccccaagagcaccttcaagaaggccgacggcagcgaggtgagcttcctggagtactacagaaagcagtacaaccaggagatcaccgacctgaagcagcccgtgctggtgagccagcccaagagaagaagaggccccggcggcaccctgcccggccccgccatgctgatccccgagctgtgctacctgaccggcctgaccgacaagatgagaaacgacttcaacgtgatgaaggacctggccgtgcacaccagactgacccccgagcagagacagagagaggtgggcagactgatcgactacatccacaagaacgacaacgtgcagagagagctgagagactggggcctgagcttcgacagcaacctgctgagcttcagcggcagaatcctgcagaccgagaagatccaccagggcggcaagaccttcgactacaacccccagttcgccgactggagcaaggagaccagaggcgcccccctgatcagcgtgaagcccctggacaactggctgctgatctacaccagaagaaactacgaggccgccaacagcctgatccagaacctgttcaaggtgacccccgccatgggcatgcagatgagaaaggccatcatgatcgaggtggacgacagaaccgaggcctacctgagagtgctgcagcagaaggtgaccgccgacacccagatcgtggtgtgcctgctgagcagcaacagaaaggacaagtacgacgccatcaagaagtacctgtgcaccgactgccccacccccagccagtgcgtggtggccagaaccctgggcaagcagcagaccgtgatggccatcgccaccaagatcgccctgcagatgaactgcaagatgggcggcgagctgtggagagtggacatccccctgaagctggtgatgatcgtgggcatcgactgctaccacgacatgaccgccggcagaagaagcatcgccggcttcgtggccagcatcaacgagggcatgaccagatggttcagcagatgcatcttccaggacagaggccaggagctggtggacggcctgaaggtgtgcctgcaggccgccctgagagcctggaacagctgcaacgagtacatgcccagcagaatcatcgtgtacagagacggcgtgggcgacggccagctgaagaccctggtgaactacgaggtgccccagttcctggactgcctgaagagcatcggcagaggctacaaccccagactgaccgtgatcgtggtgaagaagagagtgaacaccagattcttcgcccagagcggcggcagactgcagaaccccctgcccggcaccgtgatcgacgtggaggtgaccagacccgagtggtacgacttcttcatcgtgagccaggccgtgagaagcggcagcgtgagccccacccactacaacgtgatctacgacaacagcggcctgaagcccgaccacatccagagactgacctacaagctgtgccacatctactacaactggcccggcgtgatcagagtgcccgccccctgccagtacgcccacaagctggccttcctggtgggccagagcatccacagagagcccaacctgagcctgagcaacagactgtactacctgtag

SEQ ID NO: 272630 - protein, 812 aa, Artificial Sequence
  derived and/or modified sequence
MGRKLDPTKEKRGPGRKARKQKGAETELVRFLPAVSDENSKRLSSRARKRAAKRRLGSVEAPKTNKSPEAKPLPGKLPKGISAGAVQTAGKKGPQSLFNAPRGKKRPAPGSDEEEEEEDSEEDGMVNHGDLWGSEDDADTVDDYGADSNSEDEEEGEALLPIERAARKQKAREAAAGIQWSEEETEDEEEEKEVTPESGPPKVEEADGGLQINVDEEPFVLPPAGEMEQDAQAPDLQRVHKRIQDIVGILRDFGAQREEGRSRSEYLNRLKKDLAIYYSYGDFLLGKLMDLFPLSELVEFLEANEVPRPVTLRTNTLKTRRRDLAQALINRGVNLDPLGKWSKTGLVVYDSSVPIGATPEYLAGHYMLQGASSMLPVMALAPQEHERILDMCCAPGGKTSYMAQLMKNTGVILANDANAERLKSVVGNLHRLGVTNTIISHYDGRQFPKVVGGFDRVLLDAPCSGTGVISKDPAVKTNKDEKDILRCAHLQKELLLSAIDSVNATSKTGGYLVYCTCSITVEENEWVVDYALKKRNVRLVPTGLDFGQEGFTRFRERRFHPSLRSTRRFYPHTHNMDGFFIAKFKKFSNSIPQSQTGNSETATPTNVDLPQVIPKSENSSQPAKKAKGAAKTKQQLQKQQHPKKASFQKLNGISKGADSELSTVPSVTKTQASSSFQDSSQPAGKAEGIREPKVTGKLKQRSPKLQSSKKVAFLRQNAPPKGTDTQTPAVLSPSKTQATLKPKDHHQPLGRAKGVEKQQLPEQPFEKAAFQKQNDTPKGPQPPTVSPIRSSRPPPAKRKKSQSRGNSQLLLS

SEQ ID NO: 272631 - DNA, 2439 bp, Artificial Sequence
  derived and/or modified sequence
atgggcagaaagcttgacccaaccaaggagaagagggggccgggacggaaggcacgcaaacagaaaggggccgaaaccgagctggtgaggtttctccccgccgtctcagatgaaaactcaaagcgcctctcgagccgagctcgcaaaagagcagctaaacgacggctgggaagcgtggaagcaccaaaaaccaacaagtctcctgaagccaagccattgcccggaaagctgcccaaaggaatcagcgcgggcgccgtacagactgccgggaagaagggcccccagagcttattcaacgctccacggggtaagaagcgtcctgccccgggaagcgacgaggaggaagaagaggaagactctgaagaagatggaatggtgaatcacggcgacctctggggttccgaagacgacgctgatacggtcgacgattatggcgcagactctaatagcgaggacgaggaggaaggggaagcgctactccccattgagcgtgccgcacggaaacagaaggccagggaggcagccgccggcatccagtggtctgaggaggaaacagaggacgaagaagaggagaaggaagttactccagaatccggaccgcccaaagtggaagaagctgacggcgggctgcaaattaatgtggacgaagaaccctttgtactgcccccagccggcgaaatggaacaagatgcccaggcaccagacctgcaacgggtccataagcgaatccaggacatcgtgggaattctgcgagatttcggggcccagagggaggaagggcgttcccgaagcgaatacttgaacaggctcaaaaaggatctggccatctattactcatatggcgacttcctcctgggcaagttaatggacttgtttcctctgtccgagctggtggagtttctggaagcaaacgaggtcccccgaccagtgactttgcggaccaatacactcaaaacacgaagaagggacttagcccaggcgcttataaatcggggggtaaacttagaccctctcggtaagtggagcaagaccgggctagtggtgtacgattcatccgttcccatcggggctacacccgaatatctcgccggacattatatgctgcagggtgcctcctcaatgttacctgtcatggcccttgcacctcaggagcacgagcgtatcctcgatatgtgctgtgcccctgggggcaagacctcctatatggcgcagttaatgaagaacactggtgtgatcctggctaacgacgccaacgccgaaaggttgaagagcgtggtcggcaatcttcatagacttggtgtgaccaatactatcatatctcattacgatggccgccagttcccaaaggttgtaggagggttcgatagggttctacttgacgctccatgctcagggactggtgtcatctcaaaagacccagccgtcaaaactaataaggatgagaaggacatattgcgctgcgctcatctgcagaaagaactgctcttgagcgccatcgatagcgtcaatgcgaccagcaagacaggtgggtatctggtctactgtacttgctcaatcacagtggaagaaaacgagtgggtagtggattatgccttaaagaagcggaatgtccggttagtcccaacagggttggacttcggacaggagggctttacccggttcagggaacggcggttccaccctagccttcgctctacaaggcgattttatcctcatacccacaacatggatggcttcttcatagcgaaatttaaaaaattctcgaatagcattccacagtctcagaccggtaactccgagactgccacccccacgaacgtggatctcccccaggtaattcccaagagcgagaatagttcccaacccgccaagaaggctaagggagcagccaaaactaagcagcagctccaaaaacaacagcaccccaaaaaggccagcttccagaaactgaatggaatttctaaaggtgccgattccgagctatcgacagtgccttccgtgactaagactcaggcctcgtcttccttccaggacagtagtcagccagccggcaaagccgaggggattagagagccgaaggtgaccggcaagcttaaacagcgatcccctaagctccagagttctaagaaggtcgccttcttacgtcagaacgcaccgccgaaagggaccgacacccaaaccccagcagtccttagtccgtcaaagacccaggctactctgaaaccaaaggaccatcatcagccccttggacgagccaaaggagtggagaagcagcaactgccagagcagccttttgagaaggccgcattccagaaacaaaatgatacaccaaagggcccccagcctccgacagtgtctcctatcaggagctcgagaccccctcccgctaagagaaaaaaatcccagtctcggggcaattctcagctgctcctgtcctag

SEQ ID NO: 272632 - DNA, 2439 bp, Artificial Sequence
  derived and/or modified sequence
atgggaagaaaactcgaccccaccaaggaaaaaaggggcccaggaaggaaagcgagaaaacagaagggagcagaaacggagttggtaaggttcctgccagccgtgtccgatgagaacagtaagcgcctaagctcccgagccaggaaacgtgccgccaaaagaagactgggatctgtggaggctccaaagacgaataagagtccagaagccaagcctctgcctgggaaattgccgaaagggatcagcgccggggccgtccagactgctggcaagaaagggcctcagtctctgttcaacgctcctcggggcaaaaaacggcctgccccagggagcgatgaggaagaagaagaggaagactctgaggaagacggtatggtgaatcacggagacctgtggggatcggaggacgacgccgacaccgtcgatgattacggcgccgactcaaattctgaggatgaagaagagggggaggcccttctccctatcgagagagccgcccggaaacagaaagcccgggaagccgccgcaggaatccagtggagcgaggaggagactgaggatgaggaagaggaaaaggaagtcactcctgagagcggacctccaaaggtagaagaggctgacggcggcctccagatcaatgtggatgaagagccatttgttctgcctcctgctggagagatggaacaggacgcccaggcccccgatttgcagcgggtgcacaaacgaatccaagacatcgtcgggatcttgagagattttggcgcccagagagaagaagggaggtctcgaagcgagtatctgaataggttgaaaaaagaccttgcgatttactactcctacggcgattttcttctgggcaagctgatggatctgttccccctgagtgagttggtggaatttctggaagcgaatgaagtgccacggcccgtcaccctccgaaccaacactttaaagacacggcgtagggatctcgcccaagcactaattaaccgtggcgttaacctcgaccctctgggaaaatggtcgaagaccggcttggttgtgtatgactctagtgtccccattggggcaaccccagagtacttagccggacattatatgctgcagggggctagctctatgctgcctgtgatggcgctggctccgcaggagcacgagcgcatccttgacatgtgctgcgccccagggggcaaaacctcctatatggctcagcttatgaaaaacacaggcgtcattctggctaacgacgccaacgccgagcgactcaagtctgtcgtgggcaacctccaccggctcggcgtcactaacaccattatcagccactatgacggccgacagtttcccaaggtcgttggcgggttcgatcgagttctgcttgatgcaccctgcagtggaacaggtgtcatttccaaggacccggcagtaaaaaccaataaagatgaaaaggatattctgcggtgcgcacacctgcagaaggaacttttgctttcagctattgatagtgtgaatgctactagcaaaaccgggggttacttggtgtactgtacctgttctattaccgtggaagagaacgagtgggtcgttgactatgccctgaaaaaaagaaatgttaggcttgtcccaactgggttggacttcgggcaggaaggctttaccagatttagagaaaggagatttcacccgtctcttaggagtacacgacggttttacccgcacacacataacatggacgggtttttcatcgccaagttcaagaaattctccaatagtattcctcaatctcagaccggcaatagcgagaccgccacacccactaacgtggacctgccacaggtgataccgaagagtgagaattcctctcagccagccaaaaaggctaaaggcgcggccaagactaagcagcagctgcagaaacagcagcatccgaagaaggcatcgttccagaaattaaatggtatttccaagggggcagacagtgaacttagcactgtgccctcagtcacaaagactcaggcttccagcagtttccaggatagcagccagcctgcagggaaagcagaggggatcagagaacccaaagtcaccgggaaacttaagcagagatccccaaagctccagtctagtaagaaggtcgctttcctgaggcagaatgcaccccccaagggaactgacacgcagacaccagccgtgctgagcccttcaaaaacacaggctactctgaaacctaaagaccatcaccaacccctgggccgcgccaagggcgtagagaagcagcagctgcccgaacagcctttcgaaaaggccgccttccagaagcagaatgatacacccaaaggcccccagcccccgacagtctcaccaattcgatcgagcaggcctccacccgcaaagaggaaaaaatctcagtccagggggaatagccagctcctgctgagctag

SEQ ID NO: 272633 - DNA, 2683 bp, Artificial Sequence
  derived and/or modified sequence
agcgctacccgtgcgcctgcgtggaacgattctgtggcgagtgccggccgaaagctaggtccggattgcacgtggagggccgcccgaagggcactctcggacattaacccgcattctgtaccatggggcgcaagttggaccctacgaaggagaagcgggggccaggccgaaaggcccggaagcagaagggtgccgagacagaactcgtcagattcttgcctgcagtaagtgacgaaaattccaagaggctgtctagtcgtgctcgaaagagggcagccaagaggagattgggctctgttgaagcccctaagacaaataagtctcctgaggccaaaccattgcctggaaagctaccaaaagggatctctgcaggagctgtccagacagctggtaagaagggaccccagtccctatttaatgctcctcgaggcaagaagcgcccagcacctggcagtgatgaggaagaggaggaggaagactctgaagaagatggtatggtgaaccacggggacctctggggctccgaggacgatgctgatacggtagatgactatggagctgactccaactctgaggatgaggaggaaggtgaagcgttgctgcccattgaaagagctgctcggaagcagaaggcccgggaagctgctgctgggatccagtggagtgaagaggagaccgaggacgaggaggaagagaaagaagtgacccctgagtcaggccccccaaaggtggaagaggcagatgggggcctgcagatcaatgtggatgaggaaccatttgtgctgccccctgctggggagatggagcaggatgcccaggctccagacctgcaacgagttcacaagcggatccaggatattgtgggaattctgcgtgattttggggctcagcgggaggaagggcggtctcgttctgaatacctgaaccggctcaagaaggatctggccatttactactcctatggagacttcctgcttggcaagctcatggacctcttccctctgtctgagctggtggagttcttagaagctaatgaggtgcctcggcccgtcaccctccggaccaataccttgaaaacccgacgccgagaccttgcacaggctctaatcaatcgtggggttaacctggatcccctgggcaagtggtcaaagactggactagtggtgtatgattcttctgtgcccattggtgctacccccgagtacctggctgggcactacatgctgcagggagcctccagcatgttgcccgtcatggccttggcaccccaggaacatgagcggatcctggacatgtgttgtgcccctggaggaaagaccagctacatggcccagctgatgaagaacacgggtgtgatccttgccaatgacgccaatgctgagcggctcaagagtgttgtgggcaacttgcatcggctgggagtcaccaacaccattatcagccactatgatgggcgccagttccccaaggtggtggggggctttgaccgagtactgctggatgctccctgcagtggcactggggtcatctccaaggatccagccgtgaagactaacaaggatgagaaggacatcctgcgctgtgctcacctccagaaggagttgctcctgagtgctattgactctgtcaatgcgacctccaagacaggaggctacctggtttactgcacctgttctatcacagtagaagagaatgagtgggtggtagactatgctctgaaaaagaggaatgtgcgactggtgcccacgggcctagactttggccaggaaggttttacccgctttcgagaaaggcgcttccaccccagtctgcgttctacccgacgcttctaccctcatacccacaatatggatgggttcttcattgccaagttcaagaaattttccaattctatccctcagtcccagacaggaaattctgaaacagccacacctacaaatgtagacttgcctcaggtcatccccaagtctgagaacagcagccagccagccaagaaagccaagggggctgcaaagacaaagcagcagctgcagaaacagcaacatcccaagaaggcctccttccagaagctgaatggcatctccaaaggggcagactcagaattgtccactgtaccttctgtcacaaagacccaagcttcctccagcttccaggatagcagtcagccagctggaaaagccgaagggatcagggagccaaaggtgactgggaagctaaagcaacgatcacctaaattacagtcctccaagaaagttgctttcctcaggcagaatgcccctcccaagggcacagacacacaaacaccggctgtgttatccccatccaagactcaggccaccctgaaacctaaggaccatcatcagccccttggaagggccaagggggttgagaagcagcagttgccagagcagccttttgagaaagctgccttccagaaacagaatgatacccccaaggggcctcagcctcccactgtgtctcccatccgttccagccgccccccaccagcaaagaggaagaaatctcagtccaggggcaacagccagctgctgctatcttagatggttgaaaactagacgggtggctcactgccattgtcaccaggttggaactcttgcctctgtgaggatgccttctctactgtgcatacccatgaaatttaatacacattttaaaacctctg

SEQ ID NO: 272634 - DNA, 2613 bp, Artificial Sequence
  derived and/or modified sequence
cacgcgcgacgccaccttctcccatttctgcctgccacagtaccatggggcgcaagttggaccctacgaaggagaagcgggggccaggccgaaaggcccggaagcagaagggtgccgagacagaactcgtcagattcttgcctgcagtaagtgacgaaaattccaagaggctgtctagtcgtgctcgaaagagggcagccaagaggagattgggctctgttgaagcccctaagacaaataagtctcctgaggccaaaccattgcctggaaagctaccaaaagggatctctgcaggagctgtccagacagctggtaagaagggaccccagtccctatttaatgctcctcgaggcaagaagcgcccagcacctggcagtgatgaggaagaggaggaggaagactctgaagaagatggtatggtgaaccacggggacctctggggctccgaggacgatgctgatacggtagatgactatggagctgactccaactctgaggatgaggaggaaggtgaagcgttgctgcccattgaaagagctgctcggaagcagaaggcccgggaagctgctgctgggatccagtggagtgaagaggagaccgaggacgaggaggaagagaaagaagtgacccctgagtcaggccccccaaaggtggaagaggcagatgggggcctgcagatcaatgtggatgaggaaccatttgtgctgccccctgctggggagatggagcaggatgcccaggctccagacctgcaacgagttcacaagcggatccaggatattgtgggaattctgcgtgattttggggctcagcgggaggaagggcggtctcgttctgaatacctgaaccggctcaagaaggatctggccatttactactcctatggagacttcctgcttggcaagctcatggacctcttccctctgtctgagctggtggagttcttagaagctaatgaggtgcctcggcccgtcaccctccggaccaataccttgaaaacccgacgccgagaccttgcacaggctctaatcaatcgtggggttaacctggatcccctgggcaagtggtcaaagactggactagtggtgtatgattcttctgtgcccattggtgctacccccgagtacctggctgggcactacatgctgcagggagcctccagcatgttgcccgtcatggccttggcaccccaggaacatgagcggatcctggacatgtgttgtgcccctggaggaaagaccagctacatggcccagctgatgaagaacacgggtgtgatccttgccaatgacgccaatgctgagcggctcaagagtgttgtgggcaacttgcatcggctgggagtcaccaacaccattatcagccactatgatgggcgccagttccccaaggtggtggggggctttgaccgagtactgctggatgctccctgcagtggcactggggtcatctccaaggatccagccgtgaagactaacaaggatgagaaggacatcctgcgctgtgctcacctccagaaggagttgctcctgagtgctattgactctgtcaatgcgacctccaagacaggaggctacctggtttactgcacctgttctatcacagtagaagagaatgagtgggtggtagactatgctctgaaaaagaggaatgtgcgactggtgcccacgggcctagactttggccaggaaggttttacccgctttcgagaaaggcgcttccaccccagtctgcgttctacccgacgcttctaccctcatacccacaatatggatgggttcttcattgccaagttcaagaaattttccaattctatccctcagtcccagacaggaaattctgaaacagccacacctacaaatgtagacttgcctcaggtcatccccaagtctgagaacagcagccagccagccaagaaagccaagggggctgcaaagacaaagcagcagctgcagaaacagcaacatcccaagaaggcctccttccagaagctgaatggcatctccaaaggggcagactcagaattgtccactgtaccttctgtcacaaagacccaagcttcctccagcttccaggatagcagtcagccagctggaaaagccgaagggatcagggagccaaaggtgactgggaagctaaagcaacgatcacctaaattacagtcctccaagaaagttgctttcctcaggcagaatgcccctcccaagggcacagacacacaaacaccggctgtgttatccccatccaagactcaggccaccctgaaacctaaggaccatcatcagccccttggaagggccaagggggttgagaagcagcagttgccagagcagccttttgagaaagctgccttccagaaacagaatgatacccccaaggggcctcagcctcccactgtgtctcccatccgttccagccgccccccaccagcaaagaggaagaaatctcagtccaggggcaacagccagctgctgctatcttagatggttgaaaactagacgggtggctcactgccattgtcaccaggttggaactcttgcctctgtgaggatgccttctctactgtgcatacccatgaaatttaatacacattttaaaacctctggccactga

SEQ ID NO: 272635 - DNA, 2439 bp, Artificial Sequence
  derived and/or modified sequence
atgggcaggaagctggaccccaccaaggagaagaggggccctggcaggaaggccaggaagcagaagggagctgagacagagctggtgcgcttcctgcctgctgtgtctgatgagaacagcaagaggctgagcagccgggccaggaagagagctgccaagaggcggctgggctctgtggaggcccccaagaccaacaagagccctgaggccaagcccctgcccgggaagctgcccaagggcatctctgctggagctgtgcagacagctgggaagaagggcccccagagcctcttcaatgccccccggggcaagaagaggcctgcccctggcagtgatgaggaggaggaggaggaggacagcgaggaggatggcatggtgaaccacggggacctgtggggctctgaagatgatgctgacacagtggatgattatggagctgacagcaacagtgaagatgaggaggagggggaggccctgctgcccatcgagagagctgccaggaagcagaaggcccgggaggccgccgccggcatccagtggagcgaggaggagacagaagatgaggaggaggagaaggaggtgaccccagagagcggcccccccaaggtggaggaggctgatggcggcctgcagatcaacgtggatgaggagccctttgtgctgcccccagctggggagatggagcaggatgcccaggccccagacctgcagagggtgcacaagaggatccaggacatcgtgggcatcctgcgggactttggagcccagcgggaggagggccgcagccgctctgagtacctgaaccggctgaagaaggacctggccatctactacagctatggagacttcctgctgggcaagctgatggacctcttccccctgtctgagctggtggagttcctggaggccaatgaggtgcccaggcctgtgaccctgcggaccaacaccctgaagaccaggagaagagacctggcccaggccctgatcaacagaggagtgaacctggaccccctgggcaagtggagcaagacaggcctggtggtgtatgacagctctgtgcccatcggggccaccccagagtacctggccggccactacatgctgcagggcgccagctccatgctgcctgtgatggccctggccccccaggagcacgagcgcatcctggacatgtgctgtgcccctgggggcaagaccagctacatggcccagctgatgaagaacacaggagtcatcctggccaatgatgccaatgctgagcggctgaagtctgtggtgggcaacctgcaccggctgggcgtgaccaacaccatcatcagccactatgatggccggcagttccccaaggtggtgggcggctttgacagagtgctgctggatgccccctgcagcggcaccggggtcatcagcaaggaccctgctgtgaagaccaacaaggatgagaaggacatcctgcgctgtgcccacctgcagaaggagctgctgctgagcgccattgattctgtgaatgccaccagcaagacaggaggctacctggtgtactgcacctgcagcatcaccgtggaggagaatgagtgggtggtggactatgccctgaagaagagaaatgtgcggctggtgcccaccggcctggactttggccaggagggcttcacccgcttccgggagcggcgcttccaccccagcctgcggagcacccggcgcttctacccccacacccacaacatggatggcttcttcatcgccaagttcaagaagttcagcaacagcatcccccagagccagacaggcaacagcgagacagccacccccaccaacgtggacctgccccaggtgatccccaagtctgagaacagcagccagcctgccaagaaggccaagggagctgccaagaccaagcagcagctgcagaagcagcagcaccccaagaaggccagcttccagaagctgaatggcatcagcaaaggagctgacagcgagctgagcacagtgcccagcgtgaccaagacccaggccagcagcagcttccaggacagcagccagcctgctgggaaggccgagggcatccgggagcccaaggtgacaggcaagctgaagcagaggagccccaagctgcagagcagcaagaaggtggccttcctgcggcagaatgccccacccaagggcacagacacccagaccccagctgtgctgagccccagcaagacccaggccaccctgaagcccaaggaccaccaccagcccctgggccgggccaagggcgtggagaagcagcagctgcctgagcagccctttgagaaggccgccttccagaagcagaatgacacccccaagggcccccagccccccaccgtgagccccatccgcagcagcaggcctcctccagccaagaggaagaagagccagagccggggcaacagccagctgctgctgtcctag

SEQ ID NO: 272636 - DNA, 2439 bp, Artificial Sequence
  derived and/or modified sequence
atgggccggaagctggaccccaccaaggagaagcggggccccggccgtaaagcccgcaaacagaagggtgctgaaaccgagctggtgagattcttgccagcagtttctgacgaaaatagtaaaagactgagttcccgggccagaaaacgggcagcaaagaggcgactcggaagtgtggaggcccccaaaacgaataagtctcccgaggcgaaacctctgccagggaaattaccaaagggcattagtgccggagcagtgcagacagccggcaagaagggtcctcagtccttgttcaacgcaccgcgggggaagaagaggccagctcccggatccgacgaagaagaggaggaagaggactccgaggaagatggcatggtcaatcacggggacctgtggggaagcgaagatgacgcagacaccgtcgatgattacggcgccgatagtaatagtgaggatgaggaggagggcgaggccctccttccaatcgagagagccgccagaaagcaaaaggccagagaggcagcagccggaatacagtggagtgaagaggagacggaggacgaggaagaggagaaagaagtgacccctgaaagcggcccacccaaagtcgaagaggctgatgggggtttgcagataaatgtcgacgaagagccattcgtccttccccccgccggagaaatggaacaggatgcacaggcacccgacctgcagcgcgtgcacaaaaggatccaagacattgtcggtatactgagagactttggcgcccagagggaggagggacgctcaaggagtgaatatctgaatcgcttgaagaaagatctggccatttattactcctatggggacttcctgctgggtaaactgatggatctgtttcccctaagcgaattggtggagtttctcgaggcgaatgaggtcccccgccctgtcacgctgcgtactaacactctaaagacacgcaggcgggatctcgcccaggccctgatcaaccgtggggtgaatctagaccccctcgggaagtggtctaagacgggcctcgtggtttacgatagctcggtgccaattggcgctacccctgagtatttggcagggcactatatgcttcagggagccagttccatgctgcctgtaatggcgctggctccccaggagcatgagagaatccttgacatgtgctgtgcccccggtggtaagactagttatatggcacagctgatgaaaaacacaggggtgatattggctaacgacgcaaacgccgagcgtctcaagagcgtagtggggaacctccatcggctgggtgtgacaaatactatcataagtcattatgatggcaggcagttccccaaagtggtgggcggtttcgacagagtactactcgacgctccatgtagcgggacaggggttatctcaaaggatcctgccgttaaaactaacaaagatgaaaaagacatcttaaggtgcgcccatctgcagaaagagcttctcctgagtgccatcgacagcgtgaatgccacctctaagactggcggttacctcgtatattgtacctgctccattacagtggaagaaaacgaatgggtggtagactatgctctcaagaagagaaacgttcgcctggtgccaaccggattagattttgggcaggagggcttcactcggttccgggagaggcgattccacccctcattgcgttccacacgcagattttatccccacacacataatatggacggattcttcatagcaaagtttaagaagttttcgaacagcattccacagtcccagaccggtaattccgagacagcgaccccaaccaacgtagacctcccccaggtgattccaaaatccgagaatagctcccagccagccaaaaaagctaagggtgcagctaagactaagcagcagctccaaaagcagcaacatccaaagaaggcttcctttcagaagttgaatggaatctctaagggcgccgattcagaactgagcacggtgcccagcgtgaccaagacccaagccagcagctcattccaggacagcagccagccagccgggaaggcagaggggatacgggaacccaaagtcacgggaaaactgaagcagcgttcacccaaactgcaatctagcaagaaggtcgccttcctgagacagaatgcccctcctaaagggacagacacccagacaccggctgttctgtctccttccaaaacacaggccaccttaaagcccaaggaccatcaccagccactgggtagagccaagggtgtggagaaacagcagctgccagagcagcccttcgagaaggcagctttccagaaacaaaatgacacgccaaagggcccgcagcctccaactgtgagcccaattagatcctctcgaccccctccagccaagcgtaagaaaagccagagcagaggcaactcccagcttctcctcagttag

SEQ ID NO: 272637 - DNA, 2439 bp, Artificial Sequence
  derived and/or modified sequence
atgggccggaagctggaccccaccaaggagaagcggggccccggcagaaaagcgagaaaacagaagggcgcggagacagagctggtgcgcttcttgcctgctgtcagtgatgaaaacagtaagagactgagcagcagagccagaaaacgcgccgctaagcgcaggctgggctccgtggaagccccaaagaccaacaagtcacccgaggccaagcctctcccaggcaagcttccaaagggcattagtgcgggagcagtacagacggccgggaaaaaaggcccgcagtctctgttcaatgcgccaaggggcaagaagcggcctgccccagggagcgatgaagaggaagaggaagaggactctgaggaggacggaatggtcaatcacggcgatctgtggggaagcgaggacgacgctgacaccgttgatgactatggcgctgactccaacagtgaggacgaagaggagggggaagccctgttgcccatcgagagagcagctcgaaaacagaaggctagagaggctgccgccggaattcagtggtcggaggaagagacggaggacgaggaagaggagaaggaagtgactcccgaatctggccctcctaaagtggaggaggcggacggaggcctacaaataaatgtggatgaagaaccatttgtactcccccctgccggtgaaatggaacaggacgcccaagcccctgacctgcagagggtgcataagcggatccaggatatcgtcggcattcttcgggactttggagcccagagagaggagggacgctcacgctcagagtacttaaataggctgaagaaggacctggctatatactactcttatggagattttctgttaggcaagctgatggacctctttcctctttccgaactcgtggaattccttgaggcaaacgaggtaccacggcccgtgaccctgcgtaccaatacactgaagactagaagaagggatttggctcaagcactcatcaatcgcggcgtgaacctcgaccctttggggaaatggagcaagactggcctggtggtatatgattcatcggtgcccattggagcaacacccgaatacctggccggccattacatgcttcagggagccagctctatgctgcccgtgatggctctcgctcctcaggaacacgaaaggatattggatatgtgctgtgcccccggcggcaaaaccagctatatggcacagctgatgaaaaacaccggtgtaatcctggccaatgacgcaaatgcggagcgacttaaaagcgtagttggtaaccttcatagattaggggtgaccaacaccatcatcagtcattatgacggtcggcagtttcctaaagtggtaggaggttttgaccgcgtgctgctggatgctccatgcagtgggaccggtgtgatcagcaaggatccagccgttaagaccaataaagacgaaaaagatattttaaggtgcgcccaccttcagaaggaactgctgctgtcagctattgatagtgtgaacgccacctctaaaaccggtgggtatctggtgtattgtacgtgttcgattaccgttgaggagaatgagtgggtcgttgattatgcactgaaaaaacggaacgtgcgcctggtgcctacaggtctggacttcgggcaagaaggatttactcgcttccgagaaaggcgctttcatccctccctgcggtccacaagaaggttctacccacacacccataacatggacggcttttttatcgccaagtttaagaagttctccaactccatacctcaatcccagacagggaatagcgagaccgctacccctacaaacgtggatctgccacaagtcatccctaagtccgaaaattcgtcacagcccgcaaagaaggcgaagggggcagccaaaactaagcaacagctgcagaagcagcagcacccgaaaaaggcctccttccaaaaattgaacggaatatccaaaggcgctgattctgaactgagtaccgttccaagtgtaactaagactcaggcttcttcaagctttcaggactccagtcagcccgcaggcaaagcggaagggataagggagcccaaggtcacaggcaagctgaaacagcgcagccctaagctgcagagctccaaaaaggtagccttcctgaggcaaaacgctcccccaaagggaaccgacacccagacccctgccgtgttgtcaccctctaaaacacaagcaactctgaagccgaaagaccaccatcagcccttgggccgggctaaaggggtcgagaagcagcagctcccagaacaacctttcgaaaaggctgcatttcagaaacagaatgatacgcctaagggccctcagcctcccacagtgtcacccatcaggagtagccgtcccccccctgctaagagaaagaaatcgcagtccaggggaaattcacagttattgttgagctag

SEQ ID NO: 272638 - DNA, 2439 bp, Artificial Sequence
  derived and/or modified sequence
atggggaggaagctggatccaacgaaggagaaaaggggacctggccgaaaggcgaggaagcagaagggggctgagactgagctggtgcgctttctcccagccgtgagtgacgaaaactcaaaacgcctatcaagcagagccaggaagagggcagccaagcgacgcctgggctccgtggaggcacccaaaactaataagagcccagaagccaaacctctcccgggtaagctccccaaaggaatatccgccggagccgttcagactgcaggaaagaaaggtccccagtcactgttcaatgcacctaggggcaagaagagacccgctcctgggagtgacgaagaagaggaggaagaggacagtgaagaggacggaatggtgaaccatggagatctgtgggggtcagaagacgacgcagacaccgtcgacgactatggggcagacagtaacagcgaggacgaagaggagggcgaggccctcctccccattgaacgagccgcacgtaagcagaaagcacgggaggcagcagccggtatccagtggtcagaggaggaaactgaggatgaagaggaagagaaggaggtcactcccgagagcggaccgccaaaggttgaagaagctgatggcggtctgcagattaacgtggacgaggagcctttcgtcctgccaccagccggagaaatggaacaagacgcacaggcgccagatctgcagcgcgtccataagagaattcaagatatcgtcggaatactgcgggactttggtgcacagagggaggagggcaggtctcggagcgagtatttgaatagactgaagaaagacctggctatttactactcttatggtgatttcctgctcgggaaattaatggacctgttcccacttagcgagctggtggagttcctggaggcaaacgaagtgccacggcctgtgaccctgcgtacaaatacactgaaaacacggagaagagaccttgctcaggctttgatcaacaggggcgtgaacctggatcctttgggcaaatggagcaagacagggctcgtagtgtacgatagcagtgtccccatcggtgcaaccccagagtatctggccggacactatatgcttcagggtgctagctccatgctccctgtgatggcccttgcccctcaggaacacgagcgcatccttgatatgtgttgtgccccaggcggaaagactagctatatggcgcagctcatgaagaatactggagtgattttagcaaacgatgcaaacgcggagaggctcaaatctgtggtcggcaatctccacaggctgggcgttacgaacactatcatcagtcattatgacggcagacaattccccaaagttgtcggcggttttgatagagtattgttggacgctccctgcagtgggactggagttatcagcaaagatccggcagtgaagactaacaaagacgagaaggatattttgcgatgcgctcatctgcagaaggaactgttgcttagcgcgatcgattcagtcaacgctacttccaaaactggcggatacttggtgtattgcacctgctctatcacagtggaggaaaatgaatgggtggtggactatgcccttaagaaaagaaacgtacgccttgtcccaactgggctggatttcgggcaagagggctttacacggtttagggaacggcgattccatccttcactgagatccactaggcggttctatccccacacacacaatatggacgggttctttattgccaagttcaaaaagttcagtaattcgataccacagtcacagactggaaattctgagaccgccaccccaactaatgtggacctccctcaggtgattcccaagtccgagaactcatcacaacccgctaaaaaggcaaagggagctgccaaaactaaacagcaactgcagaagcagcagcaccctaaaaaagcctcattccagaaactcaatggaatttctaagggggcagacagcgagttgagtaccgttcctagcgttaccaaaacacaggcgtcctcgtcattccaagacagctcacagccagctgggaaggctgaaggaattcgcgaaccaaaagttactggtaagttaaagcagaggagccccaagctgcagtcttccaaaaaggtagcatttttgaggcagaatgccccacccaaagggactgatactcaaacgcccgctgtgctgtctccttctaagacacaagctacactgaaacccaaagatcatcatcaacccctggggcgagctaaaggtgtggaaaagcagcagttaccagaacaaccttttgagaaagccgcattccagaaacagaatgatacaccaaaggggccacagccccctaccgtatcgcccatccggagcagcaggccgcctcccgctaagagaaaaaagtcacaatcccggggaaatagtcagctgctcctttcatag

SEQ ID NO: 272639 - DNA, 2439 bp, Artificial Sequence
  derived and/or modified sequence
atgggccgtaagttagacccaactaaggaaaaacgaggcccaggccgtaaggccaggaaacaaaagggggctgagacagagctggttaggttcttgcccgcagtatcggacgagaactcaaagcgtctgtcctcccgggctagaaagcgggctgctaaacggcgactcggctctgtcgaggctccaaaaaccaacaagtctccagaagcgaagccactcccaggaaaattgcccaagggcatctccgccggagccgtccagacggctgggaagaaaggcccacagtctttattcaatgctcccagagggaaaaaaagaccagcccctggtagtgatgaagaggaagaggaagaggactctgaggaggatggaatggtgaaccacggcgacttatggggcagtgaagatgacgccgacaccgtggatgactatggcgcagatagcaattctgaagacgaggaagagggagaagccctactgccgatcgaaagggcggcaaggaagcaaaaagctcgcgaggcggctgctggaatacagtggtctgaggaggagactgaggacgaagaagaggagaaggaagttactcccgaatctggcccacccaaggtcgaggaggccgatggcggactgcagattaatgtggacgaagaacctttcgttttaccccctgctggcgagatggaacaggacgcccaggccccagacctgcagcgtgttcataagcgtattcaggatattgtgggaatcttgagagatttcggcgctcagcgtgaagagggcagaagtaggtccgagtacttgaatcgtctcaagaaagacctagctatctactactcttacggggacttcctactcggtaagttgatggatctcttccccctgagcgaactggtggagttcttagaggctaacgaagtgccccgtcccgttacacttagaacaaataccctaaaaactagacgcagggatctggcacaggctttaatcaataggggcgtcaatttggacccccttggtaagtggagtaaaactggcctcgtggtctacgactcaagcgtccctatcggtgccaccccagagtatttagctggacattacatgctgcagggggcttccagcatgctacccgttatggcattggcgcctcaagagcacgagcgcatacttgatatgtgctgcgcacctggcggaaaaacctcatatatggcacagctgatgaagaatacaggcgtaatattggctaacgacgccaacgctgaacgacttaagtcagtggttgggaatctgcaccgccttggggtcactaataccattatttctcactacgacggtagacagtttcccaaggtggtcggcggatttgatcgcgttcttcttgacgctccatgttcagggacaggcgtcatatctaaagatccagcggtgaagactaacaaagatgaaaaagacatcctgcggtgcgcacatctgcagaaggagctcctcctgtccgctatagacagtgtgaatgctacaagcaaaaccggtgggtatctggtatattgcacctgctcaatcacagtggaagagaacgagtgggttgtcgactatgccctcaaaaagcgcaacgtacgcctcgtgccaaccggcctggacttcggacaggaaggatttactaggttccgcgaacggagatttcacccttccttgcgctccacgcgacggttctaccctcacactcacaatatggatggctttttcattgcaaagttcaaaaagttcagtaactccattccacagtcacagacaggcaactcagaaacagctacaccaaccaatgtggatctcccacaagttatcccaaagtccgagaacagtagccagcctgccaaaaaggccaagggggcagcaaagaccaagcagcagttacagaaacaacagcaccctaagaaggctagtttccagaagctgaatggaattagcaaaggcgctgacagcgagctcagcaccgtcccgagtgtgaccaagacacaagcatcgtcctccttccaagactccagccagcctgcgggtaaggctgagggcattcgcgagcctaaggtgaccggcaaattgaagcagaggtctcctaagctgcagagcagcaagaaggtcgcgtttttacgacaaaacgccccaccgaaagggaccgacactcagacgccagccgtgctgtcacctagtaaaacccaggccactcttaaacccaaagaccaccatcagcctctgggccgtgcaaaaggagtcgagaaacagcagcttcccgaacagccctttgaaaaggcagcatttcaaaaacaaaatgacacccctaaaggccctcaacctcctaccgtgtcccctatcaggtctagcaggcccccacccgctaagcgtaagaagtcacagagcagaggaaactcgcaactgctgttatcttag

SEQ ID NO: 272640 - DNA, 2439 bp, Artificial Sequence
  derived and/or modified sequence
atgggcagaaagctggaccccaccaaggagaagagaggccccggcagaaaggccagaaagcagaagggcgccgagaccgagctggtgagattcctgcccgccgtgagcgacgagaacagcaagagactgagcagcagagccagaaagagagccgccaagagaagactgggcagcgtggaggcccccaagaccaacaagagccccgaggccaagcccctgcccggcaagctgcccaagggcatcagcgccggcgccgtgcagaccgccggcaagaagggcccccagagcctgttcaacgcccccagaggcaagaagagacccgcccccggcagcgacgaggaggaggaggaggaggacagcgaggaggacggcatggtgaaccacggcgacctgtggggcagcgaggacgacgccgacaccgtggacgactacggcgccgacagcaacagcgaggacgaggaggagggcgaggccctgctgcccatcgagagagccgccagaaagcagaaggccagagaggccgccgccggcatccagtggagcgaggaggagaccgaggacgaggaggaggagaaggaggtgacccccgagagcggcccccccaaggtggaggaggccgacggcggcctgcagatcaacgtggacgaggagcccttcgtgctgccccccgccggcgagatggagcaggacgcccaggcccccgacctgcagagagtgcacaagagaatccaggacatcgtgggcatcctgagagacttcggcgcccagagagaggagggcagaagcagaagcgagtacctgaacagactgaagaaggacctggccatctactacagctacggcgacttcctgctgggcaagctgatggacctgttccccctgagcgagctggtggagttcctggaggccaacgaggtgcccagacccgtgaccctgagaaccaacaccctgaagaccagaagaagagacctggcccaggccctgatcaacagaggcgtgaacctggaccccctgggcaagtggagcaagaccggcctggtggtgtacgacagcagcgtgcccatcggcgccacccccgagtacctggccggccactacatgctgcagggcgccagcagcatgctgcccgtgatggccctggccccccaggagcacgagagaatcctggacatgtgctgcgcccccggcggcaagaccagctacatggcccagctgatgaagaacaccggcgtgatcctggccaacgacgccaacgccgagagactgaagagcgtggtgggcaacctgcacagactgggcgtgaccaacaccatcatcagccactacgacggcagacagttccccaaggtggtgggcggcttcgacagagtgctgctggacgccccctgcagcggcaccggcgtgatcagcaaggaccccgccgtgaagaccaacaaggacgagaaggacatcctgagatgcgcccacctgcagaaggagctgctgctgagcgccatcgacagcgtgaacgccaccagcaagaccggcggctacctggtgtactgcacctgcagcatcaccgtggaggagaacgagtgggtggtggactacgccctgaagaagagaaacgtgagactggtgcccaccggcctggacttcggccaggagggcttcaccagattcagagagagaagattccaccccagcctgagaagcaccagaagattctacccccacacccacaacatggacggcttcttcatcgccaagttcaagaagttcagcaacagcatcccccagagccagaccggcaacagcgagaccgccacccccaccaacgtggacctgccccaggtgatccccaagagcgagaacagcagccagcccgccaagaaggccaagggcgccgccaagaccaagcagcagctgcagaagcagcagcaccccaagaaggccagcttccagaagctgaacggcatcagcaagggcgccgacagcgagctgagcaccgtgcccagcgtgaccaagacccaggccagcagcagcttccaggacagcagccagcccgccggcaaggccgagggcatcagagagcccaaggtgaccggcaagctgaagcagagaagccccaagctgcagagcagcaagaaggtggccttcctgagacagaacgccccccccaagggcaccgacacccagacccccgccgtgctgagccccagcaagacccaggccaccctgaagcccaaggaccaccaccagcccctgggcagagccaagggcgtggagaagcagcagctgcccgagcagcccttcgagaaggccgccttccagaagcagaacgacacccccaagggcccccagccccccaccgtgagccccatcagaagcagcagacccccccccgccaagagaaagaagagccagagcagaggcaacagccagctgctgctgagctag

SEQ ID NO: 272641 - protein, 275 aa, Artificial Sequence
  derived and/or modified sequence
MSAEVKVTGQNQEQFLLLAKSAKGAALATLIHQVLEAPGVYVFGELLDMPNVRELAESDFASTFRLLTVFAYGTYADYLAEARNLPPLTEAQKNKLRHLSVVTLAAKVKCIPYAVLLEALALRNVRQLEDLVIEAVYADVLRGSLDQRNQRLEVDYSIGRDIQRQDLSAIARTLQEWCVGCEVVLSGIEEQVSRANQHKEQQLGLKQQIESEVANLKKTIKVTTAAAAAATSQDPEQHLTELREPAPGTNQRQPSKKASKGKGLRGSAKIWSKSN

SEQ ID NO: 272642 - DNA, 828 bp, Artificial Sequence
  derived and/or modified sequence
atgagcgccgaggtgaaggtgaccggccagaaccaggagcagttcctgctgctggccaagagcgccaagggcgccgccctggccaccctgatccaccaggtgctggaggcccccggcgtgtacgtgttcggcgagctgctggacatgcccaacgtgagagagctggccgagagcgacttcgccagcaccttcagactgctgaccgtgttcgcctacggcacctacgccgactacctggccgaggccagaaacctgccccccctgaccgaggcccagaagaacaagctgagacacctgagcgtggtgaccctggccgccaaggtgaagtgcatcccctacgccgtgctgctggaggccctggccctgagaaacgtgagacagctggaggacctggtgatcgaggccgtgtacgccgacgtgctgagaggcagcctggaccagagaaaccagagactggaggtggactacagcatcggcagagacatccagagacaggacctgagcgccatcgccagaaccctgcaggagtggtgcgtgggctgcgaggtggtgctgagcggcatcgaggagcaggtgagcagagccaaccagcacaaggagcagcagctgggcctgaagcagcagatcgagagcgaggtggccaacctgaagaagaccatcaaggtgaccaccgccgccgccgccgccgccaccagccaggaccccgagcagcacctgaccgagctgagagagcccgcccccggcaccaaccagagacagcccagcaagaaggccagcaagggcaagggcctgagaggcagcgccaagatctggagcaagagcaactag

SEQ ID NO: 272643 - DNA, 828 bp, Artificial Sequence
  derived and/or modified sequence
atgtctgccgaagtgaaggttactggtcagaaccaagaacaattcctgttactggcaaagtcagcaaaaggagccgccctggccacactgatccaccaggttttggaggctccaggagtctacgtatttggcgagctcctggatatgccgaacgtgagggaattggcagagagtgatttcgctagcacgtttagactgctgaccgtgtttgcttacggcacatatgccgactatctcgctgaggcccgaaatttgccaccactgactgaagcccaaaaaaacaaattgcggcacctgtcagtcgtaacactggcagctaaggtgaaatgcatcccctatgccgtcctgctggaggctctggcgctgcgtaacgttaggcagctggaggatctcgtcatcgaagccgtttatgcagatgtcctcagaggcagcctggaccaacggaatcagcgcctggaagtggattatagtattgggcgcgacattcagagacaggacctcagcgcaatcgcacgcactctacaagagtggtgtgtcggatgtgaagtagtgctgagcggcatcgaggaacaagtttctagagcgaaccaacataaagaacaacagctggggttgaagcagcagatagaatccgaagttgcaaatctgaaaaaaacaattaaagttaccacagcagccgcagctgccgccacatcccaggacccagagcaacatctaaccgaactgagggagcctgccccagggaccaaccaaagacagccctctaagaaggcctccaagggcaaagggcttaggggtagcgctaagatatggtctaaaagcaactag

SEQ ID NO: 272644 - DNA, 828 bp, Artificial Sequence
  derived and/or modified sequence
atgtctgccgaggtgaaagtgaccggtcagaatcaggagcaattcctactccttgcgaaatctgcaaaaggggcagcattagcaactctgatccatcaagtgctcgaggcacccggtgtctatgtgttcggagagctactggatatgcccaatgtgcgggaactggccgagtccgattttgcctcgactttccgcctgctgaccgtgtttgcgtatgggacgtatgctgactacttagctgaggcccggaacctgcctccacttacggaggcacagaagaataaactgagacaccttagcgtggtcaccctcgctgccaaggtgaagtgcattccgtatgccgtcttgctggaggccctcgctctgagaaacgtgagacagttagaggatcttgtgattgaggccgtttacgccgatgtgttgcgcgggagcctcgaccagaggaaccagagactcgaggtcgactattccatcggcagggacatccagagacaggacctgagtgccatagcacggacgctccaagaatggtgtgtcggatgtgaagtcgtactttcagggatagaggagcaagtaagcagggccaaccagcataaggagcagcaattgggcctcaagcagcaaatcgaatcggaggtcgccaatctgaaaaagaccatcaaagttaccactgccgcagctgcagccgcaacctctcaggatcctgagcagcatctgaccgagctgcgcgagccggcccccggaaccaatcagaggcagccgtcgaagaaggcaagtaagggcaaaggactgagaggaagcgccaagatttggtccaagtcaaactag

SEQ ID NO: 272645 - DNA, 828 bp, Artificial Sequence
  derived and/or modified sequence
atgtcagcagaggtcaaagttaccggacagaatcaggaacagtttttgctccttgccaagagcgcgaaaggtgccgccctggctacactcattcaccaggtccttgaggctcccggagtgtatgtgtttggggaacttctggatatgcccaacgtgcgcgaacttgccgagtcagacttcgcgtccacctttagactgcttacagtgtttgcctacggaacttacgccgactatttagccgaggctagaaatcttccccccctaacagaggcacagaagaacaagctgcgtcacctgagcgtggtgacgctggccgcaaaggtgaagtgcataccatacgcagtcctgctcgaggctctggctctccgcaatgtcagacaactagaggatctcgttatcgaggctgtgtatgctgatgtgctcagagggtcattggatcagcggaatcagagattggaagtggattactcaataggccgagacattcagcggcaagacctgagtgcaatagccaggactctccaggagtggtgcgtggggtgcgaggtggtgctgagtggcatcgaggaacaggtaagtagggcaaaccagcataaagagcagcagttggggctcaagcaacaaatagaaagcgaagtcgcgaaccttaaaaagacaattaaggttactactgcagcagccgcggccgccactagtcaggacccagagcagcatctcaccgaactccgggagccagctcccgggaccaatcagagacagccgtcaaagaaagcttctaagggaaagggcctcaggggctctgcaaaaatttggagtaagtccaactag

SEQ ID NO: 272646 - DNA, 828 bp, Artificial Sequence
  derived and/or modified sequence
atgagcgccgaagtcaaagtgactgggcaaaatcaggagcagtttttgctgctcgctaagtctgcgaagggggccgccctggctacacttatccatcaggtgttagaggcacctggagtctacgtgttcggggagctcctggatatgcctaacgtcagagaactcgccgagtctgactttgcatccacattccgactattaaccgtgtttgcctatggtacctacgccgattacctggctgaagcgcgcaacctgccacccctgacggaggctcagaagaacaagttgcgacatctgtcagttgtaactttggccgccaaggtgaaatgtatcccctacgcagttcttctagaggcccttgcgctccgaaacgtgcggcagctagaggacctggtcatagaggccgtgtatgccgatgtgttacgcggatcccttgaccagcggaaccagagattggaggtggactatagtattggccgcgacatccagcgccaggacctttctgccattgcccgtacccttcaagaatggtgtgtggggtgtgaggtggtactcagtggcattgaagaacaggtctcccgtgccaatcagcataaagagcaacagttgggcctaaagcagcagatcgagtccgaggttgcaaacctgaaaaagaccatcaaggtgaccacagccgcagccgccgctgccacaagtcaagatcctgaacagcacctcacagaactgcgggaacctgctcctggcactaaccagcggcagccctctaagaaagctagcaagggtaaggggctgcgtggaagcgcaaaaatatggagcaaatcaaattag

SEQ ID NO: 272647 - DNA, 828 bp, Artificial Sequence
  derived and/or modified sequence
atgtccgcggaggtgaaggtcacggggcagaaccaagagcagttcctcttgctggccaagagcgcaaaaggagccgccctggccactctcattcaccaggttctggaggccccaggagtgtatgtgtttggagagctgttggacatgcccaatgttagagaacttgcggagtctgattttgcttctacctttcgcctcctgactgtgttcgcctatggaacgtatgctgactatctggcagaggcccggaatttgccgccactcaccgaagcgcagaagaataaattgcgccatttgagcgtggtcacgctggccgctaaagtcaagtgcattccatacgctgtgctcctcgaagctctggccctacggaatgtgaggcagctggaggacttagtgatagaagccgtctacgccgacgtgctgcgagggagtctcgaccaaaggaatcagcggttagaagtggactactccataggccgtgacatacagcgacaggacctctccgcgattgcccgcaccctgcaggaatggtgtgtagggtgcgaggtggtactgagcggaattgaggagcaggtttctagggccaaccagcataaggaacagcagttgggtctcaagcaacagattgagtctgaagtggccaatctgaaaaagaccattaaggtgacgacagccgctgccgcggcggcaacttcgcaggaccccgaacaacatttgacagagttgcgggagcccgcccccggcacgaaccagcgacaacctagcaaaaaagcgtccaaggggaaaggcctacgcggttctgctaaaatatggagtaaaagcaactag

SEQ ID NO: 272648 - DNA, 828 bp, Artificial Sequence
  derived and/or modified sequence
atgtctgctgaggtgaaggtgacaggccagaaccaggagcagttcctgctgctggccaagagcgccaagggagctgccctggccaccctcatccaccaggtgctggaggcccctggggtgtatgtgtttggagagctgctggacatgcccaacgtgcgggagctggccgagagtgactttgccagcaccttccggctgctgactgtgtttgcctacggcacctacgccgactacctggccgaggccaggaacctgccccccctgacagaggcccagaagaacaagctgcggcacctgtctgtggtgaccctggccgccaaggtgaagtgcatcccctatgctgtgctgctggaggccctggccctgagaaatgtgcggcagctggaggacctggtgattgaagctgtgtatgcagatgtgctgcggggcagcctggaccagaggaaccagaggctggaggtggactacagcatcggccgggacatccagaggcaggacctgagcgccatcgcccggaccctgcaggagtggtgtgtgggctgtgaggtggtgctgagcggcatcgaggagcaggtgtcccgggccaaccagcacaaggagcagcagctgggcctgaagcagcagattgaaagtgaggtggccaacctgaagaagaccatcaaggtgaccacagctgctgctgctgctgccaccagccaggaccctgagcagcacctgacagagctgcgggagcccgcccctggcaccaaccagaggcagcccagcaagaaggccagcaagggcaagggcctgcggggcagcgccaagatctggagcaagagcaactag

SEQ ID NO: 272649 - DNA, 1721 bp, Artificial Sequence
  derived and/or modified sequence
ggtggcaggaaaggcttggaacagctgccggaggtgacggagcggcggccccgcccggtgcgctggaggtcgaagcttccagctctggacatcctgagcccaagtcccccacactcagtgcagtgatgagtgcggaagtgaaggtgacagggcagaaccaggagcaatttctgctcctagccaagtcggccaagggggcagcgctggccacactcatccatcaggtgctggaggcccctggtgtctacgtgtttggagaactgctggacatgcccaatgttagagagctggctgagagtgactttgcctctaccttccggctgctcacagtgtttgcttatgggacatacgctgactacttagctgaagcccggaatcttcctccactaacagaggctcagaagaataagcttcgacacctctcagttgtcaccctggctgctaaagtaaagtgtatcccatatgcagtgttgctggaggctcttgccctgcgtaatgtgcggcagctggaagaccttgtgattgaggctgtgtatgctgacgtgcttcgtggctccctggaccagcgcaaccagcggctcgaggttgactacagcatcgggcgggacatccagcgccaggacctcagtgccattgcccgaaccctgcaggaatggtgtgtgggctgtgaggtcgtgctgtcaggcattgaggagcaggtgagccgtgccaaccaacacaaggagcagcagctgggcctgaagcagcagattgagagtgaggttgccaaccttaaaaaaaccattaaagttacgacggcagcagcagccgcagccacatctcaggaccctgagcaacacctgactgagctgagggaaccagctcctggcaccaaccagcgccagcccagcaagaaagcctcaaagggcaaggggctccgagggagcgccaagatttggtccaagtcgaattgaaaggactgtcgtttcctccctggggatgtggggtcccagctgcctgcctgcctcttaggagtcctcagagagccttctgtgcccctggccagctgataatcctaggttcatgacccttcacctcccctaaccccaaacatagatcacaccttctctagggaggaggcaaatgtaggtcatgtttttgttggtactttctgttttttgtgacttcatgtgttccattgctccccgctgccatgctctctcccttgtttccttaagagctcagcatctgtccctgttcattacatgtcattgagtaggtgggtagccctgatgggggtcgctctgtctggagcataacccacaggcgttttttctgccaccccatccctgcatgcctgatccccagttcctataccctacccctgacctattgagcagcctctgaagagccatagggcccccacctttactcacaccctgagaattctgggagccagtctgccatgccaggagtcactggacatgttcatcctagaatcctgtcacactacagtcatttcttttcctctctctggcccttgggtcctgggaatgctgctgcttcaaccccagagcctaagaatggcagccgtttcttaacatgttgagagatgattctttcttggccctggccatctcgggaagcttgatggcaatcctggaagggtttaatctccttttgtgagtttggtggggaagggaagggtatatagattgtattaaaaaaaaaaaggtatatat

SEQ ID NO: 272650 - DNA, 828 bp, Artificial Sequence
  derived and/or modified sequence
atgagcgccgaggtgaaggtgaccggccagaaccaggagcagttcctacttctggcaaagtctgccaagggtgcagctctggctactctgatccatcaggttctcgaggctcccggagtgtatgtcttcggggagctgctggatatgcccaacgtgcgggaactggcagaatcagattttgccagcacatttcgtcttctcactgttttcgcttatggtacttatgctgattacctggcagaggcccggaacttgccgcctctgaccgaggcccagaagaataagctgaggcatttgagtgtcgttacactggccgccaaggtgaaatgcatcccttatgccgtactccttgaagccctagcccttaggaacgtgcgccagttggaagacttggttattgaagcagtgtatgccgacgtgctgcgcggctccctggaccagcggaaccagcgactcgaagtggattattcaattggtagagacatacaacgccaagatctcagtgctattgcacgcacattgcaagagtggtgcgtcggttgcgaggtggtcctgtccggcattgaggagcaggtgagtcgggccaaccagcacaaagagcagcagctcggcctgaagcaacagatcgaaagcgaggttgccaacctcaagaaaaccatcaaagttacaacagcagccgcggcagcagctacttcccaggatcctgagcaacacctcacagagcttcgggaacctgcccccggcaccaatcagagacagccttcaaaaaaggcatcaaagggcaagggtctcagaggaagcgctaagatatggtctaaatccaactag

SEQ ID NO: 272651 - DNA, 828 bp, Artificial Sequence
  derived and/or modified sequence
atgagcgccgaggtgaaggtgaccggccagaaccaggagcagttcctgcttctggctaaatcagctaaaggggctgccctagccactttgatccatcaggtgctggaggctcctggtgtctacgtcttcggcgaactgctggacatgccgaacgtgcgtgagctggctgagagcgattttgccagtactttcaggctgcttaccgtgttcgcctatggaacctacgcagattacctggcagaggccaggaatttgccccccctgactgaggcccaaaagaataaattgcgccacctgtcagttgtcaccctagcagctaaagtaaaatgcatcccgtacgccgtgctgctggaagctctcgccttaaggaatgtacgccagcttgaagatcttgtcattgaggccgtgtacgccgacgtactgagaggaagcctggaccagaggaaccaacggctggaagtagactacagcatagggcgagacattcagcggcaggatctctctgcgatagctcggaccctccaagaatggtgtgtgggttgtgaggtagttctgtcaggtattgaggagcaggtttcccgcgctaaccagcacaaagaacagcaactggggcttaagcagcaaatcgaaagcgaggttgccaacctgaagaaaaccattaaggttactaccgctgctgcagccgctgccacatctcaggatcctgaacaacatctgacagaacttagggaacccgccccggggacaaaccagcgacagccttccaagaaggccagtaagggaaaaggactgagaggcagcgctaaaatttggtccaagtcgaactag

SEQ ID NO: 272652 - DNA, 828 bp, Artificial Sequence
  derived and/or modified sequence
atgagcgccgaggtgaaggtgaccggccagaaccaggagcagttcctcctgctggccaagagtgcaaagggagccgcgctggctactctgattcatcaagtcctcgaggctcctggagtctacgtgttcggtgagctgctggacatgcccaatgttcgcgaattggcagagtccgatttcgcttccacttttcgcttgttgacagttttcgcttatggcacatacgcagattatcttgcggaggctcgcaatttgcctccccttaccgaagctcaaaagaacaagttgagacacctttctgttgttacattggcagccaaggtgaaatgtatcccctatgcagttctccttgaggccctggctctcaggaatgtccgtcagttagaagatctggttatcgaggccgtctatgccgacgtcttgcgcggatccctggatcaacgtaatcagcggctcgaagtagattattccatcggtcgtgacattcagcggcaggacctttctgcaatcgccaggaccttacaagaatggtgcgtgggttgtgaggttgttttgagtggcatcgaagagcaagtatccagggccaaccagcacaaagagcagcagctcggactgaagcagcaaatcgaatctgaggtcgcaaatttgaaaaaaacaatcaaagtaactacggctgctgcagctgcggcaacatctcaggatcccgaacaacatttaacagagttgcgggaacctgctcctggcacaaatcagcggcagccgtcgaagaaggcctctaagggcaaagggctgcgggggtcagcgaagatctggagcaaaagtaattag

SEQ ID NO: 272653 - DNA, 828 bp, Artificial Sequence
  derived and/or modified sequence
atgagcgccgaggtgaaggtgaccggccagaaccaggagcagttccttctactagcaaagtcagcgaaaggcgctgctctggcaaccctcatccaccaggttttggaggcacctggcgtctacgtgtttggcgaactgttagacatgccgaatgtgagggagttggccgaatccgatttcgccagcacattcaggctcttaacagtctttgcctacggcacttacgctgactacctggcagaggccaggaatctgcctcccttgaccgaagcccagaaaaacaaattgcggcatttgtcagtggtgacacttgcagcgaaagtgaagtgtattccttacgccgtccttcttgaagcacttgctttgcgcaatgtacgccagctggaggatctcgttatcgaggctgtgtatgcggatgtactgagaggtagcctggaccagaggaatcagcgcctcgaagttgactattctataggccgcgacattcagagacaggacctctccgcaattgcccgtacactgcaggaatggtgtgttgggtgcgaggtagttttgtctggaatcgaagagcaggtctccagggcaaaccagcacaaagaacagcaacttggcttgaagcagcaaattgaatcggaagttgcaaatctgaaaaaaactatcaaagtgacgaccgcggcagccgctgccgccaccagccaagatcccgagcaacatctcacagaactcagagagcctgcccccggaacaaatcagagacagccttctaagaaagccagcaaaggaaagggtctacgaggatctgctaagatatggagtaagtccaattag

SEQ ID NO: 272654 - DNA, 828 bp, Artificial Sequence
  derived and/or modified sequence
atgagcgccgaggtgaaggtgaccggccagaaccaggagcagttcttattgctcgctaagtctgccaagggggctgctctcgcaaccctcatacaccaggtgttagaagcaccaggggtttacgtcttcggcgaattgcttgatatgcccaatgtcagagaactggcggagagtgatttcgcatctactttccgtctactgaccgtttttgcttatggtacatatgccgactacctggctgaggctcgcaatctgccgccactgaccgaggctcagaagaacaaactaaggcatctatcggtcgtaaccttagccgccaaggtcaaatgcataccttatgccgtcttgttagaggccctggcgctgcggaacgtccggcagcttgaagatttggtgattgaggccgtctacgcagatgtgctaaggggttcacttgatcagagaaaccaaagactcgaagtcgattattcgatcggcagagacatccagagacaggacctgagcgctatagctaggaccctgcaagaatggtgtgtgggctgcgaagtggtcctgtccggtattgaagagcaggttagtagggctaaccagcacaaagaacagcagttgggcctgaaacagcagatcgagagcgaagttgcgaatttgaagaagacaatcaaggtgaccaccgctgccgcagcagccgctactagccaggaccctgagcagcatttgaccgagctcagagaacctgctccgggaactaatcagcggcagccttcaaaaaaggcaagtaaaggtaaaggcctgagaggatctgctaaaatctggtcaaagagtaactag

SEQ ID NO: 272655 - DNA, 828 bp, Artificial Sequence
  derived and/or modified sequence
atgtctgccgaagtgaaagtgaccggccaaaaccaggaacagtttctgctgctagcaaaatccgctaaaggcgctgctttagcaacactgattcaccaggtcctcgaggcccctggcgtgtatgtgttcggagaattattagatatgcccaatgtgagagagctggctgaatcggacttcgcttccacattccggttgctgaccgtgtttgcatatgggacgtacgctgattacttggctgaagcccgaaacttgcctcccttgactgaagcccaaaaaaataagctgagacacttgtctgtggtcacactggcggcaaaggtcaaatgtattccatatgctgtgttgctggaggccctagcgttgagaaatgtgagacagcttgaggacctagtaatcgaggctgtgtatgcggacgtgttgagggggtctttggaccagcgcaatcagaggctggaagtcgactacagcattggcagagatattcaaagacaggatctcagtgccatcgcaagaaccctccaggaatggtgtgtcgggtgcgaggtggtcttgtctggtatcgaggagcaggtttcacgggctaaccagcacaaagaacagcagctgggtctcaagcaacagattgaatctgaggttgctaatttgaaaaagacaattaaagtgacgaccgcagccgctgccgcagccacgagtcaggatcctgaacagcacttgaccgagctccgggaacccgctcccggaacgaatcagagacagccctctaagaaagctagcaagggtaaaggcctaagaggcagtgccaaaatttggtcgaagagtaactag

SEQ ID NO: 272656 - DNA, 828 bp, Artificial Sequence
  derived and/or modified sequence
atgtccgctgaagtgaaggtgactggtcagaaccaggagcagtttttgttgctggccaagagcgccaagggcgctgccctggcaactctaatccaccaggtgctggaagcaccaggcgtctatgtgttcggtgagctcctggatatgccaaatgtccgagagctggccgagagcgatttcgccagtacctttcgcctcctgaccgttttcgcatatggaacttacgccgattacctggccgaagctagaaatctcccgcctctcaccgaagcgcaaaagaacaaactgaggcaccttagcgtcgtgactctggctgcgaaagttaagtgcattccatacgccgttttgcttgaggctctcgcccttcgcaacgttcgacagctcgaagaccttgtcatcgaggccgtatacgcggatgtgctgcgaggaagtcttgatcagagaaaccaacgcctggaagtggactattccatcggaagagatatccaaaggcaggatctgtctgctatcgctagaaccctgcaggaatggtgcgtcgggtgcgaagtcgtcctttctggcattgaggaacaggtcagcagagcaaatcagcacaaagagcagcaactggggttgaaacaacagatcgaatctgaggtggctaatctcaaaaagaccatcaaagtcacaaccgcagccgcagccgcagccacatcgcaagacccggagcagcatttaacagagctgcgcgaaccagcccctggaacaaatcagcgccagcccagcaaaaaagcctctaagggcaaagggctcagaggtagtgccaaaatctggagtaaatccaattag

SEQ ID NO: 272657 - DNA, 828 bp, Artificial Sequence
  derived and/or modified sequence
atgagcgcagaggtgaaagttacaggtcagaaccaggaacagttcttactgcttgcaaagtctgctaaaggcgcagcactcgctaccctgatccaccaggtgctcgaggcgccaggcgtgtacgtcttcggggagctgctggatatgccaaatgtgagggaacttgccgagagcgattttgcctcaactttcagactcctgacagtgtttgcgtacgggacctatgccgattacctggccgaagcaagaaacctgccacctctcaccgaggctcagaagaacaaactgaggcacctgtccgtggtgactctggctgctaaagtgaagtgcatcccctatgctgttctgctcgaggcactggccctacgaaatgtgagacagctggaggatttggtgatcgaggctgtgtatgcggatgtgctgcggggttccctggaccaacgaaaccaaagactcgaggttgactattccatcggccgtgacatccagcgtcaggacttgagcgctatagcacgcaccctgcaggagtggtgtgttggctgtgaggtggtgctctccggcatagaggaacaggtaagtagggctaatcagcataaagaacaacagctcggcctaaaacaacagatcgaatcagaagttgctaacctgaaaaagaccatcaaagtgaccaccgccgctgcagccgcagccacttctcaagaccccgagcagcacctgacggaactgcgagagcccgcacccggaacaaaccaacgtcagccctccaagaaagctagcaaagggaagggcctcagggggtccgccaagatttggtctaaaagcaactag

SEQ ID NO: 272658 - DNA, 828 bp, Artificial Sequence
  derived and/or modified sequence
atgtccgcggaagtgaaggttaccggtcagaaccaagagcaattcctcttgctggccaagagcgcaaaaggagctgcgcttgccactcttattcatcaggtgctcgaagctcccggagtatatgtgttcggcgagttacttgatatgcccaacgtaagggagcttgctgaaagcgattttgcttcgacattccgcctgttgacagtgtttgcctacggtacgtatgcagattacctggcagaagctcgcaacttgccaccgctgactgaggcccagaaaaacaagctgcggcacctatctgtggtgacactcgcggcaaaagtgaagtgtattccttacgcggttttactggaagctctggcgctgcggaatgtgcggcagctggaggatcttgtgatcgaagccgtgtacgctgatgtactgcggggttctctagaccagagaaatcaaagactcgaagtggactacagtatcggtcgcgatattcaacgtcaggatctttccgcaatcgccaggaccctgcaggagtggtgcgtcggttgcgaagtggtcctctcaggaatcgaggaacaggtcagtcgcgctaatcagcacaaagagcagcagctcgggttgaaacagcaaatcgaatctgaggttgctaaccttaagaagacaattaaggttactacagccgcagcggcagctgccacctctcaggacccagagcagcatctgacggaattacgggaaccggctcccggaacgaaccaacgacagccatctaagaaagccagtaaagggaaaggactgaggggtagcgccaagatctggtcaaagtctaactag

SEQ ID NO: 272659 - DNA, 828 bp, Artificial Sequence
  derived and/or modified sequence
atgtccgcagaggtcaaagtgaccggacaaaatcaagagcagttcctgctgctcgcgaagtcagccaagggggctgctcttgccactttgatacaccaggttctggaagcccctggagtgtacgtctttggggagctgctcgatatgccaaacgtaagggagctggccgaaagtgactttgcaagcacctttaggttgctgacagtgtttgcctacggcacttatgctgactacctcgccgaagcaaggaacttgccaccattgacagaggcacagaagaacaagctacgccatttgtccgtggtcacactggccgcaaaagttaaatgtattccatacgccgtgttgctcgaagctcttgcactccgcaatgtgcggcaactcgaggacctcgtaatcgaagctgtgtacgccgatgtgctccggggtagtctggatcaacgtaatcaaagattagaggttgactacagcattggcagagatatccaacggcaggaccttagcgccattgccaggactctgcaggagtggtgtgtggggtgcgaagttgtgctgagcgggattgaggaacaagtttcccgggctaatcaacacaaagaacagcagctagggttgaaacagcagattgagagcgaagtggcaaacctgaagaaaacaatcaaggtgaccaccgccgctgcggctgctgcgacatcccaggaccccgaacaacatctaaccgagttaagggagcccgctccaggcactaaccagagacagccctcaaaaaaagcctctaaagggaagggactgcgaggctctgccaagatctggagcaagtccaattag

SEQ ID NO: 272660 - DNA, 1831 bp, Artificial Sequence
  derived and/or modified sequence
ggaagtacggccggaagcccgccatagagtttagtggccagagcgactcttcagggaggtggcaggaaaggcttggaacagctgccggaggtgacggagcggcggccccgcccggtgcgctggaggtcgaagcttccagctctggacatcctgagcccaagtcccccacactcagtgcagtgatgagtgcggaagtgaaggtgacagggcagaaccaggagcaatttctgctcctagccaagtcggccaagggggcagcgctggccacactcatccatcaggtgctggaggcccctggtgtctacgtgtttggagaactgctggacatgcccaatgttagagagctggctgagagtgactttgcctctaccttccggctgctcacagtgtttgcttatgggacatacgctgactacttagctgaagcccggaatcttcctccactaacagaggctcagaagaataagcttcgacacctctcagttgtcaccctggctgctaaagtaaagtgtatcccatatgcagtgttgctggaggctcttgccctgcgtaatgtgcggcagctggaagaccttgtgattgaggctgtgtatgctgacgtgcttcgtggctccctggaccagcgcaaccagcggctcgaggttgactacagcatcgggcgggacatccagcgccaggacctcagtgccattgcccgaaccctgcaggaatggtgtgtgggctgtgaggtcgtgctgtcaggcattgaggagcaggtgagccgtgccaaccaacacaaggagcagcagctgggcctgaagcagcagattgagagtgaggttgccaaccttaaaaaaaccattaaagttacgacggcagcagcagccgcagccacatctcaggaccctgagcaacacctgactgagctgagggaaccagctcctggcaccaaccagcgccagcccagcaagaaagcctcaaagggcaaggggctccgagggagcgccaagatttggtccaagtcgaattgaaaggactgtcgtttcctccctggggatgtggggtcccagctgcctgcctgcctcttaggagtcctcagagagccttctgtgcccctggccagctgataatcctaggttcatgacccttcacctcccctaaccccaaacatagatcacaccttctctagggaggaggcaaatgtaggtcatgtttttgttggtactttctgttttttgtgacttcatgtgttccattgctccccgctgccatgctctctcccttgtttccttaagagctcagcatctgtccctgttcattacatgtcattgagtaggtgggtagccctgatgggggtcgctctgtctggagcataacccacaggcgttttttctgccaccccatccctgcatgcctgatccccagttcctataccctacccctgacctattgagcagcctctgaagagccatagggcccccacctttactcacaccctgagaattctgggagccagtctgccatgccaggagtcactggacatgttcatcctagaatcctgtcacactacagtcatttcttttcctctctctggcccttgggtcctgggaatgctgctgcttcaaccccagagcctaagaatggcagccgtttcttaacatgttgagagatgattctttcttggccctggccatctcgggaagcttgatggcaatcctggaagggtttaatctccttttgtgagtttggtggggaagggaagggtatatagattgtattaaaaaaaaaaaggtatatatgcatatatctatatataatatgacgcagaaataaatctatgagaaatctatct

SEQ ID NO: 272661 - DNA, 1707 bp, Artificial Sequence
  derived and/or modified sequence
gcagcaatggagagctgagggagcgtcgtcaggctctggacatcctgagcccaagtcccccacactcagtgcagtgatgagtgcggaagtgaaggtgacagggcagaaccaggagcaatttctgctcctagccaagtcggccaagggggcagcgctggccacactcatccatcaggtgctggaggcccctggtgtctacgtgtttggagaactgctggacatgcccaatgttagagagctggctgagagtgactttgcctctaccttccggctgctcacagtgtttgcttatgggacatacgctgactacttagctgaagcccggaatcttcctccactaacagaggctcagaagaataagcttcgacacctctcagttgtcaccctggctgctaaagtaaagtgtatcccatatgcagtgttgctggaggctcttgccctgcgtaatgtgcggcagctggaagaccttgtgattgaggctgtgtatgctgacgtgcttcgtggctccctggaccagcgcaaccagcggctcgaggttgactacagcatcgggcgggacatccagcgccaggacctcagtgccattgcccgaaccctgcaggaatggtgtgtgggctgtgaggtcgtgctgtcaggcattgaggagcaggtgagccgtgccaaccaacacaaggagcagcagctgggcctgaagcagcagattgagagtgaggttgccaaccttaaaaaaaccattaaagttacgacggcagcagcagccgcagccacatctcaggaccctgagcaacacctgactgagctgagggaaccagctcctggcaccaaccagcgccagcccagcaagaaagcctcaaagggcaaggggctccgagggagcgccaagatttggtccaagtcgaattgaaaggactgtcgtttcctccctggggatgtggggtcccagctgcctgcctgcctcttaggagtcctcagagagccttctgtgcccctggccagctgataatcctaggttcatgacccttcacctcccctaaccccaaacatagatcacaccttctctagggaggaggcaaatgtaggtcatgtttttgttggtactttctgttttttgtgacttcatgtgttccattgctccccgctgccatgctctctcccttgtttccttaagagctcagcatctgtccctgttcattacatgtcattgagtaggtgggtagccctgatgggggtcgctctgtctggagcataacccacaggcgttttttctgccaccccatccctgcatgcctgatccccagttcctataccctacccctgacctattgagcagcctctgaagagccatagggcccccacctttactcacaccctgagaattctgggagccagtctgccatgccaggagtcactggacatgttcatcctagaatcctgtcacactacagtcatttcttttcctctctctggcccttgggtcctgggaatgctgctgcttcaaccccagagcctaagaatggcagccgtttcttaacatgttgagagatgattctttcttggccctggccatctcgggaagcttgatggcaatcctggaagggtttaatctccttttgtgagtttggtggggaagggaagggtatatagattgtattaaaaaaaaaaaggtatatatgcatatatctatatataatatgacgcagaaataaa

SEQ ID NO: 272662 - DNA, 2034 bp, Artificial Sequence
  derived and/or modified sequence
gcgcgtgcggggcagcaatggagagctgagggagcgtcgtcagggtggacaccatgcgacacccatttctcctttgcatcctgtgtcttggggttcaatggggtgcacgtgatggggcttggggttaggcccaggggagggggtgggtgtggcagccttgcgaagtggctgactttaggattcctagatcagaattttagaccgctccatgtctgattcctcaccgcagaaccgacttagtgcctttacaatccagtccctcagccttgtgcttcccatccgaccagccatcggggacctctagcttcacatcctctttccttgcagctctggacatcctgagcccaagtcccccacactcagtgcagtgatgagtgcggaagtgaaggtgacagggcagaaccaggagcaatttctgctcctagccaagtcggccaagggggcagcgctggccacactcatccatcaggtgctggaggcccctggtgtctacgtgtttggagaactgctggacatgcccaatgttagagagctggctgagagtgactttgcctctaccttccggctgctcacagtgtttgcttatgggacatacgctgactacttagctgaagcccggaatcttcctccactaacagaggctcagaagaataagcttcgacacctctcagttgtcaccctggctgctaaagtaaagtgtatcccatatgcagtgttgctggaggctcttgccctgcgtaatgtgcggcagctggaagaccttgtgattgaggctgtgtatgctgacgtgcttcgtggctccctggaccagcgcaaccagcggctcgaggttgactacagcatcgggcgggacatccagcgccaggacctcagtgccattgcccgaaccctgcaggaatggtgtgtgggctgtgaggtcgtgctgtcaggcattgaggagcaggtgagccgtgccaaccaacacaaggagcagcagctgggcctgaagcagcagattgagagtgaggttgccaaccttaaaaaaaccattaaagttacgacggcagcagcagccgcagccacatctcaggaccctgagcaacacctgactgagctgagggaaccagctcctggcaccaaccagcgccagcccagcaagaaagcctcaaagggcaaggggctccgagggagcgccaagatttggtccaagtcgaattgaaaggactgtcgtttcctccctggggatgtggggtcccagctgcctgcctgcctcttaggagtcctcagagagccttctgtgcccctggccagctgataatcctaggttcatgacccttcacctcccctaaccccaaacatagatcacaccttctctagggaggaggcaaatgtaggtcatgtttttgttggtactttctgttttttgtgacttcatgtgttccattgctccccgctgccatgctctctcccttgtttccttaagagctcagcatctgtccctgttcattacatgtcattgagtaggtgggtagccctgatgggggtcgctctgtctggagcataacccacaggcgttttttctgccaccccatccctgcatgcctgatccccagttcctataccctacccctgacctattgagcagcctctgaagagccatagggcccccacctttactcacaccctgagaattctgggagccagtctgccatgccaggagtcactggacatgttcatcctagaatcctgtcacactacagtcatttcttttcctctctctggcccttgggtcctgggaatgctgctgcttcaaccccagagcctaagaatggcagccgtttcttaacatgttgagagatgattctttcttggccctggccatctcgggaagcttgatggcaatcctggaagggtttaatctccttttgtgagtttggtggggaagggaagggtatatagattgtattaaaaaaaaaaaggtatatatgcatatatctatatataatatgacgcagaaataaatctatgagaaatctatctacaaactaccctgaa

SEQ ID NO: 272663 - DNA, 1832 bp, Artificial Sequence
  derived and/or modified sequence
gaaaggcttggaacagctgccggaggtgacggagcggcggccccgcccggtgcgctggaggtcgaagcttccaggtagcggcccgcagagcctgacccagggtacgacgaagcagtcggcgggagcccacggtcgctgggcggtgtctttaagggagggggcggagccacgtctctggacatcctgagcccaagtcccccacactcagtgcagtgatgagtgcggaagtgaaggtgacagggcagaaccaggagcaatttctgctcctagccaagtcggccaagggggcagcgctggccacactcatccatcaggtgctggaggcccctggtgtctacgtgtttggagaactgctggacatgcccaatgttagagagctggctgagagtgactttgcctctaccttccggctgctcacagtgtttgcttatgggacatacgctgactacttagctgaagcccggaatcttcctccactaacagaggctcagaagaataagcttcgacacctctcagttgtcaccctggctgctaaagtaaagtgtatcccatatgcagtgttgctggaggctcttgccctgcgtaatgtgcggcagctggaagaccttgtgattgaggctgtgtatgctgacgtgcttcgtggctccctggaccagcgcaaccagcggctcgaggttgactacagcatcgggcgggacatccagcgccaggacctcagtgccattgcccgaaccctgcaggaatggtgtgtgggctgtgaggtcgtgctgtcaggcattgaggagcaggtgagccgtgccaaccaacacaaggagcagcagctgggcctgaagcagcagattgagagtgaggttgccaaccttaaaaaaaccattaaagttacgacggcagcagcagccgcagccacatctcaggaccctgagcaacacctgactgagctgagggaaccagctcctggcaccaaccagcgccagcccagcaagaaagcctcaaagggcaaggggctccgagggagcgccaagatttggtccaagtcgaattgaaaggactgtcgtttcctccctggggatgtggggtcccagctgcctgcctgcctcttaggagtcctcagagagccttctgtgcccctggccagctgataatcctaggttcatgacccttcacctcccctaaccccaaacatagatcacaccttctctagggaggaggcaaatgtaggtcatgtttttgttggtactttctgttttttgtgacttcatgtgttccattgctccccgctgccatgctctctcccttgtttccttaagagctcagcatctgtccctgttcattacatgtcattgagtaggtgggtagccctgatgggggtcgctctgtctggagcataacccacaggcgttttttctgccaccccatccctgcatgcctgatccccagttcctataccctacccctgacctattgagcagcctctgaagagccatagggcccccacctttactcacaccctgagaattctgggagccagtctgccatgccaggagtcactggacatgttcatcctagaatcctgtcacactacagtcatttcttttcctctctctggcccttgggtcctgggaatgctgctgcttcaaccccagagcctaagaatggcagccgtttcttaacatgttgagagatgattctttcttggccctggccatctcgggaagcttgatggcaatcctggaagggtttaatctccttttgtgagtttggtggggaagggaagggtatatagattgtattaaaaaaaaaaaggtatatatgcatatatctatatataatat

SEQ ID NO: 272664 - DNA, 2127 bp, Artificial Sequence
  derived and/or modified sequence
aggtacccagtgcagtcctgatctccagctctccagcggcttagaacagacacagaatgggccgggaccagggacccaccagagacgtctgtagttaatagctggcgctcttccactaataaagttttattgaaataaagcatttaaaaaggcgcccgtcattcttcccccagcgaccaatcgaagagtagaatgcctgcgtccctcactggagcttcagcggtcggaacgcgggggtggggcatgtcctgccgaaatttgcgtccttagagcggaagtacggccggaagcccgccatagagtttagtggccagagcgactcttcagggaggtggcaggaaaggcttggaacagctgccggaggtgacggagcggcggccccgcccggtgcgctggaggtcgaagcttccaggtagcggcccgcagagcctgacccaggctctggacatcctgagcccaagtcccccacactcagtgcagtgatgagtgcggaagtgaaggtgacagggcagaaccaggagcaatttctgctcctagccaagtcggccaagggggcagcgctggccacactcatccatcaggtgctggaggcccctggtgtctacgtgtttggagaactgctggacatgcccaatgttagagagctggctgagagtgactttgcctctaccttccggctgctcacagtgtttgcttatgggacatacgctgactacttagctgaagcccggaatcttcctccactaacagaggctcagaagaataagcttcgacacctctcagttgtcaccctggctgctaaagtaaagtgtatcccatatgcagtgttgctggaggctcttgccctgcgtaatgtgcggcagctggaagaccttgtgattgaggctgtgtatgctgacgtgcttcgtggctccctggaccagcgcaaccagcggctcgaggttgactacagcatcgggcgggacatccagcgccaggacctcagtgccattgcccgaaccctgcaggaatggtgtgtgggctgtgaggtcgtgctgtcaggcattgaggagcaggtgagccgtgccaaccaacacaaggagcagcagctgggcctgaagcagcagattgagagtgaggttgccaaccttaaaaaaaccattaaagttacgacggcagcagcagccgcagccacatctcaggaccctgagcaacacctgactgagctgagggaaccagctcctggcaccaaccagcgccagcccagcaagaaagcctcaaagggcaaggggctccgagggagcgccaagatttggtccaagtcgaattgaaaggactgtcgtttcctccctggggatgtggggtcccagctgcctgcctgcctcttaggagtcctcagagagccttctgtgcccctggccagctgataatcctaggttcatgacccttcacctcccctaaccccaaacatagatcacaccttctctagggaggaggcaaatgtaggtcatgtttttgttggtactttctgttttttgtgacttcatgtgttccattgctccccgctgccatgctctctcccttgtttccttaagagctcagcatctgtccctgttcattacatgtcattgagtaggtgggtagccctgatgggggtcgctctgtctggagcataacccacaggcgttttttctgccaccccatccctgcatgcctgatccccagttcctataccctacccctgacctattgagcagcctctgaagagccatagggcccccacctttactcacaccctgagaattctgggagccagtctgccatgccaggagtcactggacatgttcatcctagaatcctgtcacactacagtcatttcttttcctctctctggcccttgggtcctgggaatgctgctgcttcaaccccagagcctaagaatggcagccgtttcttaacatgttgagagatgattctttcttggccctggccatctcgggaagcttgatggcaatcctggaagggtttaatctccttttgtgagtttggtggggaagggaagggtatatagattgtattaaaaaaaaaaaggtatatatgcatatatctatatataatatgacgcagaaataaatctatgagaaatct

SEQ ID NO: 272665 - DNA, 828 bp, Artificial Sequence
  derived and/or modified sequence
atgagtgccgaagtgaaagtaaccggccagaatcaggagcagtttctgctgttagccaaatccgccaagggcgccgctttagcaacgctgatacaccaggtgctcgaagctccaggtgtatacgtttttggggaattgctggatatgccgaacgtgcgcgaactggccgagagcgactttgccagcacattccggctcttgaccgtgtttgcctacggcacttacgcagattatctggcagaggcacgcaatcttccccccctcaccgaagcacagaagaataagctgaggcaccttagcgtggtaactttggcagcaaaagtgaagtgcattccatacgctgttttgctggaggctctggcactgcgaaatgttcgtcagttggaggacttggtgattgaagcagtctatgccgacgtgctgcggggttccttggatcagcggaatcagcgactcgaagtcgactactctatcggacgcgacatccagcgacaggatctaagtgccatagccagaacattgcaggaatggtgcgtggggtgtgaggtagttctgagtggcattgaagagcaagtgtccagggcgaaccagcataaggaacaacagctcggactgaagcagcagattgaatctgaagtggccaatctgaagaaaactattaaagtgacaaccgccgcagccgccgcagctaccagtcaggacccagaacagcacctcacagaactgagagaaccagctccagggactaaccaacggcagcccagcaaaaaagctagtaagggtaaaggactgcgggggtccgccaagatctggtctaaatcaaactag

SEQ ID NO: 272666 - DNA, 828 bp, Artificial Sequence
  derived and/or modified sequence
atgagcgccgaggtgaaggtgaccggccagaaccaggagcagttccttcttctggccaagtccgcaaaaggcgccgcattagctaccttgatccatcaggtcctggaggctccaggcgtatatgttttcggcgagcttcttgatatgcccaacgtgcgagaactcgctgaaagtgactttgcgagtaccttccgtctgttgacagtctttgcatatggaacctatgctgattacctcgcggaggcgaggaacctgcccccgctcactgaggcgcagaaaaataagctgcggcacctcagcgtggtcactctcgccgccaaggtcaagtgcataccgtacgctgttctgttagaagcactggcccttcgcaatgtgaggcagctcgaagacctggtcatcgaagccgtttacgccgatgtactccggggcagccttgatcagaggaatcagagattagaggttgactactcaataggcagggatattcagcggcaagatcttagtgccattgccaggaccctacaggagtggtgtgtgggctgcgaagtcgtccttagtgggattgaggaacaggtgagtcgcgccaaccagcataaagagcaacagctaggcctcaaacaacagatagagtccgaagttgctaacctgaaaaagacaatcaaggtgaccaccgccgcagcggcggctgctacctcacaggaccccgaacagcacctcaccgaattgcgcgaacccgcgccaggaactaatcagcgccagccgtctaagaaagcgtccaaaggaaagggacttagaggcagtgccaaaatatggagcaagtccaattag

SEQ ID NO: 272667 - DNA, 828 bp, Artificial Sequence
  derived and/or modified sequence
atgagcgccgaggtcaaagtgactggtcagaatcaggagcaatttttactgctggccaaatccgctaaaggcgctgccctggcgaccctgattcaccaggtgctcgaagctcccggagtctacgtgtttggcgagcttctagacatgcccaatgtcagggaacttgcggaatcagactttgcgtccacttttaggctgctgactgtgttcgcctatggcacctatgcagattatctcgctgaagcgcgtaatctccctccactgaccgaagcccagaagaacaaactgcggcacctctccgtcgtgactctagccgcaaaggtaaagtgcatcccgtacgcagtcctgttagaggcactggccctccgaaacgttcggcagcttgaggatctggtcatagaagctgtttatgccgatgtcctccgaggatcgctcgatcagagaaaccagcgcctcgaggttgactacagcataggtagggacattcagcggcaagacctgtcagccattgcgaggaccctccaagagtggtgtgtgggttgcgaagtagttctttccggtatcgaggaacaagtgtcaagggccaaccagcacaaggaacagcagctgggcctcaaacaacagatagaatcggaagtggccaatctgaaaaagaccatcaaggtcaccaccgccgcagctgcggcagcaacgtcgcaagatccagaacaacaccttactgagctccgcgaaccagccccaggcacgaatcaacgacagccatctaaaaaagcgtcgaagggtaagggcctgaggggtagcgctaagatatggtccaaatctaactag

SEQ ID NO: 272668 - protein, 614 aa, Artificial Sequence
  derived and/or modified sequence
MDGKVAVQECGPPAVSWVPEEGEKLDQEDEDQVKDRGQWTNKMEFVLSVAGEIIGLGNVWRFPYLCYKNGGGAFFIPYFIFFFVCGIPVFFLEVALGQYTSQGSVTAWRKICPLFQGIGLASVVIESYLNVYYIIILAWALFYLFSSFTSELPWTTCNNFWNTEHCTDFLNHSGAGTVTPFENFTSPVMEFWERRVLGITSGIHDLGSLRWELALCLLLAWVICYFCIWKGVKSTGKVVYFTATFPYLMLVILLIRGVTLPGAYQGIIYYLKPDLFRLKDPQVWMDAGTQIFFSFAICQGCLTALGSYNKYHNNCYKDCIALCFLNSATSFVAGFVVFSILGFMSQEQGVPISEVAESGPGLAFIAFPKAVTMMPLSQLWSCLFFIMLIFLGLDSQFVCVECLVTASIDMFPRQLRKSGRRELLILTIAVMCYLIGLFLVTEGGMYIFQLFDYYASSGICLLFLSLFEVVCISWVYGADRFYDNIEDMIGYRPWPLVKISWLFLTPGLCLATFLFSLSKYTPLKYNNVYVYPPWGYSIGWFLALSSMVCVPLFVVITLLKTRGPFRKRLRQLITPDSSLPQPKQHPCLDGSAGRNFGPSPTREGLIAGEKETHL

SEQ ID NO: 272669 - DNA, 1845 bp, Artificial Sequence
  derived and/or modified sequence
atggacggcaaggtggccgtgcaggagtgcggcccccccgccgtgagctgggtgcccgaggagggcgagaagctggaccaggaggacgaggaccaggtgaaggacagaggccagtggaccaacaagatggagttcgtgctgagcgtggccggcgagatcatcggcctgggcaacgtgtggagattcccctacctgtgctacaagaacggcggcggcgccttcttcatcccctacttcatcttcttcttcgtgtgcggcatccccgtgttcttcctggaggtggccctgggccagtacaccagccagggcagcgtgaccgcctggagaaagatctgccccctgttccagggcatcggcctggccagcgtggtgatcgagagctacctgaacgtgtactacatcatcatcctggcctgggccctgttctacctgttcagcagcttcaccagcgagctgccctggaccacctgcaacaacttctggaacaccgagcactgcaccgacttcctgaaccacagcggcgccggcaccgtgacccccttcgagaacttcaccagccccgtgatggagttctgggagagaagagtgctgggcatcaccagcggcatccacgacctgggcagcctgagatgggagctggccctgtgcctgctgctggcctgggtgatctgctacttctgcatctggaagggcgtgaagagcaccggcaaggtggtgtacttcaccgccaccttcccctacctgatgctggtgatcctgctgatcagaggcgtgaccctgcccggcgcctaccagggcatcatctactacctgaagcccgacctgttcagactgaaggacccccaggtgtggatggacgccggcacccagatcttcttcagcttcgccatctgccagggctgcctgaccgccctgggcagctacaacaagtaccacaacaactgctacaaggactgcatcgccctgtgcttcctgaacagcgccaccagcttcgtggccggcttcgtggtgttcagcatcctgggcttcatgagccaggagcagggcgtgcccatcagcgaggtggccgagagcggccccggcctggccttcatcgccttccccaaggccgtgaccatgatgcccctgagccagctgtggagctgcctgttcttcatcatgctgatcttcctgggcctggacagccagttcgtgtgcgtggagtgcctggtgaccgccagcatcgacatgttccccagacagctgagaaagagcggcagaagagagctgctgatcctgaccatcgccgtgatgtgctacctgatcggcctgttcctggtgaccgagggcggcatgtacatcttccagctgttcgactactacgccagcagcggcatctgcctgctgttcctgagcctgttcgaggtggtgtgcatcagctgggtgtacggcgccgacagattctacgacaacatcgaggacatgatcggctacagaccctggcccctggtgaagatcagctggctgttcctgacccccggcctgtgcctggccaccttcctgttcagcctgagcaagtacacccccctgaagtacaacaacgtgtacgtgtaccccccctggggctacagcatcggctggttcctggccctgagcagcatggtgtgcgtgcccctgttcgtggtgatcaccctgctgaagaccagaggccccttcagaaagagactgagacagctgatcacccccgacagcagcctgccccagcccaagcagcacccctgcctggacggcagcgccggcagaaacttcggccccagccccaccagagagggcctgatcgccggcgagaaggagacccacctgtag

SEQ ID NO: 272670 - DNA, 1845 bp, Artificial Sequence
  derived and/or modified sequence
atggatgggaaggtcgccgtacaggagtgcggtccacccgcagttagttgggttcccgaagagggagagaagctggatcaggaggacgaagaccaggttaaggatcggggccagtggacaaacaagatggaattcgtgctgtcagtggctggcgagatcataggcctcggcaacgtgtggaggtttccttatctttgctataagaacggggggggcgctttctttatcccatactttatcttcttctttgtttgtggtatcccggtcttcttcctggaagtagccctgggtcagtacacgtcccaagggtctgtcactgcatggcgtaagatctgtcccctttttcagggaatcgggctcgcgagcgtggttattgagagttatttgaacgtgtactatataataattcttgcttgggccctgttctatctgttttcatcctttacatctgaactcccttggacaacctgcaataatttctggaacactgaacattgcacagactttttgaaccattccggagctggaacagtcacacctttcgagaactttacctcaccagttatggagttctgggagcgaagagtccttggcattacatccggaatccacgacctgggttcactcaggtgggagctcgcactctgtctgctgcttgcctgggtcatttgctatttctgcatctggaagggcgtgaagtccaccggaaaggttgtgtatttcaccgcgaccttcccttacctgatgctggttatcttactgatccgcggagttaccctaccaggcgcgtatcagggcatcatctattacctgaagcccgatctctttcggttgaaagacccacaggtttggatggatgctgggactcaaattttcttctcctttgccatttgtcagggatgccttacagccctaggaagttataacaagtaccataataactgctacaaggactgtatcgccttgtgtttcctcaattccgctaccagctttgtggcaggatttgtcgttttctctattcttggcttcatgtcacaggagcagggcgtgcccatttcggaggtcgcagaaagcggacctgggctcgcattcatagcattcccgaaggctgtgaccatgatgcccctttcgcagctgtggagctgcctttttttcattatgctaattttcctcggcctggattcccagttcgtgtgcgtcgaatgtcttgtgacagcctccatcgatatgtttcctaggcagcttagaaagtccggccgccgcgagctactgattttaaccatcgctgtgatgtgttacttaataggactgtttctcgtcacagaagggggaatgtacattttccagttgttcgattattacgcctcttccggcatatgcctcctcttcctatctctgttcgaagtggtgtgtataagctgggtatacggcgcggatcgattctacgacaacatcgaggacatgattggatataggccctggccacttgtgaagattagctggctgttcctgactccgggcctgtgcctcgcaacctttttgttttccctttctaaatataccccgttgaaatacaacaatgtgtacgtgtaccctccatggggatattcaatagggtggttcttggccctgtcttcaatggtctgcgtgccgttgttcgtagtaattactctgcttaagactcgcggccctttccggaaaaggttacgccagcttatcactccggatagcagcctacctcagcccaagcaacatccttgtctggatggatctgccggtaggaatttcggccccagtcccacacgggaaggcttaattgccggcgagaaagaaacccatctctag

SEQ ID NO: 272671 - DNA, 1845 bp, Artificial Sequence
  derived and/or modified sequence
atggacggtaaggtcgctgtacaggagtgcgggccgccagctgtgtcgtgggtgcccgaagaaggcgagaagctggaccaagaggacgaggatcaggtgaaggataggggacagtggaccaacaaaatggaatttgttctaagcgtggcaggtgagatcataggcttaggcaacgtgtggcgattcccctacctgtgctataagaatggcggaggcgcattttttatcccttatttcattttcttctttgtctgtggcatcccggtgttcttcttagaggtcgccttggggcaatacacgtcccagggatcggtcacagcatggcggaagatttgccccctctttcagggcattgggcttgccagcgtggtcatagaatcttatctaaacgtgtactacatcattattctggcctgggctttgttctaccttttcagttcttttacatccgagctgccttggactacgtgcaataatttctggaatactgagcactgtacggactttctgaaccattccggagccgggacagtgaccccatttgagaactttacctcacccgtcatggagttttgggagcgtcgagtacttggaattacatcaggaatccacgatctggggtccctgcggtgggagctcgccctgtgtctcctgctcgcttgggtcatatgctacttctgtatctggaaaggcgtaaaatccaccggcaaagtggtgtatttcacagccacgtttccatatctcatgcttgttatccttctgatccgtggcgtgaccttgcccggtgcctaccaggggattatctactacttgaagcctgatctgttccgtcttaaggacccgcaggtgtggatggatgccgggacacaaatcttcttttcattcgctatctgccagggctgcttgacagcgctcgggtcttataacaaataccacaacaactgctacaaggactgcatcgccctgtgtttcctcaactctgctacttctttcgtggcgggcttcgtggtatttagcatccttggcttcatgagccaggagcagggcgtgcccatctcggaggtggccgaaagtgggccagggcttgccttcatcgcattcccaaaggcggtgaccatgatgccgctgtctcagttgtggtcctgcctgttcttcattatgttaattttcttgggactagatagtcagttcgtgtgtgttgagtgccttgtgaccgcctccatcgatatgttccccagacagttgcgtaagagcggtcggagggagttgctgatcctgaccatagcggttatgtgttacctgatcggtctgtttctcgtaaccgaggggggcatgtacatttttcagctgttcgattactacgcaagtagcgggatttgcctgctattcttgtccctgttcgaagtggtgtgtattagctgggtgtatggagctgaccggttttatgacaatatcgaagacatgattgggtaccgaccctggccactggtgaagatctcctggttgtttctgacaccggggttgtgcctcgccaccttcctattcagccttagtaaatatactcccctgaagtataataacgtgtatgtctacccaccctggggttacagcatcggatggtttttggccctgagttccatggtatgcgtaccgcttttcgtagtgattacactcttgaagacccgcggccccttccgcaaacgactgcgccaactgatcacaccggactctagtctcccccagcctaagcagcacccctgcctggatggaagcgccggccgaaatttcggcccgagccccacgagggaaggcttgatcgcgggcgagaaagaaacccacctgtag

SEQ ID NO: 272672 - DNA, 1845 bp, Artificial Sequence
  derived and/or modified sequence
atggacggcaaggtcgctgtgcaggaatgcgggccgccagctgtgtcctgggtccccgaggagggagagaaactcgatcaggaagacgaggatcaggtgaaggatcggggccagtggaccaacaagatggagtttgtgctctccgtcgccggggagattatcggcctggggaatgtatggcggttcccttatctgtgttataagaatggcgggggagcatttttcatcccatattttatttttttcttcgtttgtggcatccccgtcttttttttggaggtagcactcggccagtacacaagtcagggatccgtgaccgcatggcgtaagatctgccctctctttcaagggattggcttggcaagtgtcgtaatagagtcatacctcaatgtgtactatatcataatactggcttgggctctgttctacctcttcagcagctttactagtgaactgccttggaccacgtgtaataatttctggaataccgaacactgcactgactttttgaaccactccggggccggcactgtcacgccattcgagaattttacatctcccgtgatggaattttgggaaaggagggtactaggtattacgtctggaattcatgacctcggctcactgcgatgggaactggcactctgtttactcttggcttgggtgatatgttacttttgtatttggaaaggtgttaagtcaaccggtaaggttgtgtattttaccgcaacctttccttacctgatgctggtgattttgctcatacgcggcgttaccctgccaggggcttaccaggggatcatttattacctgaagcctgatcttttccgactgaaggacccacaagtttggatggacgcaggaacccaaattttcttcagtttcgccatttgtcagggatgtttgactgcactgggctcatacaacaagtatcacaacaattgttataaggattgtattgcactttgctttctaaactcagccacatcattcgtcgcagggttcgttgtgttttctattctggggtttatgtcccaagagcaaggtgttcctatttcggaggtcgccgagtccggacccgggttggcattcattgcttttcccaaggccgtcaccatgatgcctctgtcgcagctttggtcttgcctttttttcattatgctgatctttttgggcctcgatagtcaatttgtgtgcgtggaatgcctggtgaccgcctccattgatatgtttccacggcaactgaggaagagcggcagaagagagctactgatcctgaccatcgccgttatgtgctatctgatcggactgttcctggtgacggagggcggcatgtacatttttcagctattcgattattacgcaagcagtgggatttgcttactgtttctgtcactattcgaagtggtctgtatcagctgggtttacggggcggacagattttacgataacatcgaagacatgatcggatacagaccttggcccctggtgaagatctcatggttgtttctgactcccggactgtgtctcgcgacgtttctcttctctctatccaagtatacccctctcaagtataacaacgtgtacgtgtatccgccatggggctacagcatcggatggtttctcgccctatcatccatggtttgcgttccgttgtttgtggttatcaccctattgaaaacccgagggccttttaggaagcgactcagacagctgattacccctgacagtagtcttccccagcctaaacagcatccttgccttgatggatccgctggccgtaactttgggcctagccctaccagggaaggcctcattgcaggagagaaagagacacatctctag

SEQ ID NO: 272673 - DNA, 1845 bp, Artificial Sequence
  derived and/or modified sequence
atggacggtaaggtggctgtgcaggagtgcggccctccagccgtgagctgggtgccggaggagggggaaaagcttgaccaggaagacgaggatcaggttaaggataggggacaatggactaacaagatggaattcgtcctgagcgtggctggtgaaattattggcctaggaaacgtctggagatttccctatctgtgttacaaaaacggcgggggggccttctttatcccatattttatctttttcttcgtctgcggcatccccgtattcttcctcgaggttgctttaggccagtatacatctcaggggtctgtcaccgcttggcgaaagatatgtccattattccagggaattggactggcttcagtagtgatcgaatcctacttaaatgtctactatattattatattagcatgggcccttttctaccttttcagctcattcactagcgagctgccatggaccacttgtaacaacttttggaacaccgaacattgtactgactttctgaaccactctggggccggaacagtcaccccttttgagaactttacttcccctgtgatggaattctgggagcggcgcgtcttaggaatcacctcaggcattcatgatctgggctcgctgcgatgggagctggctctctgccttttgctagcctgggtaatctgttacttctgcatatggaaaggggttaagtctactggcaaagttgtttactttactgcaacctttccctacttaatgctagtgattctgttgatcaggggtgttactcttccaggggcttatcaggggatcatatactacttgaagcctgacctctttagattgaaggatcctcaggtgtggatggatgcaggaacccagatattctttagctttgccatctgtcaaggttgtctaactgcactcggatcatacaataagtatcacaacaactgttataaggactgcatcgctttatgctttctgaattcagccacctctttcgtcgccgggttcgtcgtcttttcaatcctgggctttatgtctcaggaacaaggcgtgcctattagtgaggtggccgagagtgggcccggcctggcctttatcgccttcccaaaagccgtgacaatgatgcccttaagtcaactgtggagctgtttgttttttattatgctcatctttttgggcctggactcacagttcgtctgtgttgagtgtctggtgacagcgagtatcgacatgtttccgcggcaactgcgcaagtcgggaagacgggaattgcttatattgaccatagccgtaatgtgttacctgataggcctatttttggtgaccgaaggcggtatgtatatcttccaattgtttgattactacgcctcttctggcatctgcctcctcttcctttctctatttgaggtggtatgcatttcctgggtgtacggcgccgaccggttttacgacaatatcgaggatatgattgggtaccgtccctggccgttggtgaaaatctcatggctttttttgacacccgggctttgcctcgcgactttcttgtttagcttatccaagtatacgcctttgaaatacaacaacgtatatgtgtaccccccttggggttactcaattggctggttccttgccttgtcttctatggtgtgcgtgcctctgttcgttgtgatcacactcctgaagaccaggggtccttttaggaagcggctgagacagttgatcacccctgattcctcactgccacagccgaagcaacacccctgtctggatggaagtgcaggacggaattttggccccagtcccaccagggaagggcttatagccggtgagaaggagacccatctgtag

SEQ ID NO: 272674 - DNA, 1845 bp, Artificial Sequence
  derived and/or modified sequence
atggatggaaaagtcgccgtgcaggagtgcggtcccccagccgtctcctgggtcccggaggaaggagagaaactggatcaggaggatgaagatcaggtgaaggaccggggccagtggaccaataagatggaatttgtgctgagcgttgctggagaaatcattgggctgggaaacgtgtggcgcttcccatatctgtgctataagaacgggggaggtgcattctttattccgtattttattttcttctttgtgtgcggtattccagtgtttttcctggaggtcgcactcgggcagtatacctcacagggctcagtgaccgcctggagaaagatatgtcctctgttccaaggtatcgggctcgccagtgttgtgattgaatcctatctcaatgtgtactacataattatcctggcttgggcactgttctacctgtttagctcattcacctctgagttgccatggaccacctgcaacaacttctggaatacagagcactgcaccgattttctgaatcactctggcgcaggcaccgtcacgcccttcgaaaacttcacttctccggtaatggaattttgggagaggcgcgttctaggcatcacatctgggatccacgatttaggctccttgagatgggagctcgccttgtgtcttttacttgcgtgggtgatatgttatttttgcatctggaagggcgtgaaatcaacagggaaggttgtgtatttcacagccacattcccctatttaatgcttgtgattctgctcattcgtggggtgacccttcccggagcttaccaaggaatcatctactaccttaaaccagacctttttagactgaaggatcctcaagtgtggatggacgctggtacgcagatctttttctcgttcgccatttgtcagggctgtctgactgctttaggatcatacaataagtaccataacaattgctataaggactgtattgctctttgtttcttaaatagcgccacttctttcgtggcgggattcgtggtgttctcaatcctcggctttatgtctcaagagcagggagtacctatcagtgaggttgccgaaagtggtcctggactcgctttcattgcctttcccaaagccgtaactatgatgcccctgtcccagctttggagttgcctgttttttattatgttaatctttctgggtcttgatagccaattcgtgtgtgtggagtgtcttgtgactgcttccatcgacatgtttccgcggcaactgcgaaagtctggaaggcgcgaattgttgatcctgaccatcgccgtcatgtgctatctcatcggactcttcctggttacagaaggcggaatgtatatctttcagttgttcgactactatgcaagcagtggcatttgcctgttattcctgagcctgttcgaggtggtgtgtatcagctgggtttatggggcggataggttctacgataacattgaagacatgatcggctatcggccctggccactggttaagattagctggttgttcttgactcctggcctttgccttgctacgtttctcttctccctgtcaaagtatacacctcttaagtataataatgtctacgtatatcccccttgggggtattccattggctggttcttagccctgagctccatggtgtgtgtgcctttgtttgtagtgatcacactgctcaagacgcgcggcccctttcgaaagagactgcggcagttaattacacctgacagcagtctccctcagcctaagcagcatccatgtctggacggatctgctggaaggaacttcgggccatcccctacccgggaagggctgattgctggcgaaaaggagacgcacctttag

SEQ ID NO: 272675 - DNA, 1845 bp, Artificial Sequence
  derived and/or modified sequence
atggatggcaaggtggccgtgcaggagtgtggccccccagctgtgtcctgggtgcctgaggagggggagaagctggaccaggaggatgaggaccaggtgaaggaccggggccagtggaccaacaagatggagtttgtgctgtctgtggccggggagatcatcggcctgggcaatgtgtggaggttcccctacctgtgctacaagaatggaggaggagccttcttcatcccctacttcatcttcttctttgtgtgtggcatccctgtgttcttcctggaggtggccctgggccagtacaccagccagggctctgtgacagcctggaggaagatctgccccctcttccagggcatcggcctggcctctgtggtgattgagagctacctgaatgtgtactacatcatcatcctggcctgggccctcttctacctgttcagcagcttcaccagcgagctgccctggaccacctgcaacaacttctggaacacagagcactgcacagacttcctgaaccacagcggggccggcaccgtgaccccatttgagaacttcaccagccctgtgatggagttctgggagcggcgggtgctgggcatcaccagcggcatccatgacctgggcagcctgcgctgggagctggccctgtgcctgctgctggcctgggtgatctgctacttctgcatctggaagggcgtgaagagcacaggcaaggtggtgtacttcaccgccaccttcccctacctgatgctggtgatcctgctgatccggggcgtgaccctgcccggggcctaccagggcatcatctactacctgaagccagacctcttccggctgaaggacccccaggtgtggatggatgctggcacccagatcttcttctcctttgccatctgccagggctgcctgacagccctgggcagctacaacaagtaccacaacaactgctacaaggactgcatcgccctgtgcttcctgaacagcgccaccagctttgtggccggctttgtggtgttcagcatcctgggcttcatgagccaggagcagggcgtgcccatcagcgaggtggccgagagcggccctggcctggccttcatcgccttccccaaggctgtgaccatgatgcccctgagccagctgtggagctgcctcttcttcatcatgctgatcttcctgggcctggacagccagtttgtgtgtgtggagtgcctggtgacagccagcattgacatgttcccccggcagctgaggaagagcggccggcgggagctgctgatcctgaccatcgctgtgatgtgctacctgattggcctcttcctggtgacagaaggaggcatgtacatcttccagctgtttgactactatgccagcagcggcatctgcctgctcttcctgagcctgtttgaggtggtgtgcatctcctgggtgtatggagctgaccgcttctatgacaacatcgaggacatgattggctaccggccctggcccctggtgaagatctcctggctgttcctgaccccaggcctgtgcctggccaccttcctgttcagcctgagcaagtacacccccctgaagtacaacaacgtgtatgtgtacccaccctggggctacagcatcggctggttcctggccctgagctccatggtgtgtgtgcccctgtttgtggtgatcaccctgctgaagacccggggccccttcaggaagaggctgcggcagctgatcaccccagacagcagcctgccccagcccaagcagcacccctgcctggatggcagcgctggcaggaactttggccccagccccacccgggagggcctgattgctggggagaaggagacccacctgtag

SEQ ID NO: 272676 - DNA, 1845 bp, Artificial Sequence
  derived and/or modified sequence
atggacggcaaggtggccgtgcaggagtgcggcccccccgccgtgtcctgggtccccgaagaaggggaaaagttagaccaagaggatgaggatcaggtcaaggaccgggggcagtggaccaataaaatggagtttgtactctctgtggccggagaaatcattggactgggtaatgtgtggcgctttccctatctgtgttacaaaaatggcggcggggccttcttcattccttactttattttcttcttcgtgtgcggcatcccagtcttcttcctcgaggttgccctggggcagtatacctcccaagggtcagtgacagcctggcgtaagatttgtccgctttttcagggtatagggctcgcctcagtcgtcatagagtcatacctaaacgtatattacattatcatcttggcatgggctcttttctatttgttttctagcttcacctccgaacttccatggaccacatgcaacaatttttggaatacagagcattgcacagactttctgaatcatagtggagcgggaactgtgacaccattcgagaactttacctcaccagtaatggagttttgggagcgacgcgtgttaggcatcacctccggcatacacgatctcggcagcctgcggtgggagttggctctctgcctgttactggcctgggtgatatgttacttctgtatctggaaaggcgttaagtccactggaaaggtggtctattttacagcaactttcccttacttgatgctagtgattctgttgatccgaggcgtcactctgcccggggcttaccagggaattatatattacctgaaacctgacctgttccgcctgaaggatccgcaggtctggatggatgccggcacccagatatttttttcttttgcgatctgtcaaggctgtttgaccgccctgggaagctataataagtatcacaacaactgttacaaggattgcatcgctctgtgctttctgaattcagccacttcttttgtggcaggatttgtagtattttctatcctgggattcatgtcacaagagcagggggtgcctattagtgaagttgcggagagcggcccagggctcgcctttatagcgttccccaaggctgtgaccatgatgcccttgagccagctttggtcttgtctgttttttattatgctcatatttctgggcctcgatagccagtttgtctgcgtagagtgtctggtaactgcaagcattgatatgtttccgaggcagctgaggaaatctggacgaagagagctgctgatcctgactattgcagtgatgtgttatttaattggtctgtttcttgtcactgaaggaggtatgtatattttccagttgtttgattattacgcctcctccgggatctgcttactatttctaagtttgttcgaagtcgtgtgtatatcttgggtctatggggcagaccggttctatgataatatagaagacatgattggctaccggccctggcccctcgtgaaaataagctggctctttctcacaccaggattatgtctggcaacattcctgttctcactgagtaagtatacgcccctgaagtataataatgtgtatgtgtatcctccctggggctattcaatcggttggtttttggccttatcctccatggtgtgtgtccctctttttgtggtgattacccttctcaagaccagaggtcccttccgaaagcggctgcgccagctcatcacaccagactcatcccttcctcagcctaagcagcacccctgcctagatgggtctgccggccgaaactttggaccatcacctactagagaaggtctgattgctggagaaaaggaaacacatctgtag

SEQ ID NO: 272677 - DNA, 1845 bp, Artificial Sequence
  derived and/or modified sequence
atggacggcaaggtggccgtgcaggagtgcggcccccccgccgtgagttgggtccctgaggagggagagaaactcgatcaggaagacgaagaccaggtgaaggatcgcggacagtggactaacaagatggagttcgtattgtctgtcgccggagaaatcataggactcggtaacgtgtggcggttcccctacctctgctacaagaacggcggcggggcattcttcatcccatacttcatctttttcttcgtgtgtggcatccccgtgttcttcctagaggttgcgttagggcaatacacctctcagggttccgtcaccgcctggcggaagatctgtccactattccagggcatagggttggcgtcggtggttattgaaagctacctcaacgtgtactatatcattattttagcctgggctctcttctacttattctccagctttacaagcgagttaccgtggactacatgcaacaatttttggaatactgaacactgtacggatttcctgaaccattcgggcgctggcacagttactccatttgaaaacttcacctcaccagtgatggagttctgggagagacgggtccttgggatcacatccggtatccacgatctgggctctttgcggtgggaactggctctttgtctgctgctagcttgggtgatttgctacttttgcatttggaaaggggtcaagagcactggcaaggtggtctacttcactgcgacattcccctatctgatgttagttatcctactgatcagaggcgtgaccttaccaggagcataccagggaattatatattatctcaagccggaccttttccggctgaaggatccacaggtatggatggatgccggtacccaaatattcttcagctttgcaatctgccagggatgtcttaccgctctcggctcttacaataaataccataacaattgttacaaggattgcatcgccctttgcttccttaactccgccactagcttcgtcgctggtttcgtggtgttttccatcctcgggtttatgtcacaggaacagggagttccaataagcgaagtagccgaatccgggcctggcttagccttcatcgccttcccaaaggcagtgactatgatgccgctctcacaactgtggtcatgcctgtttttcatcatgttgattttcctgggcctcgacagccagtttgtctgcgtcgagtgcctggtcacggctagtattgacatgttcccacgccagctgagaaaatcgggtcgacgcgagctgctcatcttgactatcgcagtcatgtgctacttgattggactgtttctggtaacggagggcggcatgtacatattccagctttttgattattatgcttctagcggcatttgcctactgtttttgagcctgtttgaggttgtctgcataagttgggtttatggggctgaccgcttctatgacaatattgaagacatgatcggatacaggccgtggccactggtaaagattagttggctatttttaactccaggtctgtgcctcgctacatttttgttcagtcttagtaagtatacacccctaaaatataataacgtctatgtttatcccccgtggggatattcgataggatggtttctcgctttgtcctccatggtctgtgtgccactcttcgtggtcatcacactgttaaaaacccgcggacccttcaggaaacggctgcgacagctgatcacccccgatagcagcctcccccagcctaagcaacatccctgtcttgacggctctgctggtcgcaacttcggcccgagccctactcgggagggcctaattgccggcgagaaggaaacgcatttgtag

SEQ ID NO: 272678 - DNA, 1845 bp, Artificial Sequence
  derived and/or modified sequence
atggacggcaaggtggccgtgcaggagtgcggcccccccgccgtgtcctgggtgccagaggagggggaaaagctcgaccaggaggatgaggatcaggttaaggatcgcggacagtggacaaacaaaatggagttcgtcctcagcgtggctggcgaaattattggactcggtaatgtatggcgctttccttatctctgctacaagaatggcgggggagctttctttattccctatttcatctttttcttcgtctgcgggattcctgtgttttttctcgaggttgccttggggcagtacacgagccagggcagtgttaccgcttggcgcaaaatctgtcctttgtttcagggtatcggcctcgcctccgtggtcatcgagtcctatcttaacgtgtattatatcatcatccttgcctgggcccttttttacttgttcagtagttttacttcagagctgccttggacaacctgtaataacttctggaataccgagcactgtacagattttctgaaccattccggtgctgggactgttaccccatttgaaaacttcacatcccccgtgatggaattctgggagcgacgtgtactgggtatcacttcaggcatccatgatctgggctccctcagatgggagttggcattatgcctcctgctggcatgggtcatctgctacttctgcatctggaagggggtaaaatctactggcaaggtcgtgtattttaccgcaactttcccctacctgatgctggtgatccttcttatccgcggggtaacactacctggggcttatcagggtatcatttattatttgaagcctgacttgttccgcttgaaagatccacaggtttggatggacgctgggacccagatctttttctcttttgccatttgccagggctgtctgaccgccctcgggagttacaacaaataccacaataactgttacaaggattgcatcgccctgtgtttcctgaattctgccaccagttttgtggcgggctttgtcgtgttcagtatcttgggctttatgagtcaggagcagggcgtccctatctctgaggtcgccgaatctggccctgggctggcttttattgccttccctaaagcagtcacaatgatgccgctgtcccagctctggtcttgccttttcttcattatgttgatattcctcggtctggattctcagtttgtttgcgtcgagtgcctggtgacagcttccatagatatgtttccccgccaactgagaaaatcaggcagacgcgaactgttaatactgacaatcgccgtgatgtgctatctcatcggcctgttccttgtgacagagggtggaatgtatattttccagctcttcgattattacgcatcctctggtatttgtctcctgtttctttcactgtttgaggttgtttgcatcagctgggtttacggcgctgatagattctacgacaacatagaagacatgatcgggtaccgcccatggccattggtgaaaatatcttggctgtttcttacacccggtctctgtctcgccacttttctgttttctttgtctaagtacacccccttaaaatacaacaacgtgtacgtgtatccaccatggggttattccatcggatggttcttggccctgtcaagcatggtgtgtgtgcccctattcgttgtgatcacactgcttaagactcgcgggccttttcggaagcgcctgagacaactcataacgccagattcctcactgccacagcccaaacagcatccctgcttggacggatctgcaggaaggaattttggaccttcacccactagagaagggcttatcgccggcgaaaaggagacccatctgtag

SEQ ID NO: 272679 - DNA, 1845 bp, Artificial Sequence
  derived and/or modified sequence
atggacggcaaggtggccgtgcaggagtgcggcccccccgccgtgagctgggtgcccgaggagggagaaaagctggaccaggaggatgaggaccaggtaaaagatcgggggcagtggaccaataagatggagtttgtgctgtctgtcgcaggggagatcatcggacttggtaatgtttggaggtttccctatttgtgttacaagaatggcggaggcgccttcttcatcccctatttcatcttcttcttcgtctgtggcatacctgtatttttcttggaggtggcgctgggacaatatacctctcaggggagtgttacagcttggaggaaaatttgcccactctttcagggtatcgggctggctagcgtggtgatcgaatcttacctcaacgtatactatatcattatcctggcctgggctttgttttacttattttccagttttaccagcgaactcccttggacaacatgcaacaatttctggaacaccgagcactgcacagatttcctgaaccactcaggggctggaaccgtgactccattcgaaaacttcacatcgcccgtgatggagttctgggaaagaagggtgttggggattacaagtgggatccacgatttaggctccctgagatgggaacttgctttatgcctgctcctggcctgggtcatctgttacttttgtatatggaaaggggtgaaaagcactgggaaagttgtgtatttcaccgcgacctttccttacctgatgttggtgattctgcttattagaggcgtgaccctacccggagcctatcaggggatcatatactacctgaaacctgacttgtttcgacttaaggaccctcaggtttggatggatgccggcacccagatcttcttctcctttgcaatctgtcagggctgcttaaccgccctcggctcatacaataaataccataacaactgctataaggattgtatcgcactttgcttcctaaattcagcaacttccttcgtggctgggttcgtggtgttctctatcctgggatttatgtcccaggagcagggggtgcccatctcagaggtcgcggagtccggacctgggctagcgttcattgcttttccgaaggccgtgacgatgatgccactgtcccagctctggtcttgtctgttttttatcatgctgatctttctcggcctggattcacagtttgtgtgcgtcgagtgcctggtaaccgcgagcatcgacatgttcccacgccagctccgaaagtccgggcgtcgtgaactgttgatactgacaattgccgtcatgtgttatctgattgggctttttttggttacagaggggggcatgtatatctttcagttgtttgattattacgccagcagtggaatttgtctactcttcctgagcctctttgaggtagtgtgtatttcttgggtttacggcgccgatcgcttttacgataatatcgaggatatgattggttacaggccctggcccctggtgaagatctcttggctgtttctcacacctggcctttgtttggctacatttttgtttagcctatctaaatacactccactgaaatataataacgtgtatgtgtaccctccctggggctacagcatcggctggtttcttgcgctgtccagcatggtgtgtgtgcctctgtttgtcgtcatcaccttactgaagacaagaggacccttccgaaagagactgcgtcagctgataacccctgacagctcgctgcctcagccaaagcagcacccatgccttgacggctcagccggtagaaattttggcccttccccaacacgggaggggctcatagctggcgaaaaagaaactcacctctag

SEQ ID NO: 272680 - DNA, 1845 bp, Artificial Sequence
  derived and/or modified sequence
atggacggcaaggtggccgtgcaggagtgcggcccccccgccgtgtcctgggtccccgaggaaggagagaaactggatcaggaagatgaggaccaagtgaaagatagagggcagtggacaaataaaatggaattcgtgctgtccgtcgcaggggagatcatcggtctgggtaacgtgtggcgcttcccatacctctgttacaagaacggaggaggtgccttctttatcccttacttcattttctttttcgtttgcggaattcccgtctttttcctagaagtcgctctgggccagtacacaagccaaggatccgtgaccgcttggcgtaaaatatgtcctctcttccaaggcattgggttggcaagtgtcgttatcgagagctatttgaatgtgtactacattatcatcctagcttgggccttattttacctgttctcctccttcacctccgagctcccttggaccacgtgtaacaacttttggaacaccgaacattgtactgacttcttgaaccattccggtgcagggaccgtgaccccctttgagaatttcaccagcccagtgatggaattctgggagcgcagagtcctgggcataacatccggcatccatgacctgggcagtctgagatgggaactggccctctgcctcttgctggcctgggtaatttgctatttttgcatttggaagggagttaagtcaaccggcaaagttgtgtattttactgctacttttccatacctcatgctggtgatactactgatccgaggagtgacacttcccggggcttatcaggggattatctattatcttaagcccgatctttttcgcctgaaagacccccaggtgtggatggacgctgggacccagatattcttctcttttgctatctgccagggctgtctgactgccctgggatcatacaacaagtatcacaataattgctacaaggactgcatcgccttatgtttcttgaactcggccacctcttttgtggcgggctttgtcgtgtttagtatcctaggatttatgtcgcaagaacagggcgtacccatttccgaagtggcagagtctgggccaggtctggctttcattgccttccccaaagccgtgaccatgatgcctctgagccagctgtggagctgcctttttttcataatgcttattttcctgggtttggattctcaattcgtgtgtgtggaatgcctggtgactgcgtccatcgatatgtttccacgccaactgaggaagagcgggcggcgtgaactcctgattctcactatcgcagtgatgtgctatctgatcggtctattcctggttacagagggaggcatgtacatcttccagctctttgattattacgcctcatctggtatttgtttgctgtttctcagccttttcgaagtggtttgtatttcatgggtgtacggagccgaccgcttctacgacaatatcgaggatatgataggttaccggccctggccactcgttaagatttcatggctgttcctgactcctggtctgtgtctggccacattcctcttctccttgagtaagtacacccctttaaaatacaacaatgtctacgtgtatccgccgtggggatactcgatcgggtggttcttagcattatcttctatggtatgcgtgccactgttcgtggtgattacactgctcaaaactcgcggcccttttcggaaacgtctgagacagctgatcacacccgactcaagccttccacagccaaagcagcacccatgtttagacgggagcgccgggaggaattttggaccctcacccacacgggagggcctgatagcaggagaaaaagagacccatctgtag

SEQ ID NO: 272681 - DNA, 1845 bp, Artificial Sequence
  derived and/or modified sequence
atggacggtaaggtggctgtgcaggagtgtgggccacccgctgtttcttgggtaccggaagagggggaaaagttggaccaggaagacgaagatcaggtgaaggatagaggccaatggacgaataaaatggagtttgttctgagcgtggctggagagatcataggactgggtaatgtatggcggttcccttacttgtgctacaaaaacggtgggggagcatttttcatcccttactttattttcttcttcgtctgcgggatcccagtgtttttcctggaggtggcccttggtcaatatacatcacagggaagcgtgactgcctggcgcaaaatctgtccgctgtttcaagggatcggcctagccagcgtcgttattgaatcatacctaaatgtctattatataattattcttgcctgggccctcttctacctgttcagcagttttacaagcgaactgccctggaccacctgcaacaacttttggaataccgaacactgcaccgacttcttgaaccattccggcgcaggcactgtgactccttttgaaaattttacatctcctgtgatggaattctgggaacggagagtactgggcattacttccggcatccacgacttagggtctcttcgctgggagctggctctgtgtctgctcctggcctgggtgatctgttatttctgtatctggaagggagtgaagagcacgggaaaggtcgtgtactttaccgcgactttcccctatctgatgctggtgattctgcttatccgaggcgttacactccccggtgcctaccagggtattatctactatctcaaacccgatcttttccgactcaaggaccctcaggtctggatggatgcgggaacgcagattttcttttccttcgctatctgtcagggctgtttaaccgctctcggatcctataataaataccacaataattgttataaggactgcattgcattgtgcttcctaaatagtgccacatcctttgtcgcaggatttgtggttttctcgatactcggatttatgagccaggaacagggcgtgccgatctctgaggtggctgagagcggaccgggtctggcgtttattgcctttccgaaggccgttacaatgatgcctttgagtcagttatggagctgcctgttcttcatcatgctgattttcctggggttagatagtcaattcgtgtgtgtggagtgtctggtgacagctagcattgacatgtttccaagacagctccgcaagagcggccgtcgagagcttctgattttaactatagcagtaatgtgctatcttatcggccttttcctggtgaccgagggtggcatgtatatcttccaactctttgactactacgcaagctcggggatatgcctcctgtttctgtctctctttgaggtggtttgtataagctgggtttatggcgctgatagattctacgataacattgaagatatgattgggtacagaccctggccgctggttaaaatttcctggctgttcctgacacctgggctgtgcctggccacctttctgttttccctcagtaagtacacccccttgaaatacaacaatgtttatgtgtaccccccttgggggtactccattgggtggttcttggctctgagtagtatggtttgcgtaccgctctttgtggtgattacactgttgaagactcggggtcccttcagaaagagattgcgtcaattgattacccccgatagctccctgccacagccaaagcagcacccatgtctggacgggagtgcgggtcgtaatttcggcccttcaccgacgcgcgagggtttaatcgccggagagaaagaaactcatctctag

SEQ ID NO: 272682 - DNA, 1845 bp, Artificial Sequence
  derived and/or modified sequence
atggatggcaaagtggcggtccaagagtgtggaccacctgctgttagctgggttcccgaggaaggggaaaagctggatcaagaggacgaggatcaagtgaaggataggggacaatggactaacaagatggaatttgtgctgagcgtagctggggagatcatcgggctcggcaatgtctggcgctttccttatctctgctacaaaaacggaggaggggctttctttatcccatattttatcttcttttttgtctgtggcattcccgtcttttttctggaagttgcgttaggtcagtatacgtcacagggttcagttaccgcgtggcgaaaaatttgtccgctctttcagggtattggccttgccagtgtagtgattgaaagttaccttaatgtatattatattataatcttagcttgggcactcttttatttattttcatcttttactagtgaactgccatggacaacttgcaataacttctggaacacagagcattgcacagactttttgaaccattcgggagcgggaacggtgaccccatttgaaaactttacaagtcccgttatggagttctgggaaaggcgtgtcctcggtataacttccggcattcatgacctcgggtccctacgatgggagctggcactgtgccttctcctcgcgtgggttatttgctatttctgcatctggaaaggagttaaatccaccggcaaggttgtgtattttactgctacgtttccttacttaatgctggtgattctgctaattcgaggagtcaccttgccaggggcttaccaagggatcatatactatctgaagcctgatttgttccgcttaaaagatcctcaggtgtggatggacgcgggtactcagatctttttttctttcgcaatttgccagggctgcctgacggcactgggaagctataacaaataccacaacaactgctacaaggattgcatcgccttgtgttttctgaacagcgctacctcctttgtcgcgggattcgtcgtgttcagcattttgggttttatgagtcaggagcaaggggtcccaatttccgaggtggccgagtccggcccaggcctcgctttcatcgctttccccaaagcagtcaccatgatgccactctcccaactctggagctgcctattctttataatgttaattttcttgggcctggacagccagtttgtctgcgtggaatgccttgtaaccgccagtattgacatgtttccacgccagctcagaaagtcagggaggagagagctgttgatactgacgatcgccgtgatgtgctatcttatcggcctattcctggtgactgaggggggaatgtatattttccagctctttgactattacgcgtcctcaggaatctgtctgctcttcctgtccttgtttgaagtcgtgtgcatttcttgggtatacggagccgaccggttttacgataacatcgaagacatgattgggtatcgaccttggcccctagtcaagatcagctggctattcctgacccctggtctgtgcttggcaacgtttttattcagtctgagcaagtacacaccgcttaaatacaataatgtgtatgtctatcctccctggggctactcaatcggatggttcctcgccttgagttctatggtgtgtgtacctctattcgttgtgatcaccctgctcaagactcgcggtccattccggaagcggctccgccagctgatcacccctgatagctccctcccgcagcccaaacagcacccatgtctggacgggtctgccggtaggaatttcggcccatcccctacacgcgagggattgatcgccggagagaaagagactcacctctag

SEQ ID NO: 272683 - DNA, 1845 bp, Artificial Sequence
  derived and/or modified sequence
atggacggcaaggtggcagtccaggagtgcgggcctcctgcagtaagctgggtaccagaggagggagaaaagctagaccaggaagatgaagatcaggtgaaagatcgcggtcagtggactaacaagatggaatttgtcctctcagtggcgggtgagataataggtctcggaaatgtatggcggttcccctacctgtgctataagaatggagggggagcattttttatcccttattttatcttcttctttgtatgcggaatcccagtatttttcctagaagtggccctcgggcagtacaccagtcagggctccgttaccgcttggcgtaagatttgtcctcttttccaaggtatcggccttgcttctgtggtgatcgaaagttatctcaacgtgtactatattattattttggcttgggcactattctacctcttcagttctttcacctctgagctcccatggactacatgcaataacttctggaataccgaacactgcaccgactttctcaatcacagcggtgctggaacggtaacacctttcgagaacttcaccagtcccgtgatggaattttgggaacgcagggtcttggggatcacttccggtatccacgatctgggaagccttcgatgggaactagccctgtgcctgcttctggcctgggtgatatgctacttttgtatttggaaaggcgtgaagagcactggaaaggtggtttatttcaccgccacatttccatatctgatgctggttattttactaataaggggcgtgacccttcctggtgcttaccaaggaatcatttattacctcaaaccagacctgtttcggctgaaagatccacaagtgtggatggatgcaggcacccagattttcttctcttttgccatctgtcagggatgccttacggccctcggaagctacaataagtaccacaacaactgctacaaggactgtatcgccctgtgtttcctgaattctgccacatcttttgtcgctggctttgtagtgttcagcatcctgggatttatgtcgcaggagcagggtgtgcctattagcgaagtcgctgagtctggacccggtttggctttcattgcctttcctaaggctgtgacgatgatgccactctcacaactgtggtcttgcttgttctttattatgctcatttttctcgggcttgatagccaattcgtgtgtgtcgagtgtctggtgaccgcctccatagacatgtttcctcggcagctgagaaaatccggaaggagagagctgctgatactgactatcgctgtcatgtgctacctaataggactgtttctagtcactgaaggtgggatgtacatctttcagttgtttgattattatgctagttcaggtatctgtctgctgttcctgtctctgtttgaggtggtttgtatcagttgggtttatggagccgatcgattttacgacaacattgaagatatgatcggatacagaccttggcccctggtcaaaatcagttggctttttttgacacctgggttgtgtctggccaccttcttgttcagcctgagtaagtatacacctctgaaatacaacaacgtgtacgtgtacccaccctggggctactcgattgggtggttcctggcgttatcgtcaatggtgtgcgtgccactgtttgtcgttataactcttcttaagacaaggggtccattcagaaagagactgcggcaactgattacaccggacagctccttaccccagccaaagcagcatccctgtcttgatgggagcgcgggtagaaacttcggtccaagcccaacacgggagggcctgattgccggtgagaaggaaactcacctctag

SEQ ID NO: 272684 - DNA, 1845 bp, Artificial Sequence
  derived and/or modified sequence
atggatggcaaagtggccgtccaggaatgcggcccacctgccgtcagctgggtgcccgaagagggggaaaagctagaccaggaggacgaagaccaggtgaaggaccgagggcagtggaccaataaaatggagttcgtcctctctgtcgcaggggagattattgggctaggcaacgtctggagatttccatatctgtgttataagaacggaggcggagctttttttatcccatatttcatctttttcttcgtgtgtggcatcccagtattttttctggaagtagccctcggtcagtataccagccagggaagcgtgaccgcctggcgcaaaatatgtccgctgttccagggaattgggctggcctccgtggtcatcgagagttatctgaacgtctactatataataattctggcgtgggctctcttttacctgttcagcagcttcaccagtgagctcccctggaccacttgtaataatttttggaacaccgaacattgtacagatttcctgaaccactctggggcaggcacagtgactccttttgagaacttcacaagtcccgtcatggaattttgggaacggagggtcttaggaattacctcaggtatacacgatctggggagcctacgctgggaactggccctctgcctcctcctggcttgggtaatctgttacttttgtatttggaaaggcgtaaagtccacaggtaaggtggtctacttcaccgccaccttcccctatcttatgttggtgattctcttaattaggggggttacgctgccaggagcctatcagggcatcatatattatctgaagcctgatttgttccgtctcaaggacccccaggtatggatggatgcaggaacccagatatttttctcgtttgctatttgccaggggtgccttaccgccctgggcagctataacaaataccacaataattgctataaagactgtattgccctgtgttttctcaattctgctacgtccttcgtagccggtttcgtcgtattcagcatcttagggtttatgtcccaagagcagggggtgcccatttctgaggtggcggaaagtggcccaggattagctttcatcgcatttcctaaggcagtgacaatgatgcccttaagtcagctttggagctgtctctttttcatcatgctgatcttcctggggctcgacagtcagttcgtgtgcgtggagtgcctcgtgaccgccagtatagacatgttcccacggcagttacgaaagtctggcaggcgggagttacttatcctgaccatcgcggtgatgtgttacttaataggtctttttctggtgactgagggcggtatgtatatctttcagctttttgattattatgcatctagtggaatctgccttctttttcttagcttgttcgaagtggtctgcatctcttgggtctacggcgcagataggttctacgacaacattgaggatatgatcggataccgtccatggccacttgtgaagattagctggttattcctgacaccaggcctgtgtctggctacattcctgttttcactcagcaaatatacaccgttaaaatataataacgtgtatgtgtatccgccttggggctactcaatcggatggttcctggctctctcttcgatggtgtgcgttcctctctttgtagtgatcactctactcaagactcgaggcccattccggaagagattgaggcagctcatcactcctgattcctcgcttcctcagccaaagcaacatccttgcttggacggaagtgccggtaggaactttggtccaagcccaactagagagggtctgatcgcaggcgagaaagaaacgcatctctag

SEQ ID NO: 272685 - DNA, 1845 bp, Artificial Sequence
  derived and/or modified sequence
atggatggcaaagtcgcagttcaggagtgcggaccaccggctgtcagctgggttcctgaggagggagagaaactcgatcaagaagacgaagaccaagtaaaagaccgcggtcagtggacaaataaaatggaatttgtgctgtccgttgccggtgaaataatcggcctaggcaatgtctggagattcccttacctctgctacaagaatggaggaggagcgttctttattccttattttatattttttttcgtatgcggaattcccgtgttctttctggaggtagcactgggccaatacactagtcagggttcggtgacagcttggcgaaagatctgtcctttatttcaggggatcggtctggccagcgtggtgatcgagtcctacctgaacgtgtattacattatcatcctggcatgggccctgttctacctattctcaagtttcacaagcgagctgccatggactacgtgcaataatttttggaataccgagcattgcacagactttctgaaccatagcggggctggcacagtcacccctttcgaaaacttcacatccccagtcatggagttctgggagcggagggtgctcggcattacaagtggtattcacgatctcggtagcctcaggtgggaactggccttatgtttgcttctggcctgggtgatttgttacttctgcatctggaaaggcgtgaagagcacaggaaaagttgtgtatttcaccgccaccttcccctatctaatgctagtgatattgctgatcagaggtgtgaccctgcctggagcctatcagggtatcatttattacttaaagcccgacttgttcagactaaaggacccacaagtttggatggacgcagggactcagatatttttctctttcgcgatctgccagggttgcctcacagctcttggaagctataataaataccataataactgctataaggactgtatcgcactgtgtttccttaactcagccactagcttcgtggccggtttcgtggtgttttcaatcctggggtttatgtcacaggaacaaggcgtgcccatatcagaggtggccgagtctggcccagggctggcctttattgcttttcccaaagcggtcacaatgatgcctctgtcacaactgtggagctgtcttttcttcattatgctgatcttcctgggcctggactcccaattcgtttgcgtggaatgtcttgtcactgcttctattgatatgtttcccaggcagttacggaagagcggaaggcgggagctgctcatccttaccatcgcggtgatgtgttacctgattgggctcttccttgttaccgaagggggaatgtacatatttcagctgtttgattactacgcatcatctgggatttgcctcctgtttctttctctttttgaggttgtatgcatctcctgggtctacggcgctgaccggttttacgacaacatcgaggacatgataggataccgcccatggccactggtgaaaatctcatggctgtttctcactccgggactgtgcctggctacttttctgttctcgctgtctaagtacacacccctgaagtataataacgtctatgtttacccaccatggggatactccataggctggttcttagcccttagttctatggtttgtgtccccctattcgttgtgatcactctgttgaaaaccagagggccatttcgcaaacgcttgcggcagttgatcactccagattcctcactaccacagcctaagcagcatccatgcttagatgggtcagcaggtaggaatttcggacccagtccaacacgagagggccttatagccggtgagaaagaaactcacctctag

SEQ ID NO: 272686 - DNA, 3165 bp, Artificial Sequence
  derived and/or modified sequence
agtgattagcctgtggagcaggaaagtccagcgatgggcagctggtcacggcagtgggtgaaagcaggggtggtcatctgacgaggggaggggaagcaggtggtgcccagcaaggtggaaggagaagtggacaggagaaacctcggggcattcccgagggcccaggaactgcaataaatgatcacagggaaacttagagttcagagagggggtgtgatttgcctgaggtcacacagcaagttagagacccagctccacgactcattgtcttggctttggccctcgtcatcctgcccacccagcggggcttcccaacccaccacacagccatggacgggaaggtggcagtgcaagagtgtgggcctcctgcagtctcctgggtccccgaggagggagagaagttggaccaggaagacgaggaccaggtgaaggatcggggccaatggaccaacaagatggagtttgtgctgtcagtggccggggagatcattgggctgggcaatgtctggaggtttccctatctctgctacaaaaacggaggtggagccttcttcatcccctacttcatcttcttctttgtctgcggcatcccggtgttcttcctggaggtggcgttgggccaatacaccagccaagggagtgtcacagcctggaggaagatctgccccctcttccagggcattggtctggcatctgtggtcatcgagtcatatttgaatgtctactacatcatcatccttgcctgggctctcttctacctgttcagctccttcacttctgagctgccctggacgacctgcaacaacttttggaacacagagcattgcacggactttctgaaccactcaggagccggcacagtgaccccatttgagaattttacctcacctgtcatggaattctgggagagacgagttctgggcatcacctcgggcatccatgacctgggctccctgcgctgggagctggccctgtgcctcctgctcgcctgggtcatctgctatttctgcatctggaagggggtcaagtccacaggcaaggtggtttatttcacagccacgtttccgtacctgatgcttgtcattttgctgatcagaggtgtcacccttcccggagcctaccagggcatcatctactacttgaagccagatttgttccgcctcaaggaccctcaggtgtggatggatgcgggcacccagatcttcttctcctttgccatctgccaggggtgcctgacagccctgggcagctacaacaagtatcacaacaactgctacaaggactgcatcgccctctgcttcctgaacagtgccaccagctttgtggctgggtttgttgtcttctccatcctgggcttcatgtcccaagagcaaggggtgcccatttctgaagtggccgagtcaggtcctgggctggccttcatcgccttccccaaggctgtgactatgatgcccttatcccagctgtggtcctgcctgttctttatcatgctcatattcctagggctggacagccagtttgtctgtgtggagtgcctggtgacagcctccatagacatgttccccaggcagctccggaagagcgggcggcgcgagctcctcatcctcaccatcgccgtcatgtgctacctgatagggcttttcctggtcaccgagggcgggatgtacatcttccagctgtttgactactatgcttccagtggcatatgcctgctgttcctgtcattgtttgaagtggtctgcataagctgggtgtatggggcggaccgtttctatgacaacattgaggacatgattggctaccggccatggcccctggtgaagatctcctggctcttcctgacccctggactttgcctggccactttcctcttctccttgagcaagtacacccccctcaagtacaacaacgtctatgtgtacccgccctggggatactccattggctggttcctggctctgtcctccatggtctgtgtcccactcttcgtcgtcatcaccctcctgaagactcggggtcctttcaggaagcgtctgcgtcagctcatcacccctgactccagtctgccacagcccaagcaacatccctgcttggatggcagtgctggccggaactttgggccctccccaacaagggaaggactgatagccggggagaaggagacccatttgtagggtgtggccagaggccaggcggctcctaagccgggaacctaggtcagggccaccctccattctcagcggacagcctctgcctctgtctcctgccacaatcctgctgggaacctctggagagccacaggcacccccagctggaggccagactcctctcttgtgctagctggagcagctccttcccctttgctgataacaccaccactgggacgtgccatgttgggacgccactccctgtgggaaggcaccatcgtttttataaaggggggtctttttggaggccgccatctgattgcaacacctcgagttatgaggattccactgtggggatgcctcttgttagagcgtactgcatttgtacacggggagaggagctataattggaacgcacactgccgtccaatgtggagagcctgatgggacaataccctgttggaagtgacaactgaacacactgtgttggatcggaggttccgttaggggatccttccttaggcttaacgacagaggcaagcctttgcatgccgtcagtctggagtttcctccgagtctctcatggcatctccagctcctgccctagttccgcactgttcttgcagtgtttcatcaactcctggagcattggaatggaaggggcttgggagatgattcctagacttcacaaacactcggcatgcctccctgcactgtccgttcctctgcccaaggccgatattgctaactgatcacagattctttcccacctcacaatccttccgaatgtgctccaggcagcaccatttgccatcctgcttctaacgcaaacccctgacttcatggatgaggaacctggagaccaaagagacaaagggactttttcaagttcacatggggacccccttcttgggggccagagatatgactaaaaccttatctccttgtgctcaggccagtgtcttcccattaaccccctgccttagttaacaagtgtgtatggattgccttccatgcg

SEQ ID NO: 272687 - DNA, 3285 bp, Artificial Sequence
  derived and/or modified sequence
gttcagaggccccaccttctcttttcctcccaatcagctgcccagagctgctggctcccctgtttactctgagctgatcgatcaccttagcacacagctggctaggagagaaccatgcagtcacttcggccacacctgcccgttgacccttgctacctcggcaggctttgatcccttctgacctggaggccagaggctaggctgaggtcactcagcagacatcaaggacctgggcagatgggccggctgggatggtggcgagctgtacagataaaaagggacatgaaaatgaaaagcccgagcctgagttttcatcacggttccactcctgagtggtcttgggtgaatcacttcatctgccaaggcctggatttcctcatctgcaaactcagaaaactaaggctttggccctcgtcatcctgcccacccagcggggcttcccaacccaccacacagccatggacgggaaggtggcagtgcaagagtgtgggcctcctgcagtctcctgggtccccgaggagggagagaagttggaccaggaagacgaggaccaggtgaaggatcggggccaatggaccaacaagatggagtttgtgctgtcagtggccggggagatcattgggctgggcaatgtctggaggtttccctatctctgctacaaaaacggaggtggagccttcttcatcccctacttcatcttcttctttgtctgcggcatcccggtgttcttcctggaggtggcgttgggccaatacaccagccaagggagtgtcacagcctggaggaagatctgccccctcttccagggcattggtctggcatctgtggtcatcgagtcatatttgaatgtctactacatcatcatccttgcctgggctctcttctacctgttcagctccttcacttctgagctgccctggacgacctgcaacaacttttggaacacagagcattgcacggactttctgaaccactcaggagccggcacagtgaccccatttgagaattttacctcacctgtcatggaattctgggagagacgagttctgggcatcacctcgggcatccatgacctgggctccctgcgctgggagctggccctgtgcctcctgctcgcctgggtcatctgctatttctgcatctggaagggggtcaagtccacaggcaaggtggtttatttcacagccacgtttccgtacctgatgcttgtcattttgctgatcagaggtgtcacccttcccggagcctaccagggcatcatctactacttgaagccagatttgttccgcctcaaggaccctcaggtgtggatggatgcgggcacccagatcttcttctcctttgccatctgccaggggtgcctgacagccctgggcagctacaacaagtatcacaacaactgctacaaggactgcatcgccctctgcttcctgaacagtgccaccagctttgtggctgggtttgttgtcttctccatcctgggcttcatgtcccaagagcaaggggtgcccatttctgaagtggccgagtcaggtcctgggctggccttcatcgccttccccaaggctgtgactatgatgcccttatcccagctgtggtcctgcctgttctttatcatgctcatattcctagggctggacagccagtttgtctgtgtggagtgcctggtgacagcctccatagacatgttccccaggcagctccggaagagcgggcggcgcgagctcctcatcctcaccatcgccgtcatgtgctacctgatagggcttttcctggtcaccgagggcgggatgtacatcttccagctgtttgactactatgcttccagtggcatatgcctgctgttcctgtcattgtttgaagtggtctgcataagctgggtgtatggggcggaccgtttctatgacaacattgaggacatgattggctaccggccatggcccctggtgaagatctcctggctcttcctgacccctggactttgcctggccactttcctcttctccttgagcaagtacacccccctcaagtacaacaacgtctatgtgtacccgccctggggatactccattggctggttcctggctctgtcctccatggtctgtgtcccactcttcgtcgtcatcaccctcctgaagactcggggtcctttcaggaagcgtctgcgtcagctcatcacccctgactccagtctgccacagcccaagcaacatccctgcttggatggcagtgctggccggaactttgggccctccccaacaagggaaggactgatagccggggagaaggagacccatttgtagggtgtggccagaggccaggcggctcctaagccgggaacctaggtcagggccaccctccattctcagcggacagcctctgcctctgtctcctgccacaatcctgctgggaacctctggagagccacaggcacccccagctggaggccagactcctctcttgtgctagctggagcagctccttcccctttgctgataacaccaccactgggacgtgccatgttgggacgccactccctgtgggaaggcaccatcgtttttataaaggggggtctttttggaggccgccatctgattgcaacacctcgagttatgaggattccactgtggggatgcctcttgttagagcgtactgcatttgtacacggggagaggagctataattggaacgcacactgccgtccaatgtggagagcctgatgggacaataccctgttggaagtgacaactgaacacactgtgttggatcggaggttccgttaggggatccttccttaggcttaacgacagaggcaagcctttgcatgccgtcagtctggagtttcctccgagtctctcatggcatctccagctcctgccctagttccgcactgttcttgcagtgtttcatcaactcctggagcattggaatggaaggggcttgggagatgattcctagacttcacaaacactcggcatgcctccctgcactgtccgttcctctgcccaaggccgatattgctaactgatcacagattctttcccacctcacaatccttccgaatgtgctccaggcagcaccatttgccatcctgcttctaacgcaaacccctgacttcatggatgaggaacctggagaccaaagagacaaagggactttttcaagttcacatggggacccccttcttgggggccagagatatgactaaaaccttatctccttgtgctcaggccagtgtcttcccattaaccccctgccttagttaacaagtgtgtatggattgcc

SEQ ID NO: 272688 - DNA, 3332 bp, Artificial Sequence
  derived and/or modified sequence
gggtgtgaaggactacagagagagccaggttttggtgccatgcacacagggaaacttagagttcagagagggggtgtgatttgcctgaggtcacacagcaagttagagacccagctccacgactcattgtcttgctgcccagagctgctggctcccctgtttactctgagctgatcgatcaccttagcacacagctggctaggagagaaccatgcagtcacttcggccacacctgcccgttgacccttgctacctcggcaggctttgatcccttctgacctggaggccagaggctaggctgaggtcactcagcagacatcaaggacctgggcagatgggccggctgggatggtggcgagctgtacagataaaaagggacatgaaaatgaaaagcccgagcctgagttttcatcacggttccactcctgagtggtcttgggtgaatcacttcatctgccaaggcctggatttcctcatctgcaaactcagaaaactaaggctttggccctcgtcatcctgcccacccagcggggcttcccaacccaccacacagccatggacgggaaggtggcagtgcaagagtgtgggcctcctgcagtctcctgggtccccgaggagggagagaagttggaccaggaagacgaggaccaggtgaaggatcggggccaatggaccaacaagatggagtttgtgctgtcagtggccggggagatcattgggctgggcaatgtctggaggtttccctatctctgctacaaaaacggaggtggagccttcttcatcccctacttcatcttcttctttgtctgcggcatcccggtgttcttcctggaggtggcgttgggccaatacaccagccaagggagtgtcacagcctggaggaagatctgccccctcttccagggcattggtctggcatctgtggtcatcgagtcatatttgaatgtctactacatcatcatccttgcctgggctctcttctacctgttcagctccttcacttctgagctgccctggacgacctgcaacaacttttggaacacagagcattgcacggactttctgaaccactcaggagccggcacagtgaccccatttgagaattttacctcacctgtcatggaattctgggagagacgagttctgggcatcacctcgggcatccatgacctgggctccctgcgctgggagctggccctgtgcctcctgctcgcctgggtcatctgctatttctgcatctggaagggggtcaagtccacaggcaaggtggtttatttcacagccacgtttccgtacctgatgcttgtcattttgctgatcagaggtgtcacccttcccggagcctaccagggcatcatctactacttgaagccagatttgttccgcctcaaggaccctcaggtgtggatggatgcgggcacccagatcttcttctcctttgccatctgccaggggtgcctgacagccctgggcagctacaacaagtatcacaacaactgctacaaggactgcatcgccctctgcttcctgaacagtgccaccagctttgtggctgggtttgttgtcttctccatcctgggcttcatgtcccaagagcaaggggtgcccatttctgaagtggccgagtcaggtcctgggctggccttcatcgccttccccaaggctgtgactatgatgcccttatcccagctgtggtcctgcctgttctttatcatgctcatattcctagggctggacagccagtttgtctgtgtggagtgcctggtgacagcctccatagacatgttccccaggcagctccggaagagcgggcggcgcgagctcctcatcctcaccatcgccgtcatgtgctacctgatagggcttttcctggtcaccgagggcgggatgtacatcttccagctgtttgactactatgcttccagtggcatatgcctgctgttcctgtcattgtttgaagtggtctgcataagctgggtgtatggggcggaccgtttctatgacaacattgaggacatgattggctaccggccatggcccctggtgaagatctcctggctcttcctgacccctggactttgcctggccactttcctcttctccttgagcaagtacacccccctcaagtacaacaacgtctatgtgtacccgccctggggatactccattggctggttcctggctctgtcctccatggtctgtgtcccactcttcgtcgtcatcaccctcctgaagactcggggtcctttcaggaagcgtctgcgtcagctcatcacccctgactccagtctgccacagcccaagcaacatccctgcttggatggcagtgctggccggaactttgggccctccccaacaagggaaggactgatagccggggagaaggagacccatttgtagggtgtggccagaggccaggcggctcctaagccgggaacctaggtcagggccaccctccattctcagcggacagcctctgcctctgtctcctgccacaatcctgctgggaacctctggagagccacaggcacccccagctggaggccagactcctctcttgtgctagctggagcagctccttcccctttgctgataacaccaccactgggacgtgccatgttgggacgccactccctgtgggaaggcaccatcgtttttataaaggggggtctttttggaggccgccatctgattgcaacacctcgagttatgaggattccactgtggggatgcctcttgttagagcgtactgcatttgtacacggggagaggagctataattggaacgcacactgccgtccaatgtggagagcctgatgggacaataccctgttggaagtgacaactgaacacactgtgttggatcggaggttccgttaggggatccttccttaggcttaacgacagaggcaagcctttgcatgccgtcagtctggagtttcctccgagtctctcatggcatctccagctcctgccctagttccgcactgttcttgcagtgtttcatcaactcctggagcattggaatggaaggggcttgggagatgattcctagacttcacaaacactcggcatgcctccctgcactgtccgttcctctgcccaaggccgatattgctaactgatcacagattctttcccacctcacaatccttccgaatgtgctccaggcagcaccatttgccatcctgcttctaacgcaaacccctgacttcatggatgaggaacctggagaccaaagagacaaagggactttttcaagttcacatggggacccccttcttgggggccagagatatgactaaaaccttatctccttgtgctcaggccag

SEQ ID NO: 272689 - DNA, 3571 bp, Artificial Sequence
  derived and/or modified sequence
atacccgtctcctcatccctgggaaggagatggttctggagggggataggggaaaagggggaagggggaagggcaaggaggaggaggaggggagatgaggtcagggtgtgagtctctgagccccttcccctgcccaagggagcagcagctcagcccagctctggaggggccatcatgggactgtgcccacggggagggcaccggtctggagacagtgggttcacagtgggagtgggatgggggtgggagcgctggggacagaggacttgacttcctgaggttggatgttgtaatctcggttcacaaacttttggcctcagtccctcctgctgctcctggtatttctctgtcctttcactccccaacacacacagcccccgccccaacacatacacacacggcttctttctgtctgggagtccctggacaagtcacatgggattctgcgctgggaggaacagggtaaggcgtgaacgtggagggcagtttccctttcaggtcccggctctcttggctttcccataagcagctgccttgggactctcctggagacctgatgcccacagccaagctgaccacaggagccggtgctggggactgagggaaacttagagttcagagagggggtgtgatttgcctgaggtcacacagcaagttagagacccagctccacgactcattgtcttggctttggccctcgtcatcctgcccacccagcggggcttcccaacccaccacacagccatggacgggaaggtggcagtgcaagagtgtgggcctcctgcagtctcctgggtccccgaggagggagagaagttggaccaggaagacgaggaccaggtgaaggatcggggccaatggaccaacaagatggagtttgtgctgtcagtggccggggagatcattgggctgggcaatgtctggaggtttccctatctctgctacaaaaacggaggtggagccttcttcatcccctacttcatcttcttctttgtctgcggcatcccggtgttcttcctggaggtggcgttgggccaatacaccagccaagggagtgtcacagcctggaggaagatctgccccctcttccagggcattggtctggcatctgtggtcatcgagtcatatttgaatgtctactacatcatcatccttgcctgggctctcttctacctgttcagctccttcacttctgagctgccctggacgacctgcaacaacttttggaacacagagcattgcacggactttctgaaccactcaggagccggcacagtgaccccatttgagaattttacctcacctgtcatggaattctgggagagacgagttctgggcatcacctcgggcatccatgacctgggctccctgcgctgggagctggccctgtgcctcctgctcgcctgggtcatctgctatttctgcatctggaagggggtcaagtccacaggcaaggtggtttatttcacagccacgtttccgtacctgatgcttgtcattttgctgatcagaggtgtcacccttcccggagcctaccagggcatcatctactacttgaagccagatttgttccgcctcaaggaccctcaggtgtggatggatgcgggcacccagatcttcttctcctttgccatctgccaggggtgcctgacagccctgggcagctacaacaagtatcacaacaactgctacaaggactgcatcgccctctgcttcctgaacagtgccaccagctttgtggctgggtttgttgtcttctccatcctgggcttcatgtcccaagagcaaggggtgcccatttctgaagtggccgagtcaggtcctgggctggccttcatcgccttccccaaggctgtgactatgatgcccttatcccagctgtggtcctgcctgttctttatcatgctcatattcctagggctggacagccagtttgtctgtgtggagtgcctggtgacagcctccatagacatgttccccaggcagctccggaagagcgggcggcgcgagctcctcatcctcaccatcgccgtcatgtgctacctgatagggcttttcctggtcaccgagggcgggatgtacatcttccagctgtttgactactatgcttccagtggcatatgcctgctgttcctgtcattgtttgaagtggtctgcataagctgggtgtatggggcggaccgtttctatgacaacattgaggacatgattggctaccggccatggcccctggtgaagatctcctggctcttcctgacccctggactttgcctggccactttcctcttctccttgagcaagtacacccccctcaagtacaacaacgtctatgtgtacccgccctggggatactccattggctggttcctggctctgtcctccatggtctgtgtcccactcttcgtcgtcatcaccctcctgaagactcggggtcctttcaggaagcgtctgcgtcagctcatcacccctgactccagtctgccacagcccaagcaacatccctgcttggatggcagtgctggccggaactttgggccctccccaacaagggaaggactgatagccggggagaaggagacccatttgtagggtgtggccagaggccaggcggctcctaagccgggaacctaggtcagggccaccctccattctcagcggacagcctctgcctctgtctcctgccacaatcctgctgggaacctctggagagccacaggcacccccagctggaggccagactcctctcttgtgctagctggagcagctccttcccctttgctgataacaccaccactgggacgtgccatgttgggacgccactccctgtgggaaggcaccatcgtttttataaaggggggtctttttggaggccgccatctgattgcaacacctcgagttatgaggattccactgtggggatgcctcttgttagagcgtactgcatttgtacacggggagaggagctataattggaacgcacactgccgtccaatgtggagagcctgatgggacaataccctgttggaagtgacaactgaacacactgtgttggatcggaggttccgttaggggatccttccttaggcttaacgacagaggcaagcctttgcatgccgtcagtctggagtttcctccgagtctctcatggcatctccagctcctgccctagttccgcactgttcttgcagtgtttcatcaactcctggagcattggaatggaaggggcttgggagatgattcctagacttcacaaacactcggcatgcctccctgcactgtccgttcctctgcccaaggccgatattgctaactgatcacagattctttcccacctcacaatccttccgaatgtgctccaggcagcaccatttgccatcctgcttctaacgcaaacccctgacttcatggatgaggaacctggagaccaaagagacaaagggactttttcaagttcacatggggacccccttcttgggggccagagatatgactaaaaccttatctccttgtgctcaggccagtgtcttcccattaaccccctgccttagttaacaagtgtgtatggattgcc

SEQ ID NO: 272690 - DNA, 2101 bp, Artificial Sequence
  derived and/or modified sequence
tctttctgtctgggagtccctggacaagtcacatgggattctgcgctgggaggaacagggtaaggcgtgaacgtggagggcagtttccctttcaggtcccggctctcttggctttcccataagcagctgccttgggactctcctggagacctgatgcccacagccaagctgaccacaggagccggtgctggggactgaggctttggccctcgtcatcctgcccacccagcggggcttcccaacccaccacacagccatggacgggaaggtggcagtgcaagagtgtgggcctcctgcagtctcctgggtccccgaggagggagagaagttggaccaggaagacgaggaccaggtgaaggatcggggccaatggaccaacaagatggagtttgtgctgtcagtggccggggagatcattgggctgggcaatgtctggaggtttccctatctctgctacaaaaacggaggtggagccttcttcatcccctacttcatcttcttctttgtctgcggcatcccggtgttcttcctggaggtggcgttgggccaatacaccagccaagggagtgtcacagcctggaggaagatctgccccctcttccagggcattggtctggcatctgtggtcatcgagtcatatttgaatgtctactacatcatcatccttgcctgggctctcttctacctgttcagctccttcacttctgagctgccctggacgacctgcaacaacttttggaacacagagcattgcacggactttctgaaccactcaggagccggcacagtgaccccatttgagaattttacctcacctgtcatggaattctgggagagacgagttctgggcatcacctcgggcatccatgacctgggctccctgcgctgggagctggccctgtgcctcctgctcgcctgggtcatctgctatttctgcatctggaagggggtcaagtccacaggcaaggtggtttatttcacagccacgtttccgtacctgatgcttgtcattttgctgatcagaggtgtcacccttcccggagcctaccagggcatcatctactacttgaagccagatttgttccgcctcaaggaccctcaggtgtggatggatgcgggcacccagatcttcttctcctttgccatctgccaggggtgcctgacagccctgggcagctacaacaagtatcacaacaactgctacaaggactgcatcgccctctgcttcctgaacagtgccaccagctttgtggctgggtttgttgtcttctccatcctgggcttcatgtcccaagagcaaggggtgcccatttctgaagtggccgagtcaggtcctgggctggccttcatcgccttccccaaggctgtgactatgatgcccttatcccagctgtggtcctgcctgttctttatcatgctcatattcctagggctggacagccagtttgtctgtgtggagtgcctggtgacagcctccatagacatgttccccaggcagctccggaagagcgggcggcgcgagctcctcatcctcaccatcgccgtcatgtgctacctgatagggcttttcctggtcaccgagggcgggatgtacatcttccagctgtttgactactatgcttccagtggcatatgcctgctgttcctgtcattgtttgaagtggtctgcataagctgggtgtatggggcggaccgtttctatgacaacattgaggacatgattggctaccggccatggcccctggtgaagatctcctggctcttcctgacccctggactttgcctggccactttcctcttctccttgagcaagtacacccccctcaagtacaacaacgtctatgtgtacccgccctggggatactccattggctggttcctggctctgtcctccatggtctgtgtcccactcttcgtcgtcatcaccctcctgaagactcggggtcctttcaggaagcgtctgcgtcagctcatcacccctgactccagtctgccacagcccaagcaacatccctgcttggatggcagtgctggccggaactttgggccctccccaacaagggaaggactgatagccggggagaaggagacccatttgtag

SEQ ID NO: 272691 - protein, 146 aa, Artificial Sequence
  derived and/or modified sequence
MDGKVAVQECGPPAVSWVPEEGEKLDQEDEDQVKDRGQWTNKMEFVLSVAGEIIGLGNVWRFPYLCYKNGGGAFFIPYFIFFFVCGIPVFFLEVALGQYTSQGSVTAWRKICPLFQGIGLASVVIESYLNVYYIIILAWALFYLFS

SEQ ID NO: 272692 - protein, 581 aa, Artificial Sequence
  derived and/or modified sequence
MERQNQCIQSWKRRRKMAPWSGGTGTTRWSLCNVWRFPYLCYKNGGGAFFIPYLVFLFTCGIPVFLLETALGQYTSQGGVTAWRKICPIFEGIGYASQMIVILLNVYYIIVLAWALFYLFSSFTIDLPWGGCYHEWNTEHCMEFQKTNGSLNGTSENATSPVIEFWERRVLKISDGIQHLGALRWELALCLLLAWVICYFCIWKGVKSTGKVVYFTATFPYLMLVVLLIRGVTLPGAAQGIQFYLYPNLTRLWDPQVWMDAGTQIFFSFAICLGCLTALGSYNKYHNNCYRDCIALCFLNSGTSFVAGFAIFSILGFMSQEQGVPISEVAESGPGLAFIAYPRAVVMLPFSPLWACCFFFMVVLLGLDSQFVCVESLVTALVDMYPHVFRKKNRREVLILGVSVVSFLVGLIMLTEGGMYVFQLFDYYAASGMCLLFVAIFESLCVAWVYGAKRFYDNIEDMIGYRPWPLIKYCWLFLTPAVCTATFLFSLIKYTPLTYNKKYTYPWWGDALGWLLALSSMVCIPAWSLYRLGTLKGPFRERIRQLMCPAEDLPQRNPAGPSAPATPRTSLLRLTELESHC

SEQ ID NO: 272693 - protein, 602 aa, Artificial Sequence
  derived and/or modified sequence
MDSRVSGTTSNGETKPVYPVMEKKEEDGTLERGHWNNKMEFVLSVAGEIIGLGNVWRFPYLCYKNGGGAFFIPYLVFLFTCGIPVFLLETALGQYTSQGGVTAWRKICPIFEGIGYASQMIVILLNVYYIIVLAWALFYLFSSFTIDLPWGGCYHEWNTEHCMEFQKTNGSLNGTSENATSPVIEFWERRVLKISDGIQHLGALRWELALCLLLAWVICYFCIWKGVKSTGKVVYFTATFPYLMLVVLLIRGVTLPGAAQGIQFYLYPNLTRLWDPQVWMDAGTQIFFSFAICLGCLTALGSYNKYHNNCYRDCIALCFLNSGTSFVAGFAIFSILGFMSQEQGVPISEVAESGPGLAFIAYPRAVVMLPFSPLWACCFFFMVVLLGLDSQFVCVESLVTALVDMYPHVFRKKNRREVLILGVSVVSFLVGLIMLTEGGMYVFQLFDYYAASGMCLLFVAIFESLCVAWVYGAKRFYDNIEDMIGYRPWPLIKYCWLFLTPAVCTATFLFSLIKYTPLTYNKKYTYPWWGDALGWLLALSSMVCIPAWSLYRLGTLKGPFRERIRQLMCPAEDLPQRNPAGPSAPATPRTSLLRLTELESHC

SEQ ID NO: 272694 - DNA, 2185 bp, Artificial Sequence
  derived and/or modified sequence
agataattcttctcccctgactggacctctggcagcagcttcactaaggtgggatggatagcagggtctcaggcacaaccagtaatggagagacaaaaccagtgtatccagtcatggaaaagaaggaggaagatggcaccctggagcgggggcactggaacaacaagatggagtttgtgctgtcagtggctggggagatcattggcttaggcaacgtctggaggtttccctatctctgctacaaaaatgggggaggtgccttcttcatcccctacctcgtcttcctctttacctgtggcattcctgtcttccttctggagacagcactaggccagtacactagccagggaggcgtcacagcctggaggaagatctgccccatctttgagggcattggctatgcctcccagatgatcgtcatcctcctcaacgtctactacatcattgtgttggcctgggccctgttctacctcttcagcagcttcaccatcgacctgccctggggcggctgctaccatgagtggaacacagaacactgtatggagttccagaagaccaacggctccctgaatggtacctctgagaatgccacctctcctgtcatcgagttctgggagcggcgggtcttgaagatctctgatgggatccagcacctgggggccctgcgctgggagctggctctgtgcctcctgctggcctgggtcatctgctacttctgcatctggaagggggtgaagtccacaggcaaggtggtgtacttcacggccacatttccttacctcatgctggtggtcctgttaattcgaggggtgacgttgcctggggcagcccaaggaattcagttttacctgtacccaaacctcacgcgtctgtgggatccccaggtgtggatggatgcaggcacccagatattcttctccttcgccatctgtcttgggtgcctgacagccctgggcagctacaacaagtaccacaacaactgctacagggactgcatcgccctctgcttcctcaacagcggcaccagctttgtggccggctttgccatcttctccatcctgggcttcatgtctcaggagcagggggtgcccatttctgaggtggccgagtcaggccctggcctggctttcatcgcttacccgcgggctgtggtgatgctgcccttctctcctctctgggcctgctgtttcttcttcatggtcgttctcctgggactggatagccagtttgtgtgtgtagaaagcctggtgacagcgctggtggacatgtaccctcacgtgttccgcaagaagaaccggagggaagtcctcatccttggagtatctgtcgtctccttccttgtggggctgatcatgctcacagagggcggaatgtacgtgttccagctctttgactactatgcggccagtggcatgtgcctcctgttcgtggccatcttcgagtccctctgtgtggcttgggtttacggagccaagcgcttctacgacaacatcgaagacatgattgggtacaggccatggcctcttatcaaatactgttggctcttcctcacaccagctgtgtgcacagccacctttctcttctccctgataaagtacactccgctgacctacaacaagaagtacacgtacccgtggtggggcgatgccctgggctggctcctggctctgtcctccatggtctgcattcctgcctggagcctctacagactcggaaccctcaagggccccttcagagagagaatccgtcagctcatgtgcccagccgaggacctgccccagcggaacccagcaggaccctcggctcccgccacccccaggacctcactgctcagactcacagagctagagtctcactgctagggggcaggcccttggatggtgcctgtgtgcctggccttggggatggctgtggagggaacgtggcagaagcagccccatgtgcttccctgcccccgacctggagtggataagacaagaggggtattttggagtccacctgctgagctggaggcctcccactgcaacttttcagctcaggggttgttgaacagatgtgaaaggccagtgccaagagtgtccctctgagacccttgggaagctgggtgggggctggtaggtggggcgagacttgctggcttcgggccctctcatccttcattccattaaatccacattcttcccgc

SEQ ID NO: 272695 - protein, 688 aa, Artificial Sequence
  derived and/or modified sequence
MWCIVLFSLLAWVYAEPTMYGEILSPNYPQAYPSEVEKSWDIEVPEGYGIHLYFTHLDIELSENCAYDSVQIISGDTEEGRLCGQRSSNNPHSPIVEEFQVPYNKLQVIFKSDFSNEERFTGFAAYYVATDINECTDFVDVPCSHFCNNFIGGYFCSCPPEYFLHDDMKNCGVNCSGDVFTALIGEIASPNYPKPYPENSRCEYQIRLEKGFQVVVTLRREDFDVEAADSAGNCLDSLVFVAGDRQFGPYCGHGFPGPLNIETKSNALDIIFQTDLTGQKKGWKLRYHGDPMPCPKEDTPNSVWEPAKAKYVFRDVVQITCLDGFEVVEGRVGATSFYSTCQSNGKWSNSKLKCQPVDCGIPESIENGKVEDPESTLFGSVIRYTCEEPYYYMENGGGGEYHCAGNGSWVNEVLGPELPKCVPVCGVPREPFEEKQRIIGGSDADIKNFPWQVFFDNPWAGGALINEYWVLTAAHVVEGNREPTMYVGSTSVQTSRLAKSKMLTPEHVFIHPGWKLLEVPEGRTNFDNDIALVRLKDPVKMGPTVSPICLPGTSSDYNLMDGDLGLISGWGRTEKRDRAVRLKAARLPVAPLRKCKEVKVEKPTADAEAYVFTPNMICAGGEKGMDSCKGDSGGAFAVQDPNDKTKFYAAGLVSWGPQCGTYGLYTRVKNYVDWIMKTMQENSTPRED

SEQ ID NO: 272696 - protein, 682 aa, Artificial Sequence [sequence omitted]

SEQ ID NO: 272697 - protein, 168 aa, Artificial Sequence
  derived and/or modified sequence
MWCIVLFSLLAWVYAEPTMYGEILSPNYPQAYPSEVEKSWDIEVPEGYGIHLYFTHLDIELSENCAYDSVQIISGDTEEGRLCGQRSSNNPHSPIVEEFQVPYNKLQVIFKSDFSNEERFTGFAAYYVATDINECTDFVDVPCSHFCNNFIGGYFCSCPPEYFLHDDM

SEQ ID NO: 272698 - protein, 103 aa, Artificial Sequence
  derived and/or modified sequence
MWCIVLFSLLAWVYAEPTMYGEILSPNYPQAYPSEVEKSWDIEVPEGYGIHLYFTHLDIELSENCAYDSVQIISGDTEEGRLCGQRSSNNPHSPIVEEFQVPY

SEQ ID NO: 272699 - protein, 101 aa, Artificial Sequence
  derived and/or modified sequence
MWCIVLFSLLAWVYAEPTMYGEILSPNYPQAYPSEVEKSWDIEVPEGYGIHLYFTHLDIELSENCAYDSVQIISGDTEEGRLCGQRSSNNPHSPIVEEFQV

SEQ ID NO: 272700 - DNA, 2067 bp, Artificial Sequence
  derived and/or modified sequence
atgtggtgcatcgtgctgttcagcctgctggcctgggtgtacgccgagcccaccatgtacggcgagatcctgagccccaactacccccaggcctaccccagcgaggtggagaagagctgggacatcgaggtgcccgagggctacggcatccacctgtacttcacccacctggacatcgagctgagcgagaactgcgcctacgacagcgtgcagatcatcagcggcgacaccgaggagggcagactgtgcggccagagaagcagcaacaacccccacagccccatcgtggaggagttccaggtgccctacaacaagctgcaggtgatcttcaagagcgacttcagcaacgaggagagattcaccggcttcgccgcctactacgtggccaccgacatcaacgagtgcaccgacttcgtggacgtgccctgcagccacttctgcaacaacttcatcggcggctacttctgcagctgcccccccgagtacttcctgcacgacgacatgaagaactgcggcgtgaactgcagcggcgacgtgttcaccgccctgatcggcgagatcgccagccccaactaccccaagccctaccccgagaacagcagatgcgagtaccagatcagactggagaagggcttccaggtggtggtgaccctgagaagagaggacttcgacgtggaggccgccgacagcgccggcaactgcctggacagcctggtgttcgtggccggcgacagacagttcggcccctactgcggccacggcttccccggccccctgaacatcgagaccaagagcaacgccctggacatcatcttccagaccgacctgaccggccagaagaagggctggaagctgagataccacggcgaccccatgccctgccccaaggaggacacccccaacagcgtgtgggagcccgccaaggccaagtacgtgttcagagacgtggtgcagatcacctgcctggacggcttcgaggtggtggagggcagagtgggcgccaccagcttctacagcacctgccagagcaacggcaagtggagcaacagcaagctgaagtgccagcccgtggactgcggcatccccgagagcatcgagaacggcaaggtggaggaccccgagagcaccctgttcggcagcgtgatcagatacacctgcgaggagccctactactacatggagaacggcggcggcggcgagtaccactgcgccggcaacggcagctgggtgaacgaggtgctgggccccgagctgcccaagtgcgtgcccgtgtgcggcgtgcccagagagcccttcgaggagaagcagagaatcatcggcggcagcgacgccgacatcaagaacttcccctggcaggtgttcttcgacaacccctgggccggcggcgccctgatcaacgagtactgggtgctgaccgccgcccacgtggtggagggcaacagagagcccaccatgtacgtgggcagcaccagcgtgcagaccagcagactggccaagagcaagatgctgacccccgagcacgtgttcatccaccccggctggaagctgctggaggtgcccgagggcagaaccaacttcgacaacgacatcgccctggtgagactgaaggaccccgtgaagatgggccccaccgtgagccccatctgcctgcccggcaccagcagcgactacaacctgatggacggcgacctgggcctgatcagcggctggggcagaaccgagaagagagacagagccgtgagactgaaggccgccagactgcccgtggcccccctgagaaagtgcaaggaggtgaaggtggagaagcccaccgccgacgccgaggcctacgtgttcacccccaacatgatctgcgccggcggcgagaagggcatggacagctgcaagggcgacagcggcggcgccttcgccgtgcaggaccccaacgacaagaccaagttctacgccgccggcctggtgagctggggcccccagtgcggcacctacggcctgtacaccagagtgaagaactacgtggactggatcatgaagaccatgcaggagaacagcacccccagagaggactag

SEQ ID NO: 272701 - DNA, 2972 bp, Artificial Sequence
  derived and/or modified sequence
attaagcaatcggtgaaattccccattcctcctttccccgctggagccctggatagagggctctctggcctgggaggaggacgctgtccttgtttcaaaagcagagggagctccaagatcaaggctgagtttccctaagtcatggtctcccagccccctctgtttagatcagggaatttcagacatgcacactcgggtagggaatcttatgaacagaaccaggacagggaggctggccggaggttcctgcagagggagcgtcaaggccctgtgctgctgtccctgggggccagaggggttgcccagcatgcccactggcaggagagagggaactgacccacttgctcctaccagcttctgaaggtgacactgagccccaggtgacgccgcaccaccaaagaaggtgcttgtgtttgtcagacaaatacagccaggcctgccaccccttaggctccaaagtccggaggtgcagaaagccaggaccaagagacaggcagctcaccagggtggacaaatcgccagagatgtggtgcattgtcctgttttcacttttggcatgggtttatgctgagcctaccatgtatggggagatcctgtcccctaactatcctcaggcatatcccagtgaggtagagaaatcttgggacatagaagttcctgaagggtatgggattcacctctacttcacccatctggacattgagctgtcagagaactgtgcgtatgactcagtgcagataatctcaggagacactgaagaagggaggctctgtggacagaggagcagtaacaatccccactctccaattgtggaagagttccaagtcccatacaacaaactccaggtgatctttaagtcagacttttccaatgaagagcgttttacggggtttgctgcatactatgttgccacagacataaatgaatgcacagattttgtagatgtcccttgtagccacttctgcaacaatttcattggtggttacttctgctcctgccccccggaatatttcctccatgatgacatgaagaattgcggagttaattgcagtggggatgtattcactgcactgattggggagattgcaagtcccaattatcccaaaccatatccagagaactcaaggtgtgaataccagatccggttggagaaagggttccaagtggtggtgaccttgcggagagaagattttgatgtggaagcagctgactcagcgggaaactgccttgacagtttagtttttgttgcaggagatcggcaatttggtccttactgtggtcatggattccctgggcctctaaatattgaaaccaagagtaatgctcttgatatcatcttccaaactgatctaacagggcaaaaaaagggctggaaacttcgctatcatggagatccaatgccctgccctaaggaagacactcccaattctgtttgggagcctgcgaaggcaaaatatgtctttagagatgtggtgcagataacctgtctggatgggtttgaagttgtggagggacgtgttggtgcaacatctttctattcgacttgtcaaagcaatggaaagtggagtaattccaaactgaaatgtcaacctgtggactgtggcattcctgaatccattgagaatggtaaagttgaagacccagagagcactttgtttggttctgtcatccgctacacttgtgaggagccatattactacatggaaaatggaggaggtggggagtatcactgtgctggtaacgggagctgggtgaatgaggtgctgggcccggagctgccgaaatgtgttccagtctgtggagtccccagagaaccctttgaagaaaaacagaggataattggaggatccgatgcagatattaaaaacttcccctggcaagtcttctttgacaacccatgggctggtggagcgctcattaatgagtactgggtgctgacggctgctcatgttgtggagggaaacagggagccaacaatgtatgttgggtccacctcagtgcagacctcacggctggcaaaatccaagatgctcactcctgagcatgtgtttattcatccgggatggaagctgctggaagtcccagaaggacgaaccaattttgataatgacattgcactggtgcggctgaaagacccagtgaaaatgggacccaccgtctctcccatctgcctaccaggcacctcttccgactacaacctcatggatggggacctgggactgatctcaggctggggccgaacagagaagagagatcgtgctgttcgcctcaaggcggcaaggttacctgtagctcctttaagaaaatgcaaagaagtgaaagtggagaaacccacagcagatgcagaggcctatgttttcactcctaacatgatctgtgctggaggagagaagggcatggatagctgtaaaggggacagtggtggggcctttgctgtacaggatcccaatgacaagaccaaattctacgcagctggcctggtgtcctgggggccccagtgtgggacctatgggctctacacacgggtaaagaactatgttgactggataatgaagactatgcaggaaaatagcaccccccgtgaggactaatccagatacatcccaccagcctctccaagggtggtgaccaatgcattaccttctgttccttatgatattctcattatttcatcatgactgaaagaagacacgagcgaatgatttaaatagaacttgattgttgagacgccttgctagaggtagagtttgatcatagaattgtgctggtcatacatttgtggtctgactccttggggtcctttccccggagtacctattgtagataacactatgggtggggcactcctttcttgcactattccacagggataccttaattctttgtttcctctttacctgttcaaaattccatttacttgatcattctcagtatccactgtctatgtacaataaaggatgtttataagcaaa

SEQ ID NO: 272702 - DNA, 2635 bp, Artificial Sequence
  derived and/or modified sequence
gtttagatcagggaatttcagacatgcacactcgggtagggaatcttatgaacagaaccaggacagggaggctggccggaggttcctgcagagggagcgtcaaggccctgtgctgctgtccctgggggccagaggggttgcccagcatgcccactggcaggagagagggaactgacccacttgctcctaccagcttctgaaggctccaaagtccggaggtgcagaaagccaggaccaagagacaggcagctcaccagggtggacaaatcgccagagatgtggtgcattgtcctgttttcacttttggcatgggtttatgctgagcctaccatgtatggggagatcctgtcccctaactatcctcaggcatatcccagtgaggtagagaaatcttgggacatagaagttcctgaagggtatgggattcacctctacttcacccatctggacattgagctgtcagagaactgtgcgtatgactcagtgcagataatctcaggagacactgaagaagggaggctctgtggacagaggagcagtaacaatccccactctccaattgtggaagagttccaagtcccatacaacaaactccaggtgatctttaagtcagacttttccaatgaagagcgttttacggggtttgctgcatactatgttgccacagacataaatgaatgcacagattttgtagatgtcccttgtagccacttctgcaacaatttcattggtggttacttctgctcctgccccccggaatatttcctccatgatgacatgaagaattgcggagttaattgcagtggggatgtattcactgcactgattggggagattgcaagtcccaattatcccaaaccatatccagagaactcaaggtgtgaataccagatccggttggagaaagggttccaagtggtggtgaccttgcggagagaagattttgatgtggaagcagctgactcagcgggaaactgccttgacagtttagtttttgttgcaggagatcggcaatttggtccttactgtggtcatggattccctgggcctctaaatattgaaaccaagagtaatgctcttgatatcatcttccaaactgatctaacagggcaaaaaaagggctggaaacttcgctatcatggagatccaatgccctgccctaaggaagacactcccaattctgtttgggagcctgcgaaggcaaaatatgtctttagagatgtggtgcagataacctgtctggatgggtttgaagttgtggagggacgtgttggtgcaacatctttctattcgacttgtcaaagcaatggaaagtggagtaattccaaactgaaatgtcaacctgtggactgtggcattcctgaatccattgagaatggtaaagttgaagacccagagagcactttgtttggttctgtcatccgctacacttgtgaggagccatattactacatggaaaatggaggaggtggggagtatcactgtgctggtaacgggagctgggtgaatgaggtgctgggcccggagctgccgaaatgtgttccagtctgtggagtccccagagaaccctttgaagaaaaacagaggataattggaggatccgatgcagatattaaaaacttcccctggcaagtcttctttgacaacccatgggctggtggagcgctcattaatgagtactgggtgctgacggctgctcatgttgtggagggaaacagggagccaacaatgtatgttgggtccacctcagtgcagacctcacggctggcaaaatccaagatgctcactcctgagcatgtgtttattcatccgggatggaagctgctggaagtcccagaaggacgaaccaattttgataatgacattgcactggtgcggctgaaagacccagtgaaaatgggacccaccgtctctcccatctgcctaccaggcacctcttccgactacaacctcatggatggggacctgggactgatctcaggctggggccgaacagagaagagagatcgtgctgttcgcctcaaggcggcaaggttacctgtagctcctttaagaaaatgcaaagaagtgaaagtggagaaacccacagcagatgcagaggcctatgttttcactcctaacatgatctgtgctggaggagagaagggcatggatagctgtaaaggggacagtggtggggcctttgctgtacaggatcccaatgacaagaccaaattctacgcagctggcctggtgtcctgggggccccagtgtgggacctatgggctctacacacgggtaaagaactatgttgactggataatgaagactatgcaggaaaatagcaccccccgtgaggactaatccagatacatcccaccagcctctccaagggtggtgaccaatgcattaccttctgttccttatgatattctcattatttcatcatgactgaaagaagacacgagcgaatgatttaaatagaacttgattgttgagacgccttgctagaggtagagtttgatcatagaattgtgctggtcatacatttgtggtctgactccttggggtcctttccccggagtacctattgtagataacactatgggtggggcactcctttcttgcactattccacagggataccttaattctt

SEQ ID NO: 272703 - DNA, 2067 bp, Artificial Sequence
  derived and/or modified sequence
atgtggtgcatagtgttgttctccttgcttgcttgggtgtatgccgagccaacgatgtatggggaaatcctcagcccaaattatccccaggcatacccttccgaagtggagaagagttgggatatcgaagtgcccgaaggttatgggatccacctgtattttactcatcttgacattgagcttagtgagaattgtgcctacgatagtgtgcagatcatctcgggggacacggaggaaggacgcctctgtggacagcgaagcagcaataatccgcactcccccatagtagaagagtttcaagtgccttataacaagctgcaggttatcttcaagtccgatttctctaacgaagaaaggttcactgggtttgccgcatattatgtcgccaccgacatcaacgaatgcacagacttcgtcgatgtgccttgtagccacttctgcaataattttatcggcgggtacttctgctcatgcccccccgaatattttcttcacgatgacatgaaaaattgcggggtgaactgcagtggggacgtgttcacagctcttatcggggaaattgcgtctcccaactaccccaagccataccccgaaaattctcgatgcgagtaccagattaggctggagaagggttttcaggtcgtcgtaactctacgccgagaagacttcgacgtcgaagctgccgattctgcgggaaactgcctcgattcgttggtctttgtggcgggcgacagacagtttggcccatattgcggacacgggttcccaggacccttgaatattgagacaaagtcaaatgcgttggatattattttccaaaccgatttaactgggcagaaaaaaggatggaaactcaggtaccacggagaccctatgccttgccctaaagaggatacacctaatagcgtctgggaacctgctaaagccaaatacgtgtttcgggatgtggtgcagatcacctgtctagatggattcgaagttgtggaaggcagagttggagccacatctttctactctacttgtcaatcaaacggcaagtggagcaactccaagctgaaatgtcagcccgtggattgtggcatccccgagagcatagaaaatggaaaagtggaggacccagaatcaactctcttcggctctgtgataagatatacatgcgaggagccttattactatatggagaacggtgggggcggtgaataccattgcgccgggaacggctcatgggtgaacgaagtgctcggcccagagttgccaaagtgtgttccagtctgcggtgtcccgagggaaccattcgaggagaagcagagaattattggcggatcagacgccgatataaagaacttcccatggcaggtcttctttgataacccatgggcagggggtgccctgattaatgaatactgggtcttgaccgcagcgcatgttgtcgaggggaatagggagcccactatgtatgtgggctccacaagcgtgcagacatcgcggctggccaaaagtaaaatgttgactccagaacatgtatttatacatcccggctggaagcttctggaggtacccgaggggaggacaaactttgacaatgacatagctcttgtacgtcttaaagaccccgtaaaaatgggccccacagtcagtccaatctgtttgccaggcaccagctcagactacaatcttatggacggggatctgggtctaatttccggctggggccgcaccgagaagcgcgacagggccgtacgtttgaaggcggctcggctgccagtggccccacttcgcaagtgcaaagaggtcaaggtggaaaagccaacggccgacgctgaagcttatgtgtttaccccaaatatgatctgtgctggaggcgaaaaagggatggacagctgtaaaggggacagcggaggagctttcgctgtacaagaccccaatgataagaccaaattctatgctgccggcctggtgtcttggggccctcagtgcgggacctatgggctatacactcgcgtaaagaactatgtagactggattatgaagaccatgcaggagaattccactcccagggaggattag

SEQ ID NO: 272704 - DNA, 2067 bp, Artificial Sequence
  derived and/or modified sequence
atgtggtgcatagttctgttttccctgctcgcatgggtgtacgctgaacctacaatgtatggagagattttgagtcctaattatcctcaggcgtacccatcagaggttgagaaaagctgggacattgaggttcctgagggctacggcatccacctgtactttactcatctcgatattgaattgtctgaaaactgcgcctacgatagtgtgcagattatctccggcgacaccgaagagggaaggctgtgtgggcagcgaagctcaaacaatccacactcaccgatagtggaggaatttcaggtgccctacaataagctgcaggtcatctttaagagtgatttcagcaacgaggagaggtttacaggcttcgctgcctattacgtggctacagacatcaacgagtgcactgatttcgtagacgtgccatgttcccatttttgcaacaacttcatcggcggttacttctgctcctgccctcccgaatacttcttgcacgatgatatgaagaattgtggcgttaactgttcaggcgatgtgttcacagcactcatcggcgagattgcatctcccaattatcccaagccttaccccgagaactccagatgcgagtaccagataagactcgaaaagggctttcaagtggtggtgactctgaggcgagaggatttcgacgtggaggcggccgacagtgcgggaaactgtctagatagcctcgtgttcgtcgcgggtgatagacagttcggcccatactgtgggcacggcttcccagggccactcaatattgagaccaaaagcaacgctttggatattatttttcagactgacctgacaggtcagaagaaggggtggaaactgagatatcatggcgatcctatgccatgtcccaaagaggatacacctaatagtgtatgggaacccgcgaaagccaaatatgtgtttagagatgtagtgcagatcacctgtctcgatgggttcgaggttgtggaagggcgtgttggggcaaccagcttctacagcacctgccagagcaatgggaagtggagtaatagcaaactgaaatgccagcctgtggactgcggaatcccagagagcattgagaatggaaaggtcgaggatcctgaaagcacgctcttcggaagcgtcatccgctatacatgcgaggagccctattactacatggaaaacggcgggggtggagaataccactgtgccggcaacgggtcgtgggtgaacgaggttctcggccctgagctcccgaaatgcgtgccagtttgtggcgtccccagggagccatttgaggagaaacaacgcatcatcggcggatctgatgccgatatcaaaaacttcccttggcaggtattctttgataacccatgggcaggtggggccctgattaacgaatattgggtattgaccgcagcacacgttgtagaggggaacagagagccaactatgtatgtggggtccacatctgtgcagactagcaggctggcgaagtctaagatgctgacaccagagcacgtgttcattcacccgggctggaaactcctggaggtgcctgagggcaggaccaattttgacaacgatatcgctctggttcgactgaaagacccagtgaagatgggccccacagtttctcctatctgtctgccgggaaccagcagcgactacaacctaatggatggtgatctgggcttgatcagcggatggggacgtacagagaaacgggacagggcagtccgcctcaaagcagctcgccttcccgtcgcacccctgcgcaagtgcaaagaggtgaaagtcgaaaagcctacggcggatgccgaggcttacgtgttcacacctaatatgatatgcgctggcggcgagaagggcatggatagctgtaagggagatagtggtggcgcatttgccgtgcaagaccctaatgataagaccaaattttatgccgccgggttggtgtcctggggtccccaatgcggcacatacggactgtatacaagggtgaagaactatgtcgactggatcatgaagaccatgcaggagaatagtactcccagagaggactag

SEQ ID NO: 272705 - DNA, 2067 bp, Artificial Sequence
  derived and/or modified sequence
atgtggtgcatcgtgctcttcagcctgctggcctgggtgtatgcagagcccaccatgtacggggagatcctgagccccaactacccccaggcctaccccagcgaggtggagaagtcctgggacatcgaggtgcctgagggctacggcatccacctgtacttcacccacctggacatcgagctgtctgagaactgtgcctatgattctgtgcagatcatcagcggggacacagaggagggccgcctgtgtggccagaggagcagcaacaacccccacagccccatcgtggaggagttccaggtgccctacaacaagctgcaggtgatcttcaagagtgacttcagcaatgaggagcgcttcaccggctttgctgcctactacgtggccacagacatcaatgaatgtacagactttgtggatgtgccctgcagccacttctgcaacaacttcatcggcggctacttctgcagctgccccccagagtacttcctgcatgatgacatgaagaactgtggggtgaactgcagcggagatgtgttcaccgccctgattggagaaattgccagccccaactaccccaagccctacccagagaacagccgctgtgagtaccagatccggctggagaagggcttccaggtggtggtgaccctgcggagagaagattttgatgtggaggccgctgacagcgctggcaactgcctggacagcctggtgtttgtggccggggaccggcagtttggcccctactgcggccacggcttccctggccccctgaacatcgagaccaagagcaatgccctggacatcatcttccagacagacctgaccggccagaagaagggctggaagctgcgctaccacggggaccccatgccctgccccaaggaggacacccccaacagcgtgtgggagcccgccaaggccaagtatgtgttcagagatgtggtgcagatcacctgcctggatggctttgaggtggtggagggccgggtgggcgccaccagcttctacagcacctgccagagcaatggcaagtggagcaacagcaagctgaagtgccagcctgtggactgtggcatccctgagagcattgaaaatggcaaggtggaggaccctgagagcaccctgtttggcagcgtcatccgctacacctgtgaggagccctactactacatggagaatggaggcggcggggagtaccactgtgctggaaatggctcctgggtgaatgaggtgctgggccctgagctgcccaagtgtgtgcctgtgtgtggggtgccccgggagccctttgaggagaagcagaggatcattggaggcagtgatgctgacatcaagaacttcccctggcaggtgttctttgacaacccctgggccggcggggccctgatcaatgagtactgggtgctgacagctgcccacgtggtggagggcaaccgggagcccaccatgtatgtgggcagcacctctgtgcagaccagccggctggccaagagcaagatgctgaccccagagcacgtgttcatccaccctggctggaagctgctggaggtgcctgagggccgcaccaactttgacaatgacatcgccctggtgcggctgaaggaccctgtgaagatgggccccaccgtgagccccatctgcctgcccggcaccagcagtgactacaacctgatggatggagacctgggcctcatcagcggctggggccgcacagagaagagggacagagctgtgcggctgaaggccgcccggctgcctgtggcccccctgaggaagtgcaaggaggtgaaggtggagaagcccacagcagatgctgaggcctacgtgttcacccccaacatgatctgtgccggcggggagaagggcatggacagctgcaagggggacagcggcggggcctttgctgtgcaggaccccaatgacaagaccaagttctatgctgctggcctggtgtcctggggcccccagtgtggcacctacggcctgtacaccagggtgaagaactacgtggactggatcatgaagaccatgcaggagaacagcaccccaagagaagattag

SEQ ID NO: 272706 - DNA, 2067 bp, Artificial Sequence
  derived and/or modified sequence
atgtggtgcatcgtgctgttcagcctgctggcctgggtgtacgccgaacccaccatgtacggggaaatcctcagtcccaactacccacaggcctatccctcagaggtagagaagtcctgggacatagaggtgcctgaaggatacggcatccacctctatttcactcacctggacatcgagttatccgagaactgtgcttacgattccgttcaaatcattagtggggacacagaagaggggcgcttgtgcgggcagaggagttctaataacccacattctcccatcgtggaggagttccaggtcccctacaacaaactccaggttatctttaagtctgatttctctaacgaagagcgtttcacgggctttgccgcctattacgtcgccacagatattaacgagtgcacggacttcgtagatgttccatgctcgcacttctgtaacaacttcattggaggctatttttgctcctgtccacctgaatattttctacacgacgacatgaagaattgcggagtgaattgcagtggggatgtatttactgcccttatcggcgaaatcgcatcaccgaactatcctaagccttaccctgagaacagcagatgcgaatatcagatacgcctagagaagggcttccaagtagttgtgacacttcgtagggaggattttgacgtcgaggcggctgatagcgctggcaactgtctggatagtttggtgtttgtggccggtgacaggcagttcggcccttattgcggtcacggctttccggggccactcaatatcgaaaccaaatccaacgccctggatattatttttcagacggacctgaccggtcagaagaaaggatggaaactccgttaccacggcgatcctatgccttgcccgaaagaagacaccccaaactccgtctgggaacccgccaaggccaagtatgtgtttcgggacgtggtccagataacctgtctggacggctttgaagtggtcgagggcagagtgggagcaacctccttctactcaacctgtcagagcaatggcaaatggagcaatagtaagctcaagtgccagccagtggattgcgggatccctgagtcgatcgaaaatgggaaagtcgaggaccctgagagcacgctgtttggctctgtgattcgctatacatgcgaagagccttattattacatggagaacggagggggtggcgagtatcattgtgcaggcaatggatcctgggtgaatgaggtcctgggacctgagctgcccaaatgtgtgcccgtgtgtggggtgcctcgcgagccttttgaggagaaacagagaattattggaggcagcgacgccgacataaaaaactttccctggcaggttttctttgacaatccatgggcggggggggcgttgatcaatgaatattgggtgcttactgcagcacacgtggtagaaggcaaccgtgagccgaccatgtatgttgggtcgacctcggtccagacatctcgactggccaaaagcaaaatgctcacaccagagcatgtgtttattcaccctggttggaagctacttgaagtgcccgagggacggaccaacttcgataatgatattgccctggtaaggctgaaggacccagtcaagatggggccaaccgtgtcaccaatttgcctcccgggcacctcctcagactacaacctcatggatggcgacttgggcctgatatctggctgggggcggaccgagaaaagggaccgcgccgtgcgcctcaaagccgctcgattgccggtggctcctctgcggaaatgcaaggaggtgaaggtcgagaagccgaccgccgacgctgaagcctacgtgttcacaccaaacatgatttgtgctggcggagagaaaggaatggactcgtgcaaaggtgactcaggtggcgccttcgcagtgcaggaccccaacgataagactaagttctacgccgcaggcttagtaagttggggaccccaatgtggcacgtacggactttatacaagggtgaaaaattacgtggactggatcatgaagacaatgcaggaaaattctacgcctcgcgaggattag

SEQ ID NO: 272707 - DNA, 2067 bp, Artificial Sequence
  derived and/or modified sequence
atgtggtgcatcgtgctgttcagcctgctggcctgggtgtacgccgagccaactatgtatggggaaattctttccccaaattatcctcaggcatatccctctgaggttgagaagtcttgggacattgaggtgcccgaaggctacggcattcacctctatttcacccatctggacattgagctctctgaaaattgcgcatatgattcagttcagattatctctggggatacggaggaaggaagactgtgtggacagcggtcctctaataaccctcactctcctatcgtggaagaatttcaggtgccctacaacaagctccaggttatcttcaaaagcgacttttccaatgaagaacgcttcacagggttcgcagcttactatgtggccacggacataaacgagtgcaccgactttgttgatgttccctgttcccatttttgtaacaacttcatcggaggttatttctgctcatgtccccccgaatactttctgcacgatgatatgaagaattgcggcgtcaattgtagcggcgatgtcttcacagcacttatcggcgagattgccagtccaaactatccaaagccgtatcccgaaaactcgagatgcgaataccagatccggctcgagaaaggcttccaagtcgtcgtcactctcaggcgagaagactttgacgtcgaagcagccgattccgccggtaattgtttggactcgctggtctttgtggccggggatagacagttcgggccatactgcgggcacggatttcctgggcctcttaacatcgaaactaagtctaacgcgctcgacatcatctttcaaaccgatctgacaggccagaaaaagggctggaaactcagataccacggtgaccccatgccatgtccgaaggaggacacgccaaactcagtgtgggagcccgctaaagctaagtacgtgtttcgggacgtcgtgcagatcacctgtttggacggattcgaggttgtggagggtagagtgggtgcaactagtttctactccacttgtcagtctaatgggaaatggtcaaactccaagttgaagtgccagccagttgattgcggcatccccgagtctatcgaaaacggtaaggtggaagatcccgagtcaactctgttcggctccgttatccgatacacgtgcgaggagccctactactatatggaaaatggcggtggcggcgagtaccattgtgccgggaatgggtcttgggttaacgaagtgcttggaccagaactgccgaagtgtgttcctgtttgcggtgtcccaagggagccttttgaggaaaagcagcggatcattggtggatctgacgctgacatcaagaattttccgtggcaggtgttcttcgacaacccatgggccggcggagctttaatcaatgaatattgggtgttgactgcagcccatgtggttgagggtaaccgagagcctacaatgtatgtgggcagcacttccgtgcagactagcagactagcaaaatcaaaaatgttgaccccagagcacgtgtttattcatccgggttggaagctgctcgaggtgccggaggggaggacaaacttcgacaatgatattgcgttagtgcgtctcaaagatccagtgaagatggggccaaccgtgtcccctatttgcttaccagggacaagttccgactataacctgatggacggcgacctggggctgatttccgggtggggtaggaccgaaaagcgggaccgcgcagtgagacttaaggccgccagactccccgttgctccacttaggaaatgcaaggaagtgaaagttgagaagcccacagccgacgcagaagcctatgtatttacaccaaatatgatatgtgccggcggggaaaaggggatggatagttgcaaaggagattctggaggtgccttcgctgtgcaagatccaaacgacaagactaaattttacgcagccgggctggtctcatggggacctcagtgcgggacatatggcctctacacccgtgtgaagaattatgtcgactggatcatgaaaactatgcaagagaattctaccccccgggaggactag

SEQ ID NO: 272708 - DNA, 2067 bp, Artificial Sequence
  derived and/or modified sequence
atgtggtgtatcgtcctgtttagtctgctcgcatgggtctatgccgagcctacaatgtatggcgaaattctcagtcctaactatccgcaagcttatccatccgaggtggagaaaagctgggatattgaggttcccgaggggtatggaatacatttatatttcacccatctggacatcgagttgtctgagaattgcgcttatgatagcgtgcagatcatctcaggcgatacggaagagggaagattgtgtgggcagagatctagcaataaccctcatagtcccattgttgaagagttccaggtcccatacaacaagttgcaggtgattttcaagtctgacttctcaaatgaggaaagatttacaggatttgcagcctattatgtcgccacggacatcaacgagtgcacggactttgtggatgtcccttgcagccatttctgcaataatttcatcggagggtacttttgttcctgtcccccagaatacttcctgcacgatgatatgaagaattgcggggtgaattgttccggagacgtgtttacagctcttataggggaaattgcatctccgaattaccctaagccctatcccgaaaatagcagatgcgaatatcagatccgtctggagaaaggattccaggtggtagtgacgcttagacgggaggatttcgatgtagaagctgctgattccgccggaaactgtctagattctttagtcttcgttgccggagatcgccagtttggaccttactgtgggcacgggtttccaggaccactgaacatagaaacgaagtcaaacgccctggatattatcttccaaacggacctgaccggacaaaagaagggatggaagctcaggtatcatggcgacccaatgccctgtcctaaggaggatactccgaactctgtgtgggaaccagcaaaggctaagtacgtgtttcgggacgtggtccagatcacatgtcttgacggctttgaagtggtggaggggcgtgtgggcgctacctccttttactccacttgccagagtaacggaaaatggagcaactctaagttaaaatgtcagcctgtggattgtggcattcccgagtctatagagaatggaaaggtagaggatcccgagtctaccttgtttggttccgtcattcgctacacgtgtgaggaaccctactactatatggagaacgggggaggcggagaatatcactgtgcagggaatggctcttgggtgaacgaggttctgggaccagagctgccaaagtgcgttcccgtgtgtggtgtccccagagaaccgtttgaagagaagcagcggatcatcggaggatcagatgctgacatcaaaaatttcccctggcaagttttcttcgacaacccatgggcaggcggagctctgataaatgagtattgggtcctcactgcagcacacgtggtggagggaaatagggaacctacgatgtacgttggtagcacatcagtgcagacatcccgcctggcaaagtcgaaaatgctcaccccagaacacgtcttcatccatcctgggtggaagctactggaggttccggaaggccgaaccaatttcgacaatgacatcgcactggttagacttaaagatccagtcaagatgggcccaacggttagccctatttgcctgccagggacatcctccgattataatctgatggacggcgatctgggactcatctcagggtggggacgcacagaaaagcgggatcgggctgtgcggctgaaggccgcacggcttccggtggcaccgctaaggaaatgcaaggaggtaaaggtggaaaaacctacagctgatgccgaagcctacgtattcaccccgaatatgatctgcgctgggggagaaaaggggatggattcatgcaagggagattcaggcggagcatttgcagtgcaggatccaaacgacaaaactaagttctatgctgccggattagtctcgtgggggccacagtgcggaacgtatggcctctacacccgggtgaagaactacgtggactggatcatgaaaacaatgcaggaaaacagtacgccccgagaggattag

SEQ ID NO: 272709 - DNA, 2067 bp, Artificial Sequence
  derived and/or modified sequence
atgtggtgtatcgtcttgttctcactgctcgcatgggtatacgctgagcccacaatgtacggtgaaatcctgagccctaattacccccaggcctatccaagcgaggttgagaaatcttgggatatcgaggtacctgagggttatgggatccacctttacttcacgcacctggacatagagctctccgagaattgtgcttatgatagcgtacagattattagcggtgatacagaggaggggaggttgtgtggacaacgctctagcaacaacccgcactcacctatcgttgaggagttccaggttccgtacaataagctccaggtaatcttcaagagcgacttctcaaacgaagagcgattcacaggattcgccgcttattacgtagcaacagatataaatgagtgcacggacttcgttgatgtgccttgtagccatttctgcaacaatttcattgggggttatttttgcagctgccccccagagtatttcctccacgacgatatgaaaaattgtggggtgaattgttcgggggacgtctttactgccctgattggcgagatcgcttctcctaattacccaaaaccttacccagagaatagcaggtgcgaatatcagattcggcttgaaaagggctttcaggtcgtggttacgttgaggagggaggatttcgatgtcgaagccgcagattccgcgggaaattgtctggacagccttgtattcgtcgcaggcgatcgccagtttggtccatactgcggccacggcttcccaggtcccttgaatattgaaactaagtccaacgccttggacataattttccagaccgacctaaccgggcagaagaaaggatggaagctcaggtatcacggcgacccaatgccctgcccaaaggaggatacaccaaatagcgtgtgggagcctgcgaaggccaaatatgtgttccgggacgtggttcagatcacctgtctcgacggattcgaagtagtagaaggtcgggttggcgctacttctttctactcaacatgccagtcgaatggcaaatggtctaacagcaagctcaagtgccagcctgtcgattgcggcattccggaatccatcgaaaatggcaaggttgaggaccccgagagcactctcttcgggagtgttattagatatacatgcgaggagccgtactactatatggagaatggtggtgggggagagtaccactgtgctggcaatggcagctgggtaaatgaggtcctcggacccgagctgccaaagtgcgtgccagtttgcggggttccccgagaacctttcgaagaaaaacagagaatcattggaggttcagatgccgacatcaagaacttcccctggcaagtcttcttcgataacccgtgggcaggaggggctttgatcaatgagtactgggtactgacagcagctcatgttgtggaagggaatcgtgaacccacgatgtatgtgggttctacttctgttcaaacatccaggctagcaaaatccaagatgttaacccccgagcacgtgttcatacatccgggatggaagctgctggaagtgccagagggacgtaccaatttcgataatgacattgccttggtgaggctaaaagacccagtgaagatggggccaacagtgtctccaatctgcctgccaggtacgagtagcgattacaacctgatggacggtgatctgggtctaattagcggctgggggaggacagagaagagagaccgggctgtgaggctgaaagcagcacgcttaccggtcgcaccactgcggaagtgcaaggaggtcaaggttgaaaagccaaccgccgatgccgaggcctatgtttttacccccaacatgatctgtgccggaggcgagaaggggatggactcttgtaagggagactcaggaggagcttttgcagtccaggatccaaacgataagacgaagttttatgccgctggcctggtgtcttggggccctcaatgcggaacctatggactctacaccagagtcaagaactatgtggactggatcatgaaaacgatgcaggaaaattcgaccccgcgagaggactag

SEQ ID NO: 272710 - DNA, 2067 bp, Artificial Sequence
  derived and/or modified sequence
atgtggtgtattgtgctgttttctcttctggcatgggtttatgctgaacctactatgtacggcgagatcctgagtccgaattatccgcaggcctatccatccgaagtagaaaaatcctgggatatcgaagtgcccgaaggctatggcatccacctttattttactcatctggatatcgagctaagcgaaaactgcgcctacgactctgttcagataattagcggcgataccgaagagggccgattgtgtggccagcgtagtagtaataacccacactcccctattgtggaagaattccaggtgccttacaataagttgcaagtaatcttcaagagcgacttcagcaacgaggagcgctttactggcttcgcggcttactacgtggcaaccgatataaatgagtgtacggatttcgtcgatgtcccttgctcccacttttgcaacaacttcataggaggttacttttgttcgtgtccccccgagtacttcttgcatgacgatatgaaaaattgtggggtcaactgttctggcgacgtgttcactgcactgatcggcgaaattgcctcacctaactaccccaagccttaccctgagaactctcggtgtgaataccagatacgcctcgaaaaggggttccaagtggtggtgaccttgagacgcgaagacttcgacgtcgaagccgctgactcggcggggaactgcttggactcgctggtgttcgtggccggggacaggcagtttggcccatattgtggtcatggcttccccggccccctcaacatcgaaaccaagtctaatgctttggacattatttttcagaccgacctgaccggacagaaaaagggttggaagttgagatatcacggtgatccaatgccctgtccaaaagaggatacccccaactccgtgtgggagccagccaaggccaagtacgtgttccgcgacgtggtgcagattacatgcctggatggcttcgaggttgttgaggggcgggtgggcgcaacaagcttctactcaacgtgccagagcaatgggaagtggtcaaacagcaagcttaagtgccagcccgtggactgcggtattcccgagagtatcgaaaatggcaaagtagaggaccctgaatcgaccctcttcggatcagtcattaggtacacttgtgaggagccgtattactatatggaaaacgggggagggggcgagtatcactgtgctgggaacgggagttgggtgaacgaggttctcggacctgagttgccaaagtgcgtaccagtgtgtggcgtgcccagagagccattcgaggagaagcagaggataattggcggttctgacgccgacatcaagaattttccttggcaagtattctttgacaatccatgggcggggggtgctcttattaacgaatactgggtgttgaccgctgcccatgtagtcgaggggaaccgggagcctaccatgtatgtaggatcaacgagtgtgcagaccagtcggctggccaaaagcaagatgctgaccccggaacatgtcttcattcacccgggatggaagttattggaggtgccagaaggacgcacaaattttgacaatgatattgctctggtccgactgaaggaccctgtgaaaatggggccaaccgtgtcccctatctgcctgccgggcacttcaagtgattataacttaatggatggggatttaggcttgatttctggctggggcagaactgaaaagagggacagagctgtccgcctcaaggcggctcggctcccagtggcaccattgaggaagtgcaaagaggtcaaagtggagaagcctaccgccgatgcagaagcttacgtgttcacacccaacatgatttgcgccggcggagaaaaaggcatggacagctgtaagggcgatagtggcggagccttcgcagtccaggaccccaatgacaagaccaaattctacgccgccggtctggtctcctggggtccacagtgcgggacctacggactatataccagagtgaaaaactacgtggactggattatgaaaaccatgcaggagaactccaccccgagagaggactag

SEQ ID NO: 272711 - DNA, 2067 bp, Artificial Sequence
  derived and/or modified sequence
atgtggtgcatagttctgtttagtcttctggcatgggtgtatgcagaaccgaccatgtatggtgaaattttaagtcccaattaccctcaggcatacccatcagaggtggagaaatcatgggacatcgaggtccccgagggatacggcatccacttgtatttcacccacctggatatcgaactcagcgagaactgtgcttacgatagcgtgcagattattagtggggacacagaagagggccgactctgtggccagaggtcttcgaacaatccacactccccaatcgttgaggagtttcaggtcccatacaataaattgcaggtcatctttaagagtgatttcagcaatgaagaacgcttcactggatttgccgcttactatgtcgcgaccgacatcaatgagtgcaccgatttcgttgatgttccatgttcacacttttgtaataacttcatcgggggctacttttgctcttgcccaccagagtactttctgcacgacgatatgaagaattgtggcgttaactgctcaggggacgtatttaccgctcttatcggggagattgcatctcctaattaccccaagccgtatcctgagaattcccggtgcgagtatcagatccgtctcgaaaagggctttcaggtcgttgtgacattacgccgggaggacttcgacgtcgaggccgctgattccgcaggcaactgcctggattctctcgtgtttgttgccggggatcgacagttcggaccgtactgtgggcatggattccccggaccccttaatatcgaaacaaaatccaatgccttagatattattttccagacagatctgaccggtcagaaaaagggctggaaactgaggtatcacggcgacccgatgccttgcccaaaggaggacacaccaaattctgtgtgggaacccgcgaaggccaagtacgtttttagggatgtagtccaaatcacgtgccttgatgggtttgaggtggtggaagggcgcgtgggggcgacctcattttattccacatgtcaatctaatggcaagtggtctaactcaaagctgaagtgccaaccagtggactgcggcatccccgagtcaatcgagaatggcaaggttgaggatccagagtctacattgttcggaagcgtgatccgctacacatgcgaggagccttactattacatggagaacggtggcggcggtgagtaccattgcgcaggcaacggaagctgggtcaatgaggtgttagggcccgaactgccaaaatgtgtgcctgtctgcggcgtgcccagggagccattcgaagaaaagcaacgcatcatcggcggttcggacgccgatatcaagaatttcccttggcaggttttcttcgacaacccatgggccgggggtgccctgatcaacgagtattgggtgttgaccgcggcacacgtagttgaaggaaatagggagcccacaatgtacgtagggagcacttcagttcagacatctagactagccaaatccaagatgttaactcctgaacatgtttttatccacccagggtggaaattgttggaggtgcccgaaggccgtacaaacttcgataatgacatcgccttggtacgtctaaaggatccagtgaaaatgggtcccaccgtcagcccaatctgcctgccaggcacatcttccgactacaaccttatggacggcgatctgggactaatcagcggttgggggcggactgaaaagcgtgatcgggccgtccggctcaaggcggctcgccttcctgtggctccccttaggaagtgcaaggaagtgaaggtggagaagccaacggccgatgccgaagcttatgtattcactcctaatatgatttgcgcaggcggggagaaggggatggatagttgtaagggagacagtgggggtgctttcgcggtgcaggacccaaacgataagactaaattctatgccgcaggattagtatcttggggacctcagtgtggaacatacggactgtacacaagggtgaaaaactatgtggattggatcatgaagactatgcaggaaaatagtaccccccgtgaggactag

SEQ ID NO: 272712 - DNA, 2049 bp, Artificial Sequence
  derived and/or modified sequence
atgtacggcgagattctttcccctaactacccacaggcctatccctcagaagtggagaaaagctgggacattgaagtgccagaggggtatggcattcatttatactttacccatttggatatcgaactttctgagaattgtgcctacgatagcgtgcagataattagcggggatactgaagagggacgtctatgcgggcagaggtcttctaacaacccacattcacccatcgttgaggaattccaggtgccctacaataagctccaggtgatcttcaaatccgactttagcaatgaggagagattcaccggcttcgccgcatattatgtcgccaccgataaagatgaatgttctggtagagcccaactatggaatcacatgtctgatgtaccgtgttcccacttctgcaataactttatcgggggatatttctgttcttgccctccggagtactttttacatgacgatatgaaaaactgcggtgtgaattgctctggcgacgtatttaccgctttaattggagaaattgcgtcccccaattaccccaaaccctatcctgaaaactctagatgtgagtatcagatccggcttgaaaagggattccaggtgcacttatctttactcctgaagctggagtgttccggagctatcacagcacactgcagtcttgatctgttaggcagtatcgcaggcgaccggcagtttggcccttactgcggccacgggtttccgggcccccttaatattgagaccaagtccaacgcccttgacatcattttccagacggacttgaccggccagaaaaagggatggaagctaagatatcatggagatccaatgccctgtccaaaggaggacacacccaattccgtgtgggagcctgccaaggctaagtacgtgtttcgcgacgttgttcagattacttgcctggacggctttgaagtggtagagggccgcgttggagccacttcgttctacagcacgtgtcagagcaatggtaaatggagcaatagcaagctgaaatgtcaaccagtagactgcggcataccagaaagtatcgagaacgggaaggtggaggaccccgaatctacactctttgggtctgttatccgatatacctgtgaggaaccttactattatatggagaacgggggcggaggggaagaaagagagagaggagaatatcactgtgccggcaacggcagctgggtcaacgaggtcctgggcccggaacttccaaaatgcgtacccgtgtgtggcgtcccccgtgagcccttcgaggagaagcaacggataattggcggcagtgacgcggacatcaaaaacttcccctggcaggttttttttgacaacccatgggctggaggggcactcattaatgagtattgggtcttgactgccgcccatgttgtggaaggtaacagggaaccgactatgtacgtcggaagcacatccgtccagacctctaggctagccaagtccaagatgttgactcccgagcacgttttcattcacccgggatggaagctgctagaggtgccagagggtcgcacaaattttgataatgacattgctctcgtgaggctcaaggacccagtgaaaatgggacccaccgtgagtcctatttgtctgccgggcacaagctccgattacaacctcatggacggcgatctcggcctaattagtggctgggggcgaactgaaaaacgggatcgggcagtacgcttgaaggccgccaggctccccgtggcccccctgcgcaagtgtaaggaagtgaaggttgaaaaacccaccgccgacgccgaggcctatgtatttacccccaatatgatctgtgctggcggtgaaaaaggtatggattcgtgcaagggagacagtggtggagccttcgccgtgcaggaccctaatgataagactaaattctacgcggctggactggtttcttggggccctcaatgtggtacctacggcctgtacacacgtgtaaagaactatgttgattggataatgaagacaatgcaggagaatagtacaccccgcgaagactag

SEQ ID NO: 272713 - DNA, 507 bp, Artificial Sequence
  derived and/or modified sequence
atgtggtgtatcgtgctgttttcactccttgcttgggtgtacgcagaaccgaccatgtatggcgagatcctgtcccccaattacccacaggcctatccatcagaagtggagaagtcctgggacatagaggtgcccgaggggtatgggatacatctgtacttcacgcatttggatatagagttgagcgaaaactgtgcatacgatagcgtgcagatcatcagtggtgacaccgaggaaggacggctgtgcgggcagcgctcatccaataacccccactccccaattgtggaggagttccaggtgccatacaataaactgcaggtgatctttaagtctgacttttccaatgaggagagatttacaggtttcgctgcgtattacgtcgccaccgacatcaatgaatgcaccgacttcgtcgatgtgccttgttctcacttttgtaacaattttataggaggttacttttgtagttgtccccctgagtattttctgcatgacgatatgtag

SEQ ID NO: 272714 - DNA, 2067 bp, Artificial Sequence
  derived and/or modified sequence
atgtggtgtattgtgcttttcagcctgttggcttgggtctatgcggagcccacgatgtacggcgagatcttgtcccccaactacccacaggcctacccgagcgaggtcgaaaaatcatgggacatcgaggtgccagagggatatggtatccatctctactttacccatctggacatcgagctcagtgaaaattgtgcctacgacagcgtgcagataatatcgggagacacggaggaggggcgcctctgcgggcagcgctcctccaataacccccattcccctatcgtcgaggaatttcaggtgccatataacaaactccaggtgatctttaagtcggatttttcaaatgaggaacggtttaccggattcgccgcgtattacgtcgccaccgatataaacgaatgcaccgatttcgtggacgtgccatgctcacatttctgtaacaattttataggaggctatttctgtagctgcccaccagagtattttctgcatgatgacatgaagaattgcggcgtaaactgctcaggggatgtgttcaccgccctcattggagagattgcctctcccaactatcctaaaccttacccagagaactcccgctgcgagtatcagattcggctggagaagggcttccaggttgtggtgacccttcgcagagaagacttcgacgtggaggctgccgatagtgctggtaactgccttgattccctggtttttgtagccggagatagacagttcgggccgtactgtggccatgggttccctgggcccctgaacattgagactaagtctaacgcactggacattattttccagactgatctgacggggcagaaaaaagggtggaaactgaggtaccacggggatcccatgccttgtcctaaagaggacactcccaactctgtgtgggaacccgcgaaggcaaaatacgtgttcagagacgttgttcagattacctgtttggatggctttgaagtggtggaaggccgggtcggagcgacctcgttctactccacctgtcagagcaatggcaaatggtccaactcgaagttaaagtgtcagcccgtcgactgtggcatccctgagtcaatagaaaatggtaaagtcgaggatcccgaatcgacgctatttgggagcgtaattagatatacctgcgaggagccctattattatatggagaacggcggcgggggagagtatcattgcgcaggaaacggcagttgggtcaatgaagtccttggccccgagctccctaagtgcgttccagtctgcggggttccccgtgaacccttcgaagagaagcagcgcattattggcggctccgacgcggatattaagaactttccctggcaggtcttcttcgacaacccttgggctggcggggcactgatcaacgagtattgggtcctgactgcagcgcatgtggtggagggaaatcgggaaccaacgatgtacgttggcagcacatctgttcaaacgtccaggttggccaagtctaagatgctgaccccggaacatgtgttcatccatcccgggtggaaactcctggaggtccccgaaggaagaacaaattttgataacgatattgctctggtgcggttaaaagaccccgtcaagatggggccaacggtttcccccatctgtttgcccggcacctccagcgactataatttaatggacggggatttgggattgatctcaggttggggacggacagagaagcgcgatcgggccgtgagactgaaagccgcccgacttcccgtggcccctctccgcaagtgcaaagaggttaaggtggagaagccgaccgccgacgcagaggcctatgtctttacccccaacatgatttgcgctggaggagagaagggcatggattcatgtaagggggatagcggcggcgcatttgcggtccaggatccgaatgacaagaccaagttctacgctgcaggcttagtgtcttggggcccacaatgtggtacgtatggactctacacgcgggtaaagaactacgtagactggattatgaaaactatgcaggagaactccacacctcgcgaagattag

SEQ ID NO: 272715 - DNA, 312 bp, Artificial Sequence
  derived and/or modified sequence
atgtggtgtatagtcctgttttctctacttgcctgggtgtacgctgagcctaccatgtatggagagatcctttcgcccaattaccctcaagcttatccaagtgaggtggaaaaaagttgggatattgaggtccctgaaggctatggaatacacctgtatttcacccacctggacattgagctctcggaaaactgcgcctacgactctgtgcaaatcatcagtggcgacacagaggagggaagactgtgcggacagaggtctagcaataatcctcactcgccgattgtcgaggaatttcaggtgccatactag

SEQ ID NO: 272716 - DNA, 306 bp, Artificial Sequence
  derived and/or modified sequence
atgtggtgcatcgtcttgttctcactgctcgcgtgggtgtacgccgaacccactatgtatggggagatcctgtctccgaattacccacaggcttatccttccgaggtcgagaaatcttgggatattgaggtgccagaggggtacggaatccatttatactttacccacttggatatcgaactgtctgagaactgtgcctacgacagcgtacagattattagtggagacaccgaggaggggcggctgtgtgggcaacgaagttccaataacccccattcacccatcgtggaagagttccaggtgtag

SEQ ID NO: 272717 - DNA, 2049 bp, Artificial Sequence
  derived and/or modified sequence
atgtacggggagatcctgagccccaactacccccaggcctaccccagcgaggtggagaagtcctgggacatcgaggtgcctgagggctacggcatccacctgtacttcacccacctggacatcgagctgtctgagaactgtgcctatgattctgtgcagatcatcagcggggacacagaggagggccgcctgtgtggccagaggagcagcaacaacccccacagccccatcgtggaggagttccaggtgccctacaacaagctgcaggtgatcttcaagagtgacttcagcaatgaggagcgcttcaccggctttgctgcctactacgtggccacagacaaggatgagtgcagcggccgggcccagctgtggaaccacatgtctgatgtgccctgcagccacttctgcaacaacttcatcggcggctacttctgcagctgccccccagagtacttcctgcatgatgacatgaagaactgtggggtgaactgcagcggagatgtgttcaccgccctgattggagagatcgccagccccaactaccccaagccctacccagagaacagccgctgtgagtaccagatccggctggagaagggcttccaggtgcacctgagcctgctgctgaagctggagtgcagcggggccatcacagcccactgcagcctggacctgctgggcagcattgctggggaccggcagtttggcccctactgcggccacggcttccctggccccctgaacatcgagaccaagagcaatgccctggacatcatcttccagacagacctgaccggccagaagaagggctggaagctgcgctaccacggggaccccatgccctgccccaaggaggacacccccaacagcgtgtgggagcccgccaaggccaagtatgtgttcagagatgtggtgcagatcacctgcctggatggctttgaggtggtggagggccgggtgggcgccaccagcttctacagcacctgccagagcaatggcaagtggagcaacagcaagctgaagtgccagcctgtggactgtggcatccctgagagcattgaaaatggcaaggtggaggaccctgagagcaccctgtttggcagcgtcatccgctacacctgtgaggagccctactactacatggagaatggaggcggcggggaggagcgggagcggggggagtaccactgtgctggaaatggctcctgggtgaatgaggtgctgggccctgagctgcccaagtgtgtgcctgtgtgtggggtgccccgggagccctttgaggagaagcagaggatcattggaggcagtgatgctgacatcaagaacttcccctggcaggtgttctttgacaacccctgggccggcggggccctgatcaatgagtactgggtgctgacagctgcccacgtggtggagggcaaccgggagcccaccatgtatgtgggcagcacctctgtgcagaccagccggctggccaagagcaagatgctgaccccagagcacgtgttcatccaccctggctggaagctgctggaggtgcctgagggccgcaccaactttgacaatgacatcgccctggtgcggctgaaggaccctgtgaagatgggccccaccgtgagccccatctgcctgcccggcaccagcagtgactacaacctgatggatggagacctgggcctcatcagcggctggggccgcacagagaagagggacagagctgtgcggctgaaggccgcccggctgcctgtggcccccctgaggaagtgcaaggaggtgaaggtggagaagcccacagcagatgctgaggcctacgtgttcacccccaacatgatctgtgccggcggggagaagggcatggacagctgcaagggggacagcggcggggcctttgctgtgcaggaccccaatgacaagaccaagttctatgctgctggcctggtgtcctggggcccccagtgtggcacctacggcctgtacaccagggtgaagaactacgtggactggatcatgaagaccatgcaggagaacagcaccccaagagaagattag

SEQ ID NO: 272718 - DNA, 507 bp, Artificial Sequence
  derived and/or modified sequence
atgtggtgcatcgtgctcttcagcctgctggcctgggtgtatgcagagcccaccatgtacggggagatcctgagccccaactacccccaggcctaccccagcgaggtggagaagtcctgggacatcgaggtgcctgagggctacggcatccacctgtacttcacccacctggacatcgagctgtctgagaactgtgcctatgattctgtgcagatcatcagcggggacacagaggagggccgcctgtgtggccagaggagcagcaacaacccccacagccccatcgtggaggagttccaggtgccctacaacaagctgcaggtgatcttcaagagtgacttcagcaatgaggagcgcttcaccggctttgctgcctactacgtggccacagacatcaatgaatgtacagactttgtggatgtgccctgcagccacttctgcaacaacttcatcggcggctacttctgcagctgccccccagagtacttcctgcatgatgacatgtag

SEQ ID NO: 272719 - DNA, 312 bp, Artificial Sequence
  derived and/or modified sequence
atgtggtgcatcgtgctcttcagcctgctggcctgggtgtatgcagagcccaccatgtacggggagatcctgagccccaactacccccaggcctaccccagcgaggtggagaagtcctgggacatcgaggtgcctgagggctacggcatccacctgtacttcacccacctggacatcgagctgtctgagaactgtgcctatgattctgtgcagatcatcagcggggacacagaggagggccgcctgtgtggccagaggagcagcaacaacccccacagccccatcgtggaggagttccaggtgccctactag

SEQ ID NO: 272720 - DNA, 306 bp, Artificial Sequence
  derived and/or modified sequence
atgtggtgcatcgtgctcttcagcctgctggcctgggtgtatgcagagcccaccatgtacggggagatcctgagccccaactacccccaggcctaccccagcgaggtggagaagtcctgggacatcgaggtgcctgagggctacggcatccacctgtacttcacccacctggacatcgagctgtctgagaactgtgcctatgattctgtgcagatcatcagcggggacacagaggagggccgcctgtgtggccagaggagcagcaacaacccccacagccccatcgtggaggagttccaggtgtag

SEQ ID NO: 272721 - DNA, 2067 bp, Artificial Sequence
  derived and/or modified sequence
atgtggtgcatcgtgctgttcagcctgctggcctgggtgtacgccgaacctacaatgtatggcgagatactcagtccgaactatcctcaggcttacccctctgaggtggagaagagctgggatatcgaggtgcccgaggggtatggcattcacctttattttacacacctggatatagagttaagtgagaactgcgcttacgatagcgtacaaatcatcagcggcgataccgaggagggtcgtttgtgtggacaaagaagttccaacaacccccactcccctatagtggaagagtttcaggttccttacaataagttacaggtgattttcaaaagtgacttctccaacgaggagcgcttcaccggcttcgcggcttattatgtcgccaccgacatcaatgagtgcacagattttgtagacgtaccttgtagtcatttttgtaataactttatcggcggctacttctgcagttgccctccagagtactttctgcatgacgatatgaagaattgtggggttaactgctctggggacgtctttaccgctctcattggggagatcgccagtccaaattatcccaagccgtatccagaaaattctcgctgcgagtaccagatacgcctggagaagggctttcaggtggtggtgacccttagaagggaggactttgacgtcgaggccgctgacagcgccggaaactgtcttgattcactcgtctttgtggctggagaccgacagtttggaccgtattgcggccacgggttcccaggtcccctgaacatagagaccaagtcaaacgctctcgacattatcttccagacggacctgaccggccaaaagaaaggatggaaactcaggtaccacggcgaccccatgccctgtcccaaggaggatactccaaacagcgtgtgggagcctgccaaagccaaatacgtgttcagggacgtcgtccagatcacatgtctggatggcttcgaagtcgttgaagggcgggtgggagccacatccttttatagcacctgccagtctaacggcaagtggtctaatagcaagctgaaatgccagcccgtcgactgtgggatccccgaatctatagagaacggcaaagtggaagaccctgagtcaactctctttggcagcgtgattcggtatacgtgcgaagaaccatattactacatggagaacggcggcgggggcgagtatcactgtgctggcaacggctcgtgggtgaatgaagtgctcgggcccgaactgcccaaatgcgtgccagtgtgcggagtaccaagggaaccgttcgaagaaaaacagagaattatcggggggtcggacgctgacatcaaaaacttcccctggcaggtgtttttcgataacccctgggctggcggagcattgatcaacgaatattgggtccttaccgccgcccatgtggtcgagggcaatagagaacctaccatgtatgttgggtccacctccgtccagacctcacgtctggcaaagtctaagatgctgacacccgaacacgtgtttatacaccctggctggaagctacttgaagtccccgaggggcgaaccaacttcgataacgacattgccttggtgcggttgaaggaccccgttaagatggggcccactgtgagtcccatctgcctccccgggacttccagtgactataacctgatggatggggatctgggcctgatttccggttggggccgcactgagaagagggacagggccgtccgcctgaaagctgcccgcctgccagtggcacctctacgcaagtgtaaggaggtgaaggtcgaaaagcctacggctgatgccgaggcgtacgtgtttactccaaacatgatctgcgcaggaggagaaaaaggcatggacagctgcaagggagacagcggtggcgcctttgccgtccaggatcctaacgacaagacgaagttctacgcggctggcctggtatcttggggtccacaatgcgggacatatggcctgtatacaagagtgaaaaattatgtggattggatcatgaaaacgatgcaggagaactccacccctagagaagattag

SEQ ID NO: 272722 - DNA, 2067 bp, Artificial Sequence
  derived and/or modified sequence
atgtggtgcatcgtgctgttcagcctgctggcctgggtgtacgccgaacccaccatgtacggtgaaatactgtctcccaactatccccaagcttatccctcagaagtggaaaagagctgggacatcgaagtgcctgaaggatacgggatccacctatacttcacacatctcgacattgaactgagcgagaattgtgcgtatgacagcgtccagatcatctccggcgatacagaagagggccggttgtgcgggcagagatcatccaacaatccccatagtccaatcgtcgaagagttccaggttccctacaacaagctgcaagtgatcttcaaatcggatttctccaacgaagagcgatttacagggtttgcagcatactatgtggccacggatatcaacgagtgcacagactttgtcgacgtcccatgctcccacttctgcaacaacttcatcgggggatatttttgttcatgccctcctgagtacttcctccacgatgatatgaagaattgcggcgtgaactgtagtggagatgtctttaccgccctcattggggagattgccagccccaactatccgaagccataccctgagaactccagatgtgagtaccagatccgactagaaaagggcttccaggttgtcgtgactctgaggagagaagattttgatgtggaggctgctgactcggctgggaactgccttgactctcttgtgtttgtggcgggagatcgccagtttgggccctactgtggtcacggcttccctggaccattgaatatagaaactaagtctaacgcccttgatatcattttccaaaccgatctgactggccagaagaaaggatggaagttacggtatcacggggaccctatgccttgtccaaaggaagacacccctaacagcgtgtgggaacccgcgaaggctaaatatgtctttagggacgttgtccaaattacctgtctggacggatttgaggtggtggaaggccgcgtaggagcaacctccttttactctacgtgtcagtccaacggaaagtggtcgaactcaaaactcaaatgtcagcctgttgactgcgggatacccgaatctattgagaacggaaaggtggaagacccagagtccacgctcttcgggtctgtcatcaggtacacctgtgaagagccctactattatatggaaaatggtgggggaggggaatatcattgcgctggaaatggatcatgggtaaatgaagtgctgggacccgagctccctaagtgcgtgccagtgtgcggcgtaccccgtgagccattcgaggagaaacagcgcatcattggggggtctgacgccgacatcaagaactttccgtggcaggtcttctttgacaatccatgggctggaggcgctctgattaacgagtattgggtcctcaccgccgcccacgtggtggagggaaatcgagagccaaccatgtacgtgggatccacaagcgtacagactagccggttggctaagtccaagatgctgacccctgaacacgtgttcatccacccgggctggaaattgctggaagtgcctgaaggaaggaccaatttcgacaatgatatagcactagtgaggctcaaggaccccgtgaagatgggacctaccgtttcccccatctgcctgccgggaacaagctctgattataatttgatggacggggatctgggcttaattagcggttggggcaggacggagaaacgagacagggcagtgcgactgaaggcagctcgactccccgttgctcctctaagaaagtgcaaagaggtaaaggtggaaaagcccacagctgacgcagaagcatacgtattcactcctaatatgatatgcgccggcggggagaaaggcatggatagctgtaagggagattccggcggcgccttcgcggtacaggatcctaacgacaagaccaaattctatgcagcaggcctagtgtcctggggcccacagtgcggaacttacggcctgtatacccgggtgaaaaattatgtggactggatcatgaaaacaatgcaagaaaattctacacctcgcgaggactag

SEQ ID NO: 272723 - DNA, 2049 bp, Artificial Sequence
  derived and/or modified sequence
atgtacggcgagatcctgagccccaactacccccaggcctacccctctgaggtcgaaaagagctgggatattgaggtccctgaagggtacggtattcacctgtattttactcacctggacattgagctgagtgagaattgcgcatacgattcggtgcagatcatctctggcgatacagaagaggggaggttgtgtggccagaggagctcgaacaatccccactcgccaatcgttgaagaatttcaggttccttataataaattgcaagtaattttcaaatcagatttcagtaatgaagagcggtttaccgggtttgcagcttactatgttgctactgataaagacgagtgctccgggcgcgcacagctgtggaaccacatgagtgacgtaccatgcagccatttttgtaacaacttcattggcggctatttctgctcttgcccgccagagtactttctgcacgatgatatgaaaaactgtggagtgaattgttccggagatgttttcacggcacttattggggagattgcatccccaaattaccctaagccctatccagagaattcccgatgtgagtatcagatcaggttagagaaggggttccaggtccacctctccctgctgctgaagcttgagtgttctggggcaatcactgctcactgttctctggaccttctgggttcaattgcaggcgacaggcaattcgggccatattgtggacatggctttcctggacctctcaacatagagacaaagagtaacgctctcgatatcattttccagacggacttgaccgggcaaaaaaaggggtggaaattgcggtaccacggtgatccaatgccatgccctaaagaggacacgcccaactccgtttgggagccagctaaagctaaatatgtcttccgggacgtcgtccagattacgtgtctcgacgggttcgaggtcgttgaagggcgcgtgggtgccacaagcttttactccacttgccagtccaacggcaagtggtcaaattccaaactgaagtgtcagcctgtggattgtgggatccccgagtctatcgagaatggaaaggtggaagacccggagtccaccttatttggttctgtgatcaggtacacctgtgaagaaccctattactacatggaaaacggaggcgggggcgaagagcgcgaacgaggagagtaccattgtgccgggaatgggagctgggttaacgaggtgcttggccccgagttgcctaagtgcgtgcctgtgtgtggcgtgcccagagaacccttcgaggaaaagcagcgaatcatcggtggaagcgacgcggatattaaaaatttcccatggcaggtgtttttcgataacccatgggccgggggagctctgattaacgagtattgggtcctcaccgccgctcacgtggtcgagggcaatcgggagcccaccatgtacgtcggttcaacttcagttcagacatctcggctggccaaaagcaagatgcttacgcccgagcatgtgttcatccatcctggctggaagcttctagaagtcccagaaggtcgtaccaactttgataacgacatcgctcttgtgcgcctcaaggaccccgtgaagatggggcctactgtgagtcctatctgcctgccaggcacatcctcggactataacctgatggacggcgaccttgggctaatctctgggtggggcaggactgagaagagagacagagcagtacgcttgaaagcagccagactgcccgtggcccccctccggaagtgcaaggaggtgaaggttgagaaaccgaccgccgatgccgaggcttacgtgtttacaccaaatatgatatgtgcaggcggtgagaagggtatggacagctgcaaaggcgatagtggtggcgccttcgccgtccaagaccccaatgataagaccaaattttacgccgcgggcctggtttcatggggaccgcagtgtggtacatacggtctatacaccagggtcaagaactacgtcgattggatcatgaaaactatgcaagagaattccacaccccgagaagattag

SEQ ID NO: 272724 - DNA, 507 bp, Artificial Sequence
  derived and/or modified sequence
atgtggtgcatcgtgctgttcagcctgctggcctgggtgtacgccgagcccactatgtatggtgagatcctgagtcctaattatccccaggcttacccatccgaggtggaaaagtcatgggatatagaagtgcccgaaggctacgggatccatctgtatttcactcacctggacatcgagctgtctgaaaactgcgcatatgactccgtccaaatcattagcggcgacacagaggaaggtcgtctgtgcggccagcgatccagcaataatcctcattctccaatcgtagaagaatttcaggttccctacaataagctacaggttatctttaagtccgacttcagtaacgaggagcggtttactgggttcgctgcttactatgtggcaacggatatcaacgaatgtacagacttcgtcgacgtgccttgctcacacttttgcaacaatttcattggaggctacttctgctcttgtccacctgagtactttttgcatgatgatatgtag

SEQ ID NO: 272725 - DNA, 2067 bp, Artificial Sequence
  derived and/or modified sequence
atgtggtgcatcgtgctgttcagcctgctggcctgggtgtacgccgagccaaccatgtacggtgagatcctctcgcccaactaccctcaagcctatccgtctgaggtggaaaaaagctgggatatcgaggtgccggagggctacggaattcacctgtacttcacccatttggacatcgagctgtcagagaattgcgcctatgactccgtgcagattatcagcggagatacagaagaagggaggctgtgtggccagcgcagctctaataatccccactctccgatcgtggaagaattccaggtcccctataataaactgcaggtcatatttaaaagcgatttttctaatgaagaacggttcactggattcgccgcctattatgtggccactgacattaacgagtgtaccgacttcgtggatgtcccctgcagccacttttgtaataactttatcggcggatatttttgttcctgtccccccgagtatttcttgcatgacgatatgaagaattgcggcgtaaactgttcaggtgacgtgtttacagcacttattggggaaattgccagcccaaactatcccaagccctatcctgaaaattcccggtgcgagtatcagattaggctcgagaagggcttccaagtcgtcgtgacacttaggcgggaagacttcgacgtggaggccgccgactccgctggtaattgtctcgactccctggtgtttgtggccggggatagacagttcggcccctactgtggtcatggattcccaggacccctgaatattgagactaaaagcaatgctctggacataatcttccagaccgacctcactggccaaaagaagggctggaagctgcgatatcacggtgatcccatgccctgtcctaaggaggataccccaaattccgtgtgggagcctgcgaaggccaagtacgtctttagggacgttgtccagattacctgcctcgacggattcgaagtagtggaaggccgagttggggcaacaagcttctattctacgtgtcaatcaaacggaaagtggtcaaattccaagctgaaatgccagccagtagattgcggtatcccagagtctatcgagaacggcaaggtcgaggatcccgagagcacattgtttggttctgttattcgctacacgtgcgaggagccctactattatatggagaacggcggcggtggcgaataccattgcgccggcaacgggtcttgggtgaatgaagtccttgggcctgaattacccaagtgcgtgcctgtttgtggagtgccaagagagcccttcgaagaaaagcagagaattataggcggttctgacgccgatatcaaaaactttccatggcaggtcttcttcgacaacccctgggccggcggcgctctgatcaatgagtattgggtcctgacggcagctcatgtggtcgagggaaatagggagccaacaatgtacgtagggagcacaagtgtgcagacttcccgtttagctaaatctaagatgctgacacccgagcacgtttttattcacccggggtggaaactgctggaggtgcccgagggccgcactaattttgacaacgacatcgctttagtcagattaaaagatccagtgaaaatgggccctacagtaagtcccatttgtcttccagggacaagctccgattataatctcatggacggcgaccttggcctgatttcggggtggggcaggacagagaaacgagacagggctgttaggctgaaagcagccagactgcctgtcgctccacttagaaaatgcaaggaggtaaaggtggaaaagccgacagccgatgctgaagcctacgtgttcacaccaaacatgatttgcgcaggcggagagaagggtatggactcgtgtaaaggggactccggtggcgcctttgcagtgcaagaccctaatgataagactaagttttacgcagcagggctcgtaagctggggcccccaatgcggaacatacggactgtacacgcgtgtgaagaactacgtcgattggataatgaaaaccatgcaggagaacagtactccccgtgaggactag

SEQ ID NO: 272726 - DNA, 312 bp, Artificial Sequence
  derived and/or modified sequence
atgtggtgcatcgtgctgttcagcctgctggcctgggtgtacgccgaaccaactatgtacggggaaatactttcacccaactacccacaggcatacccttcagaggtagagaagtcctgggatatcgaggtgccagaaggatatgggatccatctatatttcacgcatttggatatagagctctcagagaactgcgcgtatgattcagtgcagatcatcagcggagatactgaagaagggagactatgtggtcagagaagtagcaacaacccccacagcccaatagtcgaagaatttcaggtgccctattag

SEQ ID NO: 272727 - DNA, 306 bp, Artificial Sequence
  derived and/or modified sequence
atgtggtgcatcgtgctgttcagcctgctggcctgggtgtacgccgaaccaacaatgtatggtgaaattcttagcccaaattatccacaggcgtaccccagcgaggtagagaagagctgggacatcgaggtgcctgaaggttatgggattcacctatatttcactcacctggatatcgagcttagcgaaaattgcgcctatgacagcgtgcaaataatcagtggcgataccgaggagggcaggttatgcggacaacggtcctcgaacaaccctcacagcccaatagtggaggaatttcaggtgtag

SEQ ID NO: 272728 - DNA, 2067 bp, Artificial Sequence
  derived and/or modified sequence
atgtggtgtattgtgcttttttcgctgctcgcatgggtctatgctgagcccaccatgtacggggaaattctctctcctaactatccccaggcataccccagtgaggttgaaaagagttgggatatagaagttcctgagggttacggtattcacttgtacttcactcaccttgatattgagttatctgaaaactgcgcctatgactccgtacagatcatttcgggcgatactgaagagggtagactatgcgggcaacggtcatccaacaaccctcatagtccaatcgttgaggagttccaggtgccatataataagctccaggtgatcttcaagagtgacttcagtaacgaggaaaggttcaccggttttgccgcttattacgtggccactgatattaatgagtgcacagactttgtagacgtgccttgcagtcacttttgtaataactttataggtgggtacttttgtagttgtccacctgaatacttcctgcacgatgacatgaaaaattgcggggttaattgctccggagacgtatttactgcactcatcggcgagattgcctctcccaactatccaaagccttacccggagaactcgcggtgcgaatatcaaatcaggctcgagaagggcttccaagtggttgtcactttgaggagagaagacttcgacgtggaggctgccgattcagccggaaactgccttgactccctcgtgtttgtcgccggagatcggcaattcggaccgtactgcggtcatggatttcctggccctctgaatatcgagacaaaatcgaatgccttggatattatctttcagacagacctgaccgggcaaaaaaaaggctggaaattgcggtatcatggggaccccatgccctgccccaaagaagacacccctaactctgtgtgggagcctgctaaagccaaatacgtgttcagagatgttgtgcagattacctgtttagacggttttgaggtggttgagggcagggtgggagccaccagcttctattctacctgccaatctaatggtaagtggtccaactccaaactgaaatgccagcccgtggactgcgggattcctgagtccattgagaacgggaaggtcgaagacccagagagtaccctgttcggaagtgttataaggtatacctgtgaggagccctactactatatggagaatggcggaggtggggagtatcattgcgctggtaacggctcttgggtcaatgaggtgctgggaccagaactccccaaatgtgtccccgtttgtggagtccctcgcgagccgttcgaggagaaacagcgaattattggcggttcagacgccgatattaagaacttcccttggcaggttttcttcgataacccatgggcagggggtgctttaatcaatgaatattgggtgctgactgctgcacacgtcgtcgaaggaaatcgcgaacctaccatgtatgttgggtccacctccgttcagactagcagacttgccaaatctaagatgctgacccctgagcacgtgtttattcaccccggatggaagttgctcgaagtgcctgagggcagaacaaattttgacaatgatatagcactcgtgcgcctgaaagatcccgttaagatgggtcctacagtgagccctatttgtctccccggtacgtctagtgattacaacctcatggatggagatttagggctgatttctgggtggggaaggaccgaaaagcgagatagggctgtgcgtctaaaggctgctcggctaccggtcgctcctctgaggaagtgtaaggaggtgaaagtggaaaaaccaactgcagatgccgaggcttatgtgtttacgccgaacatgatctgcgcaggaggtgaaaagggcatggattcttgtaaaggagattcgggaggggcatttgcggtccaagaccccaacgacaagacaaaattttatgctgccggtttggtgagttggggccctcagtgcggtacatacggactgtatactagagtgaaaaactacgtggactggatcatgaaaacgatgcaggagaattcgacacctcgagaggactag

SEQ ID NO: 272729 - DNA, 2067 bp, Artificial Sequence
  derived and/or modified sequence
atgtggtgcatcgtactgttttccttattggcttgggtgtatgcagaacctacgatgtacggcgaaattctgtcgcctaactatccacaggcctatccctcagaagtggaaaagtcatgggatattgaggtgccagaaggctacggcatccatttgtactttacacatctggacatcgagctgtctgagaattgcgcctatgacagcgtacagataattagcggggatacggaggaaggtcgcttgtgcggacagaggagctccaacaacccccacagtcccattgtggaggagtttcaggtcccctacaacaagcttcaagttatattcaagtcagatttctcaaacgaagagcggttcaccgggttcgctgcatattacgtcgcaactgatataaacgagtgtacagattttgtggacgtcccatgtagccatttctgcaacaactttatcggtggatatttctgtagttgcccccctgagtattttcttcacgacgatatgaagaactgtggagtcaattgttcaggtgacgtgttcacggcattgattggagagatcgcttcccctaactacccaaagccataccccgaaaacagcagatgtgaatatcagatccgattagaaaagggcttccaggtggtagtaacgctccgtcgcgaggacttcgacgtcgaggcagctgactccgcgggaaactgcctggacagtttggtctttgttgcaggagacagacagtttggaccctactgcggacacgggttccctgggcctctgaacatcgaaactaagtcaaacgcactggatatcatctttcaaaccgacctaactggccagaagaaagggtggaagctgagataccacggagaccccatgccttgccccaaagaggataccccaaattctgtttgggagcctgccaaagccaagtatgtttttcgggatgttgtgcagatcacatgcctcgatgggttcgaagtggtggagggtagagtcggagctacctcattctacagcacttgtcagtcaaacggaaagtggtcgaacagcaagttaaaatgccagcctgtggactgtggtattccagaatcaattgaaaatggaaaagtggaggaccccgagtctaccctcttcggatctgtgattaggtacacttgtgaggagccatattactacatggagaacggaggtggaggcgaatatcattgtgccggtaacggaagttgggttaacgaagttctaggccctgaattgcctaaatgtgtgccggtttgtggcgtccctcgagagccatttgaagaaaagcagcgtatcatagggggatctgacgctgacattaagaattttccatggcaagtgttcttcgacaatccttgggctggcggtgcccttattaatgaatactgggttctgacagcagcccacgtcgtggagggcaacagggaacccactatgtacgttggtagcacttctgtgcagactagccgcttggccaagtctaaaatgttaactccggaacacgtgttcatccatccgggatggaagctgctggaagtccctgagggccgaacgaattttgacaatgacatcgctctggtgagactcaaggaccccgtgaagatgggccctacggtgtcccccatctgtctccctggcacctcctctgattataaccttatggatggagacctcgggctaatctccggctggggtaggaccgaaaagagggaccgggcagtccgcttgaaggctgctagactgcctgtcgccccactgcgcaaatgcaaggaggtgaaggtggagaagccaactgccgacgctgaggcatacgtgttcaccccaaacatgatctgtgccggtggggaaaaggggatggactcctgcaaaggcgattcagggggagccttcgccgtgcaagatcccaacgacaaaacaaaattttacgcggcagggttggtgagctggggccctcaatgcggcacctatggtttgtatacccgcgtgaaaaattacgttgattggatcatgaagacgatgcaggaaaacagcactcctagagaagactag

SEQ ID NO: 272730 - DNA, 2049 bp, Artificial Sequence
  derived and/or modified sequence
atgtatggcgaaatcctttcccctaactatccccaggcctacccctccgaagtcgagaaatcatgggacatcgaggtccctgaggggtacggaattcacctgtattttacccatctggatatagaactgtccgagaactgcgcatacgattccgtgcagataatttcgggcgataccgaggagggaaggttgtgcggacagagatcatcgaacaacccacactctccaatcgttgaagagtttcaagtgccgtacaataagttgcaggtcatattcaagtctgacttctccaacgaggagcggttcactggttttgccgcttattatgttgcaacagataaagacgagtgctccggccgagcgcagctctggaaccacatgagcgatgtaccatgtagccatttttgtaataatttcattggaggttacttttgctcatgcccgccagaatactttcttcatgatgatatgaaaaattgcggagtgaattgctctggtgatgtctttacggccctcatcggagagatagccagccctaactaccctaaaccctatccagaaaactcacgatgtgagtatcagatccgattggaaaaggggttccaagttcacctgtcgctgctcctcaagcttgaatgtagcggcgcaatcacggcccactgctccctggaccttctgggcagcatagctggtgaccggcagtttggaccctactgtggacatggtttccccggtcctctgaacatcgaaacgaagtctaatgccctggatatcatcttccaaacagatctaacaggacaaaagaagggatggaaattgcggtaccatggagatcccatgccttgccctaaggaggatactcccaattccgtttgggagccagccaaggccaaatatgtgttccgcgatgtggtccaaattacatgtctggatgggtttgaggtcgtggaaggacgagtgggcgcaacttctttttactccacatgccagtctaacggtaagtggtcgaacagtaaactaaagtgtcaacccgtcgactgcgggatccctgagtcaatcgagaacggaaaagttgaggatccagagtctacattattcggcagcgtaatcaggtacacgtgtgaagagccttactattatatggagaacggtggaggtggcgaagagcgggagcgaggagagtatcactgcgcgggtaacggatcttgggtaaacgaagtcctgggccctgaacttcctaaatgcgtacccgtctgtggggtcccaagggagccgtttgaagagaagcagcggattatcgggggaagcgacgccgacatcaaaaatttcccttggcaagtgtttttcgacaatccctgggctgggggagccctcattaatgagtattgggtgctgaccgccgctcatgttgtggagggcaatcgagagccaacaatgtacgttggaagcacctcggtgcagacctcaaggttagctaaatctaagatgctgacccctgaacacgtgtttattcatcctgggtggaaactgctggaggtacccgagggtagaaccaacttcgataatgacattgctctggtgcgcctcaaggacccagtgaagatgggacccaccgtgtcccccatctgtttaccaggtacgtcaagcgactacaaccttatggacggcgacttgggattgatttcaggctggggaaggacggagaagagagacagagccgtaagactcaaggccgcacggctgccagtggctcctctgcggaaatgcaaagaggtgaaagttgagaagccaaccgccgatgccgaggcttatgttttcacacccaacatgatttgtgcaggaggagaaaagggaatggactcctgtaaaggggacagtggaggcgcattcgcagtacaggatcctaacgacaagactaaattctacgcagcgggactagtatcctggggcccacaatgtgggacatacgggttgtatacccgcgtgaagaattatgtagattggatcatgaagactatgcaagagaacagtacaccacgcgaagattag

SEQ ID NO: 272731 - DNA, 507 bp, Artificial Sequence
  derived and/or modified sequence
atgtggtgcattgtgttgttctctctgttggcatgggtatacgccgaaccaacgatgtacggtgagatcctcagtcccaactacccccaggcttacccaagcgaggttgaaaagtcatgggacattgaagtgcccgaagggtatgggatccatctgtatttcactcatttggacattgagctatccgagaactgtgcatatgactccgtgcagattatcagcggggatacagaagagggaagactgtgcggccagcgcagctccaataatccacatagtccaatcgtggaggagtttcaagttccatacaataagctccaagtcatttttaagagcgacttttctaatgaggagcggtttacaggatttgcagcttactacgtggcaacagatatcaatgaatgcaccgacttcgttgatgtgccatgctctcacttctgtaacaacttcatcggaggttatttttgctcatgcccgcctgagtacttccttcacgatgatatgtag

SEQ ID NO: 272732 - DNA, 2067 bp, Artificial Sequence
  derived and/or modified sequence
atgtggtgcatcgtgttattcagtctgttggcatgggtgtacgccgagccaacaatgtacggggagatcctctcccccaactatccgcaggcctacccctctgaagtggaaaaatcttgggatatagaggttcctgaaggttacgggatccatctgtactttacccatctggacattgagttgagcgagaactgcgcctacgattcagttcaaattatttccggagatactgaggagggtcggttatgtggccagcgcagctcaaataaccctcatagcccgatagtggaggagttccaagttccttataataagcttcaggtgattttcaagagtgatttctccaacgaggaacgattcaccggtttcgctgcttactatgtggcaaccgatatcaatgaatgtacagattttgtggacgtgccttgctcccacttctgcaacaacttcatagggggttatttttgtagctgcccccctgaatacttcctgcacgatgatatgaagaattgcggcgtgaactgctcaggggatgtgttcaccgcacttataggagaaatcgcatcaccgaactaccccaaaccctacccagagaattcccggtgtgaataccagattcgcttagaaaaaggattccaagttgtggtgacactaaggagagaggatttcgatgttgaggctgctgactcagctggtaattgtcttgattccctcgttttcgtagcgggagacaggcagttcggaccttactgcggacacgggttccccggacccttaaacatagaaaccaaaagcaacgccctcgatataatctttcagaccgatcttaccggacagaaaaagggatggaagctgcgataccacggtgacccaatgccgtgtccaaaggaagatactcccaatagcgtgtgggaacctgccaaggctaaatacgtgtttcgggatgtggtgcagatcacgtgtctggacgggttcgaggtcgtggaaggcagggtgggagcgacctcattttacagcacctgtcagtcaaatggaaagtggtcgaactctaagctgaagtgtcagcccgtggactgtggtatacctgaaagcattgaaaacggcaaggtggaggatccggaatccacgctgttcgggtcggttatcaggtatacctgtgaagagccttattattacatggaaaacggtgggggtggtgaataccactgtgcaggaaacggtagctgggtgaatgaggtgctaggcccagagttgcctaaatgcgtgcccgtgtgtggagttcccagggagccctttgaggaaaagcagcgcattattggcggtagcgacgcggatatcaagaacttcccgtggcaggtgttctttgacaacccctgggccggaggtgcccttattaacgagtactgggtgcttacggcagcccacgtggttgagggcaaccgtgaacctactatgtatgtgggctccacaagtgtccagacaagccgcctggcgaagtctaaaatgctgactcccgagcacgtgtttatccaccccggatggaaattgttggaggtgcctgagggcagaactaactttgataatgacatcgccctggtgcgtttgaaagatccggttaagatggggccaaccgtgagccctatttgcttacccggaacatctagtgactacaaccttatggatggagacctaggcttgatctccggctgggggcgtaccgagaagcgggaccgggcagtccggttgaaagctgcccgtcttcccgtggccccactgcgaaaatgcaaggaggtcaaggtggaaaagccaactgccgatgccgaagcttatgtgttcacgccgaatatgatatgcgcaggcggagaaaaggggatggactcatgcaaaggcgacagcggaggggcattcgccgtgcaggaccccaacgacaagacaaagttctatgcagccggactggttagctggggtccacaatgcgggacatatggcctttatactcgcgtaaagaactacgtcgattggataatgaagaccatgcaagaaaattcaacccccagagaagactag

SEQ ID NO: 272733 - DNA, 312 bp, Artificial Sequence
  derived and/or modified sequence
atgtggtgtatagtcctattctccctgctcgcctgggtgtacgcagaaccaaccatgtacggcgagatcctttctccaaactacccacaggcctacccaagcgaagtcgagaaaagctgggacattgaagtgcctgagggctatggcatccacttatacttcacccacctggacatcgaactctccgagaactgcgcctatgattcagtccaaatcatatctggtgatacagaagagggcaggctgtgcggacaaagatcctccaataatcctcattctcccatcgtggaagaattccaggtgccttattag

SEQ ID NO: 272734 - DNA, 306 bp, Artificial Sequence
  derived and/or modified sequence
atgtggtgtattgtacttttctctctgctggcatgggtttatgccgaaccaaccatgtacggtgaaatcttatcccctaattacccccaggcctatccatctgaagtggagaagagctgggatatcgaagtcccagaagggtacggcatccatctctatttcacccacttagacatcgaattaagtgaaaattgcgcctatgattccgtccaaattatctctggagatactgaagagggacggctgtgcgggcagaggtcttccaacaatccccactctccaatcgtggaagaattccaggtgtag

SEQ ID NO: 272735 - DNA, 2844 bp, Artificial Sequence
  derived and/or modified sequence
gtttagatcagggaatttcagacatgcacactcgggtagggaatcttatgaacagaaccaggacagggaggctggccggaggttcctgcagagggagcgtcaaggccctgtgctgctgtccctgggggccagaggggttgcccagcatgcccactggcaggagagagggaactgacccacttgctcctaccagcttctgaaggtgacactgagccccaggtgacgccgcaccaccaaagaaggtgcttgtgtttgtcagacaaatacagccaggcctgccaccccttaggctccaaagtccggaggtgcagaaagccaggaccaagagacaggcagctcaccagggtggacaaatcgccagagatgtggtgcattgtcctgttttcacttttggcatgggtttatgctgagcctaccatgtatggggagatcctgtcccctaactatcctcaggcatatcccagtgaggtagagaaatcttgggacatagaagttcctgaagggtatgggattcacctctacttcacccatctggacattgagctgtcagagaactgtgcgtatgactcagtgcagataatctcaggagacactgaagaagggaggctctgtggacagaggagcagtaacaatccccactctccaattgtggaagagttccaagtcccatacaacaaactccaggtgatctttaagtcagacttttccaatgaagagcgttttacggggtttgctgcatactatgttgccacagataaagatgaatgtagtggtagggctcaactctggaatcatatgtcagatgtcccttgtagccacttctgcaacaatttcattggtggttacttctgctcctgccccccggaatatttcctccatgatgacatgaagaattgcggagttaattgcagtggggatgtattcactgcactgattggggagattgcaagtcccaattatcccaaaccatatccagagaactcaaggtgtgaataccagatccggttggagaaagggttccaagtgcatctttctctgttgctcaagctggagtgcagtggtgcaatcacagctcactgtagccttgatctcttgggctcaattgcaggagatcggcaatttggtccttactgtggtcatggattccctgggcctctaaatattgaaaccaagagtaatgctcttgatatcatcttccaaactgatctaacagggcaaaaaaagggctggaaacttcgctatcatggagatccaatgccctgccctaaggaagacactcccaattctgtttgggagcctgcgaaggcaaaatatgtctttagagatgtggtgcagataacctgtctggatgggtttgaagttgtggagggacgtgttggtgcaacatctttctattcgacttgtcaaagcaatggaaagtggagtaattccaaactgaaatgtcaacctgtggactgtggcattcctgaatccattgagaatggtaaagttgaagacccagagagcactttgtttggttctgtcatccgctacacttgtgaggagccatattactacatggaaaatggaggaggtggagaagagagagagagaggggagtatcactgtgctggtaacgggagctgggtgaatgaggtgctgggcccggagctgccgaaatgtgttccagtctgtggagtccccagagaaccctttgaagaaaaacagaggataattggaggatccgatgcagatattaaaaacttcccctggcaagtcttctttgacaacccatgggctggtggagcgctcattaatgagtactgggtgctgacggctgctcatgttgtggagggaaacagggagccaacaatgtatgttgggtccacctcagtgcagacctcacggctggcaaaatccaagatgctcactcctgagcatgtgtttattcatccgggatggaagctgctggaagtcccagaaggacgaaccaattttgataatgacattgcactggtgcggctgaaagacccagtgaaaatgggacccaccgtctctcccatctgcctaccaggcacctcttccgactacaacctcatggatggggacctgggactgatctcaggctggggccgaacagagaagagagatcgtgctgttcgcctcaaggcggcaaggttacctgtagctcctttaagaaaatgcaaagaagtgaaagtggagaaacccacagcagatgcagaggcctatgttttcactcctaacatgatctgtgctggaggagagaagggcatggatagctgtaaaggggacagtggtggggcctttgctgtacaggatcccaatgacaagaccaaattctacgcagctggcctggtgtcctgggggccccagtgtgggacctatgggctctacacacgggtaaagaactatgttgactggataatgaagactatgcaggaaaatagcaccccccgtgaggactaatccagatacatcccaccagcctctccaagggtggtgaccaatgcattaccttctgttccttatgatattctcattatttcatcatgactgaaagaagacacgagcgaatgatttaaatagaacttgattgttgagacgccttgctagaggtagagtttgatcatagaattgtgctggtcatacatttgtggtctgactccttggggtcctttccccggagtacctattgtagataacactatgggtggggcactcctttcttgcactattccacagggataccttaattctttgtttcctctttacctgttcaaaattccatttacttgatcattctcagtatccactgtctatgtacaataaaggatgtttataagc

SEQ ID NO: 272736 - DNA, 1034 bp, Artificial Sequence
  derived and/or modified sequence
agacagggctgcttgaggagatgaggtgatcacggttaaagaagaggggctgtcctacatggatgatcatgatgcgccaagactgttgaaaacctgagtggaaatgggagcatcgttcttgagggcaggagagagactgataccgcgggggtggggctggtggaggacaatagaggaagaagaaaactgggagaaagtactcgattcctttggagaaaaattaggagaaagtctagagaagcaatgagggaaggatacaatttagctatagtctagaaagttagtcgaagttaactagggagggtgtgaggggcacggtgccatgtggggatgttggtgatatggccctgtgtgttatacctttgaaggtgacactgagccccaggtgacgccgcaccaccaaagaaggtgcttgtgtttgtcagacaaatacagccaggcctgccaccccttaggctccaaagtccggaggtgcagaaagccaggaccaagagacaggcagctcaccagggtggacaaatcgccagagatgtggtgcattgtcctgttttcacttttggcatgggtttatgctgagcctaccatgtatggggagatcctgtcccctaactatcctcaggcatatcccagtgaggtagagaaatcttgggacatagaagttcctgaagggtatgggattcacctctacttcacccatctggacattgagctgtcagagaactgtgcgtatgactcagtgcagataatctcaggagacactgaagaagggaggctctgtggacagaggagcagtaacaatccccactctccaattgtggaagagttccaagtcccatacaacaaactccaggtgatctttaagtcagacttttccaatgaagagcgttttacggggtttgctgcatactatgttgccacagacataaatgaatgcacagattttgtagatgtcccttgtagccacttctgcaacaatttcattggtggttacttctgctcctgccccccggaatatttcctccatgatgacatga

SEQ ID NO: 272737 - DNA, 3076 bp, Artificial Sequence
  derived and/or modified sequence
agaaaaataaaaagaatgcagcaggccaggttagcaggaacgttaagacggtgacggagaacagcaaagcctggaagcaagccgccgtggagaaggaagaactgtgctgagtacttcactctgttgcccaggctggagtgcagcggcacaatcacagctcactgcagtttcaacttcctgggttcaagtgatcctcctgcctgagcctcccaagtagctaggactataggctcctcctggctgttacactttctcagaccttccttgattatgatgacctcgaagttttgaggagtactgggaaagagtattataggatgccccctactggaatttgtcagatgtttttctcatgattatacagggattatggcttttggggaggaagatctcagagggtctcaccatgttgcccaggctgatctcaaactcctgaactcaagcaaccctcctgctttggcctcctaaagtattggtattacaggtgtgagccaccacacctggcccacaggacatggattctgaacaactggcataaatcgactggcctcaaggctccaaagtccggaggtgcagaaagccaggaccaagagacaggcagctcaccagggtggacaaatcgccagagatgtggtgcattgtcctgttttcacttttggcatgggtttatgctgagcctaccatgtatggggagatcctgtcccctaactatcctcaggcatatcccagtgaggtagagaaatcttgggacatagaagttcctgaagggtatgggattcacctctacttcacccatctggacattgagctgtcagagaactgtgcgtatgactcagtgcagataatctcaggagacactgaagaagggaggctctgtggacagaggagcagtaacaatccccactctccaattgtggaagagttccaagtcccatacaacaaactccaggtgatctttaagtcagacttttccaatgaagagcgttttacggggtttgctgcatactatgttgccacagacataaatgaatgcacagattttgtagatgtcccttgtagccacttctgcaacaatttcattggtggttacttctgctcctgccccccggaatatttcctccatgatgacatgaagaattgcggagttaattgcagtggggatgtattcactgcactgattggggagattgcaagtcccaattatcccaaaccatatccagagaactcaaggtgtgaataccagatccggttggagaaagggttccaagtggtggtgaccttgcggagagaagattttgatgtggaagcagctgactcagcgggaaactgccttgacagtttagtttttgttgcaggagatcggcaatttggtccttactgtggtcatggattccctgggcctctaaatattgaaaccaagagtaatgctcttgatatcatcttccaaactgatctaacagggcaaaaaaagggctggaaacttcgctatcatggagatccaatgccctgccctaaggaagacactcccaattctgtttgggagcctgcgaaggcaaaatatgtctttagagatgtggtgcagataacctgtctggatgggtttgaagttgtggagggacgtgttggtgcaacatctttctattcgacttgtcaaagcaatggaaagtggagtaattccaaactgaaatgtcaacctgtggactgtggcattcctgaatccattgagaatggtaaagttgaagacccagagagcactttgtttggttctgtcatccgctacacttgtgaggagccatattactacatggaaaatggaggaggtggggagtatcactgtgctggtaacgggagctgggtgaatgaggtgctgggcccggagctgccgaaatgtgttccagtctgtggagtccccagagaaccctttgaagaaaaacagaggataattggaggatccgatgcagatattaaaaacttcccctggcaagtcttctttgacaacccatgggctggtggagcgctcattaatgagtactgggtgctgacggctgctcatgttgtggagggaaacagggagccaacaatgtatgttgggtccacctcagtgcagacctcacggctggcaaaatccaagatgctcactcctgagcatgtgtttattcatccgggatggaagctgctggaagtcccagaaggacgaaccaattttgataatgacattgcactggtgcggctgaaagacccagtgaaaatgggacccaccgtctctcccatctgcctaccaggcacctcttccgactacaacctcatggatggggacctgggactgatctcaggctggggccgaacagagaagagagatcgtgctgttcgcctcaaggcggcaaggttacctgtagctcctttaagaaaatgcaaagaagtgaaagtggagaaacccacagcagatgcagaggcctatgttttcactcctaacatgatctgtgctggaggagagaagggcatggatagctgtaaaggggacagtggtggggcctttgctgtacaggatcccaatgacaagaccaaattctacgcagctggcctggtgtcctgggggccccagtgtgggacctatgggctctacacacgggtaaagaactatgttgactggataatgaagactatgcaggaaaatagcaccccccgtgaggactaatccagatacatcccaccagcctctccaagggtggtgaccaatgcattaccttctgttccttatgatattctcattatttcatcatgactgaaagaagacacgagcgaatgatttaaatagaacttgattgttgagacgccttgctagaggtagagtttgatcatagaattgtgctggtcatacatttgtggtctgactccttggggtcctttccccggagtacctattgtagataacactatgggtggggcactcctttcttgcactattccacagggataccttaattctttgtttcctctttacctgttcaaaattccatttacttgatcattctcagtatccactgtctatgtacaataaaggatgtttataagcaaa

SEQ ID NO: 272738 - DNA, 667 bp, Artificial Sequence
  derived and/or modified sequence
gtcatttggctgtcccttttctccttcctcgcacaaccctgtatcagtggggcagcacttccttctcagaccgcttgtcccagggtccctgccttcccctagtgaaagaagctcctgcctccatcggtgggcgttgggagcatcagcggagatgcacgcaatgataaacagcagacagggctgcttgaggagatgaggtgacactgagccccaggtgacgccgcaccaccaaagaaggtgcttgtgtttgtcagacaaatacagccaggcctgccaccccttaggctccaaagtccggaggtgcagaaagccaggaccaagagacaggcagctcaccagggtggacaaatcgccagagatgtggtgcattgtcctgttttcacttttggcatgggtttatgctgagcctaccatgtatggggagatcctgtcccctaactatcctcaggcatatcccagtgaggtagagaaatcttgggacatagaagttcctgaagggtatgggattcacctctacttcacccatctggacattgagctgtcagagaactgtgcgtatgactcagtgcagataatctcaggagacactgaagaagggaggctctgtggacagaggagcagtaacaatccccactctccaattgtggaagagttccaagtcccatac

SEQ ID NO: 272739 - DNA, 573 bp, Artificial Sequence
  derived and/or modified sequence
gtcatttggctgtcccttttctccttcctcgcacaaccctgtatcagtggggcagcacttccttctcagaccgcttgtcccagggtccctgccttcccctagtgaaagaagctcctgcctccatcggtgggcgttgggagcatcagcggagatgcacgcaatgataaacagcagacagggctgcttgaggagatgaggctccaaagtccggaggtgcagaaagccaggaccaagagacaggcagctcaccagggtggacaaatcgccagagatgtggtgcattgtcctgttttcacttttggcatgggtttatgctgagcctaccatgtatggggagatcctgtcccctaactatcctcaggcatatcccagtgaggtagagaaatcttgggacatagaagttcctgaagggtatgggattcacctctacttcacccatctggacattgagctgtcagagaactgtgcgtatgactcagtgcagataatctcaggagacactgaagaagggaggctctgtggacagaggagcagtaacaatccccactctccaattgtggaagagttccaagt

SEQ ID NO: 272740 - DNA, 2049 bp, Artificial Sequence
  derived and/or modified sequence
atgtacggcgagatcctgagccccaactacccccaggcctaccccagcgaggtggagaagagctgggacatcgaggtgcccgagggctacggcatccacctgtacttcacccacctggacatcgagctgagcgagaactgcgcctacgacagcgtgcagatcatcagcggcgacaccgaggagggcagactgtgcggccagagaagcagcaacaacccccacagccccatcgtggaggagttccaggtgccctacaacaagctgcaggtgatcttcaagagcgacttcagcaacgaggagagattcaccggcttcgccgcctactacgtggccaccgacaaggacgagtgcagcggcagagcccagctgtggaaccacatgagcgacgtgccctgcagccacttctgcaacaacttcatcggcggctacttctgcagctgcccccccgagtacttcctgcacgacgacatgaagaactgcggcgtgaactgcagcggcgacgtgttcaccgccctgatcggcgagatcgccagccccaactaccccaagccctaccccgagaacagcagatgcgagtaccagatcagactggagaagggcttccaggtgcacctgagcctgctgctgaagctggagtgcagcggcgccatcaccgcccactgcagcctggacctgctgggcagcatcgccggcgacagacagttcggcccctactgcggccacggcttccccggccccctgaacatcgagaccaagagcaacgccctggacatcatcttccagaccgacctgaccggccagaagaagggctggaagctgagataccacggcgaccccatgccctgccccaaggaggacacccccaacagcgtgtgggagcccgccaaggccaagtacgtgttcagagacgtggtgcagatcacctgcctggacggcttcgaggtggtggagggcagagtgggcgccaccagcttctacagcacctgccagagcaacggcaagtggagcaacagcaagctgaagtgccagcccgtggactgcggcatccccgagagcatcgagaacggcaaggtggaggaccccgagagcaccctgttcggcagcgtgatcagatacacctgcgaggagccctactactacatggagaacggcggcggcggcgaggagagagagagaggcgagtaccactgcgccggcaacggcagctgggtgaacgaggtgctgggccccgagctgcccaagtgcgtgcccgtgtgcggcgtgcccagagagcccttcgaggagaagcagagaatcatcggcggcagcgacgccgacatcaagaacttcccctggcaggtgttcttcgacaacccctgggccggcggcgccctgatcaacgagtactgggtgctgaccgccgcccacgtggtggagggcaacagagagcccaccatgtacgtgggcagcaccagcgtgcagaccagcagactggccaagagcaagatgctgacccccgagcacgtgttcatccaccccggctggaagctgctggaggtgcccgagggcagaaccaacttcgacaacgacatcgccctggtgagactgaaggaccccgtgaagatgggccccaccgtgagccccatctgcctgcccggcaccagcagcgactacaacctgatggacggcgacctgggcctgatcagcggctggggcagaaccgagaagagagacagagccgtgagactgaaggccgccagactgcccgtggcccccctgagaaagtgcaaggaggtgaaggtggagaagcccaccgccgacgccgaggcctacgtgttcacccccaacatgatctgcgccggcggcgagaagggcatggacagctgcaagggcgacagcggcggcgccttcgccgtgcaggaccccaacgacaagaccaagttctacgccgccggcctggtgagctggggcccccagtgcggcacctacggcctgtacaccagagtgaagaactacgtggactggatcatgaagaccatgcaggagaacagcacccccagagaggactag

SEQ ID NO: 272741 - DNA, 507 bp, Artificial Sequence
  derived and/or modified sequence
atgtggtgcatcgtgctgttcagcctgctggcctgggtgtacgccgagcccaccatgtacggcgagatcctgagccccaactacccccaggcctaccccagcgaggtggagaagagctgggacatcgaggtgcccgagggctacggcatccacctgtacttcacccacctggacatcgagctgagcgagaactgcgcctacgacagcgtgcagatcatcagcggcgacaccgaggagggcagactgtgcggccagagaagcagcaacaacccccacagccccatcgtggaggagttccaggtgccctacaacaagctgcaggtgatcttcaagagcgacttcagcaacgaggagagattcaccggcttcgccgcctactacgtggccaccgacatcaacgagtgcaccgacttcgtggacgtgccctgcagccacttctgcaacaacttcatcggcggctacttctgcagctgcccccccgagtacttcctgcacgacgacatgtag

SEQ ID NO: 272742 - DNA, 312 bp, Artificial Sequence
  derived and/or modified sequence
atgtggtgcatcgtgctgttcagcctgctggcctgggtgtacgccgagcccaccatgtacggcgagatcctgagccccaactacccccaggcctaccccagcgaggtggagaagagctgggacatcgaggtgcccgagggctacggcatccacctgtacttcacccacctggacatcgagctgagcgagaactgcgcctacgacagcgtgcagatcatcagcggcgacaccgaggagggcagactgtgcggccagagaagcagcaacaacccccacagccccatcgtggaggagttccaggtgccctactag

SEQ ID NO: 272743 - DNA, 306 bp, Artificial Sequence
  derived and/or modified sequence
atgtggtgcatcgtgctgttcagcctgctggcctgggtgtacgccgagcccaccatgtacggcgagatcctgagccccaactacccccaggcctaccccagcgaggtggagaagagctgggacatcgaggtgcccgagggctacggcatccacctgtacttcacccacctggacatcgagctgagcgagaactgcgcctacgacagcgtgcagatcatcagcggcgacaccgaggagggcagactgtgcggccagagaagcagcaacaacccccacagccccatcgtggaggagttccaggtgtag

SEQ ID NO: 272744 - protein, 181 aa, Artificial Sequence
  derived and/or modified sequence
MPVKGGTKCIKYLLFGFNFIFWLAGIAVLAIGLWLRFDSQTKSIFEQETNNNNSSFYTGVYILIGAGALMMLVGFLGCCGAVQESQCMLGLFFGFLLVIFAIEIAAAIWGYSHKDEVIKEVQEFYKDTYNKLKTKDEPQRETLKAIHYALNLWFGWGRGTVYLRHLPQEGRTRNLHREVLS

SEQ ID NO: 272745 - DNA, 546 bp, Artificial Sequence
  derived and/or modified sequence
atgcccgtaaaagggggcaccaagtgcattaaatacctgctgttcggtttcaactttattttttggctagcgggcatagctgtactcgctatcgggctctggctccggttcgactctcaaacaaaaagtatctttgagcaagagacaaataataataattccagtttttataccggcgtgtatatcttaatcggcgcaggggccctcatgatgctcgtcggcttcttggggtgctgtggggctgtccaagaaagtcagtgcatgctcggcctttttttcggttttctgctggtgattttcgccatcgagattgctgctgcgatctggggctacagtcataaagatgaggtgatcaaggaagttcaggaattctacaaggacacttataataaactaaaaacgaaggacgaaccacagagagaaacactgaaagccattcactatgccctaaatctgtggttcggctggggtaggggcacggtttatttgcggcatctcccacaggagggaaggaccaggaatctacatagggaggtgctgtcctag

SEQ ID NO: 272746 - DNA, 546 bp, Artificial Sequence
  derived and/or modified sequence
atgcctgtgaagggcggcaccaagtgcatcaagtacctgctgtttggcttcaacttcatcttctggctggccggcattgctgtgctggccatcggcctgtggctgcgctttgacagccagaccaagagcatctttgagcaggagaccaacaacaacaacagcagcttctacacaggagtgtacatcctgattggagctggggccctgatgatgctggtgggcttcctgggctgctgcggggctgtgcaggagagccagtgcatgctgggcctcttcttcggcttcctgctggtgatctttgccatcgagattgctgctgccatctggggctacagccacaaggatgaagtcatcaaggaggtgcaggagttctacaaggacacctacaacaagctgaagaccaaggatgagccccagcgggagaccctgaaggccatccactacgccctgaacctgtggtttggctggggccggggcaccgtgtacctgcggcacctgccccaggagggccgcaccaggaacctgcaccgggaggtgctgtcctag

SEQ ID NO: 272747 - DNA, 546 bp, Artificial Sequence
  derived and/or modified sequence
atgcccgtgaagggcggcaccaagtgcatcaagtacctgctgttcggtttcaacttcatcttctggctggctggaatcgccgttttggcgataggactgtggctgaggttcgattcccagactaagagtatcttcgaacaggaaactaacaataacaatagttccttctacacgggcgtgtacatactgataggggctggtgccttaatgatgcttgttgggttccttggatgttgcggcgccgtgcaggaatcgcaatgtatgctgggactcttttttggcttcctgcttgtaatctttgccatcgaaattgcagccgcgatctgggggtattcccataaggatgaagtgatcaaggaagtgcaggagttctacaaagatacttataataagttgaagacaaaagacgaacctcagcgagaaactctgaaagctatccattatgctctcaacctttggtttggttggggcagaggcaccgtatacctccggcacctgcctcaagaaggacgcaccagaaacctgcatagagaggtcctgtcttag

SEQ ID NO: 272748 - DNA, 546 bp, Artificial Sequence
  derived and/or modified sequence
atgcctgtaaagggtggaacaaaatgcattaaatatctgctcttcggctttaacttcattttctggctggccggaatcgcggtgctcgcaatcgggctttggttacggttcgattcgcagaccaaaagtatctttgaacaagaaactaacaataacaactcctcattttacaccggcgtgtacattctaatcggtgccggtgcccttatgatgttggtcggatttcttggatgctgtggggcagtgcaggaaagccagtgtatgctaggactcttctttggctttctcttagtgatattcgccatagaaatcgcggctgcaatttggggctacagccataaagatgaggtgatcaaagaggtccaggagttttataaggatacctataataagctgaaaactaaggacgagccccagagggagaccctcaaagccattcactacgcgctcaatctgtggttcggctgggggcgtggcaccgtgtatttgagacacttaccccaggagggcagaaccaggaatctacatagggaggtcctgagttag

SEQ ID NO: 272749 - DNA, 1229 bp, Artificial Sequence
  derived and/or modified sequence
gaccagcctacagccgcctgcatctgtatccagcgccaggtcccgccagtcccagctgcgcgcgccccccagtcccgcacccgttcggcccaggctaagttagccctcaccatgccggtcaaaggaggcaccaagtgcatcaaatacctgctgttcggatttaacttcatcttctggcttgccgggattgctgtccttgccattggactatggctccgattcgactctcagaccaagagcatcttcgagcaagaaactaataataataattccagcttctacacaggagtctatattctgatcggagccggcgccctcatgatgctggtgggcttcctgggctgctgcggggctgtgcaggagtcccagtgcatgctgggactgttcttcggcttcctcttggtgatattcgccattgaaatagctgcggccatctggggatattcccacaaggatgaggtgattaaggaagtccaggagttttacaaggacacctacaacaagctgaaaaccaaggatgagccccagcgggaaacgctgaaagccatccactatgcgttgaacctgtggtttggctgggggcgtggaacagtttatctcagacatctgccccaagaaggacgtactcgaaaccttcaccgtgaagtcctgtcctgatgccatcaaagaggtcttcgacaataaattccacatcatcggcgcagtgggcatcggcattgccgtggtcatgatatttggcatgatcttcagtatgatcttgtgctgtgctatccgcaggaaccgcgagatggtctagagtcagcttacatccctgagcaggaaagtttacccatgaagattggtgggattttttgtttgtttgttttgttttgtttgttgtttgttgtttgtttttttgccactaattttagtattcattctgcattgctagataaaagctgaagttactttatgtttgtcttttaatgcttcattcaatattgacatttgtagttgagcggggggtttggtttgctttggtttatattttttcagttgtttgtttttgcttgttatattaagcagaaatcctgcaatgaaaggtactatatttgctagactctagacaagatattgtacataaaagaatttttttgtctttaaatagatacaaatgtctatcaactttaatcaagttgtaacttatattgaagacaatttgatacataataaaaaattatgacaatgtc

SEQ ID NO: 272750 - DNA, 546 bp, Artificial Sequence
  derived and/or modified sequence
atgcccgtgaagggcggcaccaagtgcatcaagtacctgctgttcggcttcaacttcatcttctggctggccggcatcgccgtgctggccatcggcctgtggctgagattcgacagccagaccaagagcatcttcgagcaggagaccaacaacaacaacagcagcttctacaccggcgtgtacatcctgatcggcgccggcgccctgatgatgctggtgggcttcctgggctgctgcggcgccgtgcaggagagccagtgcatgctgggcctgttcttcggcttcctgctggtgatcttcgccatcgagatcgccgccgccatctggggctacagccacaaggacgaggtgatcaaggaggtgcaggagttctacaaggacacctacaacaagctgaagaccaaggacgagccccagagagagaccctgaaggccatccactacgccctgaacctgtggttcggctggggcagaggcaccgtgtacctgagacacctgccccaggagggcagaaccagaaacctgcacagagaggtgctgagctag

SEQ ID NO: 272751 - protein, 545 aa, Artificial Sequence
  derived and/or modified sequence
MSSCVSSQPSSNRAAPQDELGGRGSSSSESQKPCEALRGLSSLSIHLGMESFIVVTECEPGCAVDLGLARDRPLEADGQEVPLDTSGSQARPHLSGRKLSLQERSQGGLAAGGSLDMNGRCICPSLPYSPVSSPQSSPRLPRRPTVESHHVSITGMQDCVQLNQYTLKDEIGKGSYGVVKLAYNENDNTYYAMKVLSKKKLIRQAGFPRRPPPRGTRPAPGGCIQPRGPIEQVYQEIAILKKLDHPNVVKLVEVLDDPNEDHLYMVFELVNQGPVMEVPTLKPLSEDQARFYFQDLIKGIEYLHYQKIIHRDIKPSNLLVGEDGHIKIADFGVSNEFKGSDALLSNTVGTPAFMAPESLSETRKIFSGKALDVWAMGVTLYCFVFGQCPFMDERIMCLHSKIKSQALEFPDQPDIAEDLKDLITRMLDKNPESRIVVPEIKILVKTMIRKRSFGNPFEGSRREERSLSAPGNLLTKKPTRECESLSELKEARQRRQPPGHRPAPRGGGGSALVRGSPCVESCWAPAPGSPARMHPLRPEEAMEPE

SEQ ID NO: 272752 - DNA, 1638 bp, Artificial Sequence
  derived and/or modified sequence
atgagcagctgcgtgagcagccagcccagcagcaacagagccgccccccaggacgagctgggcggcagaggcagcagcagcagcgagagccagaagccctgcgaggccctgagaggcctgagcagcctgagcatccacctgggcatggagagcttcatcgtggtgaccgagtgcgagcccggctgcgccgtggacctgggcctggccagagacagacccctggaggccgacggccaggaggtgcccctggacaccagcggcagccaggccagaccccacctgagcggcagaaagctgagcctgcaggagagaagccagggcggcctggccgccggcggcagcctggacatgaacggcagatgcatctgccccagcctgccctacagccccgtgagcagcccccagagcagccccagactgcccagaagacccaccgtggagagccaccacgtgagcatcaccggcatgcaggactgcgtgcagctgaaccagtacaccctgaaggacgagatcggcaagggcagctacggcgtggtgaagctggcctacaacgagaacgacaacacctactacgccatgaaggtgctgagcaagaagaagctgatcagacaggccggcttccccagaagacccccccccagaggcaccagacccgcccccggcggctgcatccagcccagaggccccatcgagcaggtgtaccaggagatcgccatcctgaagaagctggaccaccccaacgtggtgaagctggtggaggtgctggacgaccccaacgaggaccacctgtacatggtgttcgagctggtgaaccagggccccgtgatggaggtgcccaccctgaagcccctgagcgaggaccaggccagattctacttccaggacctgatcaagggcatcgagtacctgcactaccagaagatcatccacagagacatcaagcccagcaacctgctggtgggcgaggacggccacatcaagatcgccgacttcggcgtgagcaacgagttcaagggcagcgacgccctgctgagcaacaccgtgggcacccccgccttcatggcccccgagagcctgagcgagaccagaaagatcttcagcggcaaggccctggacgtgtgggccatgggcgtgaccctgtactgcttcgtgttcggccagtgccccttcatggacgagagaatcatgtgcctgcacagcaagatcaagagccaggccctggagttccccgaccagcccgacatcgccgaggacctgaaggacctgatcaccagaatgctggacaagaaccccgagagcagaatcgtggtgcccgagatcaagatcctggtgaagaccatgatcagaaagagaagcttcggcaaccccttcgagggcagcagaagagaggagagaagcctgagcgcccccggcaacctgctgaccaagaagcccaccagagagtgcgagagcctgagcgagctgaaggaggccagacagagaagacagccccccggccacagacccgcccccagaggcggcggcggcagcgccctggtgagaggcagcccctgcgtggagagctgctgggcccccgcccccggcagccccgccagaatgcaccccctgagacccgaggaggccatggagcccgagtag

SEQ ID NO: 272753 - DNA, 5218 bp, Artificial Sequence
  derived and/or modified sequence
cccatctctacgaaaaatacaaaaattagccaagtatggtggccggcgcctgtaatcccagctactcgggagactgaggcagagaactgcttgaacctgggaggcagaggttgcagtgatccgagatcgcgtcactgcactccagcgtgggcgacagagcgagactccgtttcagaaaagaaaaaaaaaaaaaaaaaaaagggagtcggggtggagctctcattggctcgttgcatgtgagtgtccctacggcctagaaatacaagagaagcacatcggaacgggctggaaatccacccagttaactagagggctttgaaccttttattaacttggaggttgactctcctgtcaactcgattcccttttggctgtttggcagggtcagtgagacatcccctgggtcgctcgaccccgtaggacggttcagggagccctccaggtcttcgtttctcctcttccccgcacagtgctgttatccagctgggggatccaacgcacacttaaggctccagcaaagtggctccgctgccggatgggagtgccccagtgtgctggatgaagctggcgcatgcaccatgtcatcatgtgtctctagccagcccagcagcaaccgggccgccccccaggatgagctggggggcaggggcagcagcagcagcgaaagccagaagccctgtgaggccctgcggggcctctcatccttgagcatccacctgggcatggagtccttcattgtggtcaccgagtgtgagccgggctgtgctgtggacctcggcttggcgcgggaccggcccctggaggccgatggccaagaggtcccccttgacacctccgggtcccaggcccggccccacctctccggtcgcaagctgtctctgcaagagcggtcccagggtgggctggcagccggtggcagcctggacatgaacggacgctgcatctgcccgtccctgccctactcacccgtcagctccccgcagtcctcgcctcggctgccccggcggccgacagtggagtctcaccacgtctccatcacgggtatgcaggactgtgtgcagctgaatcagtataccctgaaggatgaaattggaaagggctcctatggtgtcgtcaagttggcctacaatgaaaatgacaatacctactatgcaatgaaggtgctgtccaaaaagaagctgatccggcaggccggctttccacgtcgccctccaccccgaggcacccggccagctcctggaggctgcatccagcccaggggccccattgagcaggtgtaccaggaaattgccatcctcaagaagctggaccaccccaatgtggtgaagctggtggaggtcctggatgaccccaatgaggaccatctgtacatggtgttcgaactggtcaaccaagggcccgtgatggaagtgcccaccctcaaaccactctctgaagaccaggcccgtttctacttccaggatctgatcaaaggcatcgagtacttacactaccagaagatcatccaccgtgacatcaaaccttccaacctcctggtcggagaagatgggcacatcaagatcgctgactttggtgtgagcaatgaattcaagggcagtgacgcgctcctctccaacaccgtgggcacgcccgccttcatggcacccgagtcgctctctgagacccgcaagatcttctctgggaaggccttggatgtttgggccatgggtgtgacactatactgctttgtctttggccagtgcccattcatggacgagcggatcatgtgtttacacagtaagatcaagagtcaggccctggaatttccagaccagcccgacatagctgaggacttgaaggacctgatcacccgtatgctggacaagaaccccgagtcgaggatcgtggtgccggaaatcaagatcctggtgaagaccatgatacgtaaacgctcctttgggaacccattcgagggcagccggcgggaggaacgctcactgtcagcgcctggaaacttgctcaccaaaaaaccaaccagggaatgtgagtccctgtctgagctcaaggaagcaaggcagcgaagacaacctccagggcaccgacccgccccccgtgggggaggaggaagtgctcttgtgagaggcagtccctgcgtggaaagttgctgggcccccgcccccggctcccccgcacgcatgcatccactgcggccggaggaggccatggagcccgagtagctgcctggatcgctcgacctcgcatgcgcgccgcgtcgcctctggggggctgctgcaccgcgtttccatagcagcatgtcctacggaaacccagcacgtgtgtagagcctcgatcgtcatctctggttatttgttttttcctttgttgttttaaaggggacaaaaaaaaaaaaaggacttgactccatgacgtcgaccgtggccgctggctggctggacaggcgggtgtgaggagttgcagacccaaacccacgtgcattttgggacaattgctttttaaaacgtttttatgccaaaaatccttcattgtgattttcagaaccacgtcagatataccaagtgactgtgtgtggggtttgacaactgtggaaaggcgagcagaaaactccggcggtctgaggccatggaggtggttgctgcatttgagagggagtagggggctagatgtggctcctagtgcaaaccggaaaccatggcaccttccagagccgtggtctcaaggagtcagagcagggctggccctcagtagctgcagggagctttgatgcaacttatttgtaagaaggatttttaaattttttatgggtagaattgtagtcaggaaaacagaaagggcttgaaatttaataagtgctgctggaaggggattttccaagcctggaagggtattcagcagctgtggtggggaaacatttctcctgaaagactgaacgtgtttcttcatgacagctgctcaaagcaggtttctgagatagctgaccgagctctggtaaatctctttgtcaaattacgaaaacttcagggtgaaatcctatgcttccatgtacattacatggcttaagattaaacaaaaacatttttcaagtctctaactagagtgaactctagagcacagtagttcagaaactatttagagcttccaggatatatttcacagcttcaggcatgtgatcagttagagccgatgaaacctatgcccgcctgtatatatattagcagcttagctagttcataacctgtatattctaaagactgctaaggttttgttttcattttaaatcctagctgattgttgtggtcaatgaaatacccagtttctggagggccaggtgggaaatgctttcactggaccaacacacaaatgatcatcctgaggatctgagcttccctagactccacacaataaccttggggcacccttttagagaagactgttgaaacccacagcactcgttggggtatgaggaaaccagggcttggcacaggaagttcccctttgtagctaaaagtccagaaagaaagggttcatctttttgacttccaactgatattgggaagtttggttgaggttcaagtgtgactccttccagagccacaggtaggggagtgtgaagttgagggggaggaaagctggaaggactctgccttgggagattcccagctctgctttccagcgcttggtggaatctgggctggggaaagacggcaccgggaaactctgcttccccattgtttccatctgatcagctgtggtgtgaggacttctcagacaaaggcaaggcctcgtgcccctgcccagcccattcatggagccctgggccttcttggcttccatagatcctaagctcttgactgtagtttagccagacttgttttgctatcttataagcagttcagaattagggaatgctggttttgaagagcaaaggacaggtagtctagagagggtcgtctggcctgcttgctgggtctttgtaacccagcacttcctcttgccctcctggctttatgtttatggggagaggactcaatagctccaccccttctggcaccagatggggcttggttagtttgcaataagcaccttgcagaggttaaagccagcgggtccctagtcttaggcccagcctgcttgtgtgggctctggcctggcctggtggctggcccagggggcagcagtgcttagagcttctgcagggcttctcttgtttacacagctgcatcagacaatgccatttctccccaccacggaaccttccatctaagatttcttccagggaatgccagcaatcaggcagcacccagctgtgggggcagtggggtgggggagacccacattgatgactttttttttttcttttaatgaagaaacaccaaagaaagctgtggaaaggacctgccccacatgaaaaggataagccaagatggctgtaaacacagagcatttgagctgccactcttggagcacattgatttttcaaaagccagctctgtcaggaaaggaggtgctgttatgagcagctcttccagtgggcaaagaggacgcccataatttcttccattgctagctcatctgtgggaccaatttggtgtaagcaacctgtggcctgcacttgtggcctcgaaggaagcacaaaccctccatccacttcccatttcctctgcccttttccacctcccccttccatcccaccagctgccagtggctcccagaaagccttattgagccccttgttgacacttggggctgcggaggcctctccctactggtctggcctttcctgagaggcaggtcttccgtcctcagagcctttctggaacaaggagaatgcctgtgcaggtggacacacaggcctggcctgtcgctctcacttgtcttccagcggggagcttcacgttgccgagtggaagaaccatgacctccacttgcttccaaggtgctagggaagtttcagggtacgctggttcccctctccagctggaggccgagtttctggggactgcagatttttctactctgtgatcgattcaatgcccgatgcttctgtttcattcccgaccctttctactatgcattttccttttatcaggtgtataaagttaaatactgtgtatttatcactaaaaagtacatgaacttaagagacaactaagcctttcgtgtttttccacaggtgtttaagcttctctgtacagttgaaataaacagacagcaaaatggt

SEQ ID NO: 272754 - DNA, 1638 bp, Artificial Sequence
  derived and/or modified sequence
atgtcaagctgtgtgagctcacagccttctagtaatagggccgctccacaggacgaactcggaggtcggggcagctcaagctctgagagccagaagccttgcgaagcactgcgcgggctgagtagtctatctatccacttgggcatggagagttttatagttgttaccgagtgtgagccaggttgcgccgtcgacctggggttggctcgggatcgacccctcgaagctgatggccaggaagtacccctggacacaagcggttctcaggctagaccccacctgtcaggcaggaaactgtcattgcaggaacgatctcagggcggacttgctgcgggtgggagcctggatatgaacggaagatgcatttgtccctcacttccctactccccagtaagcagccctcaatcttccccgcgattaccacgaaggcccacagtagagtcccaccacgtcagtattactggaatgcaggattgtgtgcagcttaaccagtacactctgaaggatgagattggcaagggcagctacggggtggtaaaactggcctataatgagaatgataacacctattatgcaatgaaagtgctgagcaagaagaagctgatcaggcaggccggatttcctagacgccctccgcctaggggtacacgtccggctccggggggctgcattcagccacgcggcccaatcgaacaggtctatcaggagatagccatcctgaagaagttagaccatccaaatgtagttaagttggtcgaagtgctggacgaccctaatgaagatcatctctacatggtattcgagttggtgaatcagggacccgttatggaggtgccaaccctgaagcctctgagcgaggaccaggcccggttctactttcaggacttaatcaagggaatagagtatctgcattatcagaagattatccaccgcgatattaagccttccaaccttctggtgggggaggatggacatatcaaaattgccgatttcggggtaagcaacgaatttaaaggctctgacgctctgctgtccaataccgtgggcactccagcctttatggccccagagtctctgtccgagacccggaaaatcttttccgggaaggctcttgatgtttgggccatgggtgttactctatactgttttgtgtttggacagtgtcccttcatggatgaaagaatcatgtgcttgcactcgaagataaagtctcaggccctggaatttccagatcagccggatatcgctgaggatctcaaggatctgatcacccgcatgctggacaagaaccccgagtcccggattgtcgtgccagagataaaaatactggtgaaaacaatgatccgaaagaggagcttcggaaacccttttgagggatcaaggagggaggagcgatcactgtcggcgcctggaaacctgctgacgaaaaaaccaacccgcgagtgtgaatccttgtcggagctcaaggaggcccggcagcggaggcaaccgccaggtcataggccggcaccccgcggcgggggtggtagcgcacttgtaagggggtctccgtgtgtagaatcttgctgggctcccgcacctgggtctcccgcgaggatgcaccctctccgacctgaggaggcaatggagccagaatag

SEQ ID NO: 272755 - DNA, 1638 bp, Artificial Sequence
  derived and/or modified sequence
atgagcagctgtgtgagcagccagcccagcagcaacagagctgccccccaggatgagctgggcggccggggcagcagcagcagcgagagccagaagccctgtgaggccctgcggggcctgagcagcctgagcatccacctgggcatggagagcttcatcgtggtgacagaatgtgagcccggctgtgctgtggacctgggcctggcccgggaccggcccctggaggctgatggccaggaggtgcccctggacaccagcggcagccaggcccggccccacctgagcggcaggaagctgagcctgcaggagaggagccagggcggcctggccgccggcggcagcctggacatgaatggccgctgcatctgccccagcctgccctacagccctgtgagcagcccccagagcagcccccggctgccccggcggcccaccgtggagagccaccacgtgtccatcaccggcatgcaggactgtgtgcagctgaaccagtacaccctgaaggatgaaattggcaagggcagctatggagtggtgaagctggcctacaatgaaaatgacaacacctactatgccatgaaggtgctgagcaagaagaagctgatccggcaggccggcttcccccggcggcccccaccccggggcaccaggcctgcccctgggggctgcatccagccccggggccccatcgagcaggtgtaccaggagatcgccatcctgaagaagctggaccaccccaacgtggtgaagctggtggaggtgctggatgaccccaatgaagaccacctgtacatggtgtttgagctggtgaaccagggccctgtgatggaggtgcccaccctgaagcccctgtctgaggaccaggcccgcttctacttccaggacctgatcaagggcatcgagtacctgcactaccagaagatcatccaccgggacatcaagcccagcaacctgctggtgggggaggatggccacatcaagattgctgactttggagtgtccaatgagttcaagggcagtgatgccctgctgagcaacacagtgggcaccccagccttcatggcccctgagagcctgtctgagaccaggaagatcttcagcggcaaggccctggatgtgtgggccatgggcgtgaccctgtactgctttgtgtttggccagtgccccttcatggatgagcgcatcatgtgcctgcacagcaagatcaagagccaggccctggagttcccagaccagcctgacattgctgaggacctgaaggacctgatcaccaggatgctggacaagaaccctgagagcagaattgtggtgcctgagatcaagatcctggtgaagaccatgatcaggaagaggagctttggaaacccctttgagggcagcagaagagaggagaggagcctgagcgcccctggcaacctgctgaccaagaagcccaccagagaatgtgagagcctgtctgagctgaaggaggcccggcagaggcggcagcccccaggccacaggcctgccccccggggcggcggcggcagcgccctggtgcggggcagcccctgtgtggagagctgctgggccccagcccctggcagccctgccaggatgcaccccctgcggcctgaggaggccatggagcctgagtag

SEQ ID NO: 272756 - DNA, 1638 bp, Artificial Sequence
  derived and/or modified sequence
atgagcagctgcgtgagcagccagcccagcagcaaccgggccgccccccaagatgaactcgggggtaggggcagttcatccagtgaaagccaaaagccctgtgaggctctcagagggctgtctagccttagcattcatcttggaatggaatccttcatcgttgtgaccgaatgcgagccgggatgtgcggtcgatctcggcttagctcgagatcggcccctggaggccgacggtcaagaggtgccccttgatacctccggatcgcaagcccgccctcacctgagcggacgcaagctgtccttacaggagaggtcgcaaggcggccttgcggccggggggtccctggatatgaacggacgctgcatctgcccttcactgccctattcacctgtgtcatcaccccagtctagtcctcgcctcccgcgtcggcctacggtggagtcacatcatgtcagcattaccgggatgcaagactgcgtgcagctaaatcagtatacattaaaagacgaaataggcaaaggcagctatggagtcgtgaaacttgcctataacgagaacgataacacctactatgcaatgaaggtcctctctaagaagaaactaatacgacaggccggattccccagaagacctcctcctcggggaactcggcccgcgcctgggggctgtatacaaccccgcggccctattgaacaggtgtatcaggagattgctatcctgaagaaattagatcatccaaatgtggtgaagttagtcgaggtcctcgatgaccctaatgaagaccatttgtatatggtttttgagctcgtgaatcaggggccagtgatggaggtccccactctcaagcccctaagtgaagaccaagcccgattttactttcaggacctgattaaggggatcgagtacctgcattaccagaagatcatacaccgagatattaaaccatccaacctcttggtaggggaggatgggcatatcaagattgctgatttcggcgtctctaacgagttcaaaggatcagatgctctactctccaacaccgtcgggacgcccgccttcatggctcctgagtctcttagcgagaccagaaagatcttctcaggaaaggccctcgatgtatgggccatgggggtcactttgtactgtttcgtgttcggacagtgtccctttatggatgaacggatcatgtgcttacattcaaagataaagtcccaggcgcttgaatttcctgaccagcccgacatcgcagaggatctcaaagatctgattactaggatgctggataaaaaccccgaatccagaatcgtagttcccgaaatcaagattctcgtaaaaacaatgatccgcaaacgctcctttggtaatccattcgaaggatccaggcgcgaagagcggtctctgtccgctcctggaaatttactgaccaagaaaccaaccagagaatgtgaaagtctctcagagctgaaggaagcccgtcagcgccggcagccgcctggtcatcggcccgcgcctcggggaggtggagggagtgctctggtgcgtggcagcccttgtgtggagagctgctgggcacccgcccccggaagcccagccagaatgcaccccctaagacccgaagaggctatggagcctgagtag

SEQ ID NO: 272757 - DNA, 1638 bp, Artificial Sequence
  derived and/or modified sequence
atgagttcctgtgtttcctctcaaccatcctctaatagagccgcacctcaggatgagctaggcggtagggggtcatcttctagcgagtctcagaagccatgcgaggctctaaggggtttgtcttcactctcaatccatctggggatggagagtttcattgtggtgacagaatgcgagcccggatgtgctgtggacctgggccttgccagggaccgccctctagaggctgatgggcaggaggttcccctggatacgtccggctcacaggccaggccccacctgagtggaaggaaattgtctttgcaggaacgctcacagggtggcctggcggcagggggttccttagacatgaacggccgttgtatctgtcccagtttgccgtatagccctgtgagttcaccccagtcctctcctagattaccaagacggccaaccgttgaatcccaccacgtgtcaattacaggaatgcaggactgcgtgcagttgaaccagtatactctgaaggatgagatcgggaagggctcttacggcgtagttaagctggcctacaatgagaacgataatacatactatgcgatgaaagtgcttagcaagaagaaattaataaggcaggcgggtttccctcggaggccccctccaagagggacccggccagcacccggagggtgtattcagccaagaggccctattgagcaggtttaccaggagattgccatcctgaaaaaactggaccacccaaacgtcgtcaagttggtggaagttcttgacgaccctaatgaagatcatttgtatatggtctttgaactggtgaaccaagggcctgtcatggaagtgcctactctcaaaccactgtctgaggatcaggctcggttctatttccaggacctcattaaggggattgaatacctgcattaccagaagatcatacacagagacattaagccgtccaatctgttggtcggcgaagacggccacattaagatagcagactttggcgtgtctaacgagttcaaaggaagcgacgcactgctcagtaatactgttgggactccagcttttatggcacctgaaagcctgtctgagacaaggaagatcttcagcggtaaggcgcttgacgtgtgggcaatgggggtgacactgtactgctttgttttcggccagtgtcccttcatggacgaaaggatcatgtgcctgcactcaaagattaaatcccaggctctagagtttccagaccaacccgacatcgcggaggacctgaaggatctgatcactcgaatgttagataagaaccctgagtcacggattgttgttcctgagatcaagatcctggtgaaaaccatgatccgaaagcggtcattcgggaatccctttgagggatccagacgagaggaacgttccctatctgcccctggaaacctgctgacaaaaaagcccactcgggagtgcgaatctcttagcgagctgaaggaggccaggcaaagacgtcaaccgcctggccacagacctgcccctcgcggtggagggggatcagcccttgtgcgcggatccccctgtgtcgaatcctgctgggcccctgctcctggttctcctgcacgtatgcacccgctgagacctgaggaagcgatggagcccgaatag

SEQ ID NO: 272758 - DNA, 1602 bp, Artificial Sequence
  derived and/or modified sequence
atgagcagctgcgtgagcagccagcccagcagcaacagagccgccccccaggacgagctgggcggcagaggcagcagcagcagcgagagccagaagccctgcgaggccctgagaggcctgagcagcctgagcatccacctgggcatggagagcttcatcgtggtgaccgagtgcgagcccggctgcgccgtggacctgggcctggccagagacagacccctggaggccgacggccaggaggtgcccctggacaccagcggcagccaggccagaccccacctgagcggcagaaagctgagcctgcaggagagaagccagggcggcctggccgccggcggcagcctggacatgaacggcagatgcatctgccccagcctgccctacagccccgtgagcagcccccagagcagccccagactgcccagaagacccaccgtggagagccaccacgtgagcatcaccggcatgcaggactgcgtgcagctgaaccagtacaccctgaaggacgagatcggcaagggcagctacggcgtggtgaagctggcctacaacgagaacgacaacacctactacgccatgaaggtgctgagcaagaagaagctgatcagacaggccggcttccccagaagacccccccccagaggcaccagacccgcccccggcggctgcatccagcccagaggccccatcgagcaggtgtaccaggagatcgccatcctgaagaagctggaccaccccaacgtggtgaagctggtggaggtgctggacgaccccaacgaggaccacctgtacatggtgttcgagctggtgaaccagggccccgtgatggaggtgcccaccctgaagcccctgagcgaggaccaggccagattctacttccaggacctgatcaagggcatcgagtacctgcactaccagaagatcatccacagagacatcaagcccagcaacctgctggtgggcgaggacggccacatcaagatcgccgacttcggcgtgagcaacgagttcaagggcagcgacgccctgctgagcaacaccgtgggcacccccgccttcatggcccccgagagcctgagcgagaccagaaagatcttcagcggcaaggccctggacgtgtgggccatgggcgtgaccctgtactgcttcgtgttcggccagtgccccttcatggacgagagaatcatgtgcctgcacagcaagatcaagagccaggccctggagttccccgaccagcccgacatcgccgaggacctgaaggacctgatcaccagaatgctggacaagaaccccgagagcagaatcgtggtgcccgagatcaagctgcacccctgggtgaccagacacggcgccgagcccctgcccagcgaggacgagaactgcaccctggtggaggtgaccgaggaggaggtggagaacagcgtgaagcacatccccagcctggccaccgtgatcctggtgaagaccatgatcagaaagagaagcttcggcaaccccttcgagggcagcagaagagaggagagaagcctgagcgcccccggcaacctgctgaccaagaagcccaccagagagtgcgagagcctgagcgagctgaagacctag

SEQ ID NO: 272759 - DNA, 1602 bp, Artificial Sequence
  derived and/or modified sequence
atgagcagctgtgtgtcctcccagcctagctccaatagggcagccccacaggacgagctcggaggaagggggagctctagcagcgagtcacaaaaaccatgcgaggccttaagagggctgtccagtttgagcatacatttagggatggaaagcttcatcgtggttacggaatgcgagcctgggtgcgcagtagatctcggtctggctagagatcgtcctctggaggccgacggtcaagaggttcccctggataccagcgggagtcaggccaggccacatttgtctggaagaaaactttctttgcaagagagatctcaagggggtcttgctgccggcggaagcctggacatgaatggtaggtgtatctgtcccagtctcccctatagccctgtgtcaagcccacagtccagtcctcgcctgccccgacggccgaccgtggagtcacatcacgtgtctatcacgggcatgcaggattgcgtgcagctgaatcagtacaccttgaaggatgagatcggaaagggaagctacggtgtagtcaagctggcttacaatgagaatgacaatacatactatgccatgaaagtgctgtcgaagaaaaaattaatccggcaagctggattcccacgcagacccccccctaggggtacacgaccagcacccggaggctgtatccagcctaggggcccaatcgagcaagtgtaccaggagatcgccatcctcaagaaacttgaccatcccaatgtcgtgaagctggtcgaagtcttggacgaccctaacgaggatcacctgtatatggtctttgaattagtgaaccagggccctgtcatggaagtaccgacactgaagcccctgtctgaagatcaagcccggttctactttcaggacctgattaaaggcatcgaatacctacattaccagaagattatccatcgcgatattaagccttccaacttgctcgtgggcgaggatggtcatatcaagatcgcagacttcggggtttccaatgagttcaagggttccgacgctcttctgtccaatacagtgggcacgcctgctttcatggcccccgaaagcctgagcgaaacacgtaagatctttagcggtaaagcattggacgtgtgggctatgggggtgacattatattgttttgtattcgggcagtgtcccttcatggacgaaagaattatgtgcttgcattccaaaatcaaatctcaggctctcgagttcccagatcaaccagacatcgcagaagatttgaaggacctgattacgcgcatgttggacaaaaatccagaatctcgcatagtggtgcccgaaatcaaactgcatccctgggtcactcgccatggcgccgagcctcttccgtcagaggacgagaattgcacattagtcgaggttacagaggaggaggtggaaaattctgttaaacacataccatcactggccactgttatccttgtgaaaacgatgatcagaaagagatcattcggaaatccatttgaaggctcacgaagagaggagcggagtttgtctgcacccgggaatctcttgacaaaaaaacccactcgggaatgcgagagtctcagtgaattaaagacttag

SEQ ID NO: 272760 - DNA, 1602 bp, Artificial Sequence
  derived and/or modified sequence
atgagcagctgtgtgagcagccagcccagcagcaacagagctgccccccaggatgagctgggcggccggggcagcagcagcagcgagagccagaagccctgtgaggccctgcggggcctgagcagcctgagcatccacctgggcatggagagcttcatcgtggtgacagaatgtgagcccggctgtgctgtggacctgggcctggcccgggaccggcccctggaggctgatggccaggaggtgcccctggacaccagcggcagccaggcccggccccacctgagcggcaggaagctgagcctgcaggagaggagccagggcggcctggccgccggcggcagcctggacatgaatggccgctgcatctgccccagcctgccctacagccctgtgagcagcccccagagcagcccccggctgccccggcggcccaccgtggagagccaccacgtgtccatcaccggcatgcaggactgtgtgcagctgaaccagtacaccctgaaggatgaaattggcaagggcagctatggagtggtgaagctggcctacaatgaaaatgacaacacctactatgccatgaaggtgctgagcaagaagaagctgatccggcaggccggcttcccccggcggcccccaccccggggcaccaggcctgcccctgggggctgcatccagccccggggccccatcgagcaggtgtaccaggagatcgccatcctgaagaagctggaccaccccaacgtggtgaagctggtggaggtgctggatgaccccaatgaagaccacctgtacatggtgtttgagctggtgaaccagggccctgtgatggaggtgcccaccctgaagcccctgtctgaggaccaggcccgcttctacttccaggacctgatcaagggcatcgagtacctgcactaccagaagatcatccaccgggacatcaagcccagcaacctgctggtgggggaggatggccacatcaagattgctgactttggagtgtccaatgagttcaagggcagtgatgccctgctgagcaacacagtgggcaccccagccttcatggcccctgagagcctgtctgagaccaggaagatcttcagcggcaaggccctggatgtgtgggccatgggcgtgaccctgtactgctttgtgtttggccagtgccccttcatggatgagcgcatcatgtgcctgcacagcaagatcaagagccaggccctggagttcccagaccagcctgacattgctgaggacctgaaggacctgatcaccaggatgctggacaagaaccctgagagcagaattgtggtgcctgagatcaagctgcacccctgggtgaccaggcatggagctgagcccctgcccagtgaagatgagaactgcaccctggtggaggtgacagaggaggaggtggagaacagcgtgaagcacatccccagcctggccaccgtcatcctggtgaagaccatgatcaggaagaggagctttggaaacccctttgagggcagccggcgggaggagaggagcctgagcgcccctggcaacctgctgaccaagaagcccacccgggagtgtgagagcctgtctgagctgaagacctag

SEQ ID NO: 272761 - DNA, 2967 bp, Artificial Sequence
  derived and/or modified sequence
gagcctggggaggtcgagggtgcagcgagccgtgatcgtgctactgcactccagcctgggcaacacagagagaccctgtctcaaaacaaacaaacaaacaaacaaacaaacaaacaaaaaaaacaaagaaaaaaaaatgggagtgggccgggcgcggtgactcacacctgtaatcccagcactttcggaggccaaggcgggtggatcacgaggtcaggaattcaagattagcctggacaacatggtgaaaccccatctctacgaaaaatacaaaaattagccaagtatggtggccggcgcctgtaatcccagctactcgggagactgaggcagagaactgcttgaacctgggaggcagaggttgcagtgatccgagatcgcgtcactgcactccagcgtgggcgacagagcgagactccgtttcagaaaagaaaaaaaaaaaaaaaaaaaagggagtcggggtggagctctcattggctcgttgcatgtgagtgtccctacggcctagaaatacaagagaagcacatcggaacgggctggaaatccacccagttaactagagggctttgaaccttttattaacttggaggttgactctcctgtcaactcgattcccttttggctgtttggcagggtcagtgagacatcccctgggtcgctcgaccccgtaggacggttcagggagccctccaggtcttcgtttctcctcttccccgcacagtgctgttatccagctgggggatccaacgcacacttaaggctccagcaaagtggctccgctgccggatgggagtgccccagtgtgctggatgaagctggcgcatgcaccatgtcatcatgtgtctctagccagcccagcagcaaccgggccgccccccaggatgagctggggggcaggggcagcagcagcagcgaaagccagaagccctgtgaggccctgcggggcctctcatccttgagcatccacctgggcatggagtccttcattgtggtcaccgagtgtgagccgggctgtgctgtggacctcggcttggcgcgggaccggcccctggaggccgatggccaagaggtcccccttgacacctccgggtcccaggcccggccccacctctccggtcgcaagctgtctctgcaagagcggtcccagggtgggctggcagccggtggcagcctggacatgaacggacgctgcatctgcccgtccctgccctactcacccgtcagctccccgcagtcctcgcctcggctgccccggcggccgacagtggagtctcaccacgtctccatcacgggtatgcaggactgtgtgcagctgaatcagtataccctgaaggatgaaattggaaagggctcctatggtgtcgtcaagttggcctacaatgaaaatgacaatacctactatgcaatgaaggtgctgtccaaaaagaagctgatccggcaggccggctttccacgtcgccctccaccccgaggcacccggccagctcctggaggctgcatccagcccaggggccccattgagcaggtgtaccaggaaattgccatcctcaagaagctggaccaccccaatgtggtgaagctggtggaggtcctggatgaccccaatgaggaccatctgtacatggtgttcgaactggtcaaccaagggcccgtgatggaagtgcccaccctcaaaccactctctgaagaccaggcccgtttctacttccaggatctgatcaaaggcatcgagtacttacactaccagaagatcatccaccgtgacatcaaaccttccaacctcctggtcggagaagatgggcacatcaagatcgctgactttggtgtgagcaatgaattcaagggcagtgacgcgctcctctccaacaccgtgggcacgcccgccttcatggcacccgagtcgctctctgagacccgcaagatcttctctgggaaggccttggatgtttgggccatgggtgtgacactatactgctttgtctttggccagtgcccattcatggacgagcggatcatgtgtttacacagtaagatcaagagtcaggccctggaatttccagaccagcccgacatagctgaggacttgaaggacctgatcacccgtatgctggacaagaaccccgagtcgaggatcgtggtgccggaaatcaagctgcacccctgggtcacgaggcatggggcggagccgttgccgtcggaggatgagaactgcacgctggtcgaagtgactgaagaggaggtcgagaactcagtcaaacacattcccagcttggcaaccgtgatcctggtgaagaccatgatacgtaaacgctcctttgggaacccattcgagggcagccggcgggaggaacgctcactgtcagcgcctggaaacttgctcaccaaaaaaccaaccagggaatgtgagtccctgtctgagctcaagacctagaaaataagtccccttcctgcctgttgcaaagtaacgtaagagttccctcacccgagtggatgcagaccttcttgctgtcagccacccttccttcatacacatagccagcccaggtgaccagaacctcccaggacagatgaggctttgtgtccttatgagactgggagaacctgctgggcacccctgctgcaggtgctgtggtgggtggggaccccactgcccttcccactgagcacatcatggctacctgacttggtgggagctccaggcagtcacttctgtttcttaaacatagctttactgaggtacaattcacataccatgtaattcacccacgggaagtgtatgattcagtggtttctaatacagacttctgcagccattaccaccgtcaactttacgacattttcatcagcccaagaagacaccctacactccttagctgtccccatccaactcccccaccccagtaaccactcagaataggtatggatttgcctattctggacgtttcgtataaatggcgtcatacacta

SEQ ID NO: 272762 - DNA, 1602 bp, Artificial Sequence
  derived and/or modified sequence
atgagcagctgcgtgagcagccagcccagcagcaaccgggccgccccacaggatgagctgggaggacgcgggagttccagtagtgagtctcagaagccttgtgaggcgttaagaggcctcagtagcctgtccattcatttggggatggagagcttcatcgtggtcactgaatgcgaacccggctgcgctgttgacttggggctggcacgcgatcgtccgctggaggcggacggccaagaggtcccactcgataccagcggcagccaggccagaccccatctctccggcaggaagctctctctgcaagagcggtcgcagggcggcctggccgccggaggttcactggacatgaatggtaggtgtatctgccccagcttgccctattccccagtgtcgtccccacagagcagcccacggctgccgcggaggcctacagtggagtcgcaccatgtctctattacaggaatgcaggactgcgttcagttaaatcagtacacactgaaggatgaaattgggaagggatcgtatggcgtcgtgaaactggcctataacgagaacgacaatacatactatgccatgaaagtgctctctaaaaagaaactaattcgccaggccggctttccgaggagaccgccaccaagggggacccgtcctgcccctggcggctgtattcaaccgcggggccccatcgagcaggtgtaccaggaaatcgctattctcaagaagcttgaccatcccaacgtcgtgaaactcgtcgaggtactagatgatccaaacgaagatcatctttacatggttttcgaactcgtgaatcagggtcccgtcatggaggtgcctacactgaagccactttctgaagaccaggcccgattctactttcaagatttgattaaggggattgagtacctgcattatcagaagatcattcatcgagacatcaaaccctccaatctacttgtgggagaagatgggcacattaaaatagccgattttggtgtgagtaacgaatttaaagggtctgacgctttgctgtctaatacagttggcactcccgcatttatggcccctgaatctctgagcgagactcgcaaaatattttctgggaaggccctggatgtgtgggccatgggggttacgctctattgtttcgtctttgggcagtgcccatttatggatgaacggatcatgtgcctacattcaaagattaagagccaagctcttgagtttcccgaccagcccgacatcgccgaggacctgaaagacctgattacgagaatgctggacaagaaccccgaatcacgtatagtagttcctgagatcaagctgcacccatgggtgaccagacatggagccgaaccactgccgagcgaagatgaaaactgtacgctagtggaagtcaccgaagaagaggtggagaactccgttaaacatatcccctccttggccactgtaatccttgtgaagactatgattcggaagcggagcttcggaaatcccttcgaggggagccgaagagaggagagaagcctctctgccccaggtaatcttctgaccaagaaacccacccgtgagtgcgagagcttatccgagttaaagacatag

SEQ ID NO: 272763 - DNA, 1602 bp, Artificial Sequence
  derived and/or modified sequence
atgagttcttgcgtgtctagtcagccgtcatctaatcgcgcagcacctcaagacgaactcggcggaagggggtctagcagtagcgagtcccagaaaccctgcgaggctctgaggggactgagttcgctctcgattcacttaggaatggagtccttcatcgtggtcacagagtgcgaaccaggatgtgctgtggacctcggcctcgccagggatcgaccattagaagccgacgggcaggaggtgccactggatacctctggcagccaggccaggcctcacctctctggacggaagctgtctctccaagaaagatcacagggaggtctcgctgcgggtggttccctcgatatgaatgggagatgtatatgcccaagtttaccatactcgcccgtgtctagcccacagtcttctcccaggcttcccaggcggcctactgtggagtcccatcatgtatcgatcacagggatgcaggattgtgtgcagctgaaccagtacactctgaaggacgagattggcaaaggtagctatggtgtcgtgaagctggcttacaatgaaaacgataatacctattacgctatgaaggtgctcagcaaaaaaaaactgataaggcaggccggattcccacgtcgccctccaccgagggggactcgccctgcccctgggggttgtatacaacccaggggacctatagagcaggtgtatcaagaaattgcaattctaaagaaacttgatcacccaaacgtggtgaaacttgtcgaagtcctcgacgaccctaacgaggaccacctatacatggtgtttgagctcgtcaatcaaggacctgtgatggaggtacccacactaaaacctttgtcagaagatcaggctaggttctatttccaagatctcatcaaagggattgaataccttcactatcagaaaattatacatcgagatatcaagccatccaacctgctggtcggggaggatggtcacatcaagatcgccgactttggagtcagtaatgaattcaaaggctcggacgccctactgtctaatactgttggcaccccagcttttatggcaccagaatccctcagtgagactaggaagattttttcagggaaagcactcgatgtgtgggcaatgggcgttacactttattgtttcgtgtttgggcagtgcccttttatggatgagcgcattatgtgtctgcacagtaaaattaaatctcaagcattagagtttcccgatcagcctgatattgcagaggacctcaaagatctaattactcgcatgctcgacaagaatccggaatcaaggatcgttgttcccgaaatcaaactgcatccctgggtcacaagacacggcgctgagccactcccctctgaggatgagaattgcactctggtagaagttaccgaagaggaagtagaaaattccgtcaagcacatcccaagcctggccacggtcatcttagtcaaaacgatgattcgaaaaagatcattcggaaaccctttcgaaggctcaaggcgggaagaacggtctttatccgcccctggaaacctgctgacaaagaagccgaccagggagtgtgagagcctgtcggagctcaaaacgtag

SEQ ID NO: 272764 - protein, 498 aa, Artificial Sequence
  derived and/or modified sequence
MSSCVSSQPSSNRAAPQDELGGRGSSSSESQKPCEALRGLSSLSIHLGMESFIVVTECEPGCAVDLGLARDRPLEADGQEVPLDTSGSQARPHLSGRKLSLQERSQGGLAAGGSLDMNGRCICPSLPYSPVSSPQSSPRLPRRPTVESHHVSITGMQDCVQLNQYTLKDEIGKGSYGVVKLAYNENDNTYYAMKVLSKKKLIRQAGFPRRPPPRGTRPAPGGCIQPRGPIEQVYQEIAILKKLDHPNVVKLVEVLDDPNEDHLYMVFELVNQGPVMEVPTLKPLSEDQARFYFQDLIKGIEYLHYQKIIHRDIKPSNLLVGEDGHIKIADFGVSNEFKGSDALLSNTVGTPAFMAPESLSETRKIFSGKALDVWAMGVTLYCFVFGQCPFMDERIMCLHSKIKSQALEFPDQPDIAEDLKDLITRMLDKNPESRIVVPEIKILVKTMIRKRSFGNPFEGSRREERSLSAPGNLLTKQGSEDNLQGTDPPPVGEEEVLL

SEQ ID NO: 272765 - DNA, 1497 bp, Artificial Sequence
  derived and/or modified sequence
atgagcagctgcgtgagcagccagcccagcagcaacagagccgccccccaggacgagctgggcggcagaggcagcagcagcagcgagagccagaagccctgcgaggccctgagaggcctgagcagcctgagcatccacctgggcatggagagcttcatcgtggtgaccgagtgcgagcccggctgcgccgtggacctgggcctggccagagacagacccctggaggccgacggccaggaggtgcccctggacaccagcggcagccaggccagaccccacctgagcggcagaaagctgagcctgcaggagagaagccagggcggcctggccgccggcggcagcctggacatgaacggcagatgcatctgccccagcctgccctacagccccgtgagcagcccccagagcagccccagactgcccagaagacccaccgtggagagccaccacgtgagcatcaccggcatgcaggactgcgtgcagctgaaccagtacaccctgaaggacgagatcggcaagggcagctacggcgtggtgaagctggcctacaacgagaacgacaacacctactacgccatgaaggtgctgagcaagaagaagctgatcagacaggccggcttccccagaagacccccccccagaggcaccagacccgcccccggcggctgcatccagcccagaggccccatcgagcaggtgtaccaggagatcgccatcctgaagaagctggaccaccccaacgtggtgaagctggtggaggtgctggacgaccccaacgaggaccacctgtacatggtgttcgagctggtgaaccagggccccgtgatggaggtgcccaccctgaagcccctgagcgaggaccaggccagattctacttccaggacctgatcaagggcatcgagtacctgcactaccagaagatcatccacagagacatcaagcccagcaacctgctggtgggcgaggacggccacatcaagatcgccgacttcggcgtgagcaacgagttcaagggcagcgacgccctgctgagcaacaccgtgggcacccccgccttcatggcccccgagagcctgagcgagaccagaaagatcttcagcggcaaggccctggacgtgtgggccatgggcgtgaccctgtactgcttcgtgttcggccagtgccccttcatggacgagagaatcatgtgcctgcacagcaagatcaagagccaggccctggagttccccgaccagcccgacatcgccgaggacctgaaggacctgatcaccagaatgctggacaagaaccccgagagcagaatcgtggtgcccgagatcaagatcctggtgaagaccatgatcagaaagagaagcttcggcaaccccttcgagggcagcagaagagaggagagaagcctgagcgcccccggcaacctgctgaccaagcagggcagcgaggacaacctgcagggcaccgaccccccccccgtgggcgaggaggaggtgctgctgtag

SEQ ID NO: 272766 - DNA, 1497 bp, Artificial Sequence
  derived and/or modified sequence
atgagcagttgcgtctcttcccagcccagtagcaatcgtgccgcaccccaggatgagctggggggccgcgggtcttctagctctgagtcccaaaaaccttgcgaggcccttcgcggactgagtagtctgagtatccatctcggcatggagtcattcatcgtcgtgacagaatgtgaacctggctgtgccgtagaccttggccttgcacgagaccgacctctggaggctgatgggcaagaggtgcctctcgatacgtccgggagtcaagcacgcccccatttgagcggtagaaagctgtctctgcaggagcgcagccagggaggactggccgccggaggctcgctggacatgaacgggagatgtatctgtccaagtttaccctattctcccgtgtcatccccacaaagttcacccaggctgccgaggaggcccaccgtagagtcccatcatgtgagcattacagggatgcaagactgtgtgcaactcaatcagtacacccttaaagatgagatcggtaagggatcctacggggtggtgaagctggcctataacgaaaacgacaatacctactatgcgatgaaagtgttgtctaagaaaaaactcattagacaggccggctttccacgccgccctcctcccagaggcacaaggcccgcacccggcggctgtatccagcctaggggtcccatcgaacaggtgtatcaagagatagccatactcaagaaacttgatcaccccaacgtggtgaaactggtggaggttctggacgaccccaacgaagaccacctttatatggtattcgaactagtgaatcaaggtcctgtgatggaggtccccaccctcaaacccctctctgaggaccaggcccgtttctactttcaggacctcattaaaggaatcgaatacttacactaccaaaaaattatccatcgggacatcaagcctagtaacctgctagtgggcgaagacggacacattaaaatcgctgacttcggagtgtcaaacgagttcaagggcagcgatgccctgctgtctaataccgtgggtacacccgcgttcatggcccctgagtcactgtccgagacccgaaagatcttcagcggtaaagcccttgacgtgtgggctatgggtgttactctctactgttttgtgtttggccagtgcccctttatggacgaacggattatgtgcctgcattccaaaataaagagtcaggctctggagtttcctgatcagccggatatcgccgaggacttaaaggatctaataaccaggatgttggacaagaatccagagtctaggattgtggtgcccgagattaaaatactcgtcaaaacgatgatccggaagcggagttttggcaatccatttgagggatctagacgggaagagagatccctttccgcccctgggaatctgttgaccaaacagggaagcgaggataatttacaagggaccgatccgcctccagtgggtgaggaagaggtgttgctttag

SEQ ID NO: 272767 - DNA, 1497 bp, Artificial Sequence
  derived and/or modified sequence
atgagcagctgtgtgagcagccagcccagcagcaacagagctgccccccaggatgagctgggcggccggggcagcagcagcagcgagagccagaagccctgtgaggccctgcggggcctgagcagcctgagcatccacctgggcatggagagcttcatcgtggtgacagaatgtgagcccggctgtgctgtggacctgggcctggcccgggaccggcccctggaggctgatggccaggaggtgcccctggacaccagcggcagccaggcccggccccacctgagcggcaggaagctgagcctgcaggagaggagccagggcggcctggccgccggcggcagcctggacatgaatggccgctgcatctgccccagcctgccctacagccctgtgagcagcccccagagcagcccccggctgccccggcggcccaccgtggagagccaccacgtgtccatcaccggcatgcaggactgtgtgcagctgaaccagtacaccctgaaggatgaaattggcaagggcagctatggagtggtgaagctggcctacaatgaaaatgacaacacctactatgccatgaaggtgctgagcaagaagaagctgatccggcaggccggcttcccccggcggcccccaccccggggcaccaggcctgcccctgggggctgcatccagccccggggccccatcgagcaggtgtaccaggagatcgccatcctgaagaagctggaccaccccaacgtggtgaagctggtggaggtgctggatgaccccaatgaagaccacctgtacatggtgtttgagctggtgaaccagggccctgtgatggaggtgcccaccctgaagcccctgtctgaggaccaggcccgcttctacttccaggacctgatcaagggcatcgagtacctgcactaccagaagatcatccaccgggacatcaagcccagcaacctgctggtgggggaggatggccacatcaagattgctgactttggagtgtccaatgagttcaagggcagtgatgccctgctgagcaacacagtgggcaccccagccttcatggcccctgagagcctgtctgagaccaggaagatcttcagcggcaaggccctggatgtgtgggccatgggcgtgaccctgtactgctttgtgtttggccagtgccccttcatggatgagcgcatcatgtgcctgcacagcaagatcaagagccaggccctggagttcccagaccagcctgacattgctgaggacctgaaggacctgatcaccaggatgctggacaagaaccctgagagcagaattgtggtgcctgagatcaagatcctggtgaagaccatgatcaggaagaggagctttggaaacccctttgagggcagcagaagagaggagaggagcctgagcgcccctggcaacctgctgaccaagcagggcagcgaggacaacctgcagggcacagaccccccacctgtgggggaggaggaggtgctgctgtag

SEQ ID NO: 272768 - DNA, 1497 bp, Artificial Sequence
  derived and/or modified sequence
atgagcagctgcgtgagcagccagcccagcagcaaccgggccgccccccaggatgaactgggcggccgagggtctagctcttccgaatctcaaaagccatgtgaggctctacgcggcttgtctagcctgtcaattcatctcggtatggaaagctttatcgtggtgactgaatgcgagcccgggtgtgcagtggatctgggcctggcgcgcgatagaccccttgaagccgatggacaggaggtacccctggatacctccggctcacaggccaggcctcaccttagtggtcgcaaactgtctcttcaagaaagaagccagggcgggcttgctgctggcggatcgctggacatgaacggcagatgcatctgcccaagcctgccctacagcccagtatctagtccacagagtagtccacggctcccgagaaggccaactgtcgagtcccaccacgttagcatcaccggtatgcaggactgcgtacagctgaatcagtacacactgaaggatgagataggaaaggggagttacggcgttgtcaaacttgcctacaacgagaacgataacacctattacgcaatgaaagtactctcaaaaaagaagctgatacgtcaagccggttttccacgtcgccctccgcctcggggaacccggccagcccccgggggatgtattcagcctagagggcctattgagcaggtctatcaagaaatcgccatcctgaagaaattggaccaccccaatgtggtgaaactcgtagaggtgcttgatgatcctaatgaagaccacctgtatatggtgtttgagctggtgaaccaaggacctgtcatggaagttccaactctcaagcccctgtccgaggaccaggctcgcttttactttcaggacttaataaaaggcattgagtatctgcactatcagaaaatcatacatcgcgatattaagcccagcaacctgctggtgggcgaagatggacacatcaaaattgcagatttcggagtatctaacgaatttaaagggtccgatgcgctcttatccaataccgtcggaacccccgctttcatggcccctgagagcctcagcgaaacccgaaagatttttagcggtaaagctctggatgtctgggcaatgggagtaaccctctattgctttgtgttcggacagtgtcctttcatggatgaaaggatcatgtgtctccattctaagattaagtcacaagccctggagttccctgatcagccagatatcgcagaggatttaaaagacttaattacacgaatgctcgataagaaccccgaatccaggatagtggtgccggagatcaagatcctcgttaagacgatgattaggaagcggagttttggtaacccattcgaaggctcaagacgcgaggagcgctctctgtcagcccccggcaacttgttgactaagcagggctccgaagacaacctccagggaactgatccaccaccagttggggaggaagaagttcttttatag

SEQ ID NO: 272769 - DNA, 1497 bp, Artificial Sequence
  derived and/or modified sequence
atgagttcgtgtgtctcttcacagccttcttcaaatcgcgctgctccgcaggatgagcttggtggacggggtagttcgtcctccgagagccaaaagccctgcgaagccctacgaggtctcagttccttgtcgattcatctggggatggagtcatttattgtggtgaccgagtgcgaacctgggtgcgcagttgacctcgggttagctcgggaccgtccgctggaggctgacggtcaggaagttcccctggatacatcgggaagtcaggctagacctcatctatccggcagaaagctgtcgctgcaggaacgctcccagggtggactggcagccggaggaagcctcgatatgaacggcaggtgcatatgcccgagtctcccttactcacctgtgtctagcccgcagagttctcctcgactacccaggcggcctactgtcgaatctcatcatgtttcaatcactggtatgcaggactgtgtccagcttaaccagtacaccttgaaagatgagattggcaaaggcagttacggcgtggtgaagctcgcttacaatgaaaatgacaatacctattacgcgatgaaggtgctttcaaagaagaagctgataaggcaggccggattcccacgacggcctcctccgcgtggcactcggcctgcccctggaggatgcatacagcctcgagggcctattgaacaggtctaccaggagattgctatactcaaaaaactggatcacccaaacgtggtcaagctggtggaggtgctggacgacccaaatgaagatcatctgtatatggtatttgagctcgtcaaccaaggacctgtgatggaagttccaacactcaaaccgctcagcgaagaccaggccagattttattttcaggaccttattaagggaatagagtaccttcactaccagaagattattcatagagatatcaagcctagcaatctgctggttggtgaggatggtcacatcaagattgcagatttcggagtctctaacgagtttaaaggctccgatgctctcctgagcaacaccgtcggcacccctgccttcatggcgcctgaatcactctcagagacaagaaaaattttctctggaaaggctctggacgtatgggccatgggcgtgacattgtattgtttcgtgttcgggcaatgtcccttcatggacgagcgcatcatgtgcctccattccaagattaaatcacaggcactggaattcccagatcagcctgacatagccgaggacctgaaagatctgattactagaatgcttgataagaaccctgagtctagaattgtcgtcccagagatcaaaatcctggtaaagactatgattcgaaagaggtcattcggaaacccctttgagggcagcaggagagaagaaagaagcctcagtgccccaggcaatctgttgacaaaacagggatccgaagataatctgcagggcaccgacccgcctcccgttggcgaagaggaagttctcctttag

SEQ ID NO: 272770 - DNA, 5175 bp, Artificial Sequence
  derived and/or modified sequence
cccatctctacgaaaaatacaaaaattagccaagtatggtggccggcgcctgtaatcccagctactcgggagactgaggcagagaactgcttgaacctgggaggcagaggttgcagtgatccgagatcgcgtcactgcactccagcgtgggcgacagagcgagactccgtttcagaaaagaaaaaaaaaaaaaaaaaaaagggagtcggggtggagctctcattggctcgttgcatgtgagtgtccctacggcctagaaatacaagagaagcacatcggaacgggctggaaatccacccagttaactagagggctttgaaccttttattaacttggaggttgactctcctgtcaactcgattcccttttggctgtttggcagggtcagtgagacatcccctgggtcgctcgaccccgtaggacggttcagggagccctccaggtcttcgtttctcctcttccccgcacagtgctgttatccagctgggggatccaacgcacacttaaggctccagcaaagtggctccgctgccggatgggagtgccccagtgtgctggatgaagctggcgcatgcaccatgtcatcatgtgtctctagccagcccagcagcaaccgggccgccccccaggatgagctggggggcaggggcagcagcagcagcgaaagccagaagccctgtgaggccctgcggggcctctcatccttgagcatccacctgggcatggagtccttcattgtggtcaccgagtgtgagccgggctgtgctgtggacctcggcttggcgcgggaccggcccctggaggccgatggccaagaggtcccccttgacacctccgggtcccaggcccggccccacctctccggtcgcaagctgtctctgcaagagcggtcccagggtgggctggcagccggtggcagcctggacatgaacggacgctgcatctgcccgtccctgccctactcacccgtcagctccccgcagtcctcgcctcggctgccccggcggccgacagtggagtctcaccacgtctccatcacgggtatgcaggactgtgtgcagctgaatcagtataccctgaaggatgaaattggaaagggctcctatggtgtcgtcaagttggcctacaatgaaaatgacaatacctactatgcaatgaaggtgctgtccaaaaagaagctgatccggcaggccggctttccacgtcgccctccaccccgaggcacccggccagctcctggaggctgcatccagcccaggggccccattgagcaggtgtaccaggaaattgccatcctcaagaagctggaccaccccaatgtggtgaagctggtggaggtcctggatgaccccaatgaggaccatctgtacatggtgttcgaactggtcaaccaagggcccgtgatggaagtgcccaccctcaaaccactctctgaagaccaggcccgtttctacttccaggatctgatcaaaggcatcgagtacttacactaccagaagatcatccaccgtgacatcaaaccttccaacctcctggtcggagaagatgggcacatcaagatcgctgactttggtgtgagcaatgaattcaagggcagtgacgcgctcctctccaacaccgtgggcacgcccgccttcatggcacccgagtcgctctctgagacccgcaagatcttctctgggaaggccttggatgtttgggccatgggtgtgacactatactgctttgtctttggccagtgcccattcatggacgagcggatcatgtgtttacacagtaagatcaagagtcaggccctggaatttccagaccagcccgacatagctgaggacttgaaggacctgatcacccgtatgctggacaagaaccccgagtcgaggatcgtggtgccggaaatcaagatcctggtgaagaccatgatacgtaaacgctcctttgggaacccattcgagggcagccggcgggaggaacgctcactgtcagcgcctggaaacttgctcacgaagcaaggcagcgaagacaacctccagggcaccgacccgccccccgtgggggaggaggaagtgctcttgtgagaggcagtccctgcgtggaaagttgctgggcccccgcccccggctcccccgcacgcatgcatccactgcggccggaggaggccatggagcccgagtagctgcctggatcgctcgacctcgcatgcgcgccgcgtcgcctctggggggctgctgcaccgcgtttccatagcagcatgtcctacggaaacccagcacgtgtgtagagcctcgatcgtcatctctggttatttgttttttcctttgttgttttaaaggggacaaaaaaaaaaaaaggacttgactccatgacgtcgaccgtggccgctggctggctggacaggcgggtgtgaggagttgcagacccaaacccacgtgcattttgggacaattgctttttaaaacgtttttatgccaaaaatccttcattgtgattttcagaaccacgtcagatataccaagtgactgtgtgtggggtttgacaactgtggaaaggcgagcagaaaactccggcggtctgaggccatggaggtggttgctgcatttgagagggagtagggggctagatgtggctcctagtgcaaaccggaaaccatggcaccttccagagccgtggtctcaaggagtcagagcagggctggccctcagtagctgcagggagctttgatgcaacttatttgtaagaaggatttttaaattttttatgggtagaattgtagtcaggaaaacagaaagggcttgaaatttaataagtgctgctggaaggggattttccaagcctggaagggtattcagcagctgtggtggggaaacatttctcctgaaagactgaacgtgtttcttcatgacagctgctcaaagcaggtttctgagatagctgaccgagctctggtaaatctctttgtcaaattacgaaaacttcagggtgaaatcctatgcttccatgtacattacatggcttaagattaaacaaaaacatttttcaagtctctaactagagtgaactctagagcacagtagttcagaaactatttagagcttccaggatatatttcacagcttcaggcatgtgatcagttagagccgatgaaacctatgcccgcctgtatatatattagcagcttagctagttcataacctgtatattctaaagactgctaaggttttgttttcattttaaatcctagctgattgttgtggtcaatgaaatacccagtttctggagggccaggtgggaaatgctttcactggaccaacacacaaatgatcatcctgaggatctgagcttccctagactccacacaataaccttggggcacccttttagagaagactgttgaaacccacagcactcgttggggtatgaggaaaccagggcttggcacaggaagttcccctttgtagctaaaagtccagaaagaaagggttcatctttttgacttccaactgatattgggaagtttggttgaggttcaagtgtgactccttccagagccacaggtaggggagtgtgaagttgagggggaggaaagctggaaggactctgccttgggagattcccagctctgctttccagcgcttggtggaatctgggctggggaaagacggcaccgggaaactctgcttccccattgtttccatctgatcagctgtggtgtgaggacttctcagacaaaggcaaggcctcgtgcccctgcccagcccattcatggagccctgggccttcttggcttccatagatcctaagctcttgactgtagtttagccagacttgttttgctatcttataagcagttcagaattagggaatgctggttttgaagagcaaaggacaggtagtctagagagggtcgtctggcctgcttgctgggtctttgtaacccagcacttcctcttgccctcctggctttatgtttatggggagaggactcaatagctccaccccttctggcaccagatggggcttggttagtttgcaataagcaccttgcagaggttaaagccagcgggtccctagtcttaggcccagcctgcttgtgtgggctctggcctggcctggtggctggcccagggggcagcagtgcttagagcttctgcagggcttctcttgtttacacagctgcatcagacaatgccatttctccccaccacggaaccttccatctaagatttcttccagggaatgccagcaatcaggcagcacccagctgtgggggcagtggggtgggggagacccacattgatgactttttttttttcttttaatgaagaaacaccaaagaaagctgtggaaaggacctgccccacatgaaaaggataagccaagatggctgtaaacacagagcatttgagctgccactcttggagcacattgatttttcaaaagccagctctgtcaggaaaggaggtgctgttatgagcagctcttccagtgggcaaagaggacgcccataatttcttccattgctagctcatctgtgggaccaatttggtgtaagcaacctgtggcctgcacttgtggcctcgaaggaagcacaaaccctccatccacttcccatttcctctgcccttttccacctcccccttccatcccaccagctgccagtggctcccagaaagccttattgagccccttgttgacacttggggctgcggaggcctctccctactggtctggcctttcctgagaggcaggtcttccgtcctcagagcctttctggaacaaggagaatgcctgtgcaggtggacacacaggcctggcctgtcgctctcacttgtcttccagcggggagcttcacgttgccgagtggaagaaccatgacctccacttgcttccaaggtgctagggaagtttcagggtacgctggttcccctctccagctggaggccgagtttctggggactgcagatttttctactctgtgatcgattcaatgcccgatgcttctgtttcattcccgaccctttctactatgcattttccttttatcaggtgtataaagttaaatactgtgtatttatcactaaaaagtacatgaacttaagagacaactaagcctttcgtgtttttccacaggtgtttaagcttctctgtacagttgaaataaacagacagcaaaatggt

SEQ ID NO: 272771 - DNA, 1692 bp, Artificial Sequence
  derived and/or modified sequence
gcttgttgctgtggaggcggttgcacgtgttgcggttgcacatgcacaactggttgttgcaccacttgcacatgctgtgcttgcgcctgcacgacaggaactactaccggtgctggggcctgttgtactggtgggtgcgccgctggagggacgggctgcgggggtgcgggctgttgctgcacatgctgcgcgggagctgcaggtacagggtgcggcggcacctgcgccgctggatgcggagggtgtgccggttgcggtggggcaggagcctgcggcggctgtggagccggatgttgcgccggcggcgctgcatgttgtacctgttgctgctgctgttgtggctgcgggacctgctgctgctgcgccgggtgcacaacgtgctgttgcgccggctgtgggaccggaggatgtgggggctgtggcggcgctgcttgctgttgttgctgtggaggcgccggcgcagcagcaggggccgccacagctgctgctggagcctgtaccggcggagccacagcatgtgccggggggacttgttgcgccacaactgcctgtggcacatgcgcgacaacatgcacggggtgcgccggcggctgctgcgccgcaacaacaaccgccaccggagctggtggcgctgcaacctgttgtgctgccggcgcaaccggcgcagctactacaactgggggcgccggatgcgccggcggagccggggccggcggctgttgtggcacaacgactgggacgtgcaccgggtgtgcggggaccggatgctgttgctgtgccggcggttgtaccggatgcacatgctgctgtgccgggtgcggatgtacaacatgttgttgtgcagcatgcgccggtgctgggggggcgtgctgcgcgacatgcactggagcgactggggctactacttgcgccacagcaggggggtgtgcatgcgccgctgcttgtgcaacaggggccgctgcaacaggggcctgtactaccacaggagccgccgggacaaccacttgttgtacgacatgtgcggctactgccgcggcggccgcgtgtgcaggcgcatgcgccgccaccgcaacaggaactacagccacctgcgcaggtgctacttgcgcggccgcctgcacttgctgtggcgcatgctgctgttgcgcagcctgcggagccggtgcaaccacttgttgcacgggtgccgccggcgctgcctgtaccggatgtggtgcgggaggcgccggtgggaccggtggtggatgttgtacgtgtacaacttgtgctggctgcggagcaggatgtaccgggggcgcctgtacgggttgtacctgttgttgtactggaggagccggctgcgcatgcggcgctggcaccacatgcgctgggggagccgcaggggggtgtacttgtgctggcggagccgcaggcgctgggggcgcaggcgctgggtgtgccggatgtgcagctggctgtggcggtgctgccacagctacttgtacctgtggcgccactgggtgtgctaccgcagccactgggtgcgcgggcacaacgggcgggacagggggcggcggctgttgcgctaccggcgcttgtggcggtggtggatgctgctgtgggggtgctgcctgcacctgtgcctgttgcgctggttgcaccacagctggctgcgctggctgtggttgcacctgtggcggctgcactggatag

SEQ ID NO: 272772 - protein, 742 aa, Artificial Sequence
  derived and/or modified sequence
MASVHESLYFNPMMTNGVVHANVFGIKDWVTPYKIAVLVLLNEMSRTGEGAVSLMERRRLNQLLLPLLQGPDITLSKLYKLIEESCPQLANSVQIRIKLMAEGELKDMEQFFDDLSDSFSGTEPEVHKTSVVGLFLRHMILAYSKLSFSQVFKLYTALQQYFQNGEKKTVEDADMELTSRDEGERKMEKEELDVSVREEEVSCSGPLSQKQAEFFLSQQASLLKNDETKALTPASLQKELNNLLKFNPDFAEAHYLSYLNNLRVQDVFSSTHSLLHYFDRLILTGAESKSNGEEGYGRSLRYAALNLAALHCRFGHYQQAELALQEAIRIAQESNDHVCLQHCLSWLYVLGQKRSDSYVLLEHSVKKAVHFGLPRAFAGKTANKLMDALKDSDLLHWKHSLSELIDISIAQKTAIWRLYGRSTMALQQAQMLLSMNSLEAVNAGVQQNNTESFAVALCHLAELHAEQGCFAAASEVLKHLKERFPPNSQHAQLWMLCDQKIQFDRAMNDGKYHLADSLVTGITALNSIEGVYRKAVVLQAQNQMSEAHKLLQKLLVHCQKLKNTEMVISVLLSVAELYWRSSSPTIALPMLLQALALSKEYRLQYLASETVLNLAFAQLILGIPEQALSLLHMAIEPILADGAILDKGRAMFLVAKCQVASAASYDQPKKAEALEAAIENLNEAKNYFAKVDCKERIRDVVYFQARLYHTLGKTQERNRCAMLFRQLHQELPSHGVPLINHL

SEQ ID NO: 272773 - DNA, 1932 bp, Artificial Sequence
  derived and/or modified sequence
atggcggagggtgagttaaaggatatggagcagttctttgacgatttgtccgattcattcagtgggactgaacccgaggtgcataaaaccagcgtcgtcggtctgttcctccgacatatgatcctagcctatagtaaactgtctttcagccaagtgtttaagctatatactgcattacagcagtactttcaaaacggggagaagaaaacggttgaagacgccgatatggagctaacgagcagggacgagggagagaggaaaatggagaaggaggagctggacgtcagcgtcagagaagaagaggtttcctgtagtgggcccctgagccagaagcaggctgagttttttctttcccagcaggccagccttttaaagaacgacgaaactaaagctcttacaccggcatctctccagaaagaactgaataatttactgaagttcaaccctgatttcgcggaggctcattacctctcctaccttaataatctcagggttcaagatgtcttttctagtactcatagcctgttgcattatttcgataggctgatcctgacgggcgctgaaagcaagagtaatggtgaggaagggtatgggaggtctttgagatatgctgcgttgaatctggcagccctgcactgccggttcggtcactaccagcaggccgaactggcgctccaagaagccattcggatcgcacaggagtcaaatgaccacgtgtgtctgcagcattgtctgtcatggctgtacgtgctgggccagaagcgcagcgattcttatgtgttgctcgagcattcagtgaaaaaagccgtgcatttcgggctcccacgcgcctttgccggtaagacagccaacaagctgatggacgcactgaaggactccgatctgcttcactggaagcacagtctctccgagctgattgatatctcaattgcccaaaagaccgctatttggcgcctctacggaagatctacaatggctttgcagcaggctcagatgctgctgagcatgaatagcctggaggctgttaacgctggtgtgcagcagaataataccgagagctttgcggttgcactttgtcacttggctgagctgcatgcagaacaggggtgtttcgccgctgcgtccgaggtactcaaacaccttaaggagagattcccaccaaacagccagcacgcgcagctctggatgctatgtgaccaaaagattcagtttgatcgcgcaatgaatgatggtaaataccacctggctgattcccttgtaaccgggataaccgctctgaattctatcgaaggagtgtaccgaaaagccgtggtgctgcaagctcagaaccagatgagcgaggcccataagctgctgcaaaagctgctcgtgcactgccagaaactgaaaaatacggagatggtgatctctgtactgctgtcagtggcggagctttattggcgcagctcttcccccactattgcgctgcctatgctgctccaggcactggcactgtctaaagagtaccgcctccagtacttggcatcagagactgtcctgaacctggcatttgcccaacttattctgggaatcccagagcaggcactgagcttacttcatatggctattgaacctatattggctgacggcgctatacttgacaaaggccgcgctatgttcctcgtcgcgaagtgtcaggtggccagtgctgcctcctacgaccagcccaagaaagctgaggcactcgaggccgccattgagaatcttaacgaggcaaagaattatttcgccaaagtcgactgtaaggaacggattcgggatgttgtctacttccaagctaggctctaccataccttaggtaagactcaggaacgcaatcgttgcgccatgcttttccgacagctccaccaggagctgccgtcacacggcgttcctttgattaaccatttgtag

SEQ ID NO: 272774 - DNA, 1932 bp, Artificial Sequence
  derived and/or modified sequence
atggctgagggggagctgaaggacatggagcagttctttgatgatctgtccgactcctttagtggcaccgaaccagaagtacataagaccagtgtggtgggactttttctgcggcacatgatcctggcctactcgaaactgagctttagtcaggtgttcaagctgtatacggccttgcagcagtactttcagaacggggagaagaagaccgtcgaggacgccgatatggaactgacctcaagagacgaaggcgagaggaagatggagaaggaggagctagacgtctctgtcagagaagaggaggtgtcatgctcaggccccctgtcgcaaaagcaggccgaattctttttgtcccagcaggcctccttgcttaagaatgatgagacgaaagccctaactcctgcaagcttgcagaaggagctgaacaatttgctcaagttcaaccctgacttcgccgaggctcattacctgtcctatttgaacaatctcagagttcaggacgtcttttcaagcacacattctttgctccattacttcgaccgtctgatccttaccggcgccgagtcaaagtcgaatggggaagagggttatggtagatcactgagatatgcagccttgaatctggcagcactccactgtcggtttgggcattaccagcaggctgagttagcccttcaggaagctatccgaattgcacaggagagcaacgatcacgtgtgtctgcagcactgcctaagctggctgtacgtgctgggacagaagcgatccgacagctacgtgcttttagaacactcagttaagaaagctgtgcattttggtctgccaagggcgtttgcgggtaagacagctaataagttgatggacgccctaaaagactcggatctgctacactggaaacactccttgagcgagctgatcgatatttctattgctcagaaaaccgcaatatggcgactgtacggcagaagtactatggctctgcagcaggctcagatgctgctgtcaatgaactcgctagaggcagtgaacgccggcgtgcaacagaataacaccgaaagctttgctgtggccctctgtcacctggcagaattgcatgccgagcagggctgtttcgccgccgcgagcgaagtgctcaagcacttaaaagaacgcttccctcccaactcccagcatgcgcagctgtggatgctttgtgatcagaaaattcaattcgatagggctatgaacgacggcaagtaccacctcgccgattccctcgtgaccggaatcacagccctgaattccattgaaggcgtctatcgcaaggctgtggtgttacaggcgcaaaaccagatgagtgaggcccataagctgctccaaaagctcttagttcattgtcaaaagctgaaaaacacggagatggtcatctcagtgctgttgagcgttgcggagctgtactggcgttcaagttcgcccacaattgcattgccaatgctgctgcaagccctcgcactaagtaaagaataccgcctgcaatatttggcctccgaaacagtgctcaacttagctttcgcccaactgatcctggggataccggagcaggcacttagcctactccatatggctattgagccaatcctggctgatggggccattcttgacaaaggtcgggccatgttcctggtggccaaatgccaggtggccagcgctgcctcctatgaccaacccaaaaaggccgaggcactggaagccgccattgaaaacttgaatgaggctaaaaattattttgcaaaggtagactgtaaggagcgaatccgtgatgtggtgtacttccaggccagactctaccataccttggggaaaacccaggaaagaaaccgatgcgccatgctcttccggcagcttcatcaggagctccctagccatggggtgcctctgatcaaccacttgtag

SEQ ID NO: 272775 - DNA, 2229 bp, Artificial Sequence
  derived and/or modified sequence
atggcgtctgtccacgagtccctgtatttcaacccaatgatgactaatggggtggtgcacgcaaatgtcttcggcataaaggattgggttactccttacaagatcgccgtcctagtactgctgaacgaaatgtctcgaactggtgagggcgccgtgtccctcatggaacgccgaagactgaatcagttactacttccgctgctgcagggacccgatatcactctgtctaagctgtacaagctcatcgaggaaagctgtccacagttagctaactctgtacagatcaggatcaagttaatggctgaaggtgagctcaaggacatggagcagttctttgacgacctgtctgacagctttagcggcactgagcctgaagttcacaagacgtccgtcgtggggctgttcttgagacacatgatactggcatatagcaagctgtcgttcagtcaggtttttaagctgtacactgcattgcagcagtatttccagaacggcgagaaaaagacagtggaggacgcagacatggaactgacaagtagggacgaaggcgagcgtaagatggagaaagaggagctggacgtcagtgttagggaagaggaagtcagttgttcaggaccactttcacagaaacaggccgagttctttctgtcacagcaggcatcactgctgaagaatgatgagacgaaagccctgacccctgccagcctccaaaaggaactgaacaaccttttgaagttcaaccctgactttgcggaggcacactatctgagttacctcaataacctcagggtacaagatgtgtttagcagcacacacagcctcctgcactattttgaccgccttatcctaactggagctgaatctaaaagcaacggtgaggagggctacggacgcagcctgagatatgcagccctcaacctggccgcgctacactgccgatttgggcactaccagcaggccgagctggccctccaagaggccatccgaattgctcaggagagtaacgaccatgtgtgtttgcagcattgccttagttggttgtatgtgttgggccagaagagaagcgattcctatgtgctgttagagcattcagtgaagaaggctgtgcacttcgggctgccgagagctttcgctggtaagaccgccaacaagctcatggatgcccttaaggactccgatttgctacattggaaacactccctctctgagctgattgacatcagcattgctcaaaagaccgctatttggcgactgtacggcagatccaccatggcccttcagcaggcacagatgctgctgagtatgaattccttagaagccgtgaacgcgggagtacaacagaataatacagagtcctttgctgttgctctctgtcatctggccgaactccacgccgagcaagggtgttttgccgcagcttccgaggtgcttaaacacctgaaagaacggttcccaccaaattctcagcacgctcagctatggatgttgtgcgaccagaagatccagttcgaccgggctatgaacgacggaaaatatcacttggcagactccttggtgacaggcatcacagcattgaatagcatcgaaggggtgtaccgcaaggccgtcgtgctccaggcccaaaatcagatgtcagaagcccacaaactgcttcagaagctgctcgtgcactgtcagaaactgaagaacaccgaaatggtaatcagcgtgctgcttagcgtcgccgaactgtactggaggagctcttctcccacaatcgcactgccaatgcttctgcaggcacttgccttatctaaagagtatagattacagtacctagcctcagaaactgtactgaatctggctttcgcccagctgattctgggaatcccagaacaggctttatctctgcttcacatggccattgagcccattcttgccgatggggctatcttagacaagggacgagccatgttcctggtcgctaaatgtcaggtggcatctgctgccagctatgaccaacccaaaaaagcggaggccctcgaagccgcaatcgaaaacctcaacgaggccaagaactatttcgcaaaggtagattgcaaggagcggatccgcgacgtggtgtactttcaagctagactttaccatactctgggcaagacacaggagcgtaaccgctgtgctatgctgtttcgccagctgcatcaggagttaccgtcccacggcgtgcctctcataaatcacttatag

SEQ ID NO: 272776 - DNA, 1932 bp, Artificial Sequence
  derived and/or modified sequence
atggccgagggggagctgaaggacatggagcagttctttgatgacctgagtgacagcttctctggaacagagcctgaggtgcacaagacctctgtggtgggcctcttcctgcggcacatgatcctggcctacagcaagctgtccttcagccaggtgttcaagctgtacacagccctgcagcagtacttccagaatggagagaagaagacagtggaggatgctgacatggagctgaccagcagagatgaaggagagaggaagatggagaaggaggagctggatgtgtctgtgcgggaggaggaggtgtcctgcagcggccccctgagccagaagcaggccgagttcttcctgagccagcaggccagcctgctgaagaatgatgagaccaaggccctgaccccagccagcctgcagaaggagctgaacaacctgctgaagttcaacccagactttgctgaggcccactacctgagctacctgaacaacctgcgggtgcaggatgtgttcagcagcacccacagcctgctgcactactttgacaggctcatcctgactggagctgagagcaagagcaatggagaggagggctacggccgcagcctgcgctatgctgccctgaacctggccgccctgcactgccgcttcggccactaccagcaggccgagctggccctgcaggaggccatcagaattgcccaggagagcaatgaccacgtgtgcctgcagcactgcctgtcctggctgtatgtgctgggccagaagagaagtgacagctatgtgctgctggagcacagcgtgaagaaggctgtgcacttcggcctgccccgggcctttgctgggaagacagccaacaagctgatggatgccctgaaggacagcgacctgctgcactggaagcacagcctgtctgagctgattgacatcagcatcgcccagaagacagccatctggaggctgtatggccgcagcaccatggccctgcagcaggcccagatgctgctgtccatgaacagcctggaggccgtgaatgctggggtgcagcagaacaacacagagagctttgctgtggccctgtgccacctggccgagctgcacgccgagcagggctgctttgctgctgccagcgaggtgctgaagcacctgaaggagcgcttcccccccaacagccagcacgcccagctgtggatgctgtgtgaccagaagatccagtttgaccgggccatgaatgatggcaagtaccacctggccgacagcctggtgacaggcatcacagccctgaacagcattgaaggagtgtacaggaaggctgtggtgctgcaggcccagaaccagatgtctgaggcccacaagctgctgcagaagctgctggtgcactgccagaagctgaagaacacagagatggtgatctctgtgctgctgtctgtggccgagctgtactggaggagcagcagccccaccatcgccctgcccatgctgctgcaggccctggccctgagcaaggagtaccgcctgcagtacctggccagcgagaccgtgctgaacctggcctttgcccagctgatcctgggcatccctgagcaggccctgagcctgctgcacatggccatcgagcccatcctggctgatggagccatcctggacaagggccgggccatgttcctggtggccaagtgccaggtggccagcgctgccagctatgaccagcccaagaaggccgaggccctggaggccgccatcgagaacctgaatgaggccaagaactactttgccaaggtggactgcaaggagcgcatcagagatgtggtgtacttccaggcccggctgtaccacaccctgggcaagacccaggagaggaacagatgtgccatgctgttccggcagctgcaccaggagctgcccagccatggagtgcccctcatcaaccacctgtag

SEQ ID NO: 272777 - DNA, 2229 bp, Artificial Sequence
  derived and/or modified sequence
atggcctctgtgcatgagagcctgtacttcaaccccatgatgaccaacggggtggtgcacgccaacgtgtttggcatcaaggactgggtgaccccctacaagattgctgtgctggtgctgctgaatgagatgagcaggactggagagggcgctgtgtccctgatggagcggcggcggctgaaccagctgctgctgcccctgctgcagggccctgacatcaccctgagcaagctgtacaagctgattgaggagagctgcccccagctggccaacagcgtgcagatccgcatcaagctgatggccgagggggagctgaaggacatggagcagttctttgatgacctgagtgacagcttcagcggcacagagcctgaggtgcacaagacctctgtggtgggcctcttcctgcggcacatgatcctggcctacagcaagctgtccttcagccaggtgttcaagctgtacacagccctgcagcagtacttccagaatggagagaagaagacagtggaggatgctgacatggagctgaccagcagagatgaaggagagaggaagatggagaaggaggagctggatgtgtctgtgcgggaggaggaggtgtcctgcagcggccccctgagccagaagcaggccgagttcttcctgagccagcaggccagcctgctgaagaatgatgagaccaaggccctgaccccagccagcctgcagaaggagctgaacaacctgctgaagttcaacccagactttgctgaggcccactacctgagctacctgaacaacctgcgggtgcaggatgtgttcagcagcacccacagcctgctgcactactttgacaggctcatcctgaccggggctgagagcaagagcaatggagaggagggctacggccgcagcctgcgctatgctgccctgaacctggccgccctgcactgccgcttcggccactaccagcaggccgagctggccctgcaggaggccatccgcatcgcccaggagagcaatgaccacgtgtgcctgcagcactgcctgtcctggctgtatgtgctgggccagaagagaagtgacagctatgtgctgctggagcacagcgtgaagaaggctgtgcacttcggcctgccccgggcctttgctgggaagacagccaacaagctgatggatgccctgaaggacagcgacctgctgcactggaagcacagcctgtctgagctgattgacatcagcatcgcccagaagacagccatctggaggctgtatggccgcagcaccatggccctgcagcaggcccagatgctgctgtccatgaacagcctggaggccgtgaatgccggcgtgcagcagaacaacacagagagctttgctgtggccctgtgccacctggccgagctgcatgctgagcagggctgctttgctgctgccagcgaggtgctgaagcacctgaaggagcgcttcccccccaacagccagcacgcccagctgtggatgctgtgtgaccagaagatccagtttgaccgggccatgaatgatggcaagtaccacctggccgacagcctggtgacaggcatcacagccctgaacagcattgagggcgtgtacaggaaggctgtggtgctgcaggcccagaaccagatgtctgaggcccacaagctgctgcagaagctgctggtgcactgccagaagctgaagaacacagagatggtgatctctgtgctgctgtctgtggccgagctgtactggaggagcagcagccccaccatcgccctgcccatgctgctgcaggccctggccctgagcaaggagtaccgcctgcagtacctggccagcgagaccgtgctgaacctggcctttgcccagctgatcctgggcatccctgagcaggccctgagcctgctgcacatggccatcgagcccatcctggctgatggagccatcctggacaagggccgggccatgttcctggtggccaagtgccaggtggccagcgctgccagctatgaccagcccaagaaggccgaggccctggaggccgccatcgagaacctgaatgaggccaagaactactttgccaaggtggactgcaaggagcgcatcagagatgtggtgtacttccaggcccggctgtaccacaccctgggcaagacccaggagaggaacagatgtgccatgctgttccggcagctgcaccaggagctgcccagccacggcgtgcccctcatcaaccacctgtag

SEQ ID NO: 272778 - DNA, 1932 bp, Artificial Sequence
  derived and/or modified sequence
atggccgagggcgagctgaaggacatggagcagttcttcgacgacctgagtgactctttttcaggaaccgaacctgaagtgcacaagacgagcgtggtgggtctgtttctccgtcacatgatacttgcttacagcaagctttctttctcccaggtcttcaaactgtacactgccttgcaacagtactttcaaaacggggagaagaagaccgttgaggatgccgacatggaacttacctcaagggacgaaggagaacgcaaaatggaaaaggaagaactcgatgtgtctgtgagggaggaggaagtgagctgctcgggtcctctctcccaaaagcaggctgaattctttctctcacaacaagcatccctactaaagaatgacgagacaaaggcccttactccagccagccttcaaaaggaactcaataatttacttaaatttaaccctgatttcgctgaagcccactacctgtcctatctgaacaacctgcgcgttcaggacgtcttctcctcaactcacagcttgctgcattactttgacagactgattctgactggcgcagagtccaaaagcaacggagaggaaggctatggcagatcgctcagatacgccgcactcaacttggcggccttgcactgtcggtttggccactatcagcaggcggagctggccttacaggaagccatcaggattgctcaggagtccaacgatcacgtgtgtcttcagcattgcttgagttggctctatgtactgggccagaagcgctctgattcttacgtactactggaacactctgtaaagaaagcagtccacttcgggttgccgagggcctttgccggcaaaaccgccaataagctgatggacgctctgaaggactctgacctgctgcactggaaacacagtctcagcgaactgatcgatatttcaatcgcacagaaaaccgccatttggaggctgtatgggagatctacaatggcactgcagcaggctcagatgctcctgtccatgaacagcctagaagccgtcaacgccggcgtccagcagaacaatacagagagcttcgctgtcgcactctgtcatctcgcagagctgcacgctgagcagggatgcttcgccgctgctagcgaggtgctgaagcatttgaaggagcggtttccccccaactcccagcacgcccaactgtggatgctttgcgatcaaaagattcagtttgacagagcaatgaatgacgggaagtatcacctagccgattctttagtcacgggcattactgctcttaactccattgagggtgtgtaccgtaaggctgtcgtgctgcaagctcagaaccagatgtcggaagcacataagttactccagaaacttctggttcattgtcaaaaattaaaaaatactgagatggtgattagtgtgctcctgagtgtggccgagctgtactggagaagcagctctcccaccatagcgcttcctatgctgctgcaggctctggctttgagcaaggaatacaggctgcagtacctggctagtgaaactgtgttgaacctcgcatttgcacagctaattctgggcatccccgaacaggcattgtccctgctgcatatggctattgagccaatcttggccgatggagcaattctggacaaggggagagcaatgtttctagtggctaaatgccaggttgccagcgctgcttcctatgatcagccaaaaaaagctgaagccctcgaggccgctatcgagaacctgaacgaggctaaaaattacttcgccaaggttgactgtaaggaaaggataagagacgtcgtttattttcaagctcgactgtaccacacccttggcaagactcaggaacgaaacagatgcgctatgctgttccggcagttgcaccaagaactgcctagccatggagtccctttgatcaaccatctttag

SEQ ID NO: 272779 - DNA, 1932 bp, Artificial Sequence
  derived and/or modified sequence
atggccgagggcgagctgaaggacatggagcagttcttcgacgacctgtctgacagctttagcgggacggagccagaggtacataaaacatctgtggtcgggttatttctgcgccatatgattctggcatactccaagcttagcttttcccaagttttcaaactatatacggcgctgcagcaatatttccaaaacggagaaaaaaagactgtcgaggatgccgacatggagctgacatcccgcgacgaaggagaaaggaaaatggagaaggaggagctggacgtttcagttcgggaggaggaagtaagctgttccgggcccctgtcccagaaacaggccgagttcttcctgagccagcaggccagccttcttaaaaacgacgagacgaaggcccttacccccgccagtcttcagaaggaactcaataacttgctaaagttcaacccagattttgcagaggcgcactatctctcttatctgaataatttgcgggtccaggatgtgttttcaagtacccacagcttgctgcattacttcgatagactgattctgactggggctgaatcaaagtcaaacggcgaagagggatatggcagatccttgcgctacgcagctctgaatttagctgccttacattgtagatttggtcactaccagcaggctgaattagctctccaagaagccatccggatcgcacaagagagcaatgatcacgtctgtctgcagcattgtctcagctggctgtatgtgctgggacaaaaaaggtccgattcatacgtgctcctggagcatagtgtgaagaaggccgttcattttgggctcccgagagcctttgccggaaaaactgccaataaactcatggacgcccttaaagattccgacctgctacactggaaacattccctctcagaattgattgatatcagcatagctcagaagacagccatttggcgcctgtatggccgatccactatggccctgcaacaagcccagatgcttttatccatgaactccctggaggccgtgaatgccggtgtgcaacaaaataacacagaatcatttgccgtggctctgtgccaccttgccgagctgcacgccgagcaaggctgcttcgcggcagcctccgaggttttgaagcatctcaaagaacgctttccacccaattcccagcacgcccagctctggatgctgtgtgatcagaagattcaatttgacagagccatgaatgacggaaagtaccacctggcggactccttggttacagggatcactgccctgaactccatcgaaggggtgtatcggaaagccgtcgtgctccaggcccagaatcaaatgtccgaagcccataagctgctccaaaagctgttagttcattgtcagaagctcaaaaataccgagatggtaatcagcgtcttgttgtccgtcgctgaactgtactggcggagctcctccccaactatcgctctgcccatgctgcttcaggctctggcgctttcaaaggagtatagattgcagtatctggcctctgagaccgtgctgaaccttgccttcgcccagctgatcctgggtatccccgaacaggctttgagccttctccatatggcaatagaaccaatccttgccgacggtgctatcttggataagggcagggccatgttcctcgtggcaaagtgtcaggtggcaagtgctgctagctacgatcagcccaagaaagccgaggccctggaggccgccattgagaatctgaacgaggcaaaaaattattttgccaaggtggactgcaaagaacgcatcagagatgtggtatatttccaggctaggttgtaccacactttaggaaagacccaagaacggaatcggtgtgcaatgctctttcgccaactccatcaggaattgccgagtcacggagttccgctgattaaccacctgtag

SEQ ID NO: 272780 - DNA, 2229 bp, Artificial Sequence
  derived and/or modified sequence
atggccagcgtgcacgagagcctgtacttcaaccccatgatgaccaatggagtggtccacgcaaatgtattcggaattaaggactgggttacaccttacaaaattgccgtcctcgtactcctgaatgagatgtcccgcaccggcgaaggggcagtgagcctgatggagaggaggcgccttaatcagttgctactcccactactacaagggcctgatatcaccctctctaagctgtataaattgatagaagaatcatgtccacaactggcgaattccgtacagatccgcatcaagctgatggcggaaggggaactcaaggacatggaacagttctttgacgacctctctgactccttttcgggaaccgaaccagaagtccacaagacctctgtggtcggcctgttcctccgccatatgattctggcatactccaaactttctttttcccaggtcttcaaactgtacacagcactgcaacagtatttccaaaacggagagaagaagactgtcgaggacgcagatatggagctgacatctagagacgaaggggagaggaaaatggagaaggaagaactggacgtcagcgttcgggaagaggaagtgtcttgcagcggtccgttgagccaaaaacaggctgagttttttctttctcagcaggccagtttgcttaagaacgacgaaaccaaggccctgacccctgcctcactccagaaggagctgaacaatttgctaaaattcaaccccgattttgcggaggctcactatctatcctatctaaacaacctgcgcgtacaggatgtcttctcttctacccattcactgttacactatttcgacagactgatcctcaccggggctgaatctaagtcaaatggcgaagaaggctacggacggtctttaagatatgccgccctgaacctggccgcccttcactgccggtttgggcactaccaacaggctgaattggcgctccaagaggccatcaggattgcccaagagtctaacgatcacgtgtgcttgcaacattgcttatcatggctgtatgtgctagggcaaaagcggtccgattcctatgtactcttggagcacagtgttaagaaagccgttcatttcgggctgccaagggcctttgctggcaaaaccgccaataaattaatggatgcccttaaagattctgacctacttcactggaaacactctttgtctgagcttattgacatttccatagcccagaagacagccatttggcgcctctacggacgttcaaccatggctctgcagcaagcccagatgcttctgtcaatgaacagcctcgaggccgtcaatgccggcgtgcaacaaaataatacggagtctttcgctgtggctttatgtcaccttgctgagttacacgctgaacaaggatgcttcgctgccgcgtccgaagtgctgaagcacctcaaggagcgctttcctccaaattctcaacatgcgcagctttggatgttatgcgaccagaagatccaattcgatcgggctatgaatgacggaaaataccatctggccgattcactcgtcaccgggatcaccgcgcttaattctatcgaaggagtgtacaggaaagccgtagtgctccaggcccaaaaccagatgtctgaggctcacaaattactccagaaattactcgtgcactgccagaagctgaagaacactgaaatggtgattagcgttttgctatccgtggcagaattgtactggcggtcttccagtcccacgattgccttgccgatgctacttcaggctttagcactgagcaaagagtacaggctgcagtacttggcttccgaaacggttctgaacttggcttttgcccaactgatactgggcatcccagaacaggccttaagcctgttgcatatggccatcgaacccatcctggcagacggggcaattcttgacaagggcagggcaatgttcctggtggccaagtgtcaggtcgctagtgccgcgtcttatgaccaaccaaagaaggctgaagctctggaggccgccattgaaaacctgaatgaagccaaaaattattttgccaaagttgattgcaaagaaaggatcagagatgtggtgtattttcaggcccggttgtatcacaccttaggtaagacacaggaacggaaccgatgtgccatgctctttcgacaactgcatcaggagctcccatcacatggggtccctctcataaaccacctctag

SEQ ID NO: 272781 - DNA, 1932 bp, Artificial Sequence
  derived and/or modified sequence
atggctgaaggcgagttgaaggatatggaacagttttttgatgacctttcagattctttctctggaactgaaccagaggttcacaaaacaagtgtagtaggtttgtttctgcgtcacatgatcttggcctacagtaagctttctttcagccaagtgtttaaactgtacactgcccttcagcagtacttccagaatggtgagaaaaagacagtggaggatgctgatatggaactgaccagtagagatgagggtgaaagaaaaatggaaaaagaagaacttgatgtatctgtaagagaagaggaggtatcttgcagtgggcctctgtcccaaaaacaagcagaattttttctttctcaacaggcttctttgctaaagaatgatgagactaaggccctcactccagcttccttgcagaaggaattaaacaatttgttgaaatttaatcctgattttgctgaagcgcattatctcagctacttaaacaacctccgtgtccaagatgttttcagttcaacacacagtctcctccattattttgatcgtctgattcttaccggagccgaaagcaaaagtaatggggaagagggctatggccggagcttgagatacgccgctctgaatcttgccgccctgcactgccgcttcggtcactatcaacaggcagagctcgccctgcaggaggcaattaggattgcccaggagtccaacgatcacgtgtgtctccagcactgtttgagctggctttatgtgctggggcagaagagatccgatagctatgttctgctggagcattctgtgaagaaggcagtacattttgggttaccgagagcttttgctgggaagacggcaaacaagctgatggatgccctaaaggactccgacctcctgcactggaaacacagcctgtcagagctcatcgatatcagcatcgcacagaaaacggccatctggaggctgtatggccgcagcaccatggcactgcaacaggcccagatgttgctgagcatgaacagcctggaggcggtgaatgcgggcgtgcagcagaacaacacagagtcctttgctgtcgcactctgccacctcgcagagctacacgcggagcagggctgttttgctgcagcttctgaagtgttaaagcacttgaaggaacgatttccgcctaatagtcagcacgcccagttatggatgctatgtgatcaaaaaatacagtttgacagagcaatgaatgatggcaaatatcatttggctgattcacttgttacaggaatcacagctctcaatagcatagagggtgtttataggaaagcggttgtattacaagctcagaaccaaatgtcagaggcacataagcttttacaaaaattgttggttcattgtcagaaactgaagaacacagaaatggtgatcagtgtcctactgtccgtggcagagctgtactggcgatcttcctcccctaccatcgcgctgcccatgctcctgcaggctctggccctctccaaggagtaccggttacagtacttggcctctgaaacagtgctgaacttggcttttgcgcagctcattcttggaatcccagaacaggccttaagtcttctccacatggccatcgagcccatcttggctgacggggctatcctggacaaaggtcgtgccatgttcttagtggccaagtgccaggtggcttcagcagcttcctacgatcagccgaagaaagcagaagctctggaggctgccatcgagaacctcaatgaagccaagaactattttgcaaaggttgactgcaaagagcgcatcagggacgtcgtttacttccaggccagactctaccataccctggggaagacccaggagaggaaccggtgtgcgatgctcttccggcagctgcatcaggagctgccctctcatggggtacccttgataaaccatctctag

SEQ ID NO: 272782 - DNA, 2147 bp, Artificial Sequence
  derived and/or modified sequence
agggcccagatattacactgtcaaaactttacaagttaattgaagagtcttgtccacagctggcaaattcagtgcagatcagaatcaaactgatggctgaaggcgagttgaaggatatggaacagttttttgatgacctttcagattctttctctggaactgaaccagaggttcacaaaacaagtgtagtaggtttgtttctgcgtcacatgatcttggcctacagtaagctttctttcagccaagtgtttaaactgtacactgcccttcagcagtacttccagaatggtgagaaaaagacagtggaggatgctgatatggaactgaccagtagagatgagggtgaaagaaaaatggaaaaagaagaacttgatgtatctgtaagagaagaggaggtatcttgcagtgggcctctgtcccaaaaacaagcagaattttttctttctcaacaggcttctttgctaaagaatgatgagactaaggccctcactccagcttccttgcagaaggaattaaacaatttgttgaaatttaatcctgattttgctgaagcgcattatctcagctacttaaacaacctccgtgtccaagatgttttcagttcaacacacagtctcctccattattttgatcgtctgattcttaccggagccgaaagcaaaagtaatggggaagagggctatggccggagcttgagatacgccgctctgaatcttgccgccctgcactgccgcttcggtcactatcaacaggcagagctcgccctgcaggaggcaattaggattgcccaggagtccaacgatcacgtgtgtctccagcactgtttgagctggctttatgtgctggggcagaagagatccgatagctatgttctgctggagcattctgtgaagaaggcagtacattttgggttaccgagagcttttgctgggaagacggcaaacaagctgatggatgccctaaaggactccgacctcctgcactggaaacacagcctgtcagagctcatcgatatcagcatcgcacagaaaacggccatctggaggctgtatggccgcagcaccatggcactgcaacaggcccagatgttgctgagcatgaacagcctggaggcggtgaatgcgggcgtgcagcagaacaacacagagtcctttgctgtcgcactctgccacctcgcagagctacacgcggagcagggctgttttgctgcagcttctgaagtgttaaagcacttgaaggaacgatttccgcctaatagtcagcacgcccagttatggatgctatgtgatcaaaaaatacagtttgacagagcaatgaatgatggcaaatatcatttggctgattcacttgttacaggaatcacagctctcaatagcatagagggtgtttataggaaagcggttgtattacaagctcagaaccaaatgtcagaggcacataagcttttacaaaaattgttggttcattgtcagaaactgaagaacacagaaatggtgatcagtgtcctactgtccgtggcagagctgtactggcgatcttcctcccctaccatcgcgctgcccatgctcctgcaggctctggccctctccaaggagtaccggttacagtacttggcctctgaaacagtgctgaacttggcttttgcgcagctcattcttggaatcccagaacaggccttaagtcttctccacatggccatcgagcccatcttggctgacggggctatcctggacaaaggtcgtgccatgttcttagtggccaagtgccaggtggcttcagcagcttcctacgatcagccgaagaaagcagaagctctggaggctgccatcgagaacctcaatgaagccaagaactattttgcaaaggttgactgcaaagagcgcatcagggacgtcgtttacttccaggccagactctaccataccctggggaagacccaggagaggaaccggtgtgcgatgctcttccggcagctgcatcaggagctgccctctcatggggtacccttgataaaccatctctagagaggacatccctgctgggctgctgtgcagagtataagattttggacttgttcatgtcccctctctccctataaatgatgtatttgtgacaccctatcttgtcaataaacagcattctgatta

SEQ ID NO: 272783 - DNA, 509 bp, Artificial Sequence
  derived and/or modified sequence
aagacctgcggacctgggcgtggcggaaggcgcgctgcggcgctgctttctcggttgggtgtttgaaatgggagatagcgtccctgaggaagctgctgcggctttctgggctaggtggtcaagtttccggggaggggagcgcgggaagggccgtggtgaatttgaacacgccggttggctcgaaggcctttgttatgaccgtcagagcagggcctcagatttccttcccagacgttcccgcgttcatgctcggtgatgacctcggggctcctcactcgtgggtccgggcccagatattacactgtcaaaactttacaagttaattgaagagtcttgtccacagctggcaaattcagtgcagatcagaatcaaactgatggctgaaggcgagttgaaggatatggaacagttttttgatgacctttcagattctttctctggaactgaaccagaggttcacaaaacaagtgtagtaggtttgtttctgcgtcacatgatcttggcctaca

SEQ ID NO: 272784 - DNA, 2400 bp, Artificial Sequence
  derived and/or modified sequence
caactggcggcagcgcgccgcgggcccgagacttagtctcgggccgccatggccagcgtccacgagagcctctacttcaatcccatgatgaccaatggggttgtgcacgccaatgtgttcggcatcaaggactgggtgacgccgtacaagatcgcggtgctggtgctgctgaacgagatgagccgcacaggcgagggcgccgtcagcctcatggagcggcggaggctcaaccagctgctcctgcccctgctgcagggcccagatattacactgtcaaaactttacaagttaattgaagagtcttgtccacagctggcaaattcagtgcagatcagaatcaaactgatggctgaaggcgagttgaaggatatggaacagttttttgatgacctttcagattctttctctggaactgaaccagaggttcacaaaacaagtgtagtaggtttgtttctgcgtcacatgatcttggcctacagtaagctttctttcagccaagtgtttaaactgtacactgcccttcagcagtacttccagaatggtgagaaaaagacagtggaggatgctgatatggaactgaccagtagagatgagggtgaaagaaaaatggaaaaagaagaacttgatgtatctgtaagagaagaggaggtatcttgcagtgggcctctgtcccaaaaacaagcagaattttttctttctcaacaggcttctttgctaaagaatgatgagactaaggccctcactccagcttccttgcagaaggaattaaacaatttgttgaaatttaatcctgattttgctgaagcgcattatctcagctacttaaacaacctccgtgtccaagatgttttcagttcaacacacagtctcctccattattttgatcgtctgattcttaccggagccgaaagcaaaagtaatggggaagagggctatggccggagcttgagatacgccgctctgaatcttgccgccctgcactgccgcttcggtcactatcaacaggcagagctcgccctgcaggaggcaattaggattgcccaggagtccaacgatcacgtgtgtctccagcactgtttgagctggctttatgtgctggggcagaagagatccgatagctatgttctgctggagcattctgtgaagaaggcagtacattttgggttaccgagagcttttgctgggaagacggcaaacaagctgatggatgccctaaaggactccgacctcctgcactggaaacacagcctgtcagagctcatcgatatcagcatcgcacagaaaacggccatctggaggctgtatggccgcagcaccatggcactgcaacaggcccagatgttgctgagcatgaacagcctggaggcggtgaatgcgggcgtgcagcagaacaacacagagtcctttgctgtcgcactctgccacctcgcagagctacacgcggagcagggctgttttgctgcagcttctgaagtgttaaagcacttgaaggaacgatttccgcctaatagtcagcacgcccagttatggatgctatgtgatcaaaaaatacagtttgacagagcaatgaatgatggcaaatatcatttggctgattcacttgttacaggaatcacagctctcaatagcatagagggtgtttataggaaagcggttgtattacaagctcagaaccaaatgtcagaggcacataagcttttacaaaaattgttggttcattgtcagaaactgaagaacacagaaatggtgatcagtgtcctactgtccgtggcagagctgtactggcgatcttcctcccctaccatcgcgctgcccatgctcctgcaggctctggccctctccaaggagtaccggttacagtacttggcctctgaaacagtgctgaacttggcttttgcgcagctcattcttggaatcccagaacaggccttaagtcttctccacatggccatcgagcccatcttggctgacggggctatcctggacaaaggtcgtgccatgttcttagtggccaagtgccaggtggcttcagcagcttcctacgatcagccgaagaaagcagaagctctggaggctgccatcgagaacctcaatgaagccaagaactattttgcaaaggttgactgcaaagagcgcatcagggacgtcgtttacttccaggccagactctaccataccctggggaagacccaggagaggaaccggtgtgcgatgctcttccggcagctgcatcaggagctgccctctcatggggtacccttgataaaccatctctagagaggacatccctgctgggctgctgtgcagagtataagattttggacttgttcatgtcccctctctccctataaatgatgtatttgtgacaccctatcttgtcaataaacagcattctgatta

SEQ ID NO: 272785 - DNA, 1932 bp, Artificial Sequence
  derived and/or modified sequence
atggcagagggtgagctgaaggacatggagcagttttttgacgacttgagtgactccttctcgggcacagagcccgaagtgcacaagacatccgtagttggcctatttctccgccacatgatactggcctactccaagctctctttttcacaggttttcaagctctacacagcgctgcagcaatacttccagaacggcgaaaagaagaccgtagaggacgccgatatggaactgacatctcgcgatgaaggagagcggaagatggaaaaagaggagctggacgtatctgtgagggaggaggaggtttcttgttctgggccactgtcgcaaaagcaggcggagttcttcctgagtcaacaggcctccctgctgaaaaacgatgaaaccaaagccttgactcccgctagcttgcagaaggaattgaacaatcttttgaagttcaatcctgattttgcagaggcccactacctgtcttatctaaataacctgagggtgcaggatgtgttctcgtctactcattccctgctccactacttcgatagattgatacttacaggtgcagagagtaagtcaaatggcgaagagggatacggaagatccttgaggtacgccgctcttaatctggcagccttacactgtaggtttggccattatcaacaggctgaactcgctctgcaggaagccatcaggatcgctcaggagagtaatgatcacgtgtgcttacagcactgtttgtcgtggctttacgtccttggccagaagagatctgattcttacgtccttctagagcactcagttaagaaagcagtgcatttcggcctcccccgtgcctttgctgggaaaacggccaataagcttatggacgctctgaaggattcagatctcctgcactggaaacattcactctccgagctgattgacatctccatcgctcagaaaactgcaatctggcgcctctacgggcgttcaactatggcactgcagcaggcccagatgctgctgtcaatgaactccctggaagcagtgaatgcaggtgttcagcaaaacaacactgagagcttcgccgttgcgttatgccacctggcagaactacacgctgagcaaggttgcttcgcagctgcttcagaagtgctgaagcacttaaaggaacggttcccgcctaactcccagcatgcacagctgtggatgctgtgcgaccagaaaattcagttcgatagagcgatgaacgatgggaaataccacctcgcagatagccttgtgaccgggatcaccgcccttaacagcatagaaggggtgtataggaaggccgtggtactgcaagcccagaatcagatgagcgaagcccataagctgctgcagaagcttctggtacattgtcagaagttgaagaatacagagatggtgatatccgtactactcagcgtagccgagctgtactggagatcttcatcacctaccatagctctgcctatgctgctgcaagctctggccctcagcaaagaatacagacttcagtatttagcatccgaaactgtgcttaacctcgccttcgcccaactcatcctgggtatcccggagcaggccctgtctctccttcacatggcaatcgaaccgattctggcagacggtgctatattggacaaaggcagggcaatgtttttggtggcaaagtgccaagtcgcgtcggcggcatcctatgatcagcccaaaaaggccgaggcgctcgaagccgcaatcgaaaacctgaacgaagctaaaaactactttgcaaaggtcgactgcaaggagagaatccgcgacgttgtgtactttcaggctcggttatatcacaccttagggaaaactcaggagcgcaatagatgcgcaatgctcttccggcaactccaccaggagttgccttcccatggcgtgccccttattaaccatctgtag

SEQ ID NO: 272786 - DNA, 1932 bp, Artificial Sequence
  derived and/or modified sequence
atggctgaaggcgagttgaaagatatggagcagtttttcgacgatctgtccgacagtttctctggcactgaacccgaggtgcacaagactagcgtggtgggactcttcttgagacatatgattttagcatattccaagcttagcttttcgcaggtgtttaagttgtacacagccctgcagcagtacttccagaacggggagaaaaagactgtggaggacgccgatatggagttaacaagcagggacgaaggcgagaggaagatggaaaaagaggaactagatgtcagtgtgcgggaggaagaagtgagctgttctgggccattgagccagaagcaggccgagttttttctgagccagcaagcttcactgctaaaaaatgacgagaccaaagcgcttacgcctgcaagcctgcagaaagaattgaacaatcttcttaagtttaatcctgatttcgccgaagctcattatctctcctatttgaataacctgcgggtccaggacgtcttcagttccactcattcccttcttcactactttgaccggttgattctcactggagcggagagtaagagtaatggcgaggagggctacggacgtagtcttcgctacgccgcacttaatcttgctgcactccattgcagattcgggcattaccagcaggcagagctggcactgcaggaggcaattcgaattgcacaggagtcaaatgatcacgtctgcctgcagcactgcctcagctggctgtatgtgttgggacagaaaaggtccgacagctatgttctgctcgagcactcagtgaaaaaggccgtacattttggcctaccacgcgctttcgccggaaaaacggcgaacaagctgatggacgccctcaaggacagcgacctgcttcattggaagcacagtctcagcgagttaatcgacatctccattgctcagaaaacagctatttggcgcttgtacgggagatcaactatggccttgcagcaggcacaaatgctcctttctatgaacagcttagaggctgtcaacgccggtgtccagcagaacaacaccgagtctttcgctgtagctctctgtcacctggcggaactgcacgccgaacaagggtgctttgctgcagccagcgaagtcctgaaacatctgaaggaaagatttcccccaaatagccagcatgcccaactttggatgctttgcgatcagaagattcagttcgatcgagctatgaatgacgggaaataccacctggcggactcactggtgactggcataaccgctctcaatagtatagaaggggtgtacaggaaagccgtggtgcttcaagcacagaaccaaatgtccgaggcccataaactcctgcagaagctgctggtgcactgccaaaagttaaagaacactgagatggtgatttccgtgctgttgtccgtggctgagttgtactggcgctcatcttccccaacaattgctctgcccatgctgctgcaagccctagcactgtctaaggaatacagactccaatatctggcctccgagaccgtccttaatctggcatttgcccagctgatccttggaatccctgagcaggctctgtctctcctgcacatggctatcgagcccattttggccgatggggcaattctggacaaaggcagggccatgtttctcgtggccaaatgtcaggtggctagcgctgcatcctacgatcagcccaagaaagcggaggccctggaggccgctatcgagaacctcaacgaggcaaagaattactttgccaaggtggattgtaaggagagaattcgtgacgtggtctactttcaagctcggctttatcacactctgggcaaaactcaagagaggaacagatgtgccatgctgttccgacagctgcaccaggaactgccctcacacggggtgcccctgatcaaccatttgtag

SEQ ID NO: 272787 - DNA, 2229 bp, Artificial Sequence
  derived and/or modified sequence
atggcgtcggtgcatgagtcactgtattttaacccaatgatgacaaacggggtcgtgcatgccaacgtctttggaatcaaggattgggtgaccccctacaagatcgcagtcctggtgttattgaatgagatgtccagaaccggcgaaggcgcagtgagcctgatggagcggaggcgcttgaatcagctacttctgcctctgttacagggacctgacatcaccctgagcaagctgtataagctgatcgaggaatcgtgtcctcaactcgccaattctgtgcaaattcgaatcaagctaatggccgagggagaactgaaagacatggagcagtttttcgacgacctttcagactctttctctggaacagagcctgaggtccataagacctctgtggttgggctgttcctccgtcatatgatcttggcatattccaagctctctttcagtcaggttttcaaactgtataccgcgctccagcaatactttcagaatggagagaagaagaccgtcgaggacgccgatatggagctgaccagccgtgatgagggcgagaggaaaatggagaaggaagagctggacgtgtccgtgcgggaagaagaagtgtcttgttctggtcctttatctcagaagcaggccgaattctttctaagtcaacaggcctcgttactgaagaatgatgaaacaaaggccctgacccctgcctctctccagaaagagttgaataacctgttaaagtttaaccctgacttcgctgaggcccactatctgagttatctcaataacttgagggtgcaagacgttttttcctccacgcattctctcctccactacttcgatcggctgatactgactggcgctgaatctaaatccaacggggaagagggctatgggagatccctcaggtatgcagcgctcaatcttgctgcactgcattgcagatttggtcattatcaacaggctgaactggccctgcaggaagctatccggatcgcccaggaaagcaacgatcatgtttgcctgcagcactgtttgtcttggttgtacgtgctcggacagaaaaggtccgattcatacgtcttgctagagcatagtgtcaagaaggcggtgcattttggactgccacgcgcatttgctgggaagaccgctaataaactgatggacgccctgaaggactcagatctcttacattggaagcattccttgtcagaactgattgacatcagcattgcccagaagaccgcgatatggcggctgtacgggagatccaccatggcgctacagcaggctcagatgcttctttctatgaactccctcgaggccgtgaatgccggagtccagcaaaacaatactgagagtttcgctgtggctctttgtcacctcgctgagctccacgcagaacagggatgttttgctgccgcttctgaagtcttgaagcacctaaaggagcgttttcccccaaactcacaacatgcccaattatggatgttgtgcgaccagaaaatacagttcgatcgggctatgaatgacggaaagtatcacctggcggattccctcgtgacaggaatcactgcgctgaacagtattgaaggggtatatcggaaagccgtagtgctgcaggcccagaatcagatgtccgaggcccataagctgctccagaaattgctcgtccactgtcagaaactgaagaataccgagatggttatatcggtgctcttgtcagtggccgagctctattggcggtccagctcgcctacaatcgcccttcccatgttgttgcaggcgcttgcactttccaaggagtaccgccttcaatatttggcatctgaaacagtactgaacctcgcatttgctcaactgatactgggcattcccgaacaggccctgtccctgcttcatatggccattgagcctattctcgcagatggagcgattctggataaagggagagccatgtttctagttgccaagtgtcaagttgcctctgccgcatcgtacgatcaaccaaaaaaggctgaagccctggaagctgccatcgagaacctcaatgaagccaaaaattacttcgccaaggtagattgcaaagaacggatccgggacgttgtgtactttcaagcacgcctgtaccacactctcggcaaaacacaggaacgcaacaggtgcgctatgctgtttcgtcagctgcatcaagaactgccgtctcatggtgtgcccctcatcaaccatctgtag

SEQ ID NO: 272788 - DNA, 1932 bp, Artificial Sequence
  derived and/or modified sequence
atggccgagggcgagctgaaggacatggagcagttcttcgacgacctgagcgacagcttcagcggcaccgagcccgaggtgcacaagaccagcgtggtgggcctgttcctgagacacatgatcctggcctacagcaagctgagcttcagccaggtgttcaagctgtacaccgccctgcagcagtacttccagaacggcgagaagaagaccgtggaggacgccgacatggagctgaccagcagagacgagggcgagagaaagatggagaaggaggagctggacgtgagcgtgagagaggaggaggtgagctgcagcggccccctgagccagaagcaggccgagttcttcctgagccagcaggccagcctgctgaagaacgacgagaccaaggccctgacccccgccagcctgcagaaggagctgaacaacctgctgaagttcaaccccgacttcgccgaggcccactacctgagctacctgaacaacctgagagtgcaggacgtgttcagcagcacccacagcctgctgcactacttcgacagactgatcctgaccggcgccgagagcaagagcaacggcgaggagggctacggcagaagcctgagatacgccgccctgaacctggccgccctgcactgcagattcggccactaccagcaggccgagctggccctgcaggaggccatcagaatcgcccaggagagcaacgaccacgtgtgcctgcagcactgcctgagctggctgtacgtgctgggccagaagagaagcgacagctacgtgctgctggagcacagcgtgaagaaggccgtgcacttcggcctgcccagagccttcgccggcaagaccgccaacaagctgatggacgccctgaaggacagcgacctgctgcactggaagcacagcctgagcgagctgatcgacatcagcatcgcccagaagaccgccatctggagactgtacggcagaagcaccatggccctgcagcaggcccagatgctgctgagcatgaacagcctggaggccgtgaacgccggcgtgcagcagaacaacaccgagagcttcgccgtggccctgtgccacctggccgagctgcacgccgagcagggctgcttcgccgccgccagcgaggtgctgaagcacctgaaggagagattcccccccaacagccagcacgcccagctgtggatgctgtgcgaccagaagatccagttcgacagagccatgaacgacggcaagtaccacctggccgacagcctggtgaccggcatcaccgccctgaacagcatcgagggcgtgtacagaaaggccgtggtgctgcaggcccagaaccagatgagcgaggcccacaagctgctgcagaagctgctggtgcactgccagaagctgaagaacaccgagatggtgatcagcgtgctgctgagcgtggccgagctgtactggagaagcagcagccccaccatcgccctgcccatgctgctgcaggccctggccctgagcaaggagtacagactgcagtacctggccagcgagaccgtgctgaacctggccttcgcccagctgatcctgggcatccccgagcaggccctgagcctgctgcacatggccatcgagcccatcctggccgacggcgccatcctggacaagggcagagccatgttcctggtggccaagtgccaggtggccagcgccgccagctacgaccagcccaagaaggccgaggccctggaggccgccatcgagaacctgaacgaggccaagaactacttcgccaaggtggactgcaaggagagaatcagagacgtggtgtacttccaggccagactgtaccacaccctgggcaagacccaggagagaaacagatgcgccatgctgttcagacagctgcaccaggagctgcccagccacggcgtgcccctgatcaaccacctgtag

SEQ ID NO: 272789 - DNA, 2229 bp, Artificial Sequence
  derived and/or modified sequence
atggccagcgtgcacgagagcctgtacttcaaccccatgatgaccaacggcgtggtgcacgccaacgtgttcggcatcaaggactgggtgaccccctacaagatcgccgtgctggtgctgctgaacgagatgagcagaaccggcgagggcgccgtgagcctgatggagagaagaagactgaaccagctgctgctgcccctgctgcagggccccgacatcaccctgagcaagctgtacaagctgatcgaggagagctgcccccagctggccaacagcgtgcagatcagaatcaagctgatggccgagggcgagctgaaggacatggagcagttcttcgacgacctgagcgacagcttcagcggcaccgagcccgaggtgcacaagaccagcgtggtgggcctgttcctgagacacatgatcctggcctacagcaagctgagcttcagccaggtgttcaagctgtacaccgccctgcagcagtacttccagaacggcgagaagaagaccgtggaggacgccgacatggagctgaccagcagagacgagggcgagagaaagatggagaaggaggagctggacgtgagcgtgagagaggaggaggtgagctgcagcggccccctgagccagaagcaggccgagttcttcctgagccagcaggccagcctgctgaagaacgacgagaccaaggccctgacccccgccagcctgcagaaggagctgaacaacctgctgaagttcaaccccgacttcgccgaggcccactacctgagctacctgaacaacctgagagtgcaggacgtgttcagcagcacccacagcctgctgcactacttcgacagactgatcctgaccggcgccgagagcaagagcaacggcgaggagggctacggcagaagcctgagatacgccgccctgaacctggccgccctgcactgcagattcggccactaccagcaggccgagctggccctgcaggaggccatcagaatcgcccaggagagcaacgaccacgtgtgcctgcagcactgcctgagctggctgtacgtgctgggccagaagagaagcgacagctacgtgctgctggagcacagcgtgaagaaggccgtgcacttcggcctgcccagagccttcgccggcaagaccgccaacaagctgatggacgccctgaaggacagcgacctgctgcactggaagcacagcctgagcgagctgatcgacatcagcatcgcccagaagaccgccatctggagactgtacggcagaagcaccatggccctgcagcaggcccagatgctgctgagcatgaacagcctggaggccgtgaacgccggcgtgcagcagaacaacaccgagagcttcgccgtggccctgtgccacctggccgagctgcacgccgagcagggctgcttcgccgccgccagcgaggtgctgaagcacctgaaggagagattcccccccaacagccagcacgcccagctgtggatgctgtgcgaccagaagatccagttcgacagagccatgaacgacggcaagtaccacctggccgacagcctggtgaccggcatcaccgccctgaacagcatcgagggcgtgtacagaaaggccgtggtgctgcaggcccagaaccagatgagcgaggcccacaagctgctgcagaagctgctggtgcactgccagaagctgaagaacaccgagatggtgatcagcgtgctgctgagcgtggccgagctgtactggagaagcagcagccccaccatcgccctgcccatgctgctgcaggccctggccctgagcaaggagtacagactgcagtacctggccagcgagaccgtgctgaacctggccttcgcccagctgatcctgggcatccccgagcaggccctgagcctgctgcacatggccatcgagcccatcctggccgacggcgccatcctggacaagggcagagccatgttcctggtggccaagtgccaggtggccagcgccgccagctacgaccagcccaagaaggccgaggccctggaggccgccatcgagaacctgaacgaggccaagaactacttcgccaaggtggactgcaaggagagaatcagagacgtggtgtacttccaggccagactgtaccacaccctgggcaagacccaggagagaaacagatgcgccatgctgttcagacagctgcaccaggagctgcccagccacggcgtgcccctgatcaaccacctgtag

SEQ ID NO: 272790 - DNA, 527 bp, Artificial Sequence
  derived and/or modified sequence
aacgagtaaggcggggaacaagggaggagtaaggggcgtggattcttcgtcccgccccttcttaaggaggcgggcagggagtaccgcatcggcggcgggcgagacctgcggaaggacgtgatagttggccaatcagagttcatcacgaagatgcctctaatggaggagtttctgagcagcacccctggcccagtggctttgaaagggagctcaaaccagagactatttcaagccctggatatcatatcctgagggccacaggagaagagaacatggctgtgagtttggatgacgacgtgccgctcatcctgaccttggatgagggtggcagtgccccactggctccctccaacggcctgggccaagaagagctacctagcaaaaatggcggcagctatgccatccacgactcccaggcccccagtctcagctctgggggtgagagttccccctccagccccgcacacaactgggagatgaattaccaagaggcagcaatctacctccaggaaggcgagaacaacgac

SEQ ID NO: 272791 - DNA, 570 bp, Artificial Sequence
  derived and/or modified sequence
gagaggacggtaggcggtggataggagagctggcgcagctgccctggtggcagtggctgaagtggcggcggcttcggcggctgcggcggctgcaacagcttcgggctcggggttttggcggcggcgccggcgggctaggctgcgcgaagatgcctctaatggaggagtttctgagcagcacccctggcccagtggctttgaaagggagctcaaaccagagactatttcaagccctggatatcatatcctgagggccacaggagaagagaacatggctgtgagtttggatgacgacgtgccgctcatcctgaccttggatgagggtggcagtgccccactggctccctccaacggcctgggccaagaagagctacctagcaaaagacgctgctgcatgctgtgctccagcaaacagaaaccttggattccctgcagggtcatttccgatgtggcgtgcaaagcagccagctgtttcgagggagcgtctgggccctgtgacatcagcatgtgggagtgttaccgtgtgtgcaaacagatggcggcagctatgccatccacgactcccaggcc

SEQ ID NO: 272792 - protein, 270 aa, Artificial Sequence
  derived and/or modified sequence
MGNTSSERAALERHGGHKTPRRDSSGGTKDGDRPKILMDSPEDADLFHSEEIKAPEKEEFLAWQHDLEVNDKAPAQARPTVFRWTGGGKEVYLSGSFNNWSKLPLTRSHNNFVAILDLPEGEHQYKFFVDGQWTHDPSEPIVTSQLGTVNNIIQVKKTDFEVFDALMVDSQKCSDVSELSSSPPGPYHQEPYVCKPEERFRAPPILPPHLLQVILNKDTGISCDPALLPEPNHVMLNHLYALSIKDGVMVLSATHRYKKKYVTTLLYKPI

SEQ ID NO: 272793 - protein, 233 aa, Artificial Sequence
  derived and/or modified sequence
MDSPEDADLFHSEEIKAPEKEEFLAWQHDLEVNDKAPAQARPTVFRWTGGGKEVYLSGSFNNWSKLPLTRSHNNFVAILDLPEGEHQYKFFVDGQWTHDPSEPIVTSQLGTVNNIIQVKKTDFEVFDALMVDSQKCSDVSELSSSPPGPYHQEPYVCKPEERFRAPPILPPHLLQVILNKDTGISCDPALLPEPNHVMLNHLYALSIKDGVMVLSATHRYKKKYVTTLLYKPI

SEQ ID NO: 272794 - DNA, 702 bp, Artificial Sequence
  derived and/or modified sequence
atggacagccccgaggacgccgacctgttccacagcgaggagatcaaggcccccgagaaggaggagttcctggcctggcagcacgacctggaggtgaacgacaaggcccccgcccaggccagacccaccgtgttcagatggaccggcggcggcaaggaggtgtacctgagcggcagcttcaacaactggagcaagctgcccctgaccagaagccacaacaacttcgtggccatcctggacctgcccgagggcgagcaccagtacaagttcttcgtggacggccagtggacccacgaccccagcgagcccatcgtgaccagccagctgggcaccgtgaacaacatcatccaggtgaagaagaccgacttcgaggtgttcgacgccctgatggtggacagccagaagtgcagcgacgtgagcgagctgagcagcagcccccccggcccctaccaccaggagccctacgtgtgcaagcccgaggagagattcagagccccccccatcctgcccccccacctgctgcaggtgatcctgaacaaggacaccggcatcagctgcgaccccgccctgctgcccgagcccaaccacgtgatgctgaaccacctgtacgccctgagcatcaaggacggcgtgatggtgctgagcgccacccacagatacaagaagaagtacgtgaccaccctgctgtacaagcccatctag

SEQ ID NO: 272795 - DNA, 813 bp, Artificial Sequence
  derived and/or modified sequence
atgggcaacaccagcagcgagagagccgccctggagagacacggcggccacaagacccccagaagagacagcagcggcggcaccaaggacggcgacagacccaagatcctgatggacagccccgaggacgccgacctgttccacagcgaggagatcaaggcccccgagaaggaggagttcctggcctggcagcacgacctggaggtgaacgacaaggcccccgcccaggccagacccaccgtgttcagatggaccggcggcggcaaggaggtgtacctgagcggcagcttcaacaactggagcaagctgcccctgaccagaagccacaacaacttcgtggccatcctggacctgcccgagggcgagcaccagtacaagttcttcgtggacggccagtggacccacgaccccagcgagcccatcgtgaccagccagctgggcaccgtgaacaacatcatccaggtgaagaagaccgacttcgaggtgttcgacgccctgatggtggacagccagaagtgcagcgacgtgagcgagctgagcagcagcccccccggcccctaccaccaggagccctacgtgtgcaagcccgaggagagattcagagccccccccatcctgcccccccacctgctgcaggtgatcctgaacaaggacaccggcatcagctgcgaccccgccctgctgcccgagcccaaccacgtgatgctgaaccacctgtacgccctgagcatcaaggacggcgtgatggtgctgagcgccacccacagatacaagaagaagtacgtgaccaccctgctgtacaagcccatctag

SEQ ID NO: 272796 - DNA, 702 bp, Artificial Sequence
  derived and/or modified sequence
atggactcaccagaggacgcggacctgttccacagcgaggagatcaaggcgccggaaaaagaggagttcctagcctggcagcacgaccttgaagtgaacgataaagctcctgcccaggccaggccaactgtcttcagatggacaggcggcggaaaagaggtatatctgtcaggttcgttcaataactggagcaaactccccctgacccgcagtcataacaattttgtggccatactggatctgcccgagggcgaacatcagtataaattctttgtcgacggacagtggacccatgatccttcagagcccatcgtgacgagtcagttgggtacagtaaacaatattatacaagtgaaaaaaaccgattttgaggtgttcgatgccctgatggtggattcccagaagtgctccgacgtatccgaattgtcctccagcccccctggcccttatcatcaggagccgtatgtgtgtaaacccgaggaacgattccgcgcaccacctatactcccaccccacctgctgcaggtaattctgaataaggacacgggaatctcatgcgatccggccctcctacctgagccaaaccatgttatgctgaaccacctgtatgcgctgtccataaaagatggtgttatggtgctgagcgctacgcaccgctataaaaagaagtacgttacaactctattgtacaagccaatctag

SEQ ID NO: 272797 - DNA, 813 bp, Artificial Sequence
  derived and/or modified sequence
atgggcaacacttcgtcagaaagagccgcgctggagagacacggcggacacaagaccccacgacgggattcgtccggcggaaccaaagacggtgaccgccccaagatcctgatggactctccggaggatgcggacttgttccacagcgaagagattaaggcacccgaaaaggaagagttcctcgcctggcagcacgacctagaagtaaacgataaggctccggcccaggccaggccgacggttttccgctggacaggcgggggaaaagaagtctacctctcaggatcttttaacaactggtccaagctgccactaactcgaagtcataataactttgttgcgatattggaccttccagagggtgaacaccaatataagtttttcgtggacggccagtggactcacgacccgtccgaacccatcgttacatcccaactgggcactgtgaataatatcatacaggtcaaaaaaactgatttcgaagtctttgatgccttaatggtggactctcagaagtgtagtgacgtgtccgagctctccagttcgcccccaggcccttaccaccaggagccttatgtctgcaaacctgaagaacgattccgtgcccctcctatcttaccccctcacctgctgcaggtgatcctgaataaagatacgggtatcagctgcgacccggccctgcttcccgaaccaaaccacgttatgctcaatcacctgtatgccttgtccatcaaggacggcgtgatggtcctttctgcaacacatcgctacaaaaaaaagtacgtcaccactctcctctacaagcctatttag

SEQ ID NO: 272798 - DNA, 702 bp, Artificial Sequence
  derived and/or modified sequence
atggacagcccagaagatgctgacctcttccacagcgaggagatcaaggcccctgagaaggaggagttcctggcctggcagcacgacctggaggtgaatgacaaggccccagcccaggcccggcccaccgtcttccgctggacaggaggcggcaaggaggtgtacctgagcggcagcttcaacaactggagcaagctgcccctgaccaggagccacaacaactttgtggccatcctggacctgcctgagggggagcaccagtacaagttctttgtggatggccagtggacccatgaccccagcgagcccatcgtgaccagccagctgggcaccgtgaacaacatcatccaggtgaagaagacagactttgaggtgtttgatgccctgatggtggacagccagaagtgcagtgatgtgtctgagctgagcagcagccccccaggcccctaccaccaggagccctacgtgtgcaagccagaggagcgcttccgggccccacccatcctgcccccccacctgctgcaggtgatcctgaacaaggacaccggcatcagctgtgaccctgccctgctgcctgagcccaaccacgtgatgctgaaccacctgtatgccctgagcatcaaggatggagtgatggtgctgagcgccacccaccgctacaagaagaagtatgtgaccaccctgctgtacaagcccatctag

SEQ ID NO: 272799 - DNA, 813 bp, Artificial Sequence
  derived and/or modified sequence
atgggcaacaccagcagcgagagagctgccctggagcggcacggcggccacaagaccccaagaagagacagcagcggcggcaccaaggatggagaccggcccaagatcctgatggacagcccagaagatgctgacctcttccacagcgaggagatcaaggcccctgagaaggaggagttcctggcctggcagcacgacctggaggtgaatgacaaggccccagcccaggcccggcccaccgtcttccgctggacaggaggcggcaaggaggtgtacctgagcggcagcttcaacaactggagcaagctgcccctgaccaggagccacaacaactttgtggccatcctggacctgcctgagggggagcaccagtacaagttctttgtggatggccagtggacccatgaccccagcgagcccatcgtgaccagccagctgggcaccgtgaacaacatcatccaggtgaagaagacagactttgaggtgtttgatgccctgatggtggacagccagaagtgcagtgatgtgtctgagctgagcagcagccccccaggcccctaccaccaggagccctacgtgtgcaagccagaggagcgcttccgggccccacccatcctgcccccccacctgctgcaggtgatcctgaacaaggacaccggcatcagctgtgaccctgccctgctgcctgagcccaaccacgtgatgctgaaccacctgtatgccctgagcatcaaggatggagtgatggtgctgagcgccacccaccgctacaagaagaagtatgtgaccaccctgctgtacaagcccatctag

SEQ ID NO: 272800 - DNA, 702 bp, Artificial Sequence
  derived and/or modified sequence
atggacagccccgaggacgccgacctgttccacagcgaggagatcaaggcgcccgagaaggaggaatttcttgcttggcagcatgacctggaagtcaacgataaggcgccagctcaggctcgtcccactgtttttagatggacaggaggaggaaaggaggtgtatctttctgggtcattcaataactggagtaagctcccattaacaagaagtcataacaactttgtcgccattctcgacctgcccgagggagagcaccagtataagttcttcgttgacggccagtggactcacgaccccagtgaaccgatcgttacatcacagctgggtaccgtgaataatattatccaggtcaagaagaccgattttgaagtatttgacgcgctgatggtcgacagccagaagtgttcggacgtctctgagctatccagcagcccaccaggcccatatcaccaggagccttacgtttgcaagccggaagaacgcttccgcgccccacccatacttccccctcacctgcttcaggtaattctcaacaaggatactggaatcagctgtgaccctgccctcctgcctgagcctaatcacgttatgttgaaccacctgtacgccctgagtattaaagatggcgtgatggtgctctccgcgacccaccggtataagaaaaaatacgtgactaccctcttgtacaagcccatttag

SEQ ID NO: 272801 - DNA, 813 bp, Artificial Sequence
  derived and/or modified sequence
atgggcaacaccagcagcgagcgggccgccctggagcggcacggcggtcacaaaacaccaagacgggatagctcagggggaacgaaagacggcgaccgaccaaagattctgatggacagcccagaggacgctgacctcttccatagtgaggaaattaaggcgccagagaaggaggagttcttggcttggcagcacgacctcgaggtcaacgataaagctcccgcacaggcccgcccaaccgtcttccggtggacagggggcggtaaagaagtgtacctttcaggatcctttaataattggagcaagctccccctgacccggtcacacaacaatttcgtggcaatcctcgacctgcccgagggtgagcaccagtacaaattctttgtcgatggccaatggacacacgatccaagcgaacccatcgtgacatctcaactcggcaccgtgaacaacatcattcaggtgaaaaaaacggacttcgaggtgttcgatgcactgatggttgacagccagaagtgctctgacgtatcagagctcagttcctcgccgcccgggccctatcatcaggaaccctatgtgtgcaaaccagaagagagattcagagccccccccattctcccaccacacctcctgcaagtgatactcaacaaagatactggaatcagctgtgaccctgccctactgcctgagcccaatcatgttatgctgaaccacctttacgccctgtctattaaggatggggtgatggtgttgtctgctacccatcggtacaagaagaagtacgtcaccacacttctgtataaacccatttag

SEQ ID NO: 272802 - DNA, 702 bp, Artificial Sequence
  derived and/or modified sequence
atggatagccctgaggatgccgatctgttccacagtgaggaaatcaaggctcccgagaaggaggagttcctggcttggcaacacgacctggaggttaacgataaagcccctgcacaggccagaccaaccgtatttaggtggacggggggaggcaaggaagtgtatttgagtggcagcttcaacaactggagcaagctgcccctgacaaggagtcataacaacttcgtagccattttggacctgcctgagggggagcatcagtacaagttctttgttgacggacagtggacccacgatccatccgagcccatagtgacaagccagcttgggactgttaacaacatcatccaagttaaaaagactgactttgaagtttttgacgctctcatggtggatagccagaagtgttcagacgtctcagagttgtcatcctcgccccctggcccttaccaccaggagccatatgtgtgcaaaccagaggaacgttttcgcgcacctcccatcctgccgcctcacctgctgcaggtaatcttgaacaaggatacaggcatctcatgtgacccagcattgctaccggagcccaaccatgttatgctcaaccacttatatgctctgagtataaaagacggagtcatggttttatccgccacacaccgctataagaaaaagtacgtcacaaccctgctttacaaaccaatctag

SEQ ID NO: 272803 - DNA, 813 bp, Artificial Sequence
  derived and/or modified sequence
atgggaaatacctccagcgagcgcgctgcattagagcggcacggtgggcataaaacacctagacgggatagcagtggcggaaccaaggacggcgacaggcctaaaatcttaatggactctccagaggacgccgacctgttccatagcgaagagatcaaagcccctgaaaaagaggagttcctggcatggcaacatgatctggaagtgaatgataaagctccagcccaggcgaggcccaccgttttccggtggactggagggggtaaggaggtctacctaagcggctcgtttaacaattggtccaagttgccacttacacggtctcataacaattttgtggcaatcctggacctgcccgagggagagcaccagtacaaattcttcgtggacggacagtggacccatgacccgtctgaacctattgtgacttctcaactgggtaccgtgaataacatcatccaggttaagaaaactgattttgaggtcttcgacgccctcatggtagatagtcagaagtgttcagatgtgtcagaactgtccagttcccctcccggaccttatcatcaggaaccttacgtgtgtaaaccagaggaacggttccgtgcgccacctatcctccctcctcaccttcttcaggtgatattgaacaaggacaccggcatctcctgtgatccggcattgctgcctgagccaaaccatgtgatgctgaatcatctgtatgcccttagcatcaaggacggcgtgatggttttaagcgccacacacaggtataagaagaagtatgtcacaacactgttgtataagccaatctag

SEQ ID NO: 272804 - DNA, 2610 bp, Artificial Sequence
  derived and/or modified sequence
agcgcctcgtcctgggcctggccctgggcggccggctgctgactgcgactgcgcgctccgaggcctgcagagacggcccggggcacctgttaccgcaccgctcaagaccggaagcggaaatggaatcgagatagcctcgcgcgtttagctggccgccgccacctccacgccctaggccgggccgacttacggagtcgccggaagcggaagtcgctgaggggtggtgaagcggttgggaaagtgtcggtttatcttcgcgccccttgcgttcttgccgcggcttgcctgggcaggtaaagcgcgattgcgagagctcggcaaccctgccgactcagccggaaccggctcccggcccgaggggcgtggtgtcctggtgctccgactccttccgcaggctccttgggacccgcggttccgggagtcccttgctcagggtccctttcctgcagtgaggcgccgtccgccttccctgtgtccccgcagacccccatcatgggcaataccagcagtgagcgcgccgcgctggagcggcatggtggccataagacgccccggagggacagctcggggggcaccaaggacggggacaggcccaagatcctgatggacagccccgaagacgccgacctcttccactccgaggaaatcaaggcaccagagaaggaggaattcctggcctggcagcatgatctggaagtgaatgataaagctcccgcccaggctcggccaacggtgtttcgatggacggggggcggaaaggaagtttacttatctgggtccttcaacaactggagtaaacttcccctcaccagaagccacaataactttgtagccatcctggatctgccggaaggagagcatcagtacaagttctttgtggatggtcagtggacgcacgacccttccgagcccatagtaaccagccagcttggcacagttaacaacatcattcaagtgaagaaaactgactttgaagtatttgatgctttaatggtggattcccaaaagtgctccgatgtgtctgagctgtccagttctcccccaggaccctaccatcaggagccctacgtctgcaaacccgaagagcgctttcgggcaccccctattctccccccacatctcctccaggtcatcctgaacaaggacacggggatttcctgtgatccagctttgcttcctgagcccaatcacgtcatgctgaaccacctatacgcgctgtctatcaaggatggagtgatggtgctcagcgcaacccaccggtacaagaagaagtacgtcaccaccttgttatacaagcccatatgaagagctgggggcggatggtggcccaggagacagcacaccaccaggctccacacgtgcatgctttccccaagagggaatggactgtacattgctcatttcacactcttcagaagacatttcatacctgccctggtcctgcttgaaggtttgtccaggcagagcagctcctgcagcgcctcggtctgtgacagtcctcctagcacccccatggctttgagcctcggggactcatcaagtccaagaaaagagggaggggtggcagaggatctgcagccctggccccgcggtgcatgaggctgggtgcagttctaaacctacattctcgatttttcttaagccaaaaatgaatgctaactcctttgccagtaaaattctgggaaacagggactgaggccacacatcatttccagtcatctgtgtgtttttaaggccagccacttgtccctgttgaggcctggctatggaactaaatacagtgttggtcttgcctgtccttcaaaatcaacaacagattgtctctcggctccagggaggtgtcatttctatagaaattagaagctttctgatttctagatgaggttttacaattgtttcttacagtcatgtgcactaagtactctttttgtaagcagaggtggctggctctgcagccttaaggccattttttaagtcaccacgtctagaagtcacatgaactctgctcagcaataatctgttctcagaacagacttttcaacctgctgccggatttctccattcagctggatgatcctcaggactgaccagttagctggcaggttgtccagctttttattccagtcataataggtgacagtgttaaccgtgaaaacttgagaggcactctgccctcttccctataaaatcacacagcgtgattttacaaggtcccgtggcaccttgctcaggacctctgcccctagttagcaagactgcagcagttgctgttgcttattctgaaaggaatgtagaacttgacagcagccttctgagtctgggtcaggaagatgtcctttggaccaaagcagacttctttatacgcagctcagtttcccgggagtcgccacagatgtacccactagcccaggttgctgtgagtcagcggaagctcccgttatgccctttgctcctggtgggagagggaggagtgagctccctgggttccagtatttacttggtatacctgagtttgggggtacccttttttgtgacttttcaaaacagtgaattactgtcaccttgatggacaagtttcaataaaactttgtaaaaataattggacatgtg

SEQ ID NO: 272805 - DNA, 1011 bp, Artificial Sequence
  derived and/or modified sequence
atcttcgcgccccttgcgttcttgccgcggcttgcctgggcaggtaaagcgcgattgcgagagctcggcaaccctgccgactcagccggaaccggctcccggcccgaggggcgtggtgtcctggtgctccgactccttccgcaggctccttgggacccgcggttccgggagtcccttgctcagggtccctttcctgcagtgaggcgccgtccgccttccctgtgtccccgcagacccccatcatgatggacagccccgaagacgccgacctcttccactccgaggaaatcaaggcaccagagaaggaggaattcctggcctggcagcatgatctggaagtgaatgataaagctcccgcccaggctcggccaacggtgtttcgatggacggggggcggaaaggaagtttacttatctgggtccttcaacaactggagtaaacttcccctcaccagaagccacaataactttgtagccatcctggatctgccggaaggagagcatcagtacaagttctttgtggatggtcagtggacgcacgacccttccgagcccatagtaaccagccagcttggcacagttaacaacatcattcaagtgaagaaaactgactttgaagtatttgatgctttaatggtggattcccaaaagtgctccgatgtgtctgagctgtccagttctcccccaggaccctaccatcaggagccctacgtctgcaaacccgaagagcgctttcgggcaccccctattctccccccacatctcctccaggtcatcctgaacaaggacacggggatttcctgtgatccagctttgcttcctgagcccaatcacgtcatgctgaaccacctatacgcgctgtctatcaaggatggagtgatggtgctcagcgcaacccaccggtacaagaagaagtacgtcaccaccttgttatacaagcccatatgaagagctgggggcggatggtggcccaggagacagcacaccaccaggctccacacgtgcatgcttt

SEQ ID NO: 272806 - DNA, 2303 bp, Artificial Sequence
  derived and/or modified sequence
aagcggaaatggaatcgagatagcctcgcgcgtttagctggccgccgccacctccacgccctaggccgggccgacttacggagtcgccggaagcggaagtcgctgaggggtggtgaagcggttgggaaagtgtcggtttatcttcgcgccccttgcgttcttgccgcggcttgcctgggcagacccccatcatgggcaataccagcagtgagcgcgccgcgctggagcggcatggtggccataagacgccccggagggacagctcggggggcaccaaggacggggacaggcccaagatcctgatggacagccccgaagacgccgacctcttccactccgaggaaatcaaggcaccagagaaggaggaattcctggcctggcagcatgatctggaagtgaatgataaagctcccgcccaggctcggccaacggtgtttcgatggacggggggcggaaaggaagtttacttatctgggtccttcaacaactggagtaaacttcccctcaccagaagccacaataactttgtagccatcctggatctgccggaaggagagcatcagtacaagttctttgtggatggtcagtggacgcacgacccttccgagcccatagtaaccagccagcttggcacagttaacaacatcattcaagtgaagaaaactgactttgaagtatttgatgctttaatggtggattcccaaaagtgctccgatgtgtctgagctgtccagttctcccccaggaccctaccatcaggagccctacgtctgcaaacccgaagagcgctttcgggcaccccctattctccccccacatctcctccaggtcatcctgaacaaggacacggggatttcctgtgatccagctttgcttcctgagcccaatcacgtcatgctgaaccacctatacgcgctgtctatcaaggatggagtgatggtgctcagcgcaacccaccggtacaagaagaagtacgtcaccaccttgttatacaagcccatatgaagagctgggggcggatggtggcccaggagacagcacaccaccaggctccacacgtgcatgctttccccaagagggaatggactgtacattgctcatttcacactcttcagaagacatttcatacctgccctggtcctgcttgaaggtttgtccaggcagagcagctcctgcagcgcctcggtctgtgacagtcctcctagcacccccatggctttgagcctcggggactcatcaagtccaagaaaagagggaggggtggcagaggatctgcagccctggccccgcggtgcatgaggctgggtgcagttctaaacctacattctcgatttttcttaagccaaaaatgaatgctaactcctttgccagtaaaattctgggaaacagggactgaggccacacatcatttccagtcatctgtgtgtttttaaggccagccacttgtccctgttgaggcctggctatggaactaaatacagtgttggtcttgcctgtccttcaaaatcaacaacagattgtctctcggctccagggaggtgtcatttctatagaaattagaagctttctgatttctagatgaggttttacaattgtttcttacagtcatgtgcactaagtactctttttgtaagcagaggtggctggctctgcagccttaaggccattttttaagtcaccacgtctagaagtcacatgaactctgctcagcaataatctgttctcagaacagacttttcaacctgctgccggatttctccattcagctggatgatcctcaggactgaccagttagctggcaggttgtccagctttttattccagtcataataggtgacagtgttaaccgtgaaaacttgagaggcactctgccctcttccctataaaatcacacagcgtgattttacaaggtcccgtggcaccttgctcaggacctctgcccctagttagcaagactgcagcagttgctgttgcttattctgaaaggaatgtagaacttgacagcagccttctgagtctgggtcaggaagatgtcctttggaccaaagcagacttctttatacgcagctcagtttcccgggagtcgccacagatgtacccactagcccaggttgctgtgagtcagcggaagctcccgttatgccctttgctcctggtgggagagggaggagtgagctccctgggttccagtatttacttggtatacctgagtttgggggtacccttttttgtgacttttcaaaacagtgaattactgtcaccttgatggacaagtttcaataaaactttgtaaaaataattgga

SEQ ID NO: 272807 - DNA, 813 bp, Artificial Sequence
  derived and/or modified sequence
atgggcaacacgagttcagagagggccgccttagaaaggcacggcggccacaagacaccccggagggattcctccggagggactaaggatggcgatcgcccaaagatactgatggattcccctgaggatgcggacctgttccatagcgaggagattaaggccccagagaaagaggaattcctggcgtggcaacatgacttggaagttaacgacaaggccccagcccaggccaggcctactgtgttccgctggacgggaggtggaaaggaggtgtatctaagtgggtccttcaataattggtctaagttaccgctgacacgaagtcataacaacttcgtcgccatattggatctgcctgaaggcgaacaccagtataaatttttcgtcgatggccagtggacccacgacccctctgaacccatagtcacctcccagctcgggaccgtgaataacatcattcaggttaagaagacagacttcgaggtcttcgacgcacttatggttgacagtcagaagtgcagcgacgtgtctgagctgtcctcttctcccccagggccttaccaccaggaaccttacgtctgtaaaccagaggagcgattccgggctccccccattctgcccccgcaccttctccaggtgatccttaataaggacacagggatttcctgcgaccctgcactgctgcccgagcccaaccacgttatgcttaatcacttatacgccctctctattaaggacggagtgatggttctgtcagccacgcaccggtacaaaaaaaagtatgttaccaccttactgtataagcccatttag

SEQ ID NO: 272808 - DNA, 813 bp, Artificial Sequence
  derived and/or modified sequence
atgggcaacaccagcagcgagcgggccgccctggagcggcacggcggacataaaacgcctcgaagggatagtagtggcggcactaaagacggggacaggcccaaaatcctgatggattccccagaggatgcagacctgtttcattccgaagaaattaaggctccggaaaaggaagagtttctggcctggcagcacgatctggaggtgaatgataaggcgcccgcacaggcacggcctactgtgtttagatggactggtggagggaaggaggtatatctgagcggcagctttaacaattggtcaaagctgcctctcaccaggagccacaacaacttcgtagctattttggacctgcccgagggcgagcaccaatataagtttttcgtcgatgggcagtggactcatgacccttccgagcccatcgtgacatcacagttgggtaccgttaacaacatcatccaggtgaaaaagaccgatttcgaggtttttgatgcgctcatggtcgacagtcaaaagtgctcagacgtgtccgagctgagttcttcaccccccggaccataccatcaagagccctacgtttgcaagcccgaagagcgcttccgggcaccccctatcttgcctccccatttgctgcaagtaattctgaataaggacacaggaatatcctgtgatccagccctgctgccggagcccaaccacgtcatgctcaaccacttgtatgccctgtcaatcaaggacggcgtcatggtcctcagcgctacgcatagatacaagaagaagtacgtcacgacacttttatacaaacctatatag

SEQ ID NO: 272809 - DNA, 813 bp, Artificial Sequence
  derived and/or modified sequence
atggggaatacctctagtgagagggctgcattggaaaggcacggcggtcataaaacacctagaagagactcatctggcggaaccaaagacggggatagacctaagatcttaatggattcccctgaggacgctgacctcttccatagcgaagagattaaggcacctgagaaagaggaatttctcgcctggcagcatgacctcgaagtgaacgataaggcccctgcccaggctcgccctacagtctttcgctggacagggggtggcaaagaggtctacctctcgggttcattcaataattggagtaagctgcctcttacccgctcacacaataattttgttgcgatcctagatctgcctgaaggcgaacaccagtacaaatttttcgtggacggacagtggacgcatgatccaagtgagccaatcgtgacatcacagctcgggacagtgaacaacatcatccaggtcaagaagaccgattttgaggtgtttgacgcgttgatggttgactctcagaagtgcagcgacgtgtctgagttatcatcaagccctcccggaccttaccaccaggaaccatacgtgtgtaaacccgaagaacgatttcgggcaccaccaatcctaccaccacacctgctccaggtcatcctgaataaagacacaggaattagctgcgaccccgctcttctccctgagcctaaccacgtgatgctcaatcacctctacgctctctccatcaaggacggggtgatggttcttagcgccacacaccgctataagaagaagtatgttaccacactactgtacaaaccaatctag

SEQ ID NO: 272810 - DNA, 1818 bp, Artificial Sequence
  derived and/or modified sequence
atggacgacctggacgccctgctggccgacctggagagcaccaccagccacatcagcaagagacccgtgttcctgagcgaggagaccccctacagctaccccaccggcaaccacacctaccaggagatcgccgtgcccccccccgtgccccccccccccagcagcgaggccctgaacggcaccatcctggaccccctggaccagtggcagcccagcagcagcagattcatccaccagcagccccagagcagcagccccgtgtacggcagcagcgccaagaccagcagcgtgagcaacccccaggacagcgtgggcagcccctgcagcagagtgggcgaggaggagcacgtgtacagcttccccaacaagcagaagagcgccgagcccagccccaccgtgatgagcaccagcctgggcagcaacctgagcgagctggacagactgctgctggagctgaacgccgtgcagcacaacccccccggcttccccgccgacgaggccaacagcagcccccccctgcccggcgccctgagccccctgtacggcgtgcccgagaccaacagccccctgggcggcaaggccggccccctgaccaaggagaagcccaagagaaacggcggcagaggcctggaggacgtgagacccagcgtggagagcctgctggacgagctggagagcagcgtgcccagccccgtgcccgccatcaccgtgaaccagggcgagatgagcagcccccagagagtgaccagcacccagcagcagaccagaatcagcgccagcagcgccaccagagagctggacgagctgatggccagcctgagcgacttcaagggcagctggcccctggaggaggtggtgctgctggtgagcatcagcagcagcgtgcaggagggcgagaagtacccccacccctgcgccgccagacacagaacccccagcctgagaagccccgaccagccccccccctgcccccagttcatggcccagggcaagaccggcagcagcagcccccccggcggcccccccaagcccggcagccagctggacagcatgctgggcagcctgcagagcgacctgaacaagctgggcgtggccaccgtggccaagggcgtgtgcggcgcctgcaagaagcccatcgccggccaggtggtgaccgccatgggcaagacctggcaccccgagcacttcgtgtgcacccactgccaggaggagatcggcagcagaaacttcttcgagagagacggccagccctactgcgagaaggactaccacaacctgttcagccccagatgctactactgcaacggccccatcctggacaaggtggtgaccgccctggacagaacctggcaccccgagcacttcttctgcgcccagtgcggcgccttcttcggccccgagggcttccacgagaaggacggcaaggcctactgcagaaaggactacttcgacatgttcgcccccaagtgcggcggctgcgccagagccatcctggagaactacatcagcgccctgaacaccctgtggcaccccgagtgcttcgtgtgcagagagtgcttcacccccttcgtgaacggcagcttcttcgagcacgacggccagccctactgcgaggtgcactaccacgagagaagaggcagcctgtgcagcggctgccagaagcccatcaccggcagatgcatcaccgccatggccaagaagttccaccccgagcacttcgtgtgcgccttctgcctgaagcagctgaacaagggcaccttcaaggagcagaacgacaagccctactgccagaactgcttcctgaagctgttctgctag

SEQ ID NO: 272811 - DNA, 1818 bp, Artificial Sequence
  derived and/or modified sequence
atggatgacctagacgccctgctcgctgacctggaatcaactacgtctcatatctccaagcgtcctgtattcctctctgaggagacgccatactcctaccctaccgggaatcacacctatcaggagatcgccgtacccccacccgtgcccccgcctccctcatcggaggccctgaatggaactatcttggacccactcgatcagtggcagccctccagctcccgtttcatccaccagcagcctcagtctagttccccggtgtacgggagctcagccaagacaagctccgtttccaatccccaggactcagttggatccccttgtagcagagtgggcgaggaggagcacgtgtattctttccccaacaagcagaaatctgcagaaccatcccccaccgttatgagcacgagcctcggctcgaacctgtcagaactggatcggctactgctggagctgaatgccgtacagcacaacccccccggtttccctgccgatgaggcgaattcctctccaccgctgcccggagccctgagccctctgtatggagtgccagagaccaattctccactgggcgggaaagccggacccctgactaaggagaaacccaagcgcaatgggggccgaggcctcgaggacgtccggcctagtgtggagagcttactggatgagctggagtcttccgttccatcgccggtgcccgccatcaccgtgaaccagggggagatgagctctccacagagagtgacgagcacacagcagcaaacgagaatctccgcctcttctgcgaccagagagctagacgaacttatggcctcgctaagcgattttaagggaagctggcctctggaggaagtggtgttactcgtttctattagctcctctgtgcaggagggagaaaagtatccccacccttgcgcagcccgccatcggacaccctcactccgatccccagatcagccacctccgtgcccccagtttatggcgcagggaaaaaccggatcatctagtccgcccgggggtccgccgaaacctggctctcagctggattccatgctgggttcccttcagtctgatctgaacaaactcggggtggccacagtagccaagggcgtctgcggcgcctgcaagaagcctatcgccggacaagtggtcaccgctatgggtaaaacctggcatcctgagcacttcgtgtgcacccactgtcaggaagagatcgggtctcgcaatttcttcgaacgggacggccagccttactgcgaaaaggactatcataatcttttctctcctagatgctactattgtaatggtcctattctggataaggttgttacagcactggacaggacctggcacccggagcacttcttctgtgcacagtgcggggccttttttggccctgaagggtttcacgaaaaagacggaaaggcctattgtcgaaaggattacttcgacatgttcgccccaaagtgtgggggttgcgcccgggccattctggagaattatatttctgctctgaataccctttggcatcccgaatgctttgtatgtcgcgagtgtttcacacccttcgtgaacggcagttttttcgagcatgatgggcagccctattgcgaagtccattaccacgaaaggagagggtcactttgttcaggctgtcagaagccgattacgggacgttgcattactgcaatggccaaaaagttccatcctgaacattttgtttgcgcattctgtctgaaacaacttaataaggggacttttaaagagcaaaacgataagccgtactgccagaactgttttttgaaactgttttgctag

SEQ ID NO: 272812 - DNA, 1818 bp, Artificial Sequence
  derived and/or modified sequence
atggatgacctggatgccctgctggccgacctggagagcaccaccagccacatcagcaagaggcctgtgttcctgtctgaggagaccccctacagctaccccactggaaaccacacctaccaggagattgctgtgcccccacctgtgcccccaccacccagcagcgaggccctgaatggcaccatcctggaccccctggaccagtggcagcccagcagcagccgcttcatccaccagcagccccagagcagcagccctgtgtatggcagcagcgccaagaccagctctgtgagcaacccccaggacagcgtgggcagcccctgcagccgggtgggggaggaggagcacgtgtacagcttccccaacaagcagaagtctgctgagcccagccccaccgtgatgagcaccagcctgggcagcaacctgtctgagctggaccggctgctgctggagctgaatgctgtgcagcacaaccccccaggcttcccagcagatgaggccaacagcagcccccccctgcccggggccctgagccccctgtatggagtgcctgagaccaacagccccctgggcggcaaggccggccccctgaccaaggagaagcccaagagaaatggaggccggggcctggaggatgtgcggcccagcgtggagagcctgctggatgagctggagagctctgtgcccagccctgtgcctgccatcaccgtgaaccagggcgagatgagcagcccccagagggtgaccagcacccagcagcagacccgcatcagcgccagcagcgccacccgggagctggatgagctgatggccagcctgagtgacttcaagggctcctggcccctggaggaggtggtgctgctggtgtccatcagcagctctgtgcaggagggggagaagtacccccacccctgtgccgcccggcacaggacccccagcctgcggagcccagaccagcccccaccctgcccccagttcatggcccagggcaagacaggcagcagcagccccccaggcggcccccccaagccaggcagccagctggacagcatgctgggcagcctgcagagcgacctgaacaagctgggcgtggccaccgtggccaagggcgtgtgtggggcctgcaagaagcccatcgccggccaggtggtgacagccatgggcaagacctggcaccctgagcactttgtgtgcacccactgccaggaggagatcggcagcaggaacttctttgaaagagatggccagccctactgtgagaaggactaccacaacctcttcagcccccgctgctactactgcaatggccccatcctggacaaggtggtgacagccctggacaggacctggcaccctgagcacttcttctgtgcccagtgtggggccttcttcggccctgagggcttccacgagaaggatggcaaggcctactgcaggaaggactactttgacatgtttgcccccaagtgtggcggctgtgcccgggccatcctggagaactacatcagcgccctgaacaccctgtggcaccctgagtgctttgtgtgccgggagtgcttcaccccatttgtgaatggcagcttctttgaacatgatggccagccctactgtgaggtgcactaccacgagcggcggggcagcctgtgcagcggctgccagaagcccatcaccggccgctgcatcacagccatggccaagaagttccaccctgagcactttgtgtgtgccttctgcctgaagcagctgaacaagggcaccttcaaggagcagaatgacaagccctactgccagaactgcttcctgaagctgttctgctag

SEQ ID NO: 272813 - DNA, 1818 bp, Artificial Sequence
  derived and/or modified sequence
atggacgacctggacgccctgctggccgacctggagagcaccacctctcatataagtaaacgtcccgtgtttctaagcgaagaaacaccgtattcctatcccactgggaaccatacataccaggaaattgccgtcccaccacccgtgcccccgccaccttcaagcgaagctttaaatggcaccatcctggatcccctggaccagtggcaaccgtcctcgagccggtttattcatcagcaaccgcaaagttccagcccagtgtacggctccagcgccaagacttcctctgtgtcaaacccccaggacagcgtgggttcaccttgcagccgggtaggtgaagaggagcacgtgtactccttccctaacaaacagaagtccgctgagccatctcccacagttatgagtactagcctaggttccaacctgagtgaactggacagactcttgctggaactgaacgctgtccagcataacccccctggattccccgcagacgaggctaacagctcccctccattacccggagccctgagtccactgtacggcgtgccggagaccaacagccctctgggcggaaaggcgggaccactcaccaaggagaagccgaagcgcaacggtggccgcggcctggaggacgtgaggccatccgtggaaagtctgctggacgaactcgagtcctccgtgccctctccggtgccagctattaccgtgaatcagggagagatgtccagcccccagagggtaactagcacccaacagcaaacacgcatcagcgccagttctgcaacacgtgagttggatgaactcatggcctctttgtccgacttcaaaggttcttggccgctggaggaagtggtactcctcgtttcaattagcagcagtgtgcaggagggcgagaaatacccacacccgtgtgctgctcgtcaccgtaccccaagcctcagatctcccgatcagcctcctccttgcccacagttcatggcgcagggtaagaccggcagctcttctcctccgggagggcccccaaagccaggttcccaactggatagtatgctgggcagccttcaaagcgatctcaataaactcggcgtggccaccgtcgcaaagggcgtctgtggcgcatgcaaaaaacccatcgccggacaggtggtcacggccatgggaaaaacctggcatcccgaacacttcgtatgcactcactgccaggaagaaatcggctctaggaattttttcgaaagggacggtcagccctactgcgaaaaagactaccataatctgttttcaccccggtgctactactgtaatggtcctattctagataaggttgtgaccgctttagaccgcacctggcaccctgaacactttttctgcgcgcagtgcggcgcttttttcggaccagagggctttcacgagaaggacggcaaagcctattgccggaaggattacttcgacatgttcgcccctaagtgtgggggatgtgcacgcgcaatcttggagaattacatttcagcccttaataccctgtggcatcctgagtgtttcgtttgcagagagtgctttaccccctttgtgaatggttctttcttcgagcatgacggtcagccttattgcgaggtgcattaccacgaacggcgcggatcactctgttccggctgtcagaagccgattaccggtagatgcatcacggcgatggccaaaaaattccatccagagcacttcgtctgtgcattttgtcttaagcagctgaataagggcacttttaaagagcagaacgataaaccatactgccagaattgcttcctgaagttgttctgctag

SEQ ID NO: 272814 - DNA, 1818 bp, Artificial Sequence
  derived and/or modified sequence
atggacgatctggacgccctgttagcggatctagagagcacaacaagccatatctcaaagcgaccagtcttcctgagcgaggagacaccctattcgtatcctacgggaaaccatacctatcaagagatagccgtaccccctcctgtgcctccgccacctagcagcgaggctctgaacgggaccattctcgatccgctagatcagtggcagcccagttctagtcgatttatccatcagcaaccacagagcagcagccctgtgtacggctcctcagccaagacttcttccgtctcaaacccccaagattctgtgggctccccctgttcaagagtgggtgaagaggaacatgtctacagctttcccaacaagcaaaagtccgctgagccgagcccgaccgtgatgtcaaccagcctgggctcaaacctttcagaactggatagattgctgttagaactcaatgccgttcagcataacccccctgggtttcccgctgacgaagcaaattctagcccccctctgcctggagcactttccccattgtatggtgtccctgagaccaacagccccttaggcggaaaggcgggaccgctgaccaaagaaaaacctaaacggaacggtggcagggggcttgaggatgtgaggccatctgtagaatcccttctcgacgaactcgagtcttctgtgccgtcaccagtgccggctattactgtgaaccagggagagatgagctcacctcaacgcgtgacgtctacccagcagcagacccgcatttccgcctcttccgctaccagggaattagacgagctgatggcgtccctgtctgatttcaaaggtagctggcccctcgaggaggtggtgctgctagtcagcattagctcctccgttcaagagggggagaagtatcctcatccttgcgcagcgcgacacaggacaccaagcctgaggagccccgaccagccgccaccatgtcctcagttcatggctcaggggaagacgggttccagctcccctcccggagggccacctaaaccgggttcacagttagattctatgctgggcagtctgcagtcggaccttaataaattgggagtggccacagtcgctaaaggggtgtgcggcgcttgcaaaaagcccatcgccggacaggtcgtgactgctatgggcaagacgtggcacccagagcattttgtgtgcacacactgccaagaagagataggaagtaggaactttttcgagagagatggacagccatactgtgaaaaggactaccataatctgttctcacctagatgctactattgcaatgggcctatcttggataaggtcgtgaccgccctggataggacctggcaccctgagcattttttctgcgcccaatgtggggctttctttggtcctgagggatttcacgaaaaagacggaaaagcatactgcaggaaggactattttgacatgtttgcacccaaatgcggaggctgcgctcgagccatcctggagaattatatctcagccctgaacacgctgtggcatcccgaatgcttcgtctgccgagaatgttttacgcctttcgtcaacgggagcttcttcgagcacgacggccagccctattgtgaagtgcattaccatgaacgacggggaagcctgtgtagcgggtgccaaaagcctatcactggaaggtgcattactgccatggccaaaaagtttcaccccgaacatttcgtttgcgccttctgcctcaagcagctaaacaaaggaacatttaaggaacagaatgataaaccttattgtcaaaattgtttccttaagttgttttgttag

SEQ ID NO: 272815 - DNA, 3815 bp, Artificial Sequence
  derived and/or modified sequence
gcgcgggcgcgcgcggcggcggcgcgttccgttccgggccgaggctcgcggcggaaaagttgcggggcatagacgagcggccccgggacgggcagctagcgcgaccctgagccggcgcccgtggtccggccatggacgacctcgacgccctgctggcggacttggagtctaccacctcccacatctccaaacggcctgtgttcttgtcggaggagaccccctactcatacccaactggaaaccacacataccaggagattgccgtgccaccccccgtccccccacccccgtccagcgaggccctcaatggcacaatccttgaccccttagaccagtggcagcccagcagctcccgattcatccaccagcagcctcagtcctcatcacctgtgtacggctccagtgccaaaacttccagtgtctccaaccctcaggacagtgttggctctccgtgctcccgagtgggtgaggaggagcacgtctacagcttccccaacaagcagaaatcagctgagccttcacccaccgtaatgagcacgtccctgggcagcaacctttctgaactcgaccgcctgctgctggaactgaacgctgtacagcataacccgccaggcttccctgcagatgaggccaactcaagccccccgcttcctggggccctgagccccctctatggtgtcccagagactaacagccccttgggaggcaaagctgggcccctgacgaaagagaagcctaagcggaatgggggccggggcctggaggacgtgcggcccagtgtggagagtctcttggatgaactggagagctccgtgcccagccccgtccctgccatcactgtgaaccagggcgagatgagcagcccgcagcgcgtcacctccacccaacagcagacacgcatctcggcctcctctgccaccagggagctggacgagctgatggcttcgctgtcggatttcaagggctcctggcccctggaggaggttgtacttcttgtctccatcagctcatctgtccaggagggagaaaagtacccccatccctgtgctgccagacaccgtaccccgagcctcaggagtcctgaccagccccctccgtgtccacagttcatggcccaggggaagacagggagcagctcaccccctggggggcccccgaagcccgggagccagctggacagcatgctggggagcctgcagtctgacctgaacaagctgggggtcgccacagtcgccaaaggagtctgcggggcctgcaagaagcccatcgccgggcaggttgtgaccgccatggggaagacgtggcaccccgagcacttcgtctgcacccactgccaggaggagatcggatcccggaacttcttcgagcgggatggacagccctactgtgaaaaggactaccacaacctcttctccccgcgctgctactactgcaacggccccatcctggataaagtggtgacagcccttgaccggacgtggcaccctgaacacttcttctgtgcacagtgtggagccttctttggtcccgaagggttccacgagaaggacggcaaggcctactgtcgcaaggactacttcgacatgttcgcacccaagtgtggcggctgcgcccgggccatcctggagaactatatctcagccctcaacacgctgtggcatcctgagtgctttgtgtgccgggaatgcttcacgccattcgtgaacggcagcttcttcgagcacgacgggcagccctactgtgaggtgcactaccacgagcggcgcggctcgctgtgttctggctgccagaagcccatcaccggccgctgcatcaccgccatggccaagaagttccaccccgagcacttcgtctgtgccttctgcctcaagcagctcaacaagggcaccttcaaggagcagaacgacaagccttactgtcagaactgcttcctcaagctcttctgctaggtgccctgcccctgtctctgccccccttccccagccagcatccccaactgcgactgtgacctagagacttcacccgggggtgaaggggtaaacccgactgaaactggaacccttgtcctccgctggtgcgggatggacagagggccgtgaggggtccccctgcttgtcttcacccctgccagagcctctgggccccctcctccctcctgtagctctccctaggctgcccactctccatcctccccaggggtagaggctgggggctccaccccagcccatgtacgtccccacgaactggcctggccagcaccccacactggagccatctcttcctcatatttcagcagtgcagccggggggcagggaagggcaggcagggtctgttggggtctctttttatccttattcctcccccgacctaattgtctttgttctgtgattattgggggacacccggctccctccagacaatgccagcataaatccatccatccaaaggcagagaaccaaaggggccatggaaggttctctgtgctcctcctacccttccagtgccctaggcctggcgactgcccctgccttttagacccgccctccccttttatacctgctcttgttctactgagaaaagcctctccagcaataatgttttctagtcacttcctccgtctccgggacggcgtgcctggacactgtaccgactttgatagatttctacactgaggtttgaattcatatcgcctgagttgcttttacttctctatacaaaatgattttgaagagattttaaagacgttcccttttgtattctcttcctcatccaccgccactgggcctgtcactgatggtggctctggtgtgaagtttgctttgtactgagggttggggtggggaagcaatttgtattttattgtttcttagcacaagcaggtgaactgggagcagctctgtgactccccctctttcacttcatagctcaccaggactgttttataaactgctgtatttggaaaccccttctttacttcccaggccagcaagctcttcactgaaactggttgaagggtgttgcacccttttgggcctagaattctgaactttatctgttctgtttctgtgggaggagaaggggaagtatgttttggggggctgcttcctgtctgagtaagccctcaggagcctctgctcccctgtgaacccactgaaccttctgagcccccactgcttctatggggctctctcttctgccttctcaggaaagctggtgtctgattttggccatcaggactctgacgtctctttggtcttgttgatttcctctgggcatatcccttccccagatctgctcctcccctttcacaggtgggatcggcactcagggggtctggaaagaaggtcataagggagcatgataggatttggggcagagggacaggctcctctggggaaaccccccagagctctttaccaaggatgaaagaggagccaggccttgggctcctgatgaggagaaaggggccccaccggggtctaatggtgacagtccaaaccactccactggcctcctggcagaagccgagtgtgctggggtctccgaagagggtccctcctttttgggggaaggtcagcccagcccctccaaaggtctgatgtctccactttcacccgcaggccttaccgctctgtttatagtgacccaccctagatcttccccaagagggactggggtttctggggtccattctctgagtcagtggttatttgaaaatttgattttgattttattttttctctgtaaacttccaagctggcttttcccatttcaattcctgtgatttatgccaataaagtttgcccatgattttc

SEQ ID NO: 272816 - DNA, 3785 bp, Artificial Sequence
  derived and/or modified sequence
ggcgggcgcgggcgcgggcgcgcgcggcggcggcgcgttccgttccgggccgaggctcgcggcggaaaagttgcggggcatagacgagcggccccgggacgggcagctagcgcgaccctgagccggcgcccgtggtccggccatggacgacctcgacgccctgctggcggacttggagtctaccacctcccacatctccaaacggcctgtgttcttgtcggaggagaccccctactcatacccaactggaaaccacacataccaggagattgccgtgccaccccccgtccccccacccccgtccagcgaggccctcaatggcacaatccttgaccccttagaccagtggcagcccagcagctcccgattcatccaccagcagcctcagtcctcatcacctgtgtacggctccagtgccaaaacttccagtgtctccaaccctcaggacagtgttggctctccgtgctcccgagtgggtgaggaggagcacgtctacagcttccccaacaagcagaaatcagctgagccttcacccaccgtaatgagcacgtccctgggcagcaacctttctgaactcgaccgcctgctgctggaactgaacgctgtacagcataacccgccaggcttccctgcagatgaggccaactcaagccccccgcttcctggggccctgagccccctctatggtgtcccagagactaacagccccttgggaggcaaagctgggcccctgacgaaagagaagcctaagcggaatgggggccggggcctggaggacgtgcggcccagtgtggagagtctcttggatgaactggagagctccgtgcccagccccgtccctgccatcactgtgaaccagggcgagatgagcagcccgcagcgcgtcacctccacccaacagcagacacgcatctcggcctcctctgccaccagggagctggacgagctgatggcttcgctgtcggatttcaagatccagggcctggagcaaagagcggatggggagcggtgctgggcggccggctggcctcgggacggcgggcggagcagccccggagggcaggacgagggagggttcatggcccaggggaagacagggagcagctcaccccctggggggcccccgaagcccgggagccagctggacagcatgctggggagcctgcagtctgacctgaacaagctgggggtcgccacagtcgccaaaggagtctgcggggcctgcaagaagcccatcgccgggcaggttgtgaccgccatggggaagacgtggcaccccgagcacttcgtctgcacccactgccaggaggagatcggatcccggaacttcttcgagcgggatggacagccctactgtgaaaaggactaccacaacctcttctccccgcgctgctactactgcaacggccccatcctggataaagtggtgacagcccttgaccggacgtggcaccctgaacacttcttctgtgcacagtgtggagccttctttggtcccgaagggttccacgagaaggacggcaaggcctactgtcgcaaggactacttcgacatgttcgcacccaagtgtggcggctgcgcccgggccatcctggagaactatatctcagccctcaacacgctgtggcatcctgagtgctttgtgtgccgggaatgcttcacgccattcgtgaacggcagcttcttcgagcacgacgggcagccctactgtgaggtgcactaccacgagcggcgcggctcgctgtgttctggctgccagaagcccatcaccggccgctgcatcaccgccatggccaagaagttccaccccgagcacttcgtctgtgccttctgcctcaagcagctcaacaagggcaccttcaaggagcagaacgacaagccttactgtcagaactgcttcctcaagctcttctgctaggtgccctgcccctgtctctgccccccttccccagccagcatccccaactgcgactgtgacctagagacttcacccgggggtgaaggggtaaacccgactgaaactggaacccttgtcctccgctggtgcgggatggacagagggccgtgaggggtccccctgcttgtcttcacccctgccagagcctctgggccccctcctccctcctgtagctctccctaggctgcccactctccatcctccccaggggtagaggctgggggctccaccccagcccatgtacgtccccacgaactggcctggccagcaccccacactggagccatctcttcctcatatttcagcagtgcagccggggggcagggaagggcaggcagggtctgttggggtctctttttatccttattcctcccccgacctaattgtctttgttctgtgattattgggggacacccggctccctccagacaatgccagcataaatccatccatccaaaggcagagaaccaaaggggccatggaaggttctctgtgctcctcctacccttccagtgccctaggcctggcgactgcccctgccttttagacccgccctccccttttatacctgctcttgttctactgagaaaagcctctccagcaataatgttttctagtcacttcctccgtctccgggacggcgtgcctggacactgtaccgactttgatagatttctacactgaggtttgaattcatatcgcctgagttgcttttacttctctatacaaaatgattttgaagagattttaaagacgttcccttttgtattctcttcctcatccaccgccactgggcctgtcactgatggtggctctggtgtgaagtttgctttgtactgagggttggggtggggaagcaatttgtattttattgtttcttagcacaagcaggtgaactgggagcagctctgtgactccccctctttcacttcatagctcaccaggactgttttataaactgctgtatttggaaaccccttctttacttcccaggccagcaagctcttcactgaaactggttgaagggtgttgcacccttttgggcctagaattctgaactttatctgttctgtttctgtgggaggagaaggggaagtatgttttggggggctgcttcctgtctgagtaagccctcaggagcctctgctcccctgtgaacccactgaaccttctgagcccccactgcttctatggggctctctcttctgccttctcaggaaagctggtgtctgattttggccatcaggactctgacgtctctttggtcttgttgatttcctctgggcatatcccttccccagatctgctcctcccctttcacaggtgggatcggcactcagggggtctggaaagaaggtcataagggagcatgataggatttggggcagagggacaggctcctctggggaaaccccccagagctctttaccaaggatgaaagaggagccaggccttgggctcctgatgaggagaaaggggccccaccggggtctaatggtgacagtccaaaccactccactggcctcctggcagaagccgagtgtgctggggtctccgaagagggtccctcctttttgggggaaggtcagcccagcccctccaaaggtctgatgtctccactttcacccgcaggccttaccgctctgtttatagtgacccaccctagatcttccccaagagggactggggtttctggggtccattctctgagtcagtggttatttgaaaatttgattttgattttattttttctctgtaaacttccaagctggcttttcccatttcaattcctgtgatttatgccaataaagtttgcccatgattttca

SEQ ID NO: 272817 - DNA, 1776 bp, Artificial Sequence
  derived and/or modified sequence
atggatgatctggatgcactgcttgccgacctagagtctacgacctcacacattagcaagagacccgtctttctgtccgaggagacaccgtacagttatcctacggggaaccacacctaccaggagatcgcagtgcctccgccagtacctccacccccttccagcgaggcgctgaacggcacaatcctggacccactggaccagtggcaaccgtcaagcagtcgcttcatacaccagcagccccagtcaagcagcccagtgtacggaagttccgccaagacatcctctgtctctaatccacaagactccgttggaagcccttgctctagggtgggggaagaggagcatgtttactcattcccgaataagcagaagagcgctgaaccctctccaactgtcatgtccacctccctggggtccaatttgtccgaactcgaccgcctgttgttagagttgaatgccgtgcagcacaatccacccgggtttcctgcagacgaagcaaacagttcgcccccgctcccgggggccttgtcaccattgtatggggttcccgagacaaacagccctctaggagggaaagccggcccactgacaaaggaaaagcccaagaggaacgggggtagggggctcgaggacgtccggccaagcgtggagtctctcctggatgaactcgagagttcagtcccgtctccagtcccagcaatcacagtgaatcaaggagagatgagctccccacagagagttactagcacccagcaacaaacacggattagtgcttccagtgcaacacgggagctcgatgaactgatggcatcactgtccgattttaaaatacagggcctcgagcagagggcagacggtgagcgctgctgggccgcaggctggccacgagatggaggaagatcctcacctggcggacaagatgagggggggtttatggctcagggcaagacaggctcttcctcaccaccaggggggcccccaaaacctgggtcccagttggattctatgttgggttctcttcagagtgaccttaataagctcggcgtggcaactgtggctaagggtgtgtgtggcgcctgcaaaaaaccaattgccgggcaggtagttaccgccatgggaaaaacatggcacccggaacactttgtttgcacacactgtcaggaggagatcgggtcccggaatttcttcgagcgggacgggcagccatattgcgagaaggactaccataacctattctcacccagatgctattattgcaatgggcccatcctagataaagtggtcaccgcacttgatcgtacttggcacccggaacactttttctgcgctcagtgtggagctttcttcgggcctgaaggatttcacgagaaggacgggaaagcctattgtcggaaagattattttgatatgttcgcacctaagtgcggcggttgtgcccgcgcaatcctcgaaaattacatctctgctctaaataccctgtggcatccggagtgtttcgtttgtcgggaatgcttcacgccgttcgtgaacggttcattttttgagcacgatggacagccttactgtgaggtgcattaccacgagcgccgggggtccttgtgcagtggatgccaaaagcctattactggccgatgcatcacagctatggccaagaagttccatccggagcacttcgtgtgcgctttttgccttaaacagctgaacaaaggaacctttaaagaacaaaatgacaagccttattgccaaaattgctttctgaaactcttctgctag

SEQ ID NO: 272818 - DNA, 1776 bp, Artificial Sequence
  derived and/or modified sequence
atggatgacctggatgccctgctggccgacctggagagcaccaccagccacatcagcaagaggcctgtgttcctgtctgaggagaccccctacagctaccccactggaaaccacacctaccaggagattgctgtgcccccacctgtgcccccaccacccagcagcgaggccctgaatggcaccatcctggaccccctggaccagtggcagcccagcagcagccgcttcatccaccagcagccccagagcagcagccctgtgtatggcagcagcgccaagaccagctctgtgagcaacccccaggacagcgtgggcagcccctgcagccgggtgggggaggaggagcacgtgtacagcttccccaacaagcagaagtctgctgagcccagccccaccgtgatgagcaccagcctgggcagcaacctgtctgagctggaccggctgctgctggagctgaatgctgtgcagcacaaccccccaggcttcccagcagatgaggccaacagcagcccccccctgcccggggccctgagccccctgtatggagtgcctgagaccaacagccccctgggcggcaaggccggccccctgaccaaggagaagcccaagagaaatggaggccggggcctggaggatgtgcggcccagcgtggagagcctgctggatgagctggagagctctgtgcccagccctgtgcctgccatcaccgtgaaccagggcgagatgagcagcccccagagggtgaccagcacccagcagcagacccgcatcagcgccagcagcgccacccgggagctggatgagctgatggccagcctgagtgacttcaagatccagggcctggagcagagagcagatggagagcgctgctgggccgccggctggcccagagatggcggccgcagcagccctgggggccaggatgagggcggcttcatggcccagggcaagacaggcagcagcagccccccaggcggcccccccaagccaggcagccagctggacagcatgctgggcagcctgcagagcgacctgaacaagctgggcgtggccaccgtggccaagggcgtgtgtggggcctgcaagaagcccatcgccggccaggtggtgacagccatgggcaagacctggcaccctgagcactttgtgtgcacccactgccaggaggagatcggcagcaggaacttctttgaaagagatggccagccctactgtgagaaggactaccacaacctcttcagcccccgctgctactactgcaatggccccatcctggacaaggtggtgacagccctggacaggacctggcaccctgagcacttcttctgtgcccagtgtggggccttcttcggccctgagggcttccacgagaaggatggcaaggcctactgcaggaaggactactttgacatgtttgcccccaagtgtggcggctgtgcccgggccatcctggagaactacatcagcgccctgaacaccctgtggcaccctgagtgctttgtgtgccgggagtgcttcaccccatttgtgaatggcagcttctttgaacatgatggccagccctactgtgaggtgcactaccacgagcggcggggcagcctgtgcagcggctgccagaagcccatcaccggccgctgcatcacagccatggccaagaagttccaccctgagcactttgtgtgtgccttctgcctgaagcagctgaacaagggcaccttcaaggagcagaatgacaagccctactgccagaactgcttcctgaagctgttctgctag

SEQ ID NO: 272819 - DNA, 1776 bp, Artificial Sequence
  derived and/or modified sequence
atggacgacctggacgccctgctggccgacctggagagcaccaccagccatatctctaagcggcccgtatttcttagcgaggagaccccatactcttaccccactggcaatcatacctaccaggaaatcgcagtgcctcctccagtccctccacctccttccagcgaagccctcaatggcactatcctcgatcctcttgatcaatggcagccatcatcatcccgctttatccaccagcaacctcaatcctctagcccagtctatggtagctccgctaagacatcaagcgtatccaacccacaggattctgtgggctccccctgctccagagtaggggaggaggaacacgtatatagtttcccaaacaaacagaagtcagcggaaccctcacctacagttatgagtacttccctaggttctaaccttagcgaattagaccgactgttactcgaactgaatgccgttcagcataaccctcctggctttcctgcagacgaggctaatagcagccccccactgccaggagctctgagccccctgtatggcgtaccggagacgaacagccccctcggagggaaggccggaccactcaccaaagaaaagcctaagcgcaacgggggtagaggcttggaggacgtgcggcccagtgtcgagagccttctggacgaactggaaagcagtgtgcctagccctgtgcctgctattaccgtgaaccagggtgagatgtcaagtccccagcgggtcacgagcactcagcaacagactagaatatccgcttcctccgcgactagagagttggatgagctcatggccagtctttccgactttaagattcagggactggagcagagagccgatggggagcgctgctgggccgctggttggccgcgggatggagggagaagctcccctggaggccaggatgaagggggcttcatggcccagggaaagaccgggtcctcctcacctcccgggggaccaccgaagccaggctctcagctggacagcatgctcggctctttacaatctgatctcaataaactgggcgtcgctacagtcgccaagggtgtatgcggcgcgtgcaagaagcctatcgcgggtcaggtagtaactgctatgggcaaaacctggcatccagagcacttcgtctgtactcactgccaggaagaaattgggtcacgaaattttttcgagagggatggtcagccatactgcgaaaaggactatcacaatctgtttagtcccagatgctactattgtaatggcccaatcttggataaggtggtgacggctttagacaggacctggcatcctgagcactttttctgcgcacaatgcggcgcttttttcgggcctgagggcttccatgagaaagatggcaaggcttactgtaggaaagattactttgatatgttcgctcccaagtgtggaggctgcgcacgcgctatcctggaaaactatatttcagctctcaatacactttggcatccagagtgctttgtttgtcgcgaatgctttacaccgttcgtcaacggatccttttttgagcacgacggtcagccctactgtgaagtgcactaccatgaaagacgtggctccttgtgtagtggatgccagaagccaatcaccggccgttgtataacagccatggccaagaagtttcatccagagcactttgtatgcgccttttgtttgaaacagcttaataagggaacttttaaagagcagaacgataagccttactgccaaaactgcttcctgaagctgttctgctag

SEQ ID NO: 272820 - DNA, 1776 bp, Artificial Sequence
  derived and/or modified sequence
atggatgacctggacgctctgctcgcagatctggagagtactacctcacatattagcaagagaccagtgtttctgagtgaggagacaccttactcttatcctaccggaaatcatacatatcaggaaatcgcggtgcctccacctgtgccgcctccaccaagctcggaggcactcaacggcacaattctggacccgttggatcaatggcagccaagcagttctcggttcattcaccaacaacctcaatcgtccagtccggtttacggtagttccgcgaaaacgtccagtgtatcgaatcctcaggactccgtgggtagtccttgctctcgcgtgggagaggaggaacacgtgtactcattccctaacaagcagaagtccgcagagcctagccctaccgtgatgtccaccagtctcgggtccaatctctcagaacttgacagattgcttttagagcttaacgccgttcagcataaccctcccggatttccagccgacgaagccaatagttcccccccactgccaggcgcactgagtccactgtatggggtgcccgaaaccaacagcccccttggcggtaaagccggaccactcacgaaggagaaacctaaaagaaacggcggacggggtcttgaggacgtacggccatctgtggagtctctgctggacgaactagagagtagtgttcctagtcccgtaccagcgataacagtgaaccagggggaaatgtctagccctcagagggtgacatccacacaacagcaaaccaggatttcagccagcagcgccacgagggaactcgatgaactgatggccagcctctcagacttcaagatccagggtttggaacaacgcgctgacggcgagcgttgctgggctgctggatggccgcgagatggcggacgcagtagcccgggaggtcaagatgagggtgggttcatggcacagggcaaaacaggctcctcgagcccccctggcggaccccctaagcccggttctcaacttgattccatgctgggttcactgcagtccgacctcaacaaattaggcgttgcaacagtcgctaagggtgtatgcggtgcttgtaagaagcctatcgctggacaggtggttacagccatgggcaaaacttggcatccagagcactttgtgtgcactcattgccaggaggagatagggtctcggaacttcttcgaacgggacggccaaccttattgtgagaaggattatcacaatctgttttccccgagatgctattactgcaacggacccatattggacaaggttgtgacagctttagacagaacttggcacccagaacactttttctgtgcgcagtgcggcgctttcttcggtccggaagggtttcacgagaaggacggcaaagcctactgccgcaaggattattttgatatgttcgcgcctaagtgcggcggttgcgctcgcgctattctggagaactacatttccgctttaaacacactgtggcaccccgagtgcttcgtgtgcagggaatgtttcactccctttgttaatggtagcttttttgagcacgatggtcagccctactgtgaagtgcactatcatgagcgcagagggagtctgtgctctggctgtcaaaaacccattaccggccgatgcatcacagccatggccaagaaattccatcctgagcatttcgtctgcgctttctgtctgaagcagttaaataaaggaacctttaaggaacagaatgacaagccctactgtcagaactgttttctgaaactcttttgctag

SEQ ID NO: 272821 - DNA, 1776 bp, Artificial Sequence
  derived and/or modified sequence
atggacgacctggacgccctgctggccgacctggagagcaccaccagccacatcagcaagagacccgtgttcctgagcgaggagaccccctacagctaccccaccggcaaccacacctaccaggagatcgccgtgcccccccccgtgccccccccccccagcagcgaggccctgaacggcaccatcctggaccccctggaccagtggcagcccagcagcagcagattcatccaccagcagccccagagcagcagccccgtgtacggcagcagcgccaagaccagcagcgtgagcaacccccaggacagcgtgggcagcccctgcagcagagtgggcgaggaggagcacgtgtacagcttccccaacaagcagaagagcgccgagcccagccccaccgtgatgagcaccagcctgggcagcaacctgagcgagctggacagactgctgctggagctgaacgccgtgcagcacaacccccccggcttccccgccgacgaggccaacagcagcccccccctgcccggcgccctgagccccctgtacggcgtgcccgagaccaacagccccctgggcggcaaggccggccccctgaccaaggagaagcccaagagaaacggcggcagaggcctggaggacgtgagacccagcgtggagagcctgctggacgagctggagagcagcgtgcccagccccgtgcccgccatcaccgtgaaccagggcgagatgagcagcccccagagagtgaccagcacccagcagcagaccagaatcagcgccagcagcgccaccagagagctggacgagctgatggccagcctgagcgacttcaagatccagggcctggagcagagagccgacggcgagagatgctgggccgccggctggcccagagacggcggcagaagcagccccggcggccaggacgagggcggcttcatggcccagggcaagaccggcagcagcagcccccccggcggcccccccaagcccggcagccagctggacagcatgctgggcagcctgcagagcgacctgaacaagctgggcgtggccaccgtggccaagggcgtgtgcggcgcctgcaagaagcccatcgccggccaggtggtgaccgccatgggcaagacctggcaccccgagcacttcgtgtgcacccactgccaggaggagatcggcagcagaaacttcttcgagagagacggccagccctactgcgagaaggactaccacaacctgttcagccccagatgctactactgcaacggccccatcctggacaaggtggtgaccgccctggacagaacctggcaccccgagcacttcttctgcgcccagtgcggcgccttcttcggccccgagggcttccacgagaaggacggcaaggcctactgcagaaaggactacttcgacatgttcgcccccaagtgcggcggctgcgccagagccatcctggagaactacatcagcgccctgaacaccctgtggcaccccgagtgcttcgtgtgcagagagtgcttcacccccttcgtgaacggcagcttcttcgagcacgacggccagccctactgcgaggtgcactaccacgagagaagaggcagcctgtgcagcggctgccagaagcccatcaccggcagatgcatcaccgccatggccaagaagttccaccccgagcacttcgtgtgcgccttctgcctgaagcagctgaacaagggcaccttcaaggagcagaacgacaagccctactgccagaactgcttcctgaagctgttctgctag

SEQ ID NO: 272822 - protein, 424 aa, Artificial Sequence
  derived and/or modified sequence
MSTSLGSNLSELDRLLLELNAVQHNPPGFPADEANSSPPLPGALSPLYGVPETNSPLGGKAGPLTKEKPKRNGGRGLEDVRPSVESLLDELESSVPSPVPAITVNQGEMSSPQRVTSTQQQTRISASSATRELDELMASLSDFKFMAQGKTGSSSPPGGPPKPGSQLDSMLGSLQSDLNKLGVATVAKGVCGACKKPIAGQVVTAMGKTWHPEHFVCTHCQEEIGSRNFFERDGQPYCEKDYHNLFSPRCYYCNGPILDKVVTALDRTWHPEHFFCAQCGAFFGPEGFHEKDGKAYCRKDYFDMFAPKCGGCARAILENYISALNTLWHPECFVCRECFTPFVNGSFFEHDGQPYCEVHYHERRGSLCSGCQKPITGRCITAMAKKFHPEHFVCAFCLKQLNKGTFKEQNDKPYCQNCFLKLFC

SEQ ID NO: 272823 - protein, 316 aa, Artificial Sequence [sequence omitted]

SEQ ID NO: 272824 - DNA, 1674 bp, Artificial Sequence
  derived and/or modified sequence
atggacgacctggacgccctgctggccgacctggagagcaccaccagccacatcagcaagagacccgtgttcctgagcgaggagaccccctacagctaccccaccggcaaccacacctaccaggagatcgccgtgcccccccccgtgccccccccccccagcagcgaggccctgaacggcaccatcctggaccccctggaccagtggcagcccagcagcagcagattcatccaccagcagccccagagcagcagccccgtgtacggcagcagcgccaagaccagcagcgtgagcaacccccaggacagcgtgggcagcccctgcagcagagtgggcgaggaggagcacgtgtacagcttccccaacaagcagaagagcgccgagcccagccccaccgtgatgagcaccagcctgggcagcaacctgagcgagctggacagactgctgctggagctgaacgccgtgcagcacaacccccccggcttccccgccgacgaggccaacagcagcccccccctgcccggcgccctgagccccctgtacggcgtgcccgagaccaacagccccctgggcggcaaggccggccccctgaccaaggagaagcccaagagaaacggcggcagaggcctggaggacgtgagacccagcgtggagagcctgctggacgagctggagagcagcgtgcccagccccgtgcccgccatcaccgtgaaccagggcgagatgagcagcccccagagagtgaccagcacccagcagcagaccagaatcagcgccagcagcgccaccagagagctggacgagctgatggccagcctgagcgacttcaagttcatggcccagggcaagaccggcagcagcagcccccccggcggcccccccaagcccggcagccagctggacagcatgctgggcagcctgcagagcgacctgaacaagctgggcgtggccaccgtggccaagggcgtgtgcggcgcctgcaagaagcccatcgccggccaggtggtgaccgccatgggcaagacctggcaccccgagcacttcgtgtgcacccactgccaggaggagatcggcagcagaaacttcttcgagagagacggccagccctactgcgagaaggactaccacaacctgttcagccccagatgctactactgcaacggccccatcctggacaaggtggtgaccgccctggacagaacctggcaccccgagcacttcttctgcgcccagtgcggcgccttcttcggccccgagggcttccacgagaaggacggcaaggcctactgcagaaaggactacttcgacatgttcgcccccaagtgcggcggctgcgccagagccatcctggagaactacatcagcgccctgaacaccctgtggcaccccgagtgcttcgtgtgcagagagtgcttcacccccttcgtgaacggcagcttcttcgagcacgacggccagccctactgcgaggtgcactaccacgagagaagaggcagcctgtgcagcggctgccagaagcccatcaccggcagatgcatcaccgccatggccaagaagttccaccccgagcacttcgtgtgcgccttctgcctgaagcagctgaacaagggcaccttcaaggagcagaacgacaagccctactgccagaactgcttcctgaagctgttctgctag

SEQ ID NO: 272825 - DNA, 1674 bp, Artificial Sequence
  derived and/or modified sequence
atggatgacttagacgcactgttagccgatttggagtcaacgacaagtcatataagcaagcgacccgtcttcctgagtgaggaaaccccatattcttaccccaccggaaaccacacataccaggagattgcagtgcccccaccggtgcctccaccacctagctcagaggcccttaacggtaccatattggatcctttggaccaatggcagccgtccagttctcgatttatacaccaacaaccccagtcctcgagccctgtctacgggtccagcgctaaaacatcatccgtatctaatccccaggacagcgtcggaagtccctgcagccgtgtgggggaggaggagcacgtatatagtttccccaacaagcagaaaagcgctgaaccctctccaacagtcatgagcacttctctggggagcaatctgtccgagctggaccggcttttgcttgaattaaacgctgtgcagcataaccctcccggatttccggcggacgaagctaacagcagccccccactccccggagcgctgtctcctctgtacggggtgcccgagacaaacagtccattgggaggaaaggccggtcccctcacaaaggagaaacccaagagaaatggaggcagaggactcgaagacgtgagaccctccgtggaatcactgctagatgaactggagagctctgtcccaagccccgttccggctatcactgtgaaccaaggcgagatgagcagcccacagcgggtcacgagtacccagcagcagactcgcatctctgccagctctgccacacgcgagttagatgagcttatggccagcctgagcgacttcaaattcatggcacagggaaaaacaggctcctcatcaccaccgggcgggcctcccaagccaggcagccagctggacagcatgctgggcagtcttcagtctgacctgaacaagctaggcgtggcgacagtggccaagggagtgtgtggcgcctgcaagaagcctatcgctggacaggttgtcaccgctatggggaaaacttggcatccagagcatttcgtttgcacacattgtcaggaagagattggctctagaaactttttcgagagggacggtcaaccttactgtgagaaagattatcataatctgtttagcccccggtgttactattgcaacggacctatcctagacaaagtggtcacagcccttgaccgaacgtggcacccagagcactttttttgcgcacaatgcggagccttttttgggccagagggtttccatgaaaaagatgggaaggcctactgcaggaaggactactttgacatgtttgctccgaagtgtggaggatgcgctagagccattctggagaactacatttcagccctaaacactctttggcaccccgagtgcttcgtgtgcagggagtgcttcactcctttcgtgaacggtagcttttttgagcacgacgggcagccatattgtgaggtgcattaccacgagaggagagggtctctgtgtagcggctgtcagaagcctatcaccggtagatgtatcactgcaatggccaaaaagtttcaccctgagcacttcgtgtgtgcgttttgtttgaagcaactgaataagggaaccttcaaggaacaaaatgataaaccttactgccagaactgttttctgaaactattttgttag

SEQ ID NO: 272826 - DNA, 1674 bp, Artificial Sequence
  derived and/or modified sequence
atggatgacctggatgccctgctggccgacctggagagcaccaccagccacatcagcaagaggcctgtgttcctgtctgaggagaccccctacagctaccccactggaaaccacacctaccaggagattgctgtgcccccacctgtgcccccaccacccagcagcgaggccctgaatggcaccatcctggaccccctggaccagtggcagcccagcagcagccgcttcatccaccagcagccccagagcagcagccctgtgtatggcagcagcgccaagaccagctctgtgagcaacccccaggacagcgtgggcagcccctgcagccgggtgggggaggaggagcacgtgtacagcttccccaacaagcagaagtctgctgagcccagccccaccgtgatgagcaccagcctgggcagcaacctgtctgagctggaccggctgctgctggagctgaatgctgtgcagcacaaccccccaggcttcccagcagatgaggccaacagcagcccccccctgcccggggccctgagccccctgtatggagtgcctgagaccaacagccccctgggcggcaaggccggccccctgaccaaggagaagcccaagagaaatggaggccggggcctggaggatgtgcggcccagcgtggagagcctgctggatgagctggagagctctgtgcccagccctgtgcctgccatcaccgtgaaccagggcgagatgagcagcccccagagggtgaccagcacccagcagcagacccgcatcagcgccagcagcgccacccgggagctggatgagctgatggccagcctgagtgacttcaagttcatggcccagggcaagacaggcagcagcagccccccaggcggcccccccaagccaggcagccagctggacagcatgctgggcagcctgcagagcgacctgaacaagctgggcgtggccaccgtggccaagggcgtgtgtggggcctgcaagaagcccatcgccggccaggtggtgacagccatgggcaagacctggcaccctgagcactttgtgtgcacccactgccaggaggagatcggcagcaggaacttctttgaaagagatggccagccctactgtgagaaggactaccacaacctcttcagcccccgctgctactactgcaatggccccatcctggacaaggtggtgacagccctggacaggacctggcaccctgagcacttcttctgtgcccagtgtggggccttcttcggccctgagggcttccacgagaaggatggcaaggcctactgcaggaaggactactttgacatgtttgcccccaagtgtggcggctgtgcccgggccatcctggagaactacatcagcgccctgaacaccctgtggcaccctgagtgctttgtgtgccgggagtgcttcaccccatttgtgaatggcagcttctttgaacatgatggccagccctactgtgaggtgcactaccacgagcggcggggcagcctgtgcagcggctgccagaagcccatcaccggccgctgcatcacagccatggccaagaagttccaccctgagcactttgtgtgtgccttctgcctgaagcagctgaacaagggcaccttcaaggagcagaatgacaagccctactgccagaactgcttcctgaagctgttctgctag

SEQ ID NO: 272827 - DNA, 1674 bp, Artificial Sequence
  derived and/or modified sequence
atggacgacctggacgccctgctggccgacctggagagcaccacctcgcatatttccaagcggcctgtattcctcagcgaggagaccccttattcctatccaaccggcaaccatacctaccaggagatagctgtgccacctccagtgccccctccaccgagctcagaagccctaaatggcactatccttgatcccctggaccagtggcagcctagcagctcccgattcatacatcagcagccccagagctcaagccctgtttacggctccagtgcgaaaactagcagcgtcagtaaccctcaggatagcgtaggctcgccctgcagccgcgtaggggaggaagagcatgtatactcatttcccaataagcaaaaaagcgctgagccaagcccaacggtgatgtccacgtcactggggtccaacctctctgagttagaccggctgctgctggagctgaacgcagtgcaacataatccacccggattccccgcggacgaggcaaatagtagccctccgcttccaggggctctgagtcccctgtatggtgtcccagagacgaacagcccactcggcgggaaagctggcccattgacaaaagagaagcctaaaaggaatggcggaagggggttggaagacgtgcgtccttcagtggagagcttgctggatgaattagaatcctcagtccccagcccagtgccggctatcactgtgaaccagggggagatgtcttctcctcagagggtgacttcaacccaacagcaaacgcggatttctgcatcaagcgctaccagagaactggatgaattaatggcctcactcagcgattttaaatttatggcgcagggcaagacggggtcaagttctcctcccggtggccccccaaaaccagggtcccaattggattcaatgctggggagtctccagtccgacctcaacaagcttggtgtggctactgtggcgaagggtgtgtgtggcgcatgcaaaaaacctatcgctgggcaggtagtgacggctatgggcaagacatggcatcctgagcattttgtctgcacacattgtcaggaggaaatcggcagtaggaatttcttcgagcgggacggccagccatactgcgaaaaagattaccataatctgtttagcccccgctgttactactgcaatgggccaatcctggacaaagttgtgaccgccctggatcgcacatggcacccagagcacttcttttgcgcgcagtgtggagcattcttcggacccgagggattccatgagaaggacggcaaggcctattgtcgaaaagactatttcgatatgttcgcaccaaaatgcggcggttgcgccagagctatcctggaaaattacattagtgctttgaataccctgtggcatcctgaatgctttgtgtgccgcgagtgtttcacaccattcgtgaatgggtccttcttcgaacacgacggacagccatactgtgaagtacactatcatgagagacgcggatccctctgtagcggttgtcaaaagcccatcaccggtcggtgcatcaccgccatggccaaaaagtttcatcctgaacattttgtctgcgctttttgtttaaaacaactgaacaagggcacctttaaagaacagaacgataagccctattgccagaactgcttcctgaagctattctgttag

SEQ ID NO: 272828 - DNA, 1674 bp, Artificial Sequence
  derived and/or modified sequence
atggacgatttagatgctctgctcgccgatctggaatccaccacaagtcatatttcaaagaggcccgtattcctcagcgaagagacgccctattcatacccgaccgggaaccacacctaccaggaaatcgcggtcccacctccagtcccaccacccccttctagtgaggctctgaacggcaccatactggaccccctggaccagtggcagcccagctctagtcgcttcatccaccagcagccccagagcagttccccagtgtacgggtccagcgctaaaaccagttcagtgtccaaccctcaagattctgtaggttcgccctgcagccgcgtgggggaggaggagcacgtgtatagttttccaaataagcaaaaaagcgccgagccgtcacctactgtcatgagcacaagcttgggcagtaacttgtcagaactggacaggctgttactagagttaaatgcagtacagcacaatcccccaggatttcccgcagacgaggccaactccagtccacctctgccaggcgctctgagtccgttatacggcgtgcctgaaactaattctccactgggtgggaaggccggacccctgactaaggagaagcccaagcgcaacgggggtagggggctggaggatgtgcgaccatccgtcgagtcgttgctggatgagctggaaagcagtgtgccaagtcctgtccctgcaattaccgttaaccagggcgaaatgtcttcccctcagcgtgtaacgtcaacgcagcagcaaacaagaatctctgcctcttctgccacacgcgagctggacgaactcatggcttccttatcggacttcaaatttatggctcagggcaagaccggcagcagctctccaccaggcggaccccctaagcccggaagccagctggattctatgctgggctcactgcagagtgatctgaataagcttggcgttgcaactgtggccaaaggcgtctgcggcgcatgtaagaaaccaattgcagggcaggtcgtgaccgctatgggaaagacttggcatcccgagcacttcgtgtgtactcactgccaggaagagataggttcccgcaacttcttcgaacgggatgggcaaccatattgtgaaaaggattatcacaacctgttttccccaagatgttattattgcaacggaccaattttggataaagtagtcaccgcacttgaccgcacttggcaccccgagcattttttttgtgctcagtgcggcgctttcttcgggccagaaggcttccatgaaaaggacggtaaggcctactgtcggaaggattacttcgatatgttcgctccaaaatgcggtggctgcgccagagctatcctggagaattatatttccgcgctgaacacactgtggcaccccgagtgtttcgtgtgtagggaatgttttaccccctttgtgaatggatccttttttgaacatgacggccagccgtactgcgaagtccactatcacgaaagacgaggcagcctgtgtagcggctgtcagaaaccaattactgggaggtgcataacagcgatggcaaaaaaatttcaccccgaacatttcgtttgcgcgttttgtctgaagcagctcaataagggaacctttaaagaacagaatgacaaaccatattgtcagaactgcttcttaaagcttttctgctag

SEQ ID NO: 272829 - DNA, 1847 bp, Artificial Sequence
  derived and/or modified sequence
gcgcgggcgcgcgcggcggcggcgcgttccgttccgggccgaggctcgcggcggaaaagttgcggggcatagacgagcggccccgggacgggcagctagcgcgaccctgagccggcgcccgtggtccggccatggacgacctcgacgccctgctggcggacttggagtctaccacctcccacatctccaaacggcctgtgttcttgtcggaggagaccccctactcatacccaactggaaaccacacataccaggagattgccgtgccaccccccgtccccccacccccgtccagcgaggccctcaatggcacaatccttgaccccttagaccagtggcagcccagcagctcccgattcatccaccagcagcctcagtcctcatcacctgtgtacggctccagtgccaaaacttccagtgtctccaaccctcaggacagtgttggctctccgtgctcccgagtgggtgaggaggagcacgtctacagcttccccaacaagcagaaatcagctgagccttcacccaccgtaatgagcacgtccctgggcagcaacctttctgaactcgaccgcctgctgctggaactgaacgctgtacagcataacccgccaggcttccctgcagatgaggccaactcaagccccccgcttcctggggccctgagccccctctatggtgtcccagagactaacagccccttgggaggcaaagctgggcccctgacgaaagagaagcctaagcggaatgggggccggggcctggaggacgtgcggcccagtgtggagagtctcttggatgaactggagagctccgtgcccagccccgtccctgccatcactgtgaaccagggcgagatgagcagcccgcagcgcgtcacctccacccaacagcagacacgcatctcggcctcctctgccaccagggagctggacgagctgatggcttcgctgtcggatttcaagttcatggcccaggggaagacagggagcagctcaccccctggggggcccccgaagcccgggagccagctggacagcatgctggggagcctgcagtctgacctgaacaagctgggggtcgccacagtcgccaaaggagtctgcggggcctgcaagaagcccatcgccgggcaggttgtgaccgccatggggaagacgtggcaccccgagcacttcgtctgcacccactgccaggaggagatcggatcccggaacttcttcgagcgggatggacagccctactgtgaaaaggactaccacaacctcttctccccgcgctgctactactgcaacggccccatcctggataaagtggtgacagcccttgaccggacgtggcaccctgaacacttcttctgtgcacagtgtggagccttctttggtcccgaagggttccacgagaaggacggcaaggcctactgtcgcaaggactacttcgacatgttcgcacccaagtgtggcggctgcgcccgggccatcctggagaactatatctcagccctcaacacgctgtggcatcctgagtgctttgtgtgccgggaatgcttcacgccattcgtgaacggcagcttcttcgagcacgacgggcagccctactgtgaggtgcactaccacgagcggcgcggctcgctgtgttctggctgccagaagcccatcaccggccgctgcatcaccgccatggccaagaagttccaccccgacccatgtacgtccccacgaactggcctggccagcaccccacactggagccatctcttcctcatatttcagcagtgcagccggggggcagggaagggcaggcagggtctgttggggtctctttttatccttattcctcccccgacctaa

SEQ ID NO: 272830 - DNA, 3683 bp, Artificial Sequence
  derived and/or modified sequence
ggcgggcgcgggcgcgggcgcgcgcggcggcggcgcgttccgttccgggccgaggctcgcggcggaaaagttgcggggcatagacgagcggccccgggacgggcagctagcgcgaccctgagccggcgcccgtggtccggccatggacgacctcgacgccctgctggcggacttggagtctaccacctcccacatctccaaacggcctgtgttcttgtcggaggagaccccctactcatacccaactggaaaccacacataccaggagattgccgtgccaccccccgtccccccacccccgtccagcgaggccctcaatggcacaatccttgaccccttagaccagtggcagcccagcagctcccgattcatccaccagcagcctcagtcctcatcacctgtgtacggctccagtgccaaaacttccagtgtctccaaccctcaggacagtgttggctctccgtgctcccgagtgggtgaggaggagcacgtctacagcttccccaacaagcagaaatcagctgagccttcacccaccgtaatgagcacgtccctgggcagcaacctttctgaactcgaccgcctgctgctggaactgaacgctgtacagcataacccgccaggcttccctgcagatgaggccaactcaagccccccgcttcctggggccctgagccccctctatggtgtcccagagactaacagccccttgggaggcaaagctgggcccctgacgaaagagaagcctaagcggaatgggggccggggcctggaggacgtgcggcccagtgtggagagtctcttggatgaactggagagctccgtgcccagccccgtccctgccatcactgtgaaccagggcgagatgagcagcccgcagcgcgtcacctccacccaacagcagacacgcatctcggcctcctctgccaccagggagctggacgagctgatggcttcgctgtcggatttcaagttcatggcccaggggaagacagggagcagctcaccccctggggggcccccgaagcccgggagccagctggacagcatgctggggagcctgcagtctgacctgaacaagctgggggtcgccacagtcgccaaaggagtctgcggggcctgcaagaagcccatcgccgggcaggttgtgaccgccatggggaagacgtggcaccccgagcacttcgtctgcacccactgccaggaggagatcggatcccggaacttcttcgagcgggatggacagccctactgtgaaaaggactaccacaacctcttctccccgcgctgctactactgcaacggccccatcctggataaagtggtgacagcccttgaccggacgtggcaccctgaacacttcttctgtgcacagtgtggagccttctttggtcccgaagggttccacgagaaggacggcaaggcctactgtcgcaaggactacttcgacatgttcgcacccaagtgtggcggctgcgcccgggccatcctggagaactatatctcagccctcaacacgctgtggcatcctgagtgctttgtgtgccgggaatgcttcacgccattcgtgaacggcagcttcttcgagcacgacgggcagccctactgtgaggtgcactaccacgagcggcgcggctcgctgtgttctggctgccagaagcccatcaccggccgctgcatcaccgccatggccaagaagttccaccccgagcacttcgtctgtgccttctgcctcaagcagctcaacaagggcaccttcaaggagcagaacgacaagccttactgtcagaactgcttcctcaagctcttctgctaggtgccctgcccctgtctctgccccccttccccagccagcatccccaactgcgactgtgacctagagacttcacccgggggtgaaggggtaaacccgactgaaactggaacccttgtcctccgctggtgcgggatggacagagggccgtgaggggtccccctgcttgtcttcacccctgccagagcctctgggccccctcctccctcctgtagctctccctaggctgcccactctccatcctccccaggggtagaggctgggggctccaccccagcccatgtacgtccccacgaactggcctggccagcaccccacactggagccatctcttcctcatatttcagcagtgcagccggggggcagggaagggcaggcagggtctgttggggtctctttttatccttattcctcccccgacctaattgtctttgttctgtgattattgggggacacccggctccctccagacaatgccagcataaatccatccatccaaaggcagagaaccaaaggggccatggaaggttctctgtgctcctcctacccttccagtgccctaggcctggcgactgcccctgccttttagacccgccctccccttttatacctgctcttgttctactgagaaaagcctctccagcaataatgttttctagtcacttcctccgtctccgggacggcgtgcctggacactgtaccgactttgatagatttctacactgaggtttgaattcatatcgcctgagttgcttttacttctctatacaaaatgattttgaagagattttaaagacgttcccttttgtattctcttcctcatccaccgccactgggcctgtcactgatggtggctctggtgtgaagtttgctttgtactgagggttggggtggggaagcaatttgtattttattgtttcttagcacaagcaggtgaactgggagcagctctgtgactccccctctttcacttcatagctcaccaggactgttttataaactgctgtatttggaaaccccttctttacttcccaggccagcaagctcttcactgaaactggttgaagggtgttgcacccttttgggcctagaattctgaactttatctgttctgtttctgtgggaggagaaggggaagtatgttttggggggctgcttcctgtctgagtaagccctcaggagcctctgctcccctgtgaacccactgaaccttctgagcccccactgcttctatggggctctctcttctgccttctcaggaaagctggtgtctgattttggccatcaggactctgacgtctctttggtcttgttgatttcctctgggcatatcccttccccagatctgctcctcccctttcacaggtgggatcggcactcagggggtctggaaagaaggtcataagggagcatgataggatttggggcagagggacaggctcctctggggaaaccccccagagctctttaccaaggatgaaagaggagccaggccttgggctcctgatgaggagaaaggggccccaccggggtctaatggtgacagtccaaaccactccactggcctcctggcagaagccgagtgtgctggggtctccgaagagggtccctcctttttgggggaaggtcagcccagcccctccaaaggtctgatgtctccactttcacccgcaggccttaccgctctgtttatagtgacccaccctagatcttccccaagagggactggggtttctggggtccattctctgagtcagtggttatttgaaaatttgattttgattttattttttctctgtaaacttccaagctggcttttcccatttcaattcctgtgatttatgccaataaagtttgcccatgattttca

SEQ ID NO: 272831 - DNA, 3807 bp, Artificial Sequence
  derived and/or modified sequence
ttcccctgtgtactcctggctcggctggccggctaaggcagtttctcatcactgatgtgctctgggacagctgagtgggatgggctcctctggggtgggtgtggaggagtggtcgtgatgcctggaacactgcagtcactcctcagagacacgacttggcagccctcctgagcctgcctggtcacatgctgcctgtcttggaaggtcctctgtcccaagcagtggatgtgcagtttcttcacccctgcttagcttcatcaggcacaatgcgtctttgagacgccctgctggcggacttggagtctaccacctcccacatctccaaacggcctgtgttcttgtcggaggagaccccctactcatacccaactggaaaccacacataccaggagattgccgtgccaccccccgtccccccacccccgtccagcgaggccctcaatggcacaatccttgaccccttagaccagtggcagcccagcagctcccgattcatccaccagcagcctcagtcctcatcacctgtgtacggctccagtgccaaaacttccagtgtctccaaccctcaggacagtgttggctctccgtgctcccgagtgggtgaggaggagcacgtctacagcttccccaacaagcagaaatcagctgagccttcacccaccgtaatgagcacgtccctgggcagcaacctttctgaactcgaccgcctgctgctggaactgaacgctgtacagcataacccgccaggcttccctgcagatgaggccaactcaagccccccgcttcctggggccctgagccccctctatggtgtcccagagactaacagccccttgggaggcaaagctgggcccctgacgaaagagaagcctaagcggaatgggggccggggcctggaggacgtgcggcccagtgtggagagtctcttggatgaactggagagctccgtgcccagccccgtccctgccatcactgtgaaccagggcgagatgagcagcccgcagcgcgtcacctccacccaacagcagacacgcatctcggcctcctctgccaccagggagctggacgagctgatggcttcgctgtcggatttcaagttcatggcccaggggaagacagggagcagctcaccccctggggggcccccgaagcccgggagccagctggacagcatgctggggagcctgcagtctgacctgaacaagctgggggtcgccacagtcgccaaaggagtctgcggggcctgcaagaagcccatcgccgggcaggttgtgaccgccatggggaagacgtggcaccccgagcacttcgtctgcacccactgccaggaggagatcggatcccggaacttcttcgagcgggatggacagccctactgtgaaaaggactaccacaacctcttctccccgcgctgctactactgcaacggccccatcctggataaagtggtgacagcccttgaccggacgtggcaccctgaacacttcttctgtgcacagtgtggagccttctttggtcccgaagggttccacgagaaggacggcaaggcctactgtcgcaaggactacttcgacatgttcgcacccaagtgtggcggctgcgcccgggccatcctggagaactatatctcagccctcaacacgctgtggcatcctgagtgctttgtgtgccgggaatgcttcacgccattcgtgaacggcagcttcttcgagcacgacgggcagccctactgtgaggtgcactaccacgagcggcgcggctcgctgtgttctggctgccagaagcccatcaccggccgctgcatcaccgccatggccaagaagttccaccccgagcacttcgtctgtgccttctgcctcaagcagctcaacaagggcaccttcaaggagcagaacgacaagccttactgtcagaactgcttcctcaagctcttctgctaggtgccctgcccctgtctctgccccccttccccagccagcatccccaactgcgactgtgacctagagacttcacccgggggtgaaggggtaaacccgactgaaactggaacccttgtcctccgctggtgcgggatggacagagggccgtgaggggtccccctgcttgtcttcacccctgccagagcctctgggccccctcctccctcctgtagctctccctaggctgcccactctccatcctccccaggggtagaggctgggggctccaccccagcccatgtacgtccccacgaactggcctggccagcaccccacactggagccatctcttcctcatatttcagcagtgcagccggggggcagggaagggcaggcagggtctgttggggtctctttttatccttattcctcccccgacctaattgtctttgttctgtgattattgggggacacccggctccctccagacaatgccagcataaatccatccatccaaaggcagagaaccaaaggggccatggaaggttctctgtgctcctcctacccttccagtgccctaggcctggcgactgcccctgccttttagacccgccctccccttttatacctgctcttgttctactgagaaaagcctctccagcaataatgttttctagtcacttcctccgtctccgggacggcgtgcctggacactgtaccgactttgatagatttctacactgaggtttgaattcatatcgcctgagttgcttttacttctctatacaaaatgattttgaagagattttaaagacgttcccttttgtattctcttcctcatccaccgccactgggcctgtcactgatggtggctctggtgtgaagtttgctttgtactgagggttggggtggggaagcaatttgtattttattgtttcttagcacaagcaggtgaactgggagcagctctgtgactccccctctttcacttcatagctcaccaggactgttttataaactgctgtatttggaaaccccttctttacttcccaggccagcaagctcttcactgaaactggttgaagggtgttgcacccttttgggcctagaattctgaactttatctgttctgtttctgtgggaggagaaggggaagtatgttttggggggctgcttcctgtctgagtaagccctcaggagcctctgctcccctgtgaacccactgaaccttctgagcccccactgcttctatggggctctctcttctgccttctcaggaaagctggtgtctgattttggccatcaggactctgacgtctctttggtcttgttgatttcctctgggcatatcccttccccagatctgctcctcccctttcacaggtgggatcggcactcagggggtctggaaagaaggtcataagggagcatgataggatttggggcagagggacaggctcctctggggaaaccccccagagctctttaccaaggatgaaagaggagccaggccttgggctcctgatgaggagaaaggggccccaccggggtctaatggtgacagtccaaaccactccactggcctcctggcagaagccgagtgtgctggggtctccgaagagggtccctcctttttgggggaaggtcagcccagcccctccaaaggtctgatgtctccactttcacccgcaggccttaccgctctgtttatagtgacccaccctagatcttccccaagagggactggggtttctggggtccattctctgagtcagtggttatttgaaaatttgattttgattttattttttctctgtaaacttccaagctggcttttcccatttcaattcctgtgatttatgccaataaagtttgcccatgattttca

SEQ ID NO: 272832 - protein, 403 aa, Artificial Sequence
  derived and/or modified sequence
MSAPSSTGPQYCPGLPSRKEATPEGRPETCLLPSSPQAQRPIQGLEQRADGERCWAAGWPRDGGRSSPGGQDEGGGSWPLEEVVLLVSISSSVQEGEKYPHPCAARHRTPSLRSPDQPPPCPQFMAQGKTGSSSPPGGPPKPGSQLDSMLGSLQSDLNKLGVATVAKGVCGACKKPIAGQVVTAMGKTWHPEHFVCTHCQEEIGSRNFFERDGQPYCEKDYHNLFSPRCYYCNGPILDKVVTALDRTWHPEHFFCAQCGAFFGPEGFHEKDGKAYCRKDYFDMFAPKCGGCARAILENYISALNTLWHPECFVCRECFTPFVNGSFFEHDGQPYCEVHYHERRGSLCSGCQKPITGRCITAMAKKFHPEHFVCAFCLKQLNKGTFKEQNDKPYCQNCFLKLFC

SEQ ID NO: 272833 - DNA, 1212 bp, Artificial Sequence
  derived and/or modified sequence
atgagcgcccccagcagcaccggcccccagtactgccccggcctgcccagcagaaaggaggccacccccgagggcagacccgagacctgcctgctgcccagcagcccccaggcccagagacccatccagggcctggagcagagagccgacggcgagagatgctgggccgccggctggcccagagacggcggcagaagcagccccggcggccaggacgagggcggcggcagctggcccctggaggaggtggtgctgctggtgagcatcagcagcagcgtgcaggagggcgagaagtacccccacccctgcgccgccagacacagaacccccagcctgagaagccccgaccagccccccccctgcccccagttcatggcccagggcaagaccggcagcagcagcccccccggcggcccccccaagcccggcagccagctggacagcatgctgggcagcctgcagagcgacctgaacaagctgggcgtggccaccgtggccaagggcgtgtgcggcgcctgcaagaagcccatcgccggccaggtggtgaccgccatgggcaagacctggcaccccgagcacttcgtgtgcacccactgccaggaggagatcggcagcagaaacttcttcgagagagacggccagccctactgcgagaaggactaccacaacctgttcagccccagatgctactactgcaacggccccatcctggacaaggtggtgaccgccctggacagaacctggcaccccgagcacttcttctgcgcccagtgcggcgccttcttcggccccgagggcttccacgagaaggacggcaaggcctactgcagaaaggactacttcgacatgttcgcccccaagtgcggcggctgcgccagagccatcctggagaactacatcagcgccctgaacaccctgtggcaccccgagtgcttcgtgtgcagagagtgcttcacccccttcgtgaacggcagcttcttcgagcacgacggccagccctactgcgaggtgcactaccacgagagaagaggcagcctgtgcagcggctgccagaagcccatcaccggcagatgcatcaccgccatggccaagaagttccaccccgagcacttcgtgtgcgccttctgcctgaagcagctgaacaagggcaccttcaaggagcagaacgacaagccctactgccagaactgcttcctgaagctgttctgctag

SEQ ID NO: 272834 - DNA, 1212 bp, Artificial Sequence
  derived and/or modified sequence
atgtccgctccttccagcaccggacctcagtactgtcccggtcttccctctaggaaagaggccactcccgagggacgtccagagacctgcctcctcccatcatcgccccaagcccagcgccccatacaaggcctggagcaacgcgccgacggcgaaagatgttgggctgcagggtggccgagggacggcggccggtcctctcctgggggccaggacgaaggaggcggatcatggccacttgaggaggtggtccttttggtttctatatcttcaagcgtgcaggagggtgagaaatatcctcatccttgtgcagctaggcaccggacaccctccttgcgaagtcccgatcaacccccaccttgtccccagttcatggctcagggtaagacaggttcaagttcacctcccgggggcccccctaaacccggcagccaattggattcaatgctgggctcattacagagtgacctcaataagcttggggtggctactgttgcaaaaggcgtgtgcggagcatgcaaaaagcctatagctggccaggtggtaactgccatggggaagacatggcaccccgaacatttcgtgtgtacccattgtcaggaggaaattggcagccggaatttcttcgagcgagacggccagccttattgcgagaaggactatcacaatttatttagtccgcggtgctactattgtaatggccctatattggataaggtggtgactgctctggatcgcacttggcacccagagcactttttctgtgcccagtgtggcgcgttctttggcccagaaggatttcacgaaaaagatggaaaagcctattgcaggaaagactacttcgatatgtttgccccaaagtgcggaggatgtgctagagctattctcgaaaactacatcagcgcactaaacacactgtggcatcccgaatgttttgtctgtagagaatgcttcacaccttttgtgaacgggtccttctttgagcacgatggccagccctattgtgaagtccattaccacgaacgcagggggtcactttgctccgggtgtcaaaaacctatcaccggacgctgtatcacggccatggctaagaagttccaccccgagcactttgtgtgcgccttttgcctcaagcagcttaataaaggcacttttaaggagcagaacgacaaaccttattgtcagaattgtttcttaaaattgttttgttag

SEQ ID NO: 272835 - DNA, 1212 bp, Artificial Sequence
  derived and/or modified sequence
atgtctgcccccagcagcacaggcccccagtactgccccggcctgcccagcaggaaggaggccaccccagagggccggcctgagacctgcctgctgcccagcagcccccaggcccagaggcccatccagggcctggagcagagagcagatggagagcgctgctgggccgccggctggcccagagatggcggccgcagcagccctgggggccaggatgagggcggcggctcctggcccctggaggaggtggtgctgctggtgtccatcagcagctctgtgcaggagggggagaagtacccccacccctgtgccgcccggcacaggacccccagcctgcggagcccagaccagcccccaccctgcccccagttcatggcccagggcaagacaggcagcagcagccccccaggcggcccccccaagccaggcagccagctggacagcatgctgggcagcctgcagagcgacctgaacaagctgggcgtggccaccgtggccaagggcgtgtgtggggcctgcaagaagcccatcgccggccaggtggtgacagccatgggcaagacctggcaccctgagcactttgtgtgcacccactgccaggaggagatcggcagcaggaacttctttgaaagagatggccagccctactgtgagaaggactaccacaacctcttcagcccccgctgctactactgcaatggccccatcctggacaaggtggtgacagccctggacaggacctggcaccctgagcacttcttctgtgcccagtgtggggccttcttcggccctgagggcttccacgagaaggatggcaaggcctactgcaggaaggactactttgacatgtttgcccccaagtgtggcggctgtgcccgggccatcctggagaactacatcagcgccctgaacaccctgtggcaccctgagtgctttgtgtgccgggagtgcttcaccccatttgtgaatggcagcttctttgaacatgatggccagccctactgtgaggtgcactaccacgagcggcggggcagcctgtgcagcggctgccagaagcccatcaccggccgctgcatcacagccatggccaagaagttccaccctgagcactttgtgtgtgccttctgcctgaagcagctgaacaagggcaccttcaaggagcagaatgacaagccctactgccagaactgcttcctgaagctgttctgctag

SEQ ID NO: 272836 - DNA, 1212 bp, Artificial Sequence
  derived and/or modified sequence
atgagcgcccccagcagcaccggcccccagtactgccccggcctgccctctcgcaaagaggcaacccccgaaggtcgaccagaaacttgtctgctgccaagttccccccaggctcagcgacccatacagggcctggaacagcgagcagatggtgaaaggtgctgggccgctggctggcctagagatggcggcaggtcctcaccaggtggccaggacgaaggcggcgggagctggccattggaagaagtggtgctgctcgtgtctatctcaagttcggtacaggagggggagaagtatccgcatccatgtgccgcccggcacaggactccaagtctcagatctccggatcaaccccctccgtgtcctcaattcatggcgcagggtaagaccggatcttctagccctccaggcggccctcctaaaccaggaagccaactcgacagcatgttaggttccctgcagagtgacttgaataaactgggagtggcaactgttgccaagggggtctgcggggcttgcaagaaacccatagcggggcaagttgtgacggctatgggcaaaacgtggcaccctgagcatttcgtctgtacgcactgtcaagaggagatcgggtctaggaacttttttgaacgcgatggacagccatactgtgaaaaggattaccataatttatttagtccaaggtgctactattgcaacgggcccattctcgacaaggtggtgactgcgctcgaccggacctggcatcctgaacattttttttgcgcccagtgtggcgcattcttcgggcccgagggtttccatgaaaaggatgggaaggcatattgtagaaaggactacttcgacatgttcgcccctaagtgcggtggctgcgctcgcgccatcttggaaaactacatctccgctctgaatacactatggcaccctgaatgtttcgtgtgtcgagaatgttttaccccctttgttaacggctcattcttcgagcacgacggtcaaccatactgcgaagtccactaccacgagcgccgtgggagcctatgttctggatgtcagaagcctatcacaggaaggtgcatcaccgctatggccaagaaattccaccctgagcactttgtttgtgccttctgtctgaaacagctcaacaaaggcaccttcaaggaacaaaacgataagccgtactgccagaactgtttccttaagctgttttgttag

SEQ ID NO: 272837 - DNA, 1212 bp, Artificial Sequence
  derived and/or modified sequence
atgtccgccccttcatctaccggccctcagtactgccctggccttcccagtcgaaaggaggcgacaccagaaggcaggccagagacatgccttctgcctagttccccccaggcacaacgccctattcagggattggaacagcgggcagacggagagcgatgctgggcagcgggttggccacgagatggcggtcgctcctctcctggcggtcaggacgagggcggaggctcatggcctctggaagaggtggtactcctggtgtctatatcaagctcagtccaggaaggcgagaagtaccctcatccttgtgccgcacgtcacaggaccccgtcactaaggtcgccagaccagccccctccgtgtccgcaatttatggcacaaggtaagaccggcagcagctcaccgcctgggggaccgcctaaacctggctcccagttggatagcatgctcggatcactgcaatccgacttgaataagctgggagttgctacagtggctaaaggagtgtgcggagcttgcaaaaaacctatcgccggtcaagtcgtgaccgcaatgggcaaaacctggcaccccgaacacttcgtctgcactcactgccaagaggaaattggcagcaggaacttcttcgaacgggatgggcagccttactgtgagaaggactaccacaacttgttcagtcccaggtgttattactgtaacgggcctattctcgataaggtcgttacagctctcgataggacctggcacccagagcactttttttgtgcacaatgcggcgcatttttcgggccagagggtttccacgagaaggatggtaaagcgtactgtagaaaggactactttgatatgttcgcccctaaatgtgggggttgtgctagagccatcctcgagaactatattagcgcattgaacactctgtggcatccagaatgcttcgtgtgccgcgaatgctttacaccatttgtgaacggatcttttttcgaacatgatggacagccatattgcgaagtgcattaccatgagcgaagaggttctttgtgtagcggctgccagaagccaatcactggacgatgcatcaccgccatggctaagaagttccaccctgagcacttcgtctgtgcgttctgtcttaaacaactcaacaagggcaccttcaaagaacagaacgacaaaccctattgccaaaactgcttcctgaaattgttctgttag

SEQ ID NO: 272838 - DNA, 4132 bp, Artificial Sequence
  derived and/or modified sequence
gatgaccgagaggggaagtgtggccaggccaacccagggacctgaaaccccaaggagcccagagggcaccacggaagctgccacccaggacgggaaggaacagccagagcttccatgtgccatggccatgggcacacccagcaccacggagaggatttccacctctggccagatccgatctgtgatcaggaggagctgggagtctggccacgcacaccccatgtcccgggagccctcccctcgccgccggctggaccctgccaccttgagcaggaccccatcccaggaacagctcatcgcggagctgcaggggcggctgggcatccagcctgaggcagaggagccggcggaggcggcggggccctctgcccaggactggctgaccgagggcgtcatcatcactgtgcagccacgtgggaagcgggccggggggcagctcgtagagaaggtggcgaggagatgcccatggctggggctgggccagagccaagcacctggggtccgggttcttccctggccccagtgctggccggaggggagatctggggagagggtgggggtttcttgcctcctgtgactttggaagactggccccactcttggtgcagagtgggaaggcccagggggagcctggggaggtcccgccacccctgtgggctgagctggcgatttcttcctcatcgctctccctcctttcttctccccaggttgtcttccctcctggctctcccattcccctgagaagaaccatctctgtcctggcttctccttctgtccctttgctccagcatcgcacagacgccgcggccagcagctcttctcccctgcccagcctgctcgcctcctcccccctggggccctcagcttatacctgtggttcttctggggtccagagtgcaggggaagagccccatgatgagggggtgcagggccctgcccttcccattcctgcaccccacaccatgaggtccgtgggctgccagactgatgaggacccgctcttccccccgatgcagaaggtccgctgccctcttgcttttctgtgggtccacccatgtctgctccttcctcgactggtcctcagtactgccccgggctcccatcgaggaaagaagccactccagaagggagaccagaaacctgtctcctcccttccagcccccaggcccagcgcccgatccagggcctggagcaaagagcggatggggagcggtgctgggcggccggctggcctcgggacggcgggcggagcagccccggagggcaggacgagggagggggctcctggcccctggaggaggttgtacttcttgtctccatcagctcatctgtccaggagggagaaaagtacccccatccctgtgctgccagacaccgtaccccgagcctcaggagtcctgaccagccccctccgtgtccacagttcatggcccaggggaagacagggagcagctcaccccctggggggcccccgaagcccgggagccagctggacagcatgctggggagcctgcagtctgacctgaacaagctgggggtcgccacagtcgccaaaggagtctgcggggcctgcaagaagcccatcgccgggcaggttgtgaccgccatggggaagacgtggcaccccgagcacttcgtctgcacccactgccaggaggagatcggatcccggaacttcttcgagcgggatggacagccctactgtgaaaaggactaccacaacctcttctccccgcgctgctactactgcaacggccccatcctggataaagtggtgacagcccttgaccggacgtggcaccctgaacacttcttctgtgcacagtgtggagccttctttggtcccgaagggttccacgagaaggacggcaaggcctactgtcgcaaggactacttcgacatgttcgcacccaagtgtggcggctgcgcccgggccatcctggagaactatatctcagccctcaacacgctgtggcatcctgagtgctttgtgtgccgggaatgcttcacgccattcgtgaacggcagcttcttcgagcacgacgggcagccctactgtgaggtgcactaccacgagcggcgcggctcgctgtgttctggctgccagaagcccatcaccggccgctgcatcaccgccatggccaagaagttccaccccgagcacttcgtctgtgccttctgcctcaagcagctcaacaagggcaccttcaaggagcagaacgacaagccttactgtcagaactgcttcctcaagctcttctgctaggtgccctgcccctgtctctgccccccttccccagccagcatccccaactgcgactgtgacctagagacttcacccgggggtgaaggggtaaacccgactgaaactggaacccttgtcctccgctggtgcgggatggacagagggccgtgaggggtccccctgcttgtcttcacccctgccagagcctctgggccccctcctccctcctgtagctctccctaggctgcccactctccatcctccccaggggtagaggctgggggctccaccccagcccatgtacgtccccacgaactggcctggccagcaccccacactggagccatctcttcctcatatttcagcagtgcagccggggggcagggaagggcaggcagggtctgttggggtctctttttatccttattcctcccccgacctaattgtctttgttctgtgattattgggggacacccggctccctccagacaatgccagcataaatccatccatccaaaggcagagaaccaaaggggccatggaaggttctctgtgctcctcctacccttccagtgccctaggcctggcgactgcccctgccttttagacccgccctccccttttatacctgctcttgttctactgagaaaagcctctccagcaataatgttttctagtcacttcctccgtctccgggacggcgtgcctggacactgtaccgactttgatagatttctacactgaggtttgaattcatatcgcctgagttgcttttacttctctatacaaaatgattttgaagagattttaaagacgttcccttttgtattctcttcctcatccaccgccactgggcctgtcactgatggtggctctggtgtgaagtttgctttgtactgagggttggggtggggaagcaatttgtattttattgtttcttagcacaagcaggtgaactgggagcagctctgtgactccccctctttcacttcatagctcaccaggactgttttataaactgctgtatttggaaaccccttctttacttcccaggccagcaagctcttcactgaaactggttgaagggtgttgcacccttttgggcctagaattctgaactttatctgttctgtttctgtgggaggagaaggggaagtatgttttggggggctgcttcctgtctgagtaagccctcaggagcctctgctcccctgtgaacccactgaaccttctgagcccccactgcttctatggggctctctcttctgccttctcaggaaagctggtgtctgattttggccatcaggactctgacgtctctttggtcttgttgatttcctctgggcatatcccttccccagatctgctcctcccctttcacaggtgggatcggcactcagggggtctggaaagaaggtcataagggagcatgataggatttggggcagagggacaggctcctctggggaaaccccccagagctctttaccaaggatgaaagaggagccaggccttgggctcctgatgaggagaaaggggccccaccggggtctaatggtgacagtccaaaccactccactggcctcctggcagaagccgagtgtgctggggtctccgaagagggtccctcctttttgggggaaggtcagcccagcccctccaaaggtctgatgtctccactttcacccgcaggccttaccgctctgtttatagtgacccaccctagatcttccccaagagggactggggtttctggggtccattctctgagtcagtggttatttgaaaatttgattttgattttattttttctctgtaaacttccaagctggcttttcccatttcaattcctgtgatttatgccaataaagtttgcccatgattttc

SEQ ID NO: 272839 - protein, 871 aa, Artificial Sequence
  derived and/or modified sequence
MADSSEGPRAGPGEVAELPGDESGTPGGEAFPLSSLANLFEGEDGSLSPSPADASRPAGPGDGRPNLRMKFQGAFRKGVPNPIDLLESTLYESSVVPGPKKAPMDSLFDYGTYRHHSSDNKRWRKKIIEKQPQSPKAPAPQPPPILKVFNRPILFDIVSRGSTADLDGLLPFLLTHKKRLTDEEFREPSTGKTCLPKALLNLSNGRNDTIPVLLDIAERTGNMREFINSPFRDIYYRGQTALHIAIERRCKHYVELLVAQGADVHAQARGRFFQPKDEGGYFYFGELPLSLAACTNQPHIVNYLTENPHKKADMRRQDSRGNTVLHALVAIADNTRENTKFVTKMYDLLLLKCARLFPDSNLEAVLNNDGLSPLMMAAKTGKIGIFQHIIRREVTDEDTRHLSRKFKDWAYGPVYSSLYDLSSLDTCGEEASVLEILVYNSKIENRHEMLAVEPINELLRDKWRKFGAVSFYINVVSYLCAMVIFTLTAYYQPLEGTPPYPYRTTVDYLRLAGEVITLFTGVLFFFTNIKDLFMKKCPGVNSLFIDGSFQLLYFIYSVLVIVSAALYLAGIEAYLAVMVFALVLGWMNALYFTRGLKLTGTYSIMIQKILFKDLFRFLLVYLLFMIGYASALVSLLNPCANMKVCNEDQTNCTVPTYPSCRDSETFSTFLLDLFKLTIGMGDLEMLSSTKYPVVFIILLVTYIILTFVLLLNMLIALMGETVGQVSKESKHIWKLQWATTILDIERSFPVFLRKAFRSGEMVTVGKSSDGTPDRRWCFRVDEVNWSHWNQNLGIINEDPGKNETYQYYGFSHTVGRLRRDRWSSVVPRVVELNKNSNPDEVVVPLDSMGNPRCDGHQQGYPRKWRTDDAPL

SEQ ID NO: 272840 - DNA, 2616 bp, Artificial Sequence
  derived and/or modified sequence
atggccgacagcagcgagggccccagagccggccccggcgaggtggccgagctgcccggcgacgagagcggcacccccggcggcgaggccttccccctgagcagcctggccaacctgttcgagggcgaggacggcagcctgagccccagccccgccgacgccagcagacccgccggccccggcgacggcagacccaacctgagaatgaagttccagggcgccttcagaaagggcgtgcccaaccccatcgacctgctggagagcaccctgtacgagagcagcgtggtgcccggccccaagaaggcccccatggacagcctgttcgactacggcacctacagacaccacagcagcgacaacaagagatggagaaagaagatcatcgagaagcagccccagagccccaaggcccccgccccccagcccccccccatcctgaaggtgttcaacagacccatcctgttcgacatcgtgagcagaggcagcaccgccgacctggacggcctgctgcccttcctgctgacccacaagaagagactgaccgacgaggagttcagagagcccagcaccggcaagacctgcctgcccaaggccctgctgaacctgagcaacggcagaaacgacaccatccccgtgctgctggacatcgccgagagaaccggcaacatgagagagttcatcaacagccccttcagagacatctactacagaggccagaccgccctgcacatcgccatcgagagaagatgcaagcactacgtggagctgctggtggcccagggcgccgacgtgcacgcccaggccagaggcagattcttccagcccaaggacgagggcggctacttctacttcggcgagctgcccctgagcctggccgcctgcaccaaccagccccacatcgtgaactacctgaccgagaacccccacaagaaggccgacatgagaagacaggacagcagaggcaacaccgtgctgcacgccctggtggccatcgccgacaacaccagagagaacaccaagttcgtgaccaagatgtacgacctgctgctgctgaagtgcgccagactgttccccgacagcaacctggaggccgtgctgaacaacgacggcctgagccccctgatgatggccgccaagaccggcaagatcggcatcttccagcacatcatcagaagagaggtgaccgacgaggacaccagacacctgagcagaaagttcaaggactgggcctacggccccgtgtacagcagcctgtacgacctgagcagcctggacacctgcggcgaggaggccagcgtgctggagatcctggtgtacaacagcaagatcgagaacagacacgagatgctggccgtggagcccatcaacgagctgctgagagacaagtggagaaagttcggcgccgtgagcttctacatcaacgtggtgagctacctgtgcgccatggtgatcttcaccctgaccgcctactaccagcccctggagggcacccccccctacccctacagaaccaccgtggactacctgagactggccggcgaggtgatcaccctgttcaccggcgtgctgttcttcttcaccaacatcaaggacctgttcatgaagaagtgccccggcgtgaacagcctgttcatcgacggcagcttccagctgctgtacttcatctacagcgtgctggtgatcgtgagcgccgccctgtacctggccggcatcgaggcctacctggccgtgatggtgttcgccctggtgctgggctggatgaacgccctgtacttcaccagaggcctgaagctgaccggcacctacagcatcatgatccagaagatcctgttcaaggacctgttcagattcctgctggtgtacctgctgttcatgatcggctacgccagcgccctggtgagcctgctgaacccctgcgccaacatgaaggtgtgcaacgaggaccagaccaactgcaccgtgcccacctaccccagctgcagagacagcgagaccttcagcaccttcctgctggacctgttcaagctgaccatcggcatgggcgacctggagatgctgagcagcaccaagtaccccgtggtgttcatcatcctgctggtgacctacatcatcctgaccttcgtgctgctgctgaacatgctgatcgccctgatgggcgagaccgtgggccaggtgagcaaggagagcaagcacatctggaagctgcagtgggccaccaccatcctggacatcgagagaagcttccccgtgttcctgagaaaggccttcagaagcggcgagatggtgaccgtgggcaagagcagcgacggcacccccgacagaagatggtgcttcagagtggacgaggtgaactggagccactggaaccagaacctgggcatcatcaacgaggaccccggcaagaacgagacctaccagtactacggcttcagccacaccgtgggcagactgagaagagacagatggagcagcgtggtgcccagagtggtggagctgaacaagaacagcaaccccgacgaggtggtggtgcccctggacagcatgggcaaccccagatgcgacggccaccagcagggctaccccagaaagtggagaaccgacgacgcccccctgtag

SEQ ID NO: 272841 - DNA, 2616 bp, Artificial Sequence
  derived and/or modified sequence
atggctgatagctctgaggggccgcgggccggccccggcgaagtggccgaattgcccggggatgagagcggcacccctggaggagaagccttcccgttaagttcacttgcgaatctgtttgaaggagaagacggctctttgagtccctcacctgccgatgcctcgcgacccgcggggcctggtgatggtagacctaacctgcgtatgaagtttcagggggccttccggaaaggagttcctaaccctatagatttgctggaatccacactatacgagagtagcgtggtccccggaccaaagaaggcaccaatggattcactgtttgattatgggacttacagacatcactccagcgacaacaaacgatggcgtaaaaaaatcattgagaaacagccgcaaagtcctaaggctccagctccccagcccccacccatcctcaaagtctttaataggcccatcctgttcgatatcgtgagtcgcgggtctaccgccgatctggacgggttattgccatttctccttacacataaaaaaaggctcacagacgaagagttcagagagccctcgacagggaagacatgtttgcctaaagccctgctcaatctcagtaatggaaggaatgataccatacctgtgttgctggatatagcagagcgaaccggaaacatgagggaattcattaacagccccttccgagacatatactaccggggacagactgcactgcacatagcgattgagcgaagatgtaagcactacgttgagctgctagttgctcagggagccgacgtgcatgcccaggcaaggggtcgttttttccagccgaaagatgaggggggttatttctatttcggtgaactccctctgagtcttgccgcttgtacaaatcagccacatattgtgaactatctcactgagaatccccataaaaaagctgacatgaggaggcaggactctcgcgggaacacagttcttcatgccctggttgctatcgctgacaacactagggaaaataccaagtttgtgaccaaaatgtacgatttgctgctgttgaaatgcgcaagactattcccagattccaacctggaagctgtcttgaataacgatgggctgagtccactcatgatggctgcaaagacaggcaagatcggcatctttcagcacattattcgcagggaggtgaccgatgaagacacaagacacctgtcacgaaagttcaaagattgggcctatggacctgtgtattcctcgctttacgatctttctagtttagacacctgcggagaggaagcatccgtcctggagatcctcgtttacaattcaaagatagaaaaccggcatgagatgttggctgtggagccaattaacgagctgctgagagacaaatggcgtaaattcggagccgtgtcgttttatatcaatgtggtgagctatctgtgcgcaatggtcatcttcactctaacagcttattaccagcctctcgagggaactcctccatacccctacagaaccactgttgactacctgagactggcaggggaggtaatcacacttttcacgggcgtgctttttttttttactaacattaaggatctgtttatgaagaaatgtcccggggtgaattctctgttcattgacggatcctttcagttgctctacttcatctattccgttctggttatagtttccgctgctctctacttggccggcattgaggcatacttggcagtgatggtgtttgcgctggtactgggctggatgaatgcattgtattttactagggggctgaagctgactgggacatactccattatgatccagaagatcttattcaaggatctgtttcgctttcttctcgtgtatctcctgtttatgataggttatgccagcgctctggtgtcactgttgaacccatgcgccaacatgaaggtctgcaatgaagatcaaactaattgtacagtccctacctatcctagctgtcgggattccgaaacattctccacttttctgctggacctgtttaaacttacgataggtatgggcgatctggagatgcttagctccacaaagtatcccgtcgtcttcataattctgctggtgacatacattatcctcaccttcgttctactactcaatatgctcatcgccttaatgggagagacagttggccaagtgtcaaaggagagcaaacacatttggaagctacagtgggccacaaccatcttggacatcgagcggagctttccagttttcctgaggaaggcctttcgttctggagagatggtcactgttggaaagagctcagatgggaccccagaccggcgctggtgctttcgcgtagatgaggtgaactggagtcattggaaccagaacctggggattattaatgaagatccagggaaaaacgagacctatcaatactacgggttttcacatactgtcggacggcttaggagagatcgttggtctagcgtggtgcctagggtcgtggagctgaacaaaaactcaaacccagatgaggtcgttgtcccacttgactccatggggaacccccgttgcgatgggcaccagcaagggtatcctcgcaaatggcgaaccgacgacgctccactttag

SEQ ID NO: 272842 - DNA, 2616 bp, Artificial Sequence
  derived and/or modified sequence
atggctgactcttctgagggcccccgcgcgggacccggagaggtggccgagttgccgggagatgaaagtggcacaccgggcggagaggcatttcctcttagtagtcttgcgaatctgtttgaaggggaggacggcagtttaagtcctagtccagccgatgcatcccggccagccggcccgggagatggaagacctaatttacgcatgaagttccagggggcgttccggaaaggcgttcctaaccctatcgacctgctggagtccaccttgtacgaatcgtccgtggtgccgggccctaaaaaagcccccatggattctctgtttgactacggcacatacagacaccacagctccgataacaagcgctggaggaaaaaaatcattgagaagcagccgcagtctcccaaagcacctgccccacaacctccaccaattttgaaggtcttcaatcgtcctatcttattcgatattgtctcccgtgggtctacagccgacttggacgggttgctcccatttctgctcacccataagaaaagacttactgacgaagagtttcgcgaaccaagtaccggaaagacgtgcctacccaaggcgctgctcaatttgagcaacggccgcaacgacaccattccggttcttctggatatagcagaacggacaggcaatatgcgggaattcatcaattctccattccgggacatctactatcggggccagacagctttgcatatcgccatagaaagacgatgcaaacattatgtcgagctgctggtagcccagggggccgacgtgcacgctcaggcccgaggccggttctttcagcccaaggacgaaggtggttatttttatttcggcgagctgcccctctcgctggctgcttgtacaaatcaaccccacatcgttaattacctcactgaaaatccacataagaaggccgacatgcgcaggcaggatagccggggcaacaccgttcttcacgcactcgtagcaatcgctgacaacacccgggaaaacacaaagttcgtgaccaaaatgtatgacttgttgctcctgaaatgcgcccggctgtttccagattcgaacctggaagctgtgcttaacaacgatggcctgtccccgctgatgatggcagctaaaacgggtaagatcggtatttttcaacatataatccgtagagaggttaccgatgaggacacgcggcaccttagccgaaaattcaaggattgggcatatggccccgtctactcctctctgtatgatctatcctccttagatacttgtggggaagaggcttctgttctggaaatcctggtgtataattcaaagatcgaaaatcggcatgagatgcttgccgtcgagccaataaatgagctcttgagggataaatggcgcaagttcggcgccgttagcttctatatcaacgtggtatcatatctgtgcgccatggtgatcttcactctgaccgcttactatcagccactggaggggacgcctccctacccatacaggaccaccgtggactacctgagactggccggggaggtgataaccctctttaccggtgtgttatttttctttaccaacattaaggacttgttcatgaaaaagtgtcccggtgtgaacagccttttcatcgacggcagctttcagcttctctactttatctactcagtgttagtgattgtttcagcagctctctacctcgcaggtatagaagcatatctcgcggtgatggtcttcgctctggttctggggtggatgaatgctctttactttaccaggggactcaagctgacaggtacctactccattatgatccagaaaattctttttaaggacctattcaggttccttctggtgtaccttcttttcatgataggatacgcctcagcacttgtgagtctgctgaacccctgcgctaatatgaaggtgtgtaacgaggaccagactaactgtactgtgccgacgtaccccagctgccgagatagtgaaactttttcaacattcctgctggatctgttcaagctgactatcggaatgggggacttagagatgcttagcagtacaaaatatccagtcgtgttcataattctgttagtaacatacattattttgaccttcgtgttattgctgaatatgctcatcgcccttatgggcgagacagtcggacaggtttcgaaagagagcaaacatatctggaaactgcagtgggctacgactatactggatattgaacgctccttccccgtcttcctcaggaaagcctttaggtcgggcgagatggtcacagttggcaagtcgtcagatggcactcccgataggcgatggtgcttccgagtggatgaggtgaattggagtcattggaaccaaaacctaggtatcatcaacgaggaccctgggaagaatgaaacctaccaatactatgggttcagccacactgtcgggaggctgcggcgtgacaggtggtccagtgtggttccaagagtggtcgagctgaataagaatagtaatcctgatgaggtggtggtgccgttggactctatgggcaacccccgctgtgacggtcatcagcaaggatacccgcgcaaatggcggacagatgacgccccactgtag

SEQ ID NO: 272843 - DNA, 2616 bp, Artificial Sequence
  derived and/or modified sequence
atggctgacagcagcgagggcccccgggccggccctggagaggtggccgagctgcctggagatgaaagtggcaccccaggaggagaggccttccccctgagcagcctggccaacctgtttgaaggagaagatggcagcctgagccccagccctgcagatgccagcaggcctgctggccctggagatggccggcccaacctgaggatgaagttccagggcgccttcagaaaaggagtgcccaaccccatcgacctgctggagagcaccctgtatgagagctctgtggtgcccggccccaagaaggcccccatggacagcctgtttgattatggcacctaccgccaccacagcagtgacaacaagcgctggaggaagaagatcatcgagaagcagccccagagccccaaggccccagccccccagcccccacccatcctgaaggtgttcaaccggcccatcctgtttgatattgtgtcccggggcagcacagctgacctggatggcctgctgcccttcctgctgacccacaagaagaggctgacagatgaggagttccgggagcccagcacaggcaagacctgcctgcccaaggccctgctgaacctgagcaatggaagaaatgacaccatccctgtgctgctggacattgctgagaggacaggcaacatgagggagttcatcaacagccccttccgggacatctactaccggggccagacagccctgcacatcgccatcgagcggcgctgcaagcactacgtggagctgctggtggcccagggcgcagatgtgcacgcccaggcccggggccgcttcttccagcccaaggatgaaggaggctacttctactttggagagctgcccctgagcctggccgcctgcaccaaccagccccacatcgtgaactacctgacagagaacccccacaagaaggctgacatgaggcggcaggacagccggggcaacacagtgctgcacgccctggtggccatcgctgacaacacccgggagaacaccaagtttgtgaccaagatgtatgacctgctgctgctgaagtgtgcccggctcttcccagacagcaacctggaggccgtgctgaacaatgatggcctgagccccctgatgatggccgccaagacaggcaagattggcatcttccagcacatcatcagaagagaggtgacagatgaggacaccaggcacctgagcaggaagttcaaggactgggcctacggccctgtgtacagcagcctgtatgacctgagcagcctggacacctgtggggaggaggcctctgtgctggagatcctggtgtacaacagcaagattgagaacagacatgagatgctggccgtggagcccatcaatgagctgctgcgggacaagtggaggaagtttggagctgtgtccttctacatcaacgtggtgtcctacctgtgtgccatggtgatcttcaccctgacagcctactaccagcccctggagggcaccccaccctacccctaccgcaccaccgtggactacctgcggctggccggggaggtgatcaccctcttcaccggggtgctcttcttcttcaccaacatcaaggacctcttcatgaagaagtgccctggggtgaacagcctcttcattgatggcagcttccagctgctgtacttcatctacagcgtgctggtgattgtgtctgctgccctgtacctggccggcatcgaggcctacctggccgtgatggtgtttgccctggtgctgggctggatgaatgccctgtacttcacccggggcctgaagctgaccggcacctacagcatcatgatccagaagatcctcttcaaggacctcttccgcttcctgctggtgtacctgctcttcatgattggctacgccagcgccctggtgtccctgctgaacccctgtgccaacatgaaggtgtgcaatgaagaccagaccaactgcaccgtgcccacctaccccagctgccgggacagcgagaccttcagcaccttcctgctggacctcttcaagctgaccatcggcatgggagacctggagatgctgagcagcaccaagtaccctgtggtgttcatcatcctgctggtgacctacatcatcctgacctttgtgctgctgctgaacatgctgattgccctgatgggagaaacagtgggccaggtgtccaaggagagcaagcacatctggaagctgcagtgggccaccaccatcctggacatcgagaggagcttccctgtgttcctgaggaaggccttccgcagcggggagatggtgacagtgggcaagagcagtgatggcaccccagaccggcgctggtgcttccgggtggatgaggtgaactggagccactggaaccagaacctgggcatcatcaatgaagatcctgggaagaatgagacctaccagtactacggcttcagccacacagtgggccgcctgcggcgggaccgctggagctctgtggtgccccgggtggtggagctgaacaagaacagcaacccagatgaggtggtggtgcccctggacagcatgggcaacccccgctgtgatggccaccagcagggctaccccaggaagtggaggacagatgatgcccccctgtag

SEQ ID NO: 272844 - DNA, 2616 bp, Artificial Sequence
  derived and/or modified sequence
atggccgacagcagcgagggcccccgggccggccccggcgaggtggccgagttaccaggggacgagagcggcacgccgggaggcgaagcgttcccgctgtcctcattagccaatctcttcgaaggcgaagacggtagcctgtcaccgtcaccagcagatgcgtcccgaccagctggcccaggcgacggcagaccaaatctacgcatgaagttccagggagcctttcgaaagggcgttccaaaccctattgatctactggagtctaccctttatgaatcttctgtggtgccgggtcctaaaaaggcacctatggacagtctcttcgactacgggacctaccgacaccactctagcgacaataagcggtggagaaaaaaaatcatagaaaaacagcctcagagtccaaaggccccagctcctcaaccacctcctatcctgaaggtgtttaatagacccattctgtttgacatcgtctcccgtgggtctaccgccgatcttgacggtctgttgcccttcttgcttacccacaagaaacgtctcacagacgaggagtttcgagagccatctacaggaaaaacctgtctacctaaggccctgcttaacttgtcaaatggtcggaatgataccatcccagtgctgctcgacattgctgagcggacaggtaacatgagggagttcattaacagtcccttccgtgatatctattacagggggcagactgccctgcatattgccatagagagaaggtgcaagcactacgttgaactattagtggctcagggtgcagatgtgcacgcccaggctagagggcgattttttcaacctaaggatgagggtggctacttctactttggggagctccctcttagcctagccgcctgtaccaatcagccccatattgtgaattatttgacagagaatcctcacaaaaaagccgacatgcggaggcaagattcgcgtggaaatacggttctccatgctctggtggctattgctgataatacaagggagaacaccaagtttgtgactaagatgtacgacctgctgctgttgaagtgcgccaggttgttccccgactctaatctggaggctgttctgaacaacgacggcctgtcacctcttatgatggctgccaagaccggcaagattgggatattccaacatatcattcgacgcgaagttacagatgaggatactaggcacctctctcgtaaattcaaggactgggcttatggccccgtttatagtagcctgtacgacctgtcctcactcgatacatgcggggaggaggcgagcgtcctggaaattctggtctacaacagtaagatcgaaaacagacacgagatgctggctgtcgaacccattaacgaattactgagggataaatggcgaaaatttggcgccgtgagcttttacatcaacgtggtgtcgtatttgtgcgccatggtcatctttaccctgactgcgtactaccagccactcgagggcacccccccatacccttaccgaactactgtggactaccttagattggctggggaggtgattaccctgttcaccggtgtgctgtttttcttcaccaacattaaggatctgtttatgaaaaagtgccctggcgtgaatagcctctttatagatggaagctttcagctgttgtattttatttatagcgtgttggtgatagtgagcgccgcactgtatcttgctgggattgaggcataccttgcagtgatggtgtttgccctagtccttggctggatgaacgctctctacttcacaaggggacttaagctgactgggacgtactccatcatgattcagaaaatcctgtttaaggatttattccgcttcctgctggtgtacctgttgtttatgattggctacgcatccgcactggtgtcgctgctcaacccatgcgccaatatgaaggtgtgcaatgaagatcagacgaattgcaccgtgccaacgtacccctcctgcagggattctgagacattctctacattcctgctggacctgttcaagttgaccattggaatgggcgatctggagatgctgtcctcaacgaagtatcctgttgtcttcattattcttcttgttacttacatcatacttaccttcgtactcctgctcaacatgctgattgctcttatgggagaaactgtcggtcaggtaagtaaggagtctaagcacatctggaaactgcagtgggccacaaccatcctcgacatagaacgctccttcccggtgtttctgagaaaagcttttcgatccggggaaatggttaccgtcgggaagagcagcgacggtactccggacagaagatggtgctttagggttgacgaggttaattggagccactggaaccagaacttggggattattaacgaagaccccggaaagaatgagacctaccaatattacggattctcccacacggttggccggctgaggagagaccggtggtcatccgttgtgccacgggtggtcgagctgaacaagaattctaaccccgatgaagttgtcgtgcctttagacagcatgggaaaccccagatgtgatggacatcaacagggatatcccaggaaatggcgaactgacgatgcgcccttatag

SEQ ID NO: 272845 - DNA, 2616 bp, Artificial Sequence
  derived and/or modified sequence
atggccgacagcagcgagggcccccgggccggccccggcgaggtggctgaactaccaggagacgagtccgggacgcccggcggagaagccttccctctatcctctctagccaatctatttgagggagaagatgggagcctgagtcctagcccggccgacgcttcccgtccagccggaccgggggacggtcggccgaaccttcggatgaagtttcagggagccttccgcaaaggggtgccaaacccaattgatttgctggaatccactctgtacgagtccagcgtggtgccagggcctaagaaggctcccatggattctctgtttgactatggaacatatagacaccacagtagtgataacaagcgatggcggaagaagattatcgagaaacagccacaaagccctaaagcaccggcaccacagcccccacccatattgaaagtgttcaaccggcccatcctgttcgacattgttagccgaggcagcacggcagatttggacgggctactgccctttctactgacacacaagaagcggctcactgacgaggagtttcgcgagccctccaccggcaagacctgtctgcctaaagctctcttgaacctctcgaatggtcgtaacgacacgatacccgtgctgctagatatcgctgaacgcaccgggaatatgagggagttcattaacagcccattccgcgacatatactacagaggacagacagcacttcacatcgcgatcgaacgcagatgcaagcactacgtggagctgctcgtagcccagggcgccgacgtgcatgcccaggcgaggggcagatttttccaaccgaaggatgagggtggttacttctatttcggagagcttccccttagtctagctgcctgcacaaatcagccacatatcgtcaactatctcacagaaaatcctcataagaaagccgacatgcggaggcaggattcaagaggaaacacagtgttgcacgccttggtggcgattgccgacaatacaagggaaaataccaagttcgttactaaaatgtatgacttgctcctcctgaagtgcgcacggcttttccctgactcgaacctggaagcagtcttgaacaacgatggtctgtctccactgatgatggccgcgaaaaccgggaaaattggcatattccagcacattatccgaagagaagtgaccgatgaagacacccgacatctgtcaaggaaattcaaagactgggcctacggacccgtgtatagcagcctttatgacctatcttcgttggacacatgtggtgaggaagcatcagtgcttgagatcctggtgtacaactctaagattgaaaatagacatgaaatgcttgccgtggagcccatcaatgagctgcttagggacaaatggcggaaattcggcgcggtaagcttctacattaacgtcgtgagctatctgtgcgcgatggtgatctttacactgacggcctattaccagcctctagaaggcacccctccctatccatataggaccacggttgattacctgcggctggcaggagaggtgattacactttttacaggcgtactctttttcttcaccaacatcaaggatctgtttatgaaaaagtgccccggcgttaactccctgttcatagacggctctttccagctgctttactttatttacagcgtattagtgatcgttagcgcagccttatatttagcaggaattgaggcctacttggccgttatggtgttcgcgctggtattgggctggatgaatgctctgtatttcactcgtggtctgaaacttaccggcacgtactctattatgatccagaagattctttttaaggatttgttcagattcctcctcgtctacctacttttcatgattggctatgcaagcgccctggtttctctattgaatccctgtgccaatatgaaagtatgtaatgaagatcagacaaactgcacagtaccaacctacccaagttgcagagatagcgaaacgtttagcacctttctgctggacctctttaaactgacaatcgggatgggcgatctagaaatgttgtcctccactaagtacccagtggtgttcataattctgctcgtgacctatatcatattaaccttcgtgctgttactgaacatgcttatcgctttaatgggcgagacggtcggtcaggtctctaaggaatccaagcacatctggaagttgcagtgggcgaccactattctggacatcgagaggtcttttcccgtgttcctgcgcaaggcctttcgcagcggggagatggttactgtcggcaagagtagtgacgggaccccagatagaaggtggtgcttccgggtagatgaggtgaactggagccactggaatcaaaaccttggaataatcaacgaggatcccggtaagaatgagacctatcagtattacggattcagccacaccgtgggccggctaagaagggaccgctggagctcggtcgtgcctagggtggtggaactcaataagaatagcaatcccgacgaagtcgtggtgccactggattctatgggtaacccacgatgcgacggtcatcagcagggatacccaaggaagtggcggacggacgacgcacctctctag

SEQ ID NO: 272846 - DNA, 2616 bp, Artificial Sequence
  derived and/or modified sequence
atggcagactcatcagagggaccgcgagcgggtcccggtgaagtggcggagctgccgggagatgagagcggaacccccggtggagaagctttccccctttcaagcctggcaaacctatttgaaggtgaggatgggtctctgtccccttctcccgctgacgccagcagaccggcaggacctggcgatggtagacctaatctgaggatgaaattccagggcgcattccgtaagggagttccgaatcctatcgaccttctggaatcaactctttacgagtcttccgtggtaccaggccctaagaaagcacctatggattctctatttgattacgggacctaccgccatcactcatcagataataaacgctggaggaagaaaataatcgagaagcagccacagtcaccaaaggcgccagcaccacagcctccccctatcctgaaggtcttcaataggccaatcctgttcgacatcgttagcaggggcagcacagcggatcttgacggtctacttcctttcttgctgactcacaagaaaagactaaccgacgaagagttccgagaaccaagcaccggcaagacatgcttacccaaagcactcttaaatctgtcaaatggcaggaacgataccattccagtgctgttagacatcgcggagagaactggcaatatgcgtgaatttataaactcaccgttccgtgatatatactatagaggacagacggccctacatatcgcgatcgagagaaggtgtaagcactacgtcgagctactggtggcacagggggcagatgtgcacgcacaggctagaggacgattcttccagcccaaagacgagggcggatatttttactttggcgaacttcctttatcactagccgcatgcactaaccaaccacatatcgtgaactatttaaccgaaaatcctcacaaaaaagctgatatgcggaggcaggactccagaggtaataccgtgctgcacgcgctcgttgcaattgccgacaacacgagagagaataccaagtttgtgaccaagatgtacgatctccttttgctgaagtgtgcaagactgtttccggattcaaaccttgaggctgttctgaataatgacgggctgagtcctctgatgatggctgccaagacaggcaagattgggatctttcaacacatcatccggagggaggttactgatgaagatacccgacatcttagccgaaaattcaaggattgggcgtacggacccgtgtattctagcctgtacgatctgtcctccctcgacacttgcggcgaagaggctagtgtcctggaaatcctggtctataacagtaagatagagaaccgccatgagatgctcgcagtagagccaattaatgagctactgcgagataaatggaggaaattcggagccgttagcttctatattaacgttgtcagctatctgtgcgcaatggtgatttttaccctcacagcatactatcagcccctggagggcaccccaccatatccctaccgcacaaccgttgattacttgcgcttagctggagaggtcattacactctttaccggcgttctgttttttttcactaacatcaaagatctcttcatgaaaaagtgccctggcgtgaactcgctcttcatcgatgggagttttcagcttctttattttatctattctgtgttggttattgtcagtgccgctctctatctggccggaattgaggcttatttagcagtgatggtattcgcactggtgctcggctggatgaatgcgctttactttacgcgtgggttgaagcttactggaacttattccatcatgatccaaaagatccttttcaaggatcttttccggtttcttctggtttatcttctgtttatgatcggctatgcttctgcattggtttcgttgcttaatccatgcgccaatatgaaggtgtgcaacgaagaccagacgaactgcactgttcccacttatccatcgtgtcgcgattcagaaacgttctcaacttttcttcttgatctcttcaaactaacaattggcatgggggacctggagatgctgagttccacaaagtacccagtggtctttattatactgctggtgacttacataatactgacctttgtactcctgctgaatatgctcattgcattgatgggggagactgtggggcaagtgtcaaaagagtcaaaacacatatggaagctacaatgggccactacgatcttagatatcgagcggagctttccagtttttttacggaaggcatttaggagcggtgagatggtaacagtagggaagtcaagcgatggaaccccagatagaaggtggtgctttagagtagatgaagtaaattggtcccattggaatcagaacctgggtattattaacgaggacccagggaagaacgagacctatcagtactatggattctcccacactgtgggacggctgcgtcgtgacagatggtcttctgtggtaccaagggttgtcgagctgaataagaatagcaatcccgacgaggtcgtggtgccgctcgattcaatggggaacccacgctgcgacgggcaccagcagggctatccaagaaagtggcgcaccgatgacgccccactgtag

SEQ ID NO: 272847 - DNA, 2616 bp, Artificial Sequence
  derived and/or modified sequence
atggctgacagctcagagggccctcgagccggaccaggcgaggtcgccgagttacctggcgacgagtcaggtacacccggaggtgaagcatttcctttgtcaagtctcgcaaacctgtttgagggtgaagacgggtccctgagcccaagccccgcagatgccagtcgtccagccggtcccggtgatggacgtcctaacttacgtatgaagttccagggggcattccgtaagggcgtccctaatccaatcgacctgttggaaagcaccctgtatgagtcatcggtggtgcccggaccaaaaaaggctcccatggacagtctttttgactacggcacctaccggcaccattcctctgataacaagaggtggagaaagaagattatcgagaagcagccccagagtcccaaagcacctgctccccagcctccacctatactcaaggtttttaaccgcccaatcctcttcgatatcgtgtcacggggttccactgctgatctggacggcttgctacctttccttctgacccacaaaaagcggctgaccgatgaggaatttagggaaccatccactggaaaaacatgcctccctaaggccttgttaaatctctctaatggccgtaacgatacgatccctgtgctgctggacattgcagagcgaacaggcaacatgcgggaatttatcaacagcccttttcgcgacatatactaccgaggccagactgccctgcatatcgcaattgaacgcaggtgtaagcattacgtagaattgttggtagcccaaggtgccgacgtgcacgcccaagccagaggaagattctttcagccaaaggatgagggtggatacttttatttcggtgaattgcctctgtccttagctgcttgtaccaaccaaccacatatcgtcaactatctgaccgaaaacccacacaaaaaagccgatatgagacgtcaggacagcagaggtaatacagtgctgcatgctttagtggccatcgcggataatactcgggagaacaccaaattcgtgactaaaatgtatgatcttctgctccttaagtgtgctagactcttccccgactctaacctggaggccgtgctgaacaatgacggattgagtcctctgatgatggcagctaagacaggcaaaattggaatttttcagcatataatcaggcgagaagtgaccgatgaggatacacggcacctgtcccgcaagtttaaagattgggcgtatgggcctgtgtactcatctctatatgatctcagctcccttgacacgtgtggggaggaggcgtctgtgttggagattttagtctacaactccaaaattgaaaaccgtcatgagatgttggccgttgagcccataaacgaactgctgcgcgataaatggcgcaagttcggcgctgtgtctttctacattaatgttgtgtcgtacctttgcgctatggtgattttcaccttaaccgcctactatcagcccttagagggaacccccccttacccgtacagaaccaccgttgattacctgaggttggcgggagaggtaatcacgctcttcacaggcgtgctgttctttttcaccaatattaaggacctgttcatgaagaagtgtcccggagtgaatagcctttttatcgacgggagcttccagctcctgtactttatctactcagtcctggtgatcgtgtccgccgcattatacctcgccggtatcgaggcatatttagccgtgatggttttcgccctggtgctcggatggatgaacgcgctgtacttcactaggggtctcaagctcactggaacctatagcattatgattcagaaaatccttttcaaagatttattccgattccttctggtgtatctcttgtttatgatcggctacgcgagtgctctcgtaagcctgcttaacccctgcgcaaacatgaaagtttgcaatgaggaccagaccaactgcaccgtgccaacttacccaagctgtcgagacagtgaaacattctccacgttcttgctggatcttttcaagctcaccatcgggatgggagacctggagatgctctcgtccaccaagtaccccgtcgttttcattattctcctggtgacctacattatcctgacattcgttctcttactaaacatgttaattgcgctgatgggggagaccgtcggccaagtgtctaaggaatccaaacatatttggaaactccaatgggccaccacgatccttgatatcgaaagatctttccctgtgtttctgcgcaaggctttcagatctggggaaatggtgaccgtgggaaagagctctgatggaactcctgaccgtaggtggtgttttagggttgatgaagtcaactggtcccactggaaccagaatctcggcatcattaacgaggatcctgggaaaaacgaaacataccagtactacgggtttagccacaccgttggacgcctaagaagagacaggtggtcatctgttgtgccccgtgttgttgaattgaataagaattctaatcccgacgaagttgttgtgcctcttgacagtatggggaatccccgatgtgacggtcatcagcagggctatccacgcaaatggcggactgatgatgctccactctag

SEQ ID NO: 272848 - DNA, 3233 bp, Artificial Sequence
  derived and/or modified sequence
gggattcaggaagcgcggatctcccggccgccggcgcccagccgtcccggaggctgagcagtgcagacgggcctggggcaggcatggcggattccagcgaaggcccccgcgcggggcccggggaggtggctgagctccccggggatgagagtggcaccccaggtggggaggcttttcctctctcctccctggccaatctgtttgagggggaggatggctccctttcgccctcaccggctgatgccagtcgccctgctggcccaggcgatgggcgaccaaatctgcgcatgaagttccagggcgccttccgcaagggggtgcccaaccccatcgatctgctggagtccaccctatatgagtcctcggtggtgcctgggcccaagaaagcacccatggactcactgtttgactacggcacctatcgtcaccactccagtgacaacaagaggtggaggaagaagatcatagagaagcagccgcagagccccaaagcccctgcccctcagccgccccccatcctcaaagtcttcaaccggcctatcctctttgacatcgtgtcccggggctccactgctgacctggacgggctgctcccattcttgctgacccacaagaaacgcctaactgatgaggagtttcgagagccatctacggggaagacctgcctgcccaaggccttgctgaacctgagcaatggccgcaacgacaccatccctgtgctgctggacatcgcggagcgcaccggcaacatgagggagttcattaactcgcccttccgtgacatctactatcgaggtcagacagccctgcacatcgccattgagcgtcgctgcaaacactacgtggaacttctcgtggcccagggagctgatgtccacgcccaggcccgtgggcgcttcttccagcccaaggatgaggggggctacttctactttggggagctgcccctgtcgctggctgcctgcaccaaccagccccacattgtcaactacctgacggagaacccccacaagaaggcggacatgcggcgccaggactcgcgaggcaacacagtgctgcatgcgctggtggccattgctgacaacacccgtgagaacaccaagtttgttaccaagatgtacgacctgctgctgctcaagtgtgcccgcctcttccccgacagcaacctggaggccgtgctcaacaacgacggcctctcgcccctcatgatggctgccaagacgggcaagattgggatctttcagcacatcatccggcgggaggtgacggatgaggacacacggcacctgtcccgcaagttcaaggactgggcctatgggccagtgtattcctcgctttatgacctctcctccctggacacgtgtggggaagaggcctccgtgctggagatcctggtgtacaacagcaagattgagaaccgccacgagatgctggctgtggagcccatcaatgaactgctgcgggacaagtggcgcaagttcggggccgtctccttctacatcaacgtggtctcctacctgtgtgccatggtcatcttcactctcaccgcctactaccagccgctggagggcacaccgccgtacccttaccgcaccacggtggactacctgcggctggctggcgaggtcattacgctcttcactggggtcctgttcttcttcaccaacatcaaagacttgttcatgaagaaatgccctggagtgaattctctcttcattgatggctccttccagctgctctacttcatctactctgtcctggtgatcgtctcagcagccctctacctggcagggatcgaggcctacctggccgtgatggtctttgccctggtcctgggctggatgaatgccctttacttcacccgtgggctgaagctgacggggacctatagcatcatgatccagaagattctcttcaaggaccttttccgattcctgctcgtctacttgctcttcatgatcggctacgcttcagccctggtctccctcctgaacccgtgtgccaacatgaaggtgtgcaatgaggaccagaccaactgcacagtgcccacttacccctcgtgccgtgacagcgagaccttcagcaccttcctcctggacctgtttaagctgaccatcggcatgggcgacctggagatgctgagcagcaccaagtaccccgtggtcttcatcatcctgctggtgacctacatcatcctcacctttgtgctgctcctcaacatgctcattgccctcatgggcgagacagtgggccaggtctccaaggagagcaagcacatctggaagctgcagtgggccaccaccatcctggacattgagcgctccttccccgtattcctgaggaaggccttccgctctggggagatggtcaccgtgggcaagagctcggacggcactcctgaccgcaggtggtgcttcagggtggatgaggtgaactggtctcactggaaccagaacttgggcatcatcaacgaggacccgggcaagaatgagacctaccagtattatggcttctcgcataccgtgggccgcctccgcagggatcgctggtcctcggtggtaccccgcgtggtggaactgaacaagaactcgaacccggacgaggtggtggtgcctctggacagcatggggaacccccgctgcgatggccaccagcagggttacccccgcaagtggaggactgatgacgccccgctctagggactgcagcccagccccagcttctctgcccactcatttctagtccagccgcatttcagcagtgccttctggggtgtccccccacaccctgctttggccccagaggcgagggaccagtggaggtgccagggaggccccaggaccctgtggtcccctggctctgcctccccaccctggggtgggggctcccggccacctgtcttgctcctatggagtcacataagccaacgccagagcccctccacctcaggccccagcccctgcctctccattatttatttgctctgctctcaggaagcgacgtgacccctgccccagctggaacctggcagaggccttaggaccccgttccaagtgcactgcccggccaagccccagcctcagcctgcgcctgagctgcatgcgccaccatttttggcagcgtggcagctttgcaaggggctggggccctcggcgtggggccatgccttctgtgtgttctgtagtgtctgggatttgccggtgctcaataaatgtttattcattgacggtgga

SEQ ID NO: 272849 - DNA, 3247 bp, Artificial Sequence
  derived and/or modified sequence
ggggcttcctggagcccccgcccctggccgggttctgcctgactcccctttcattcccttgcaggctgagcagtgcagacgggcctggggcaggcatggcggattccagcgaaggcccccgcgcggggcccggggaggtggctgagctccccggggatgagagtggcaccccaggtggggaggcttttcctctctcctccctggccaatctgtttgagggggaggatggctccctttcgccctcaccggctgatgccagtcgccctgctggcccaggcgatgggcgaccaaatctgcgcatgaagttccagggcgccttccgcaagggggtgcccaaccccatcgatctgctggagtccaccctatatgagtcctcggtggtgcctgggcccaagaaagcacccatggactcactgtttgactacggcacctatcgtcaccactccagtgacaacaagaggtggaggaagaagatcatagagaagcagccgcagagccccaaagcccctgcccctcagccgccccccatcctcaaagtcttcaaccggcctatcctctttgacatcgtgtcccggggctccactgctgacctggacgggctgctcccattcttgctgacccacaagaaacgcctaactgatgaggagtttcgagagccatctacggggaagacctgcctgcccaaggccttgctgaacctgagcaatggccgcaacgacaccatccctgtgctgctggacatcgcggagcgcaccggcaacatgagggagttcattaactcgcccttccgtgacatctactatcgaggtcagacagccctgcacatcgccattgagcgtcgctgcaaacactacgtggaacttctcgtggcccagggagctgatgtccacgcccaggcccgtgggcgcttcttccagcccaaggatgaggggggctacttctactttggggagctgcccctgtcgctggctgcctgcaccaaccagccccacattgtcaactacctgacggagaacccccacaagaaggcggacatgcggcgccaggactcgcgaggcaacacagtgctgcatgcgctggtggccattgctgacaacacccgtgagaacaccaagtttgttaccaagatgtacgacctgctgctgctcaagtgtgcccgcctcttccccgacagcaacctggaggccgtgctcaacaacgacggcctctcgcccctcatgatggctgccaagacgggcaagattgggatctttcagcacatcatccggcgggaggtgacggatgaggacacacggcacctgtcccgcaagttcaaggactgggcctatgggccagtgtattcctcgctttatgacctctcctccctggacacgtgtggggaagaggcctccgtgctggagatcctggtgtacaacagcaagattgagaaccgccacgagatgctggctgtggagcccatcaatgaactgctgcgggacaagtggcgcaagttcggggccgtctccttctacatcaacgtggtctcctacctgtgtgccatggtcatcttcactctcaccgcctactaccagccgctggagggcacaccgccgtacccttaccgcaccacggtggactacctgcggctggctggcgaggtcattacgctcttcactggggtcctgttcttcttcaccaacatcaaagacttgttcatgaagaaatgccctggagtgaattctctcttcattgatggctccttccagctgctctacttcatctactctgtcctggtgatcgtctcagcagccctctacctggcagggatcgaggcctacctggccgtgatggtctttgccctggtcctgggctggatgaatgccctttacttcacccgtgggctgaagctgacggggacctatagcatcatgatccagaagattctcttcaaggaccttttccgattcctgctcgtctacttgctcttcatgatcggctacgcttcagccctggtctccctcctgaacccgtgtgccaacatgaaggtgtgcaatgaggaccagaccaactgcacagtgcccacttacccctcgtgccgtgacagcgagaccttcagcaccttcctcctggacctgtttaagctgaccatcggcatgggcgacctggagatgctgagcagcaccaagtaccccgtggtcttcatcatcctgctggtgacctacatcatcctcacctttgtgctgctcctcaacatgctcattgccctcatgggcgagacagtgggccaggtctccaaggagagcaagcacatctggaagctgcagtgggccaccaccatcctggacattgagcgctccttccccgtattcctgaggaaggccttccgctctggggagatggtcaccgtgggcaagagctcggacggcactcctgaccgcaggtggtgcttcagggtggatgaggtgaactggtctcactggaaccagaacttgggcatcatcaacgaggacccgggcaagaatgagacctaccagtattatggcttctcgcataccgtgggccgcctccgcagggatcgctggtcctcggtggtaccccgcgtggtggaactgaacaagaactcgaacccggacgaggtggtggtgcctctggacagcatggggaacccccgctgcgatggccaccagcagggttacccccgcaagtggaggactgatgacgccccgctctagggactgcagcccagccccagcttctctgcccactcatttctagtccagccgcatttcagcagtgccttctggggtgtccccccacaccctgctttggccccagaggcgagggaccagtggaggtgccagggaggccccaggaccctgtggtcccctggctctgcctccccaccctggggtgggggctcccggccacctgtcttgctcctatggagtcacataagccaacgccagagcccctccacctcaggccccagcccctgcctctccattatttatttgctctgctctcaggaagcgacgtgacccctgccccagctggaacctggcagaggccttaggaccccgttccaagtgcactgcccggccaagccccagcctcagcctgcgcctgagctgcatgcgccaccatttttggcagcgtggcagctttgcaaggggctggggccctcggcgtggggccatgccttctgtgtgttctgtagtgtctgggatttgccggtgctcaataaatgtttattcattgacggtggaga

SEQ ID NO: 272850 - protein, 662 aa, Artificial Sequence
  derived and/or modified sequence
MVSKLSQLQTELLAALLESGLSKEALIQALGEPGPYLLAGEGPLDKGESCGGGRGELAELPNGLGETRGSEDETDDDGEDFTPPILKELENLSPEEAAHQKAVVETLLQEDPWRVAKMVKSYLQQHNIPQREVVDTTGLNQSHLSQHLNKGTPMKTQKRAALYTWYVRKQREVAQQFTHAGQGGLIEEPTGDELPTKKGRRNRFKWGPASQQILFQAYERQKNPSKEERETLVEECNRAECIQRGVSPSQAQGLGSNLVTEVRVYNWFANRRKEEAFRHKLAMDTYSGPPPGPGPGPALPAHSSPGLPPPALSPSKVHGVRYGQPATSETAEVPSSSGGPLVTVSTPLHQVSPTGLEPSHSLLSTEAKLVSAAGGPLPPVSTLTALHSLEQTSPGLNQQPQNLIMASLPGVMTIGPGEPASLGPTFTNTGASTLVIGLASTQAQSVPVINSMGSSLTTLQPVQFSQPLHPSYQQPLMPPVQSHVTQSPFMATMAQLQSPHALYSHKPEVAQYTHTGLLPQTMLITDTTNLSALASLTPTKQVRSRPAGPPLACDRAPHPHIPRAQEAALLPQVFTSDTEASSESGLHTPASQATTLHVPSQDPASIQHLQPAHRLSASPTVSSSSLVLYQSSDSSNGQSHLLPSNHSVIETFISTQMASSSQ

SEQ ID NO: 272851 - DNA, 1989 bp, Artificial Sequence
  derived and/or modified sequence
atggttagtaaactgtctcagcttcagaccgaactgttggctgcgctgctagagagcggtctaagcaaagaggctctcattcaggcactgggggaacccggaccgtatctgctggccggcgagggcccattggataaaggggagtcatgcggcggaggccggggggagctagccgagctccccaatggtcttggcgagacccgtgggagcgaagacgagaccgacgacgacggagaggactttacgccgcccatactgaaagagctggagaatttatccccggaggaggcagcccaccaaaaagctgttgtggaaacgctattgcaggaggacccctggagagtcgccaagatggtgaaatcatacctccagcagcacaacatcccgcagagggaggtggttgacactaccggactgaatcaaagtcatctgtctcaacatctgaacaagggcacacctatgaagacccaaaagagagcagcgctttatacctggtatgttagaaagcagagagaagtggcacagcagtttacacacgctggccagggaggcttgatcgaggaacccaccggcgatgaactgccaacaaaaaagggcaggcgtaacagatttaagtggggccccgcttcacagcagatcttgtttcaggcttatgagcgccaaaaaaaccctagcaaggaggaacgagaaacacttgtagaagagtgcaaccgggcagaatgtatccagcgcggagttagtcccagccaggcacaaggtctgggaagcaatcttgtcactgaggttcgcgtatacaactggttcgcaaaccggcgaaaggaagaggctttccgccacaaactggcaatggacacttattcaggccctccaccaggtcctggacccggcccagctttgcccgcacattcttcaccaggcttaccgccccccgctctttctccgagcaaagtccatggtgtgagatacggacaaccagcaacgagtgagaccgcagaagtaccgagctcatccggaggaccattagtgaccgtgtccacacccctgcaccaagtaagtcccacggggctcgaaccaagtcactccttgttgtctacagaggcaaaactcgtgagtgccgcaggagggcccctccctccagtttcgacgcttaccgccctgcactccctcgaacagacctccccaggtcttaaccagcagcctcagaacctgataatggcttccctgccaggagtaatgaccataggcccaggcgagcccgcctctctggggcccacattcaccaacacgggcgctagtaccctcgtcatagggctggccagcacacaggctcagtctgtcccagtgattaattcgatgggctcttctctcactacactgcagcccgtccaattctcgcagcctttacatccttcctatcagcagcctctcatgcccccagtgcagtcccatgtgacccaatcaccattcatggctacaatggcccagctccagagccctcacgcgctgtactcacacaagccagaagtcgcacaatacacccacaccggcttgctcccccagaccatgctcataaccgacaccaccaatttatcagctcttgctagtctgacccctactaagcaagtccggagtcgtccggctggtcctccccttgcttgtgaccgggcacctcacccccacattccacgggcccaggaggcggccctgctgccgcaggtgttcactagtgatacggaagcttcatccgagtcgggtctacacactccagcgtcccaagcgacaaccctgcatgtgcccagccaagatccagcttctatacaacaccttcaacccgcacacaggctttccgcatctcccaccgtatcatcctcgagcttggtgctgtatcagagctccgattccagtaacgggcagtcacatttattgccctctaaccactctgtgatagaaacatttatatccactcagatggccagctctagccagtag

SEQ ID NO: 272852 - DNA, 3332 bp, Artificial Sequence
  derived and/or modified sequence
cgtggccctgtggcagccgagccatggtttctaaactgagccagctgcagacggagctcctggcggccctgctcgagtcagggctgagcaaagaggcactgatccaggcactgggtgagccggggccctacctcctggctggagaaggccccctggacaagggggagtcctgcggcggcggtcgaggggagctggctgagctgcccaatgggctgggggagactcggggctccgaggacgagacggacgacgatggggaagacttcacgccacccatcctcaaagagctggagaacctcagccctgaggaggcggcccaccagaaagccgtggtggagacccttctgcaggaggacccgtggcgtgtggcgaagatggtcaagtcctacctgcagcagcacaacatcccacagcgggaggtggtcgataccactggcctcaaccagtcccacctgtcccaacacctcaacaagggcactcccatgaagacgcagaagcgggccgccctgtacacctggtacgtccgcaagcagcgagaggtggcgcagcagttcacccatgcagggcagggagggctgattgaagagcccacaggtgatgagctaccaaccaagaaggggcggaggaaccgtttcaagtggggcccagcatcccagcagatcctgttccaggcctatgagaggcagaagaaccctagcaaggaggagcgagagacgctagtggaggagtgcaatagggcggaatgcatccagagaggggtgtccccatcacaggcacaggggctgggctccaacctcgtcacggaggtgcgtgtctacaactggtttgccaaccggcgcaaagaagaagccttccggcacaagctggccatggacacgtacagcgggccccccccagggccaggcccgggacctgcgctgcccgctcacagctcccctggcctgcctccacctgccctctcccccagtaaggtccacggtgtgcgctatggacagcctgcgaccagtgagactgcagaagtaccctcaagcagcggcggtcccttagtgacagtgtctacacccctccaccaagtgtcccccacgggcctggagcccagccacagcctgctgagtacagaagccaagctggtctcagcagctgggggccccctcccccctgtcagcaccctgacagcactgcacagcttggagcagacatccccaggcctcaaccagcagccccagaacctcatcatggcctcacttcctggggtcatgaccatcgggcctggtgagcctgcctccctgggtcctacgttcaccaacacaggtgcctccaccctggtcatcggcctggcctccacgcaggcacagagtgtgccggtcatcaacagcatgggcagcagcctgaccaccctgcagcccgtccagttctcccagccgctgcacccctcctaccagcagccgctcatgccacctgtgcagagccatgtgacccagagccccttcatggccaccatggctcagctgcagagcccccacgccctctacagccacaagcccgaggtggcccagtacacccacacgggcctgctcccgcagactatgctcatcaccgacaccaccaacctgagcgccctggccagcctcacgcccaccaagcaggtaaggtccaggcctgctggccctcccttggcctgtgacagagcccctcacccccacatcccccgggctcaggaggctgctctgctcccccaggtcttcacctcagacactgaggcctccagtgagtccgggcttcacacgccggcatctcaggccaccaccctccacgtccccagccaggaccctgccagcatccagcacctgcagccggcccaccggctcagcgccagccccacagtgtcctccagcagcctggtgctgtaccagagctcagactccagcaatggccagagccacctgctgccatccaaccacagcgtcatcgagaccttcatctccacccagatggcctcttcctcccagtaaccacggcacctgggccctggggcctgtactgcctgcttggggggtgatgagggcagcagccagccctgcctggaggacctgagcctgccgagcaaccgtggcccttcctggacagctgtgcctcgctccccactctgctctgatgcatcagaaagggagggctctgaggcgccccaacccgtggaggctgctcggggtgcacaggagggggtcgtggagagctaggagcaaagcctgttcatggcagatgtaggagggactgtcgctgcttcgtgggatacagtcttcttacttggaactgaagggggcggcctatgacttgggcacccccagcctgggcctatggagagccctgggaccgctacaccactctggcagccacacttctcaggacacaggcctgtgtagctgtgacctgctgagctctgagaggccctggatcagcgtggccttgttctgtcaccaatgtacccaccgggccactccttcctgccccaactccttccagctagtgacccacatgccatttgtactgaccccatcacctactcacacaggcatttcctgggtggctactctgtgccagagcctggggctctaacgcctgagcccagggaggccgaagctaacagggaaggcaggcagggctctcctggcttcccatccccagcgattccctctcccaggccccatgacctccagctttcctgtatttgttcccaagagcatcatgcctctgaggccagcctggcctcctgcctctactgggaaggctacttcggggctgggaagtcgtccttactcctgtgggagcctcgcaacccgtgccaagtccaggtcctggtggggcagctcctctgtctcgagcgccctgcagaccctgcccttgtttggggcaggagtagctgagctcacaaggcagcaaggcccgagcagctgagcagggccggggaactggccaagctgaggtgcccaggagaagaaagaggtgaccccagggcacaggagctacctgtgtggacaggactaacactcagaagcctgggggcctggctggctgagggcagttcgcagccaccctgaggagtctgaggtcctgagcactgccaggagggacaaaggagcctgtgaacccaggacaagcatggtcccacatccctgggcctgctgctgagaacctggccttcagtgtaccgcgtctaccctgggattcaggaaaaggcctggggtgacccggcaccccctgcagcttgtagccagccggggcgagtggcacgtttatttaacttttagtaaagtcaaggagaaatgcggtggaaa

SEQ ID NO: 272853 - DNA, 1989 bp, Artificial Sequence
  derived and/or modified sequence
atggtgtccaagctgagccagctgcagacagagctgctggccgccctgctggagagcggcctgagcaaggaggccctgatccaggccctgggggagcccggcccctacctgctggccggggagggccccctggacaagggggagagctgtggcggcggccgcggggagctggccgagctgcccaacggcctgggggagacccggggctctgaagatgaaacagatgatgatggagaggacttcaccccacccatcctgaaggagctggagaacctgagccctgaggaggccgcccaccagaaggctgtggtggagaccctgctgcaggaggacccctggagggtggccaagatggtgaagagctacctgcagcagcacaacatcccccagcgggaggtggtggacaccaccggcctgaaccagagccacctgagccagcacctgaacaagggcacccccatgaagacccagaagagagctgccctgtacacctggtacgtgaggaagcagcgggaggtggcccagcagttcacccacgccggccagggcggcctcatcgaggagcccactggagatgagctgcccaccaagaagggcagaagaaaccgcttcaagtggggccctgccagccagcagatcctcttccaggcctatgaaaggcagaagaaccccagcaaggaggagcgggagaccctggtggaggagtgcaacagagctgagtgcatccagaggggcgtgagccccagccaggcccagggcctgggcagcaacctggtgacagaggtgcgggtgtacaactggtttgccaacagaaggaaggaggaggccttccgccacaagctggccatggacacctacagcggccccccacctggccctggccctggccctgccctgcctgcccacagcagccctggcctgcccccaccagccctgagccccagcaaggtgcacggcgtgcgctatggccagcctgccaccagcgagacagctgaggtgcccagcagcagcggcggccccctggtgacagtgtccacccccctgcaccaggtgagccccaccggcctggagcccagccacagcctgctgagcacagaggccaagctggtgtctgctgctgggggccccctgccccctgtgtccaccctgacagccctgcacagcctggagcagaccagccctggcctgaaccagcagccccagaacctgatcatggccagcctgcccggggtgatgaccatcggccctggagagcccgccagcctgggccccaccttcaccaacacaggagccagcaccctggtgattggcctggccagcacccaggcccagagcgtgcctgtgatcaacagcatgggcagcagcctgaccaccctgcagcctgtgcagttcagccagcccctgcaccccagctaccagcagcccctgatgcctcctgtgcagagccacgtgacccagagccccttcatggccaccatggcccagctgcagagcccccacgccctgtacagccacaagccagaggtggcccagtacacccacacaggcctgctgccccagaccatgctgatcacagacaccaccaacctgagcgccctggccagcctgacccccaccaagcaggtgcgcagcaggcctgctggcccccccctggcctgtgaccgggccccccacccccacatcccccgggcccaggaggccgccctgctgccccaggtgttcaccagtgacacagaggccagcagcgagagcggcctgcacaccccagccagccaggccaccaccctgcacgtgcccagccaggaccctgccagcatccagcacctgcagcctgcccaccggctgagcgccagccccaccgtgagcagcagcagcctggtgctgtaccagagcagtgacagcagcaatggccagagccacctgctgcccagcaaccacagcgtgattgagaccttcatcagcacccagatggccagcagcagccagtag

SEQ ID NO: 272854 - DNA, 1989 bp, Artificial Sequence
  derived and/or modified sequence
atggtgagcaagctgagccagctgcagaccgagctgctggccgccctgctcgagagcgggttaagtaaggaggccctgatccaagcactaggggagccaggtccctacctgctggctggcgaaggacctctcgataagggtgagtcatgcggcggcgggcgcggggaactggcggagctgccaaacgggctgggggagacaagaggttccgaggacgagaccgatgatgacggtgaagattttacgcctccaattttgaaggaactggagaacctttcacctgaagaagctgcccatcaaaaagcagtggtggaaaccctgttgcaagaggatccatggcgtgtggctaagatggtcaagtcgtacctacagcaacacaatatccctcagcgcgaggtggtcgatactacaggtttgaaccagtctcatctctcccagcacctcaacaagggaactcccatgaagacccagaaaagagctgccctgtacacctggtatgttcggaagcaacgcgaagtcgcccagcaatttactcacgccggccagggcggactgatcgaggagcccactggagacgagctgccaaccaagaaggggcgccgcaatcggttcaagtggggacctgcgagtcaacagatcttatttcaagcctatgaacgccagaagaatccctcgaaggaggaacgtgaaacgctcgtggaggaatgcaatagggcagagtgtatccagcggggcgtatccccttcgcaggctcagggcctgggatctaatttggttacagaggttagggtttacaattggtttgccaacaggcgtaaggaggaggctttccgtcacaaactggccatggacacttatagtggcccacctccaggacccggacccgggcccgccctcccggcccattcctctcctggactgcctcctccggccctgtccccttcaaaggtgcacggagtgcgatacggtcaacccgctacctctgaaactgccgaggtgccatcctcctctggcgggccactcgtgacggtcagcactcccctgcaccaggtttcacccacagggctcgaaccctcacactccctgctcagcaccgaagcaaagctggtgtctgccgccggaggcccacttccccctgtgtctactttgaccgccctgcattcgttggaacaaacgtcacctggcctcaaccaacagcctcagaatttgatcatggctagcttgccgggggtgatgaccatcggtcctggtgagcccgcatccctgggccccacattcacgaacacaggcgctagtacgctggtgatcggattggcttcaactcaggcccagtcagtccctgttattaactcaatgggatctagcctgacaactctccagccagtgcagttctcccagcccctacatccttcctaccaacaacccctgatgccacctgttcagtcgcacgtgacacagagtccattcatggcaaccatggcgcaattgcagagcccacatgccctgtactcacacaagcccgaggtggcccaatatacgcacaccggtcttcttcctcagactatgctcattacagataccacgaacctgagtgctctggcttcccttacacctacaaaacaggttcggtcaagacctgcggggcccccacttgcgtgtgaccgggcgccgcatcctcatattccgagagcccaggaggccgccctgctgccgcaggtgttcacctctgacaccgaagcctcttctgagtctggtcttcatacaccagcctcccaggcaactactctgcacgttccgtcccaggaccccgcttcgatccagcaccttcaacctgctcacagactttcagccagcccaaccgtctcctcctcaagcctcgtcctttaccagtcgtcagacagctctaacggtcaaagccacctcctaccgtccaaccacagtgtaattgagacctttatctcaacgcagatggcctcaagctcacagtag

SEQ ID NO: 272855 - DNA, 1989 bp, Artificial Sequence
  derived and/or modified sequence
atggtatctaagctctcccagctgcagactgagctgttagccgctttactcgagagcgggctgagcaaagaggccctgattcaggccctgggtgaaccaggcccttaccttctggcaggggaaggaccactggacaaaggcgaatcttgtggcggtgggagaggcgaactagctgagctgcccaacgggctgggagaaacccgcggaagcgaggatgaaaccgatgatgacggtgaagattttactcctcccatactcaaggagctcgagaacctgagccccgaggaagctgctcatcagaaagcagtcgtggaaacactcctgcaggaagacccttggcgagtcgccaaaatggtgaaaagctatctacagcagcacaacatcccacagagggaggtagtggacacaactgggctcaaccaatcccacttatcccagcacctgaacaagggcactccaatgaaaacacagaaaagagccgctctctatacttggtacgtcagaaagcaacgggaggtggcacagcagttcacccatgctggtcaaggcggtctcatcgaagaaccaactggggatgaactccctaccaagaagggcaggcgcaacagattcaagtggggaccagcctctcagcagattctgttccaggcttacgagaggcaaaagaatccctctaaagaagagcgggaaacccttgtggaagagtgtaatagagccgagtgtatccagagaggagtgagcccgagccaggcgcaaggacttggcagcaacctcgtcaccgaagtgcgagtctacaattggtttgcaaacagacgcaaggaagaggcttttcgccacaaactcgctatggacacatacagcggccctccgccaggcccaggacccggtcccgcactgcctgcgcacagctcccccggattgccccctcctgccctgtctccatctaaggtccatggcgtgaggtacggccagcccgctaccagcgaaaccgccgaggtgcccagctcttctggagggcctcttgtaaccgtgtcaactccccttcaccaggtgtcccctactggcttagaaccatcccactcactgctgtcgacagaggctaaactggtgtctgcagccggagggccactccccccagttagtaccttaacggccttgcattctctggagcagacttcacccggtctcaaccagcagccacagaatctcatcatggcctctctgccgggagtcatgacaatcggtcctggcgagccagccagcctgggacccacttttactaataccggggcttctactttagtgatcgggctggcttccacacaggctcagagtgttccagtgatcaacagcatggggagcagcttaaccacactccagccagtgcagttcagccagccattacatccgtcatatcagcagccccttatgccacctgtgcagagccatgtgacgcagagcccttttatggccacaatggcccaactgcaatcaccacacgccttgtactcccataagcccgaagtggcacagtacacccacaccggccttctaccccagaccatgctgatcacagatacaactaacctcagtgctctggcttctctaacacccacaaagcaggttaggagcaggcccgctggacctcctctagcttgtgatcgcgcaccacatcctcatatccccagggcacaggaggcagcattacttccgcaggtgttcaccagcgacacagaggccagttcagagtctgggcttcacacacccgcaagtcaggcaacaacgttgcatgttccttcccaggaccctgctagcatacagcacctgcagccagctcatagactgtctgcctccccaaccgtgtcttccagctcgctggtcctgtatcaaagctccgatagcagtaatggccaatcacacttactgccatccaaccactcagtgatcgagacattcatctcgacacagatggcctcctctagccagtag

SEQ ID NO: 272856 - DNA, 1989 bp, Artificial Sequence
  derived and/or modified sequence
atggtgagcaagctgagccagctgcagaccgagctgctggccgccctgctggagagcggcctgagcaaggaggccctgatccaggccctgggcgagcccggcccctacctgctggccggcgagggccccctggacaagggcgagagctgcggcggcggcagaggcgagctggccgagctgcccaacggcctgggcgagaccagaggcagcgaggacgagaccgacgacgacggcgaggacttcaccccccccatcctgaaggagctggagaacctgagccccgaggaggccgcccaccagaaggccgtggtggagaccctgctgcaggaggacccctggagagtggccaagatggtgaagagctacctgcagcagcacaacatcccccagagagaggtggtggacaccaccggcctgaaccagagccacctgagccagcacctgaacaagggcacccccatgaagacccagaagagagccgccctgtacacctggtacgtgagaaagcagagagaggtggcccagcagttcacccacgccggccagggcggcctgatcgaggagcccaccggcgacgagctgcccaccaagaagggcagaagaaacagattcaagtggggccccgccagccagcagatcctgttccaggcctacgagagacagaagaaccccagcaaggaggagagagagaccctggtggaggagtgcaacagagccgagtgcatccagagaggcgtgagccccagccaggcccagggcctgggcagcaacctggtgaccgaggtgagagtgtacaactggttcgccaacagaagaaaggaggaggccttcagacacaagctggccatggacacctacagcggccccccccccggccccggccccggccccgccctgcccgcccacagcagccccggcctgcccccccccgccctgagccccagcaaggtgcacggcgtgagatacggccagcccgccaccagcgagaccgccgaggtgcccagcagcagcggcggccccctggtgaccgtgagcacccccctgcaccaggtgagccccaccggcctggagcccagccacagcctgctgagcaccgaggccaagctggtgagcgccgccggcggccccctgccccccgtgagcaccctgaccgccctgcacagcctggagcagaccagccccggcctgaaccagcagccccagaacctgatcatggccagcctgcccggcgtgatgaccatcggccccggcgagcccgccagcctgggccccaccttcaccaacaccggcgccagcaccctggtgatcggcctggccagcacccaggcccagagcgtgcccgtgatcaacagcatgggcagcagcctgaccaccctgcagcccgtgcagttcagccagcccctgcaccccagctaccagcagcccctgatgccccccgtgcagagccacgtgacccagagccccttcatggccaccatggcccagctgcagagcccccacgccctgtacagccacaagcccgaggtggcccagtacacccacaccggcctgctgccccagaccatgctgatcaccgacaccaccaacctgagcgccctggccagcctgacccccaccaagcaggtgagaagcagacccgccggcccccccctggcctgcgacagagccccccacccccacatccccagagcccaggaggccgccctgctgccccaggtgttcaccagcgacaccgaggccagcagcgagagcggcctgcacacccccgccagccaggccaccaccctgcacgtgcccagccaggaccccgccagcatccagcacctgcagcccgcccacagactgagcgccagccccaccgtgagcagcagcagcctggtgctgtaccagagcagcgacagcagcaacggccagagccacctgctgcccagcaaccacagcgtgatcgagaccttcatcagcacccagatggccagcagcagccagtag

SEQ ID NO: 272857 - protein, 409 aa, Artificial Sequence
  derived and/or modified sequence
MKTSDGFTLNAESYVSFTTKLDIPTAAKYEYGVPLQTSDSFLRFPSSLTSSLCTDNNPAAFLVNQAVKCTRKINLEQCEEIEALSMAFYSSPEILRVPDSRKKVPITVQSIVIQSLNKTLTRREDTDVLQPTLVNAGHFSLCVNVVLEVKYSLTYTDAGEVTKADLSFVLGTVSSVVVPLQQKFEIHFLQENTQPVPLSGNPGYVVGLPLAAGFQPHKGSGIIQTTNRYGQLTILHSTTEQDCLALEGVRTPVLFGYTMQSGCKLRLTGALPCQLVAQKVKSLLWGQGFPDYVAPFGNSQAQDMLDWVPIHFITQSFNRKDSCQLPGALVIEVKWTKYGSLLNPQAKIVNVTANLISSSFPEANSGNERTILISTAVTFVDVSAPAEAGFRAPPAINARLPFNFFFPFV

SEQ ID NO: 272858 - DNA, 1230 bp, Artificial Sequence
  derived and/or modified sequence
atgaaaacatccgatggtttcactctgaatgccgagtcgtatgtttccttcaccacaaagctggatattccaaccgctgctaagtatgagtacggagtgccgctccagacttccgattcatttctcagattcccaagcagtcttacctcaagtctgtgtacagacaataatccagctgctttcctggttaatcaggctgtcaagtgcacccggaaaattaatttggagcagtgcgaagagatcgaagctctgtcaatggccttttacagctcgcccgagatcctccgcgtgcctgattctaggaaaaaagtgcccattaccgtgcagtccatcgtgatccagtctcttaataagactctaaccagaagagaagatacagacgttctccagccaactttggtcaatgcagggcacttcagcctgtgcgtcaatgttgtgctggaggtcaagtactcgctgacctacacagatgccggagaggttacaaaagccgacctcagctttgtcctgggcaccgtctcaagtgtggtcgttcctcttcaacaaaagttcgaaattcattttctccaggaaaacacacaacccgtacccttaagcggcaacccaggttacgtggtcggattaccactggctgcagggttccagccccacaaagggagtggaatcattcagacaacaaacaggtacggacagctcacaattctacatagcacaactgaacaagattgtttggccctggagggagtgcggacaccagtgctcttcggatatacgatgcagtctggctgcaagctcaggctgacaggggctcttccctgtcaattggtggcccaaaaggttaaatccctcctgtggggacaaggcttcccagattacgtcgcacccttcggaaatagccaagcccaggacatgctcgactgggttcctatccattttatcactcaaagttttaatcggaaagacagttgtcagctaccgggagctttggtcattgaggttaaatggactaaatacggatccctcctgaatccgcaggccaagattgttaacgtcacagcaaatctgatcagctcttcgtttccagaggccaacagcggaaacgagcggactatcttgatctcaaccgcagtgacttttgtagacgtatctgccccagcagaggcagggttcagggcaccgcctgctataaacgcacggctgccattcaacttcttctttccttttgtatag

SEQ ID NO: 272859 - DNA, 1230 bp, Artificial Sequence
  derived and/or modified sequence
atgaaaacatcagacggtttcaccttaaacgccgagagctacgtatcttttaccaccaaactggatatcccgacagccgcgaagtatgaatatggagtcccactccagactagcgacagcttccttaggttcccttcctcattgacatcaagcctctgtaccgataacaatccagcggcttttctagtgaaccaggctgttaaatgcactcgcaagattaatctagaacaatgtgaggagattgaggccctctccatggctttctactcctcccctgaaattttgcgggtgcctgatagccgcaagaaagtgcctattaccgtgcagtcaattgtgatacagtctcttaataaaaccttgacccgccgcgaggatacagacgtgctgcagccaacacttgttaacgcaggccacttttccctgtgcgtgaacgtggtacttgaagtcaaatattcattaacttataccgatgctggcgaagtaaccaaagccgatctgagttttgtcctcggaacagtatccagcgtagtcgtgcctttgcagcagaaattcgaaatacatttccttcaagagaacacccaacccgttcccctgagtgggaatccggggtacgtggtgggacttccattagccgccggtttccagcctcacaagggatccggcataatccagactacaaacagatacgggcagttgaccatccttcattcgaccaccgaacaggactgtctcgctcttgagggcgtccgaaccccggttctattcgggtacacaatgcagagcgggtgtaaattacggcttactggggcactcccctgtcaactggtggcccagaaggtcaaatcgttgttgtggggccaggggttcccagattatgtcgctccgtttggcaattctcaggctcaagacatgctagattgggttcctatccactttattacacagtcatttaatcgcaaagattcctgccagctccccggcgcactggtcatcgaagtgaaatggaccaagtatgggtcactcctcaatccccaggctaagatagtgaacgtaacggctaatcttattagttcttcctttcctgaagcaaattctgggaacgagcgtactattctcatctcgactgccgtcaccttcgtggatgtcagcgcacccgccgaagccggatttcgagctcctcccgctataaatgcgaggcttccatttaacttctttttcccatttgtatag

SEQ ID NO: 272860 - DNA, 1230 bp, Artificial Sequence
  derived and/or modified sequence
atgaagacaagcgatggctttaccctgaacgctgagagttatgtctcgtttaccacgaaacttgatattccaaccgccgccaagtatgagtatggcgtaccacttcagactagtgacagcttcctgcgattccccagcagtcttacctcctccctgtgcaccgataacaatcccgccgctttcctcgtgaatcaagctgtgaaatgtacccggaaaataaatttggagcagtgtgaggaaatcgaagctttgtctatggccttttacagttctcctgagatcctgcgcgtccccgatagccgcaagaaagtgcctattaccgtgcagtcaattgtgatacagtctcttaataaaaccttgacccgccgcgaggatacagacgtgctgcagccaacacttgttaacgcaggccacttttccctgtgcgtgaacgtggtacttgaagtcaaatattcattaacttataccgatgctggcgaagtaaccaaagccgatctgagttttgtcctcggaacagtatccagcgtagtcgtgcctttgcagcagaaattcgaaatacatttccttcaagagaacacccaacccgttcccctgagtgggaaccccgggtatgttgtggggctgccgcttgcagcgggcttccagccacataaaggaagcggcatcatccaaaccaccaaccgttacggacaattgacaatcctccattccactactgaacaagactgcctggcactcgagggggtgagaacgcctgtgctatttggttataccatgcagagtggctgtaagttgcgtcttactggagcacttccatgtcagctcgtcgcccagaaagtcaagtctctgctatggggtcaagggttccctgattatgtggccccttttggtaatagtcaagctcaagacatgctagattgggttcctatccactttattacacagtcatttaatcgcaaagattcctgccagctccccggcgcactggtcatcgaagtgaaatggaccaagtatgggtcactcctcaatccccaggctaagatagtgaacgtaacggctaatcttattagttcttcctttcctgaagcaaattctgggaacgagcgtactattctcatctcgactgccgtcaccttcgtggatgtcagcgcacccgccgaagccggatttcgagctcctcccgctataaatgcgaggcttcctttcaacttcttcttccccttcgtctag

SEQ ID NO: 272861 - DNA, 1230 bp, Artificial Sequence
  derived and/or modified sequence
atgaagaccagcgacggcttcaccctgaacgccgagagctacgtgagcttcaccaccaagctggacatccccaccgccgccaagtacgagtacggcgtgcccctgcagaccagcgacagcttcctgagattccccagcagcctgaccagcagcctgtgcaccgacaacaaccccgccgccttcctggtgaaccaggccgtgaagtgcaccagaaagatcaacctggagcagtgcgaggagatcgaggccctgagcatggccttctacagcagccccgagatcctgagagtgcccgacagcagaaagaaggtgcccatcaccgtgcagagcatcgtgatccagagcctgaacaagaccctgaccagaagagaggacaccgacgtgctgcagcccaccctggtgaacgccggccacttcagcctgtgcgtgaacgtggtgctggaggtgaagtacagcctgacctacaccgacgccggcgaggtgaccaaggccgacctgagcttcgtgctgggcaccgtgagcagcgtggtggtgcccctgcagcagaagttcgagatccacttcctgcaggagaacacccagcccgtgcccctgagcggcaaccccggctacgtggtgggcctgcccctggccgccggcttccagccccacaagggcagcggcatcatccagaccaccaacagatacggccagctgaccatcctgcacagcaccaccgagcaggactgcctggccctggagggcgtgagaacccccgtgctgttcggctacaccatgcagagcggctgcaagctgagactgaccggcgccctgccctgccagctggtggcccagaaggtgaagagcctgctgtggggccagggcttccccgactacgtggcccccttcggcaacagccaggcccaggacatgctggactgggtgcccatccacttcatcacccagagcttcaacagaaaggacagctgccagctgcccggcgccctggtgatcgaggtgaagtggaccaagtacggcagcctgctgaacccccaggccaagatcgtgaacgtgaccgccaacctgatcagcagcagcttccccgaggccaacagcggcaacgagagaaccatcctgatcagcaccgccgtgaccttcgtggacgtgagcgcccccgccgaggccggcttcagagccccccccgccatcaacgccagactgcccttcaacttcttcttccccttcgtgtag

SEQ ID NO: 272862 - DNA, 1230 bp, Artificial Sequence
  derived and/or modified sequence
atgaagacctccgacggcttcacattaaacgccgaatcttacgtctcctttactactaagctcgatatacctactgcggccaaatacgagtatggggtgcctttgcagacatcagattcgttcttacgctttccatcttcactcactagcagcctttgtaccgataacaatcccgctgctttcctagtcaatcaggccgttaaatgcacgcgtaagatcaacttggagcagtgcgaagagattgaggctttgagcatggccttttacagctctcctgagattctgagggtcccagactcccggaagaaagtccctattacagtccagagtattgtcatacagtctctgaacaagaccctgacccggagagaggacaccgatgtcctgcagcctaccctcgtaaatgccggtcatttctcactctgtgtgaacgtcgtcttagaggtcaaatatagtctgacatacacagacgctggggaggtcaccaaagcagatctttcgttcgttctggggacagtatcatcagtcgtggtgcccttgcaacagaagtttgagatacatttcctccaggagaacactcagcctgtccccctgtccggtaaccccggctatgtggtgggattgcccttggcagcagggtttcagccccacaagggatcgggaattattcagactacgaaccgctacggccagttaactatactgcactccacaacagagcaggactgtctcgccctggagggcgtgcgtaccccggtgctgttcggttatactatgcagtcaggctgcaagctgcgactgaccggggcgctgccgtgccagctcgtggcacagaaggtgaaatccctgctctgggggcagggattccccgactacgtggcaccattcggcaatagtcaggcgcaggacatgctcgactgggttccgatccatttcattactcagagttttaatagaaaggattcctgccagctccccggtgcactcgtgattgaagtgaagtggactaaatacgggtcccttctgaatcctcaagcgaaaatagtaaatgtcacagcgaatctgatttctagcagttttccagaggccaattctggaaacgagagaaccattctgatctcaacggctgtcacgttcgtggacgtgagcgccccagctgaggctggatttcgagccccacctgcaattaatgccaggttaccatttaatttctttttcccctttgtctag

SEQ ID NO: 272863 - DNA, 1230 bp, Artificial Sequence
  derived and/or modified sequence
atgaagaccagtgatggcttcaccctgaatgctgagagctatgtgtccttcaccaccaagctggacatccccacagctgccaagtatgaatatggagtgcccctgcagaccagtgacagcttcctgcgcttccccagcagcctgaccagcagcctgtgcacagacaacaacccagctgccttcctggtgaaccaggccgtgaagtgcaccaggaagatcaacctggagcagtgtgaggagattgaggccctgtccatggccttctacagcagccctgagatcctgcgggtgcctgacagcaggaagaaggtgcccatcaccgtgcagagcatcgtcatccagagcctgaacaagaccctgacccggcgggaggacacagatgtgctgcagcccaccctggtgaatgccggccacttcagcctgtgtgtgaatgtggtgctggaggtgaagtacagcctgacctacacagatgctggggaggtgaccaaggctgacctgagctttgtgctgggcaccgtgtcctctgtggtggtgcccctgcagcagaagtttgagatccacttcctgcaggagaacacccagcctgtgcccctgagcggcaaccctggctacgtggtgggcctgcccctggccgccggcttccagccccacaagggcagcggcatcatccagaccaccaacagatatggccagctgaccatcctgcacagcaccacagagcaggactgcctggccctggagggcgtgaggacccctgtgctgtttggctacaccatgcagagcggctgcaagctgcggctgaccggggccctgccctgccagctggtggcccagaaggtgaagagcctgctgtggggccagggcttcccagactatgtggcccccttcggcaacagccaggcccaggacatgctggactgggtgcccatccacttcatcacccagagcttcaacaggaaggacagctgccagctgcccggggccctggtgattgaggtgaagtggaccaagtatggcagcctgctgaacccccaggccaagatcgtgaatgtgacagccaacctgatcagcagcagcttccctgaggccaacagcggaaatgaaagaaccatcctgatcagcacagctgtgacctttgtggatgtgtctgccccagctgaggccggcttccgggcccccccagccatcaatgcccggctgcccttcaacttcttcttcccctttgtgtag

SEQ ID NO: 272864 - DNA, 1230 bp, Artificial Sequence
  derived and/or modified sequence
atgaagaccagcgacggcttcaccctgaacgccgagagctacgtgtccttcaccactaagttggacatccctacagccgcgaagtatgagtacggggtgcccctgcagacctccgattcattcttgagattcccgtcctctctgaccagttctctgtgcacggataacaacccggcggctttcctcgtgaaccaggctgtaaagtgcacacgcaagatcaaccttgagcagtgtgaggagatcgaagccctctccatggcgttttatagtagtcctgaaatactcagagttcccgattcaagaaaaaaggtccccattacggtgcagagcatcgtgattcaaagtctgaacaagacccttaccaggcgcgaagacactgacgttttgcagcccacgcttgttaacgccggccactttagtctgtgcgttaatgttgtccttgaggttaaatacagtctgacttataccgacgctggcgaggtgaccaaggccgatctctcgttcgtactgggtacagtgagctcagtggtcgtgcctctgcaacagaaatttgagatacactttcttcaagagaacactcaacccgttcctctctctggaaatccggggtacgtggtgggcctgcccttagccgccgggttccagcctcataaaggatctgggatcatccagactactaacagatacggccagctgaccatcctccactctacaactgaacaggattgtctggcccttgagggtgtacggacacccgttctcttcggttataccatgcagtctggctgtaagttgcggttgaccggagctcttccctgtcagctggttgctcagaaagtgaaatccttgctctggggtcagggatttcctgactatgtcgcacccttcggcaacagccaagcccaggatatgctggattgggtgcctatccatttcataacacagtcctttaatcggaaagactcttgccaactccctggagccctcgtgattgaggtcaagtggaccaagtatggctctcttctcaatccacaggctaagatcgttaacgtgacagccaatctgataagcagctcgtttcccgaggccaacagcggcaatgagagaactatactgatcagtaccgcagtcacatttgtcgacgtgtccgcccccgccgaggctggtttcagggcaccccctgcgattaacgcaagactgccctttaatttttttttcccctttgtatag

SEQ ID NO: 272865 - RNA, 1230 nt, Artificial Sequence
  derived and/or modified sequence
augaaaacaucagacgguuucaccuuaaacgccgagagcuacguaucuuuuaccaccaaacuggauaucccgacagccgcgaaguaugaauauggagucccacuccagacuagcgacagcuuccuuagguucccuuccucauugacaucaagccucuguaccgauaacaauccagcggcuuuucuagugaaccaggcuguuaaaugcacucgcaagauuaaucuagaacaaugugaggagauugaggcccucuccauggcuuucuacuccuccccugaaauuuugcgggugccugauagccgcaagaaagugccuauuaccgugcagucaauugugauacagucucuuaauaaaaccuugacccgccgcgaggauacagacgugcugcagccaacacuuguuaacgcaggccacuuuucccugugcgugaacgugguacuugaagucaaauauucauuaacuuauaccgaugcuggcgaaguaaccaaagccgaucugaguuuuguccucggaacaguauccagcguagucgugccuuugcagcagaaauucgaaauacauuuccuucaagagaacacccaacccguuccccugagugggaauccgggguacguggugggacuuccauuagccgccgguuuccagccucacaagggauccggcauaauccagacuacaaacagauacgggcaguugaccauccuucauucgaccaccgaacaggacugucucgcucuugagggcguccgaaccccgguucuauucggguacacaaugcagagcggguguaaauuacggcuuacuggggcacuccccugucaacugguggcccagaaggucaaaucguuguuguggggccagggguucccagauuaugucgcuccguuuggcaauucucaggcucaagacaugcuagauuggguuccuauccacuuuauuacacagucauuuaaucgcaaagauuccugccagcuccccggcgcacuggucaucgaagugaaauggaccaaguaugggucacuccucaauccccaggcuaagauagugaacguaacggcuaaucuuauuaguucuuccuuuccugaagcaaauucugggaacgagcguacuauucucaucucgacugccgucaccuucguggaugucagcgcacccgccgaagccggauuucgagcuccucccgcuauaaaugcgaggcuuccauuuaacuucuuuuucccauuuguauag

SEQ ID NO: 272866 - RNA, 1230 nt, Artificial Sequence
  derived and/or modified sequence
augaagacaagcgauggcuuuacccugaacgcugagaguuaugucucguuuaccacgaaacuugauauuccaaccgccgccaaguaugaguauggcguaccacuucagacuagugacagcuuccugcgauuccccagcagucuuaccuccucccugugcaccgauaacaaucccgccgcuuuccucgugaaucaagcugugaaauguacccggaaaauaaauuuggagcagugugaggaaaucgaagcuuugucuauggccuuuuacaguucuccugagauccugcgcguccccgauagccgcaagaaagugccuauuaccgugcagucaauugugauacagucucuuaauaaaaccuugacccgccgcgaggauacagacgugcugcagccaacacuuguuaacgcaggccacuuuucccugugcgugaacgugguacuugaagucaaauauucauuaacuuauaccgaugcuggcgaaguaaccaaagccgaucugaguuuuguccucggaacaguauccagcguagucgugccuuugcagcagaaauucgaaauacauuuccuucaagagaacacccaacccguuccccugagugggaaccccggguauguuguggggcugccgcuugcagcgggcuuccagccacauaaaggaagcggcaucauccaaaccaccaaccguuacggacaauugacaauccuccauuccacuacugaacaagacugccuggcacucgagggggugagaacgccugugcuauuugguuauaccaugcagaguggcuguaaguugcgucuuacuggagcacuuccaugucagcucgucgcccagaaagucaagucucugcuauggggucaaggguucccugauuauguggccccuuuugguaauagucaagcucaagacaugcuagauuggguuccuauccacuuuauuacacagucauuuaaucgcaaagauuccugccagcuccccggcgcacuggucaucgaagugaaauggaccaaguaugggucacuccucaauccccaggcuaagauagugaacguaacggcuaaucuuauuaguucuuccuuuccugaagcaaauucugggaacgagcguacuauucucaucucgacugccgucaccuucguggaugucagcgcacccgccgaagccggauuucgagcuccucccgcuauaaaugcgaggcuuccuuucaacuucuucuuccccuucgucuag

SEQ ID NO: 272867 - protein, 559 aa, Artificial Sequence
  derived and/or modified sequence
MPDPDFTVRDVKLLVGSRRLVDVMDVNTQKGTEMSMSQFVRYYETPEAQRDKLYNVISLEFSHTKLEHLVKRPTVVDLVDWVDNMWPQHLKEKQTEATNAIAEMKYPKVKKYCLMSVKGCFTDFHIDFGGTSVWYHVFRGGKIFWLIPPTLHNLALYEEWVLSGKQSDIFLGDRVERCQRIELKQGYTFFIPSGWIHAVYTPVDSLVFGGNILHSFNVPMQLRIYEIEDRTRVQPKFRYPFYYEMCWYVLERYVYCVTQRSHLTQEYQRESMLIDAPRKPSIDGFSSDSWLEMEEEACDQQPQEEEEKDEEGEGRDRAPKPPTDGSTSPTSTPSEDQEALGKKPKAPALRFLKRTLSNESEESVKSTTLAVDYPKTPTGSPATEVSAKWTHLTEFELKGLKALVEKLESLPENKKCVPEGIEDPQALLEGVKNVLKEHADDDPSLAITGVPVVTWPKKTPKNRAVGRPKGKLGPASAVKLAANRTTAGARRRRTRCRKCEACLRTECGECHFCKDMKKFGGPGRMKQSCIMRQCIATAIRSLISACPSSNAVETSVILT

SEQ ID NO: 272868 - protein, 206 aa, Artificial Sequence
  derived and/or modified sequence
MALNVAPVRDTKWLTLEVCRQFQRGTCSRSDEECKFAHPPKSCQVENGRVIACFDSLKGRCSRENCKYLHPPTHLKTQLEINGRNNLIQQKTAAAMLAQQMQFMFPGTPLHPVAFPPGALHPLPKRQALEKSNGTSAVFNPSVLHYQQALTSAQLQQHAAFIPTDNSEIISRNGMECQESALRITKHCYCTYYPVSSSIELPQTAC

SEQ ID NO: 272869 - protein, 106 aa, Artificial Sequence
  derived and/or modified sequence
MTQSTAKAMKRPLEATVDLAFPPGALHPLPKRQALEKSNGTSAVFNPSVLHYQQALTSAQLQQHAAFIPTVPMMHSATSATVSAATTPATSVPFAATATANQLVYS

SEQ ID NO: 272870 - DNA, 321 bp, Artificial Sequence
  derived and/or modified sequence
atgacccagagcaccgccaaggccatgaagagacccctggaggccaccgtggacctggccttcccccccggcgccctgcaccccctgcccaagagacaggccctggagaagagcaacggcaccagcgccgtgttcaaccccagcgtgctgcactaccagcaggccctgaccagcgcccagctgcagcagcacgccgccttcatccccaccgtgcccatgatgcacagcgccaccagcgccaccgtgagcgccgccaccacccccgccaccagcgtgcccttcgccgccaccgccaccgccaaccagctggtgtacagctag

SEQ ID NO: 272871 - DNA, 321 bp, Artificial Sequence
  derived and/or modified sequence
atgacccagtcaactgccaaggcaatgaagcgccctctagaagcgacagtggatctggcctttccccctggcgccctgcatccattacctaagcgtcaagctctggagaaatccaatgggacatctgctgtcttcaatccatccgtgcttcattaccagcaggccttaacctctgcacagctgcagcaacacgccgcattcatccccacagtgcccatgatgcattccgctacctctgcaaccgtaagcgccgccactacaccagcaacaagcgttcctttcgccgccactgctacagccaatcagttggtctactcgtag

SEQ ID NO: 272872 - DNA, 1864 bp, Artificial Sequence
  derived and/or modified sequence
ctgaaggtaaaattttccagatacggcagacggctttcagagtacaataaacagggaatgagaactatttacatggaagtttctttctcatgatgcggtggagaagcctcggccacttggttctgccagatgttcctggggttactgtaaatgggaaggacaggcagagctaaacaaggtttatcatttaaaagtgcctgtgtgaagtcacttttgctggaaaactgcagcttgggagctttctttgtattcacatcccactcttctgtcaagtacactttaccctgaccttatgagtggatgaagatacctcagttgtctgactttgccaattgcttaatttcagaatttaaaaaggggaaagaaaaacatcctgctaaaatatgaacatctgagtgtcttattttccaacatcgtcaatagctgtgagcgtcagcattaaatattctcccaaggagtgccatgatattgaagtcactttattaataacagctgtatctgcaaaacagtcaagagactcggacgttgaaagccagagatgacactgagcatgcttttattgcggcctaccatctttaagtgggacatattgattgatgagtgattgcctgtccatacactctctcatcatcctgttccttggattggacttcactaagcaatttatcactcaccttcagacttacatgtgggagttttcacaacagtagttttggaatcattagaacttggattgatttcatcatttaacagaaacaaacagcccaaattactttatcaccatggctttgaacgttgccccagtcagagatacaaaatggctgacattagaagtctgcagacagtttcaaagaggaacatgctcacgctctgatgaagaatgcaaatttgctcatccccccaaaagttgtcaggttgaaaatggaagagtaattgcctgctttgattccctaaagggccgttgttcgagagagaactgcaagtatcttcaccctccgacacacttaaaaactcaactagaaattaatggaaggaacaatttgattcagcaaaaaactgcagcagcaatgcttgcccagcagatgcaatttatgtttccaggaacaccacttcatccagtgcccactttccctgtaggtcccgcgatagggacaaatacggctattagctttgctccttacctagcacctgtaacccctggagttgggttggtcccaacggaaattctgcccaccacgcctgttattgttcccggaagtccaccggtcactgtcccgggctcaactgcaactcagaaacttctcaggactgacaaactggaggtatgcagggagttccagcgaggaaactgtgcccggggagagaccgactgccgctttgcacaccccgcagacagcaccatgatcgacacaagtgacaacaccgtaaccgtttgtatggattacataaaggggcgttgcatgagggagaaatgcaaatattttcaccctcctgcacacttgcaggccaaaatcaaagctgcgcagccgcggccgcggccacagtcatgactcagtcgactgccaaagcaatgaagcgacctctcgaagcaactgtagacctggcctttccccctggtgctcttcatcctttaccaaagagacaagcacttgaaaaaagcaatggtaccagcgcggtctttaaccccagcgtcttgcactaccagcaggctctcaccagcgcacagttgcagcaacacgccgcgttcattccaacagtacccatgatgcacagcgctacgtccgccactgtctctgcagcaacaactcctgcaacaagtgtccccttcgcagcaacagccacagccaatcagttagtttatagc

SEQ ID NO: 272873 - DNA, 321 bp, Artificial Sequence
  derived and/or modified sequence
atgacccagagcacagccaaggccatgaagaggcccctggaggccaccgtggacctggccttccccccaggggccctgcaccccctgcccaagaggcaggccctggagaagagcaatggcaccagcgctgtgttcaaccccagcgtgctgcactaccagcaggccctgaccagcgcccagctgcagcagcacgccgccttcatccccaccgtgcccatgatgcacagcgccaccagcgccaccgtgtctgctgccaccaccccagccacctctgtgccctttgctgccacagccacagccaaccagctggtgtacagctag

SEQ ID NO: 272874 - DNA, 321 bp, Artificial Sequence
  derived and/or modified sequence
atgacccagagcaccgccaaggccatgaagcggcccctggaggccaccgtcgacttggcttttccgccaggggccctgcacccgctgccaaagcgtcaagcgctcgagaagtcaaacggaactagtgcggtgttcaaccctagtgtactacattaccaacaagcactcacctcagcgcagctgcagcagcacgccgcctttattccgactgtgcctatgatgcactctgcgacaagcgcaactgtgagtgccgcaacaacacctgccacttcagtaccgttcgccgccacagccaccgccaatcaactggtgtactcgtag

SEQ ID NO: 272875 - DNA, 321 bp, Artificial Sequence
  derived and/or modified sequence
atgacacaatccaccgcaaaagctatgaagagacccctcgaagctactgtggacctcgcctttccccctggggctctccaccctctgcctaaacgccaggctcttgagaaatccaacggaacttcagccgttttcaatccttcggtgctccattatcagcaggcacttacctcagcgcagctccagcagcacgctgcctttatccctaccgtaccgatgatgcattctgccacaagcgccaccgtgagcgcagccacaacacctgcgacctccgtcccctttgccgctaccgcaacggcgaatcagctggtctactcttag

SEQ ID NO: 272876 - DNA, 495 bp, Artificial Sequence
  derived and/or modified sequence
atggacgacagcaccgagagagagcagagcagactgaccagctgcctgaagaagagagaggagatgaagctgaaggagtgcgtgagcatcctgcccagaaaggagagccccagcgtgagaagcagcaaggacggcaagctgctggccgccaccctgctgctggccctgctgagctgctgcctgaccgtggtgagcttctaccaggtggccgccctgcagggcgacctggccagcctgagagccgagctgcagggccaccacgccgagaagctgcccgccggcgccggcgcccccaaggccggcctggaggaggcccccgccgtgaccgccggcctgaagatcttcgagccccccgcccccggcgagggcaacagcagccagaacagcagaaacaagagagccgtgcagggccccgaggagaccgtgacccaggactgcctgcagctgatcgccgacagcgagacccccaccatccagaagggcttcatctactag

SEQ ID NO: 272877 - DNA, 495 bp, Artificial Sequence
  derived and/or modified sequence
atggatgattccactgagcgggagcagagcaggctgacatcctgcctaaagaaacgagaggagatgaagttgaaggagtgtgtctccattcttcctagaaaagaaagcccctcagttcggtcctccaaggacgggaaacttctcgctgccactctgctgctagccctactctcctgctgtcttacagtggtgagtttctatcaggtggccgcattacagggggatttggccagcctgcgcgctgagctgcaaggacaccacgctgaaaaactgcccgccggtgctggcgctcctaaggcaggcttagaagaggctccggccgtaactgccggcttgaagatcttcgagcctcccgctccaggcgagggcaattctagccagaactctcggaacaaacgcgctgtgcagggacctgaggaaaccgtcacccaagattgtctgcagctgatcgctgattctgagacccctaccatccagaagggctttatctactag

SEQ ID NO: 272878 - DNA, 495 bp, Artificial Sequence
  derived and/or modified sequence
atggatgacagcacagagcgggagcagagccggctgaccagctgcctgaagaagcgggaggagatgaagctgaaggaatgtgtgtccatcctgcccaggaaggagagccccagcgtgcgcagcagcaaggatggcaagctgctggccgccaccctgctgctggccctgctgagctgctgcctgactgtggtgtccttctaccaggtggccgccctgcagggcgacctggccagcctgcgggcagagctgcagggccaccacgccgagaagctgcctgctggagctggggcccccaaggccggcctggaggaggccccagctgtgacagctggcctgaagatctttgagcccccagcccctggagagggcaacagcagccagaacagcaggaacaagagagctgtgcagggccctgaggagaccgtgacccaggactgcctgcagctgattgctgacagcgagacccccaccatccagaagggcttcatctactag

SEQ ID NO: 272879 - DNA, 495 bp, Artificial Sequence
  derived and/or modified sequence
atggacgacagcaccgagcgggagcagagccggctgaccagctgcctgaagaagagggaggaaatgaaactcaaggagtgcgtgagtattctaccccggaaagaatctccctcggtgcggtcctctaaggacggcaaactgcttgctgccactctgctcctggccttattgagttgttgtctcacagtcgtgtccttctatcaggtcgctgccctgcaaggagacctcgcttcgctacgggctgagttacaggggcatcatgcggagaaactgccagccggagctggcgctcctaaggccgggctggaagaggccccagctgtaacggcaggcctgaagatattcgagccgccggcgcccggagaggggaactctagccagaattccaggaataaaagggcagtgcaagggcctgaagagaccgtgacccaggattgtctccagttgatcgccgactccgagaccccgacaatccagaaaggtttcatctactag

SEQ ID NO: 272880 - DNA, 495 bp, Artificial Sequence
  derived and/or modified sequence
atggatgactctaccgagagggaacagagtaggctgactagctgcctcaaaaagcgagaagaaatgaagcttaaagagtgtgtgtctatcttacctagaaaggagtctccttcggtgcggtccagtaaagatggaaaattgctggctgctacactcctgttggctctgctttcatgttgtctgacagtggtgagtttttaccaggtggccgcactgcagggggatctcgccagcctgagagcagagttacagggacaccacgccgagaaactcccagctggggctggcgcacccaaggccggtttagaagaggccccagctgtcactgcaggcttgaagatatttgagccccctgcccctggagagggcaactccagccagaacagcaggaataaaagagcagtccaagggccagaggaaacggtgacacaggactgcttacaactgattgccgattctgagactcctaccatccagaaagggttcatttattag

SEQ ID NO: 272881 - DNA, 495 bp, Artificial Sequence
  derived and/or modified sequence
atggatgactccacagaaagggagcagtcacgccttacttcttgccttaagaaaagagaagaaatgaaactgaaggagtgtgtttccatcctcccacggaaggaaagcccctctgtccgatcctccaaagacggaaagctgctggctgcaaccttgctgctggcactgctgtcttgctgcctcacggtggtgtctttctaccaggtggccgccctgcaaggggacctggccagcctccgggcagagctgcagggccaccacgcggagaagctgccagcaggagcaggagcccccaaggccggcctggaggaagctccagctgtcaccgcgggactgaaaatctttgaaccaccagctccaggagaaggcaactccagtcagaacagcagaaataagcgtgccgttcagggtccagaagaaacagtcactcaagactgcttgcaactgattgcagacagtgaaacaccaactatacaaaaaggttttatatactga

SEQ ID NO: 272882 - protein, 306 aa, Artificial Sequence
  derived and/or modified sequence
MALRLLRRAARGAAAAALLRLKASLAADIPRLGYSSSSHHKYIPRRAVLYVPGNDEKKIKKIPSLNVDCAVLDCEDGVAANKKNEARLRIVKTLEDIDLGPTEKCVRVNSVSSGLAEEDLETLLQSRVLPSSLMLPKVESPEEIQWAVCEETLKVGPQVGLFLDAVVFGGEDFRASIGATSSKETLDILYARQKIVVIAKAFGLQAIDLVYIDFRDGAGLLRQSREGAAMGFTGKQVIHPNQIAVVQEQFSPSPEKIKWAEELIAAFKEHQQLGKGAFTFQGSMIDMPLLKQAQNTVTLATSIKEK

SEQ ID NO: 272883 - protein, 103 aa, Artificial Sequence
  derived and/or modified sequence
LQAIDLVYIDFRDGAGLLRQSREGAAMGFTGKQVIHPNQIAVVQEQFSPSPEKIKWAEELIAAFKEHQQLGKGAFTFQGSMIDMPLLKQAQNTVTLATSIKEK

SEQ ID NO: 272884 - protein, 89 aa, Artificial Sequence
  derived and/or modified sequence
EELIAAFKEHQQLGKVGRYCCSWLCIQPFPSSPGQRSQSISRVPGRYWVLGARSWESKGAFTFQGSMIDMPLLKQAQNTVTLATSIKEK

SEQ ID NO: 272885 - protein, 147 aa, Artificial Sequence
  derived and/or modified sequence
NEARLRIVKTLEDIDLGPTEKCVRVNSVSSGLAEEDLETLLQSRVLPSSLMLPKVESPEEIQWAVCEETLKVGPQVGLFLDAVVFGGEDFRASIGVKDISLSLFLCVCVYMCVYIFSLPLKDGHLHNNVYLPTMTMVFHDNGMDTTS

SEQ ID NO: 272886 - protein, 302 aa, Artificial Sequence
  derived and/or modified sequence
MALRLLRRAARGAAAAALLRLKASLAADIPRLGYSSSSHHKYIPRRAVLYVPGNDEKKIKKIPSLNVDCAVLDCEDGVAANKKNEARLRIVKTLEDIDLGPTEKCVRVNSVSSGLAEEDLETLLQSRVLPSSLMLPKVESPEEIQWAVCEETLKVGPQVGLFLDAVVFGGEDFRASIGATSSKETLDILYARQKIVVIAKAFGLQAIDLVYIDFRDGAGLLRQSREGAAMGFTGKQVIHPNQIAVVQEQFSPSPEKIKWAEELIAAFKEHQQLGKTVSCSASQAGVQWRDLGSLQPPPPGFK

SEQ ID NO: 272887 - DNA, 921 bp, Artificial Sequence
  derived and/or modified sequence
atggctctgcggcttctcagaagagctgctaggggagccgcggcagcagccttgttacgtctgaaggccagtctggctgccgacatacctcggctcggatatagttcctcatcccaccacaaatacatcccacggagagcagtgttgtacgtgcctggaaatgatgaaaaaaaaattaaaaagataccctctcttaacgtcgactgcgcagtgctggactgcgaggatggcgtagcagccaacaagaagaatgaagccaggctgcggattgtcaaaacactggaagatattgacctgggtccaactgagaagtgcgtgcgggtaaattcagtctcatccgggcttgctgaggaggatttagaaacactgcttcagtccagagtgctgccaagctctttgatgctgcctaaggtggagagtccggaagaaatacagtgggctgtgtgtgaagaaaccctcaaggttgggccccaggtcgggttgtttctggacgcagtggtgttcggaggggaggactttagggcttctattggcgcaaccagcagcaaggaaactctagacatcctttatgctaggcaaaagattgtagttattgctaaagcttttggcctccaggcaatagacctggtttatatcgacttccgcgatggcgcaggtttgctcaggcagagcagagagggcgccgctatgggctttaccggcaagcaagtaatccatccaaatcaaatagctgtggtgcaagaacagtttagccctagccccgagaagatcaaatgggcagaagaattgatcgctgccttcaaggaacatcaacagctcggtaagggagcatttacctttcaggggagcatgattgatatgcctctgttaaagcaggctcaaaacactgtcactctcgccactagcatcaaagagaagtag

SEQ ID NO: 272888 - DNA, 921 bp, Artificial Sequence
  derived and/or modified sequence
atggccctgaggctgctgcgtcgggcagcccggggtgccgctgccgcagctctgctgcgcttaaaagcctcactggctgcagatatccccagattggggtacagctcctccagtcatcacaaatatattccacggcgagctgtactgtatgtgcccggcaacgatgagaagaagataaagaaaatcccttcattaaacgtggactgcgccgtgttggactgtgaagacggtgttgctgctaataagaagaacgaggccaggctgcggatcgtgaagaccctggaagacatcgatctgggcccaaccgaaaagtgtgtgagggtcaactcagtgtcctcgggcctagccgaggaggacctggagaccctgctgcagtccagagtgcttccatcttccctgatgctacctaaggtggagagccctgaggagattcaatgggccgtttgcgaagagacactcaaagtcggaccccaggttggcctgttcctggacgcagtggtgttcggaggcgaagactttagggcatccatcggtgcaaccagtagcaaggaaacgctggacattctgtatgcacgccaaaaaatcgtggtcattgcaaaagccttcgggctacaggcaatagacttggtctacatcgactttagagacggcgccggtcttctcagacagtcacgtgaaggagctgctatggggttcacagggaaacaagtaatccatccaaaccagatcgctgtcgttcaggagcagtttagcccatcgcccgaaaaaatcaaatgggctgaggagctcattgctgcatttaaagagcaccagcagctgggtaaaggcgccttcacgtttcagggctcgatgatagacatgccgctgttaaagcaagctcaaaatacagtgacactggctaccagtatcaaggagaaatag

SEQ ID NO: 272889 - DNA, 312 bp, Artificial Sequence
  derived and/or modified sequence
cttcaggctatcgacctcgtctacatcgactttagggacggtgccggtttgctgcgtcagtcgagagagggagccgccatgggattcacaggcaagcaggtcattcaccctaaccagatcgctgtcgtgcaggagcagtttagcccttctccagagaagattaagtgggcggaggagctgatagctgcattcaaagagcaccaacagttgggaaaaggagccttcacatttcagggcagcatgatagatatgcctctgttgaaacaggcccaaaacactgtaactctcgcaacctccatcaaggagaaatag

SEQ ID NO: 272890 - DNA, 270 bp, Artificial Sequence
  derived and/or modified sequence
gaagaactgatcgccgcattcaaggagcaccagcagctgggtaaggttgggaggtactgctgcagttggttatgtattcagccttttcctagtagccctggacaacgatcacagtcgatttcacgagttcccggaagatactgggtgctgggtgcgagatcctgggaatccaagggcgcatttaccttccaagggtcaatgatcgacatgccactactgaaacaggcacagaacactgtcactctggcaactagtataaaggagaaatag

SEQ ID NO: 272891 - DNA, 444 bp, Artificial Sequence
  derived and/or modified sequence
aacgaagctcgcttgaggatcgttaagactctagaggatatcgacctaggtcccacagagaagtgcgtccgagtaaactcggtgtcaagcggccttgccgaggaggacctggagaccctgttgcagtcaagagtccttccttcaagcctcatgctgcccaaggtcgaaagtccagaggagatccagtgggccgtttgcgaggaaacactgaaggtcggaccacaggtggggctgttcctggacgctgtggtgttcggtggcgaagattttcgggccagtattggcgtcaaagatatatcactcagcttgttcctgtgtgtttgtgtgtacatgtgcgtgtacatttttagtcttccactaaaggacggccaccttcacaacaacgtctacctgccaaccatgaccatggtgttccacgacaatgggatggacacaacgagctag

SEQ ID NO: 272892 - DNA, 909 bp, Artificial Sequence
  derived and/or modified sequence
atggcactaagactgctgcgccgggccgctcgaggggccgccgccgcagccctgcttaggctgaaagcgagtttggctgctgacattccacgcctcggctatagctcgagttcacatcataaatacatcccaagaagggcagtcctctacgtacccgggaacgatgaaaagaagataaagaaaatcccctcccttaatgtcgattgcgcagtgctggactgtgaagatggggtggctgcaaacaagaagaatgaggcacgactgaggatcgttaaaaccctcgaggacattgatttgggtccgaccgagaaatgcgtccgagttaacagcgtgagcagtgggctcgccgaggaagatctcgaaaccctcctgcagtctagagtcctgccaagttccttgatgctcccaaaagtggagtcccccgaggaaattcagtgggctgtctgcgaagaaacgcttaaagtgggcccccaggtgggcctgttcctcgacgctgtcgtgtttggaggagaggattttcgggcttctatcggcgcaaccagttccaaggagactctggatattctatacgccaggcagaagatcgtggtcattgctaaagcattcggcttacaggcgattgacctggtctatattgacttccgggacggcgcgggattgctgcgacagagccgcgagggggcagcgatgggcttcacaggtaagcaagtaatccacccaaaccagattgctgtcgtgcaggagcagttttcccctagtcccgagaagatcaagtgggctgaggaacttattgctgcgtttaaggagcatcagcagcttggcaagaccgtcagttgttcagcttcccaggcaggagtgcagtggagagatctgggatcactgcagccccctccccccggatttaagtag

SEQ ID NO: 272893 - DNA, 921 bp, Artificial Sequence
  derived and/or modified sequence
atggccctgcggctgctgcggcgggccgcccggggagctgctgctgctgccctgctgcggctgaaggccagcctggccgctgacatcccccggctgggctacagcagcagcagccaccacaagtacatccccaggagagctgtgctgtatgtgcctggaaatgatgagaagaagatcaagaagatccccagcctgaatgtggactgtgctgtgctggactgtgaagatggagtggccgccaacaagaagaatgaggcccggctgcgcatcgtgaagaccctggaggacatcgacctgggccccacagagaagtgtgtgcgggtgaacagcgtgagcagcggcctggccgaggaggacctggagaccctgctgcagagccgggtgctgcccagcagcctgatgctgcccaaggtggagagccctgaggagatccagtgggccgtgtgtgaggagaccctgaaggtgggcccccaggtgggcctcttcctggatgctgtggtgtttggaggagaggacttccgggccagcattggagccaccagcagcaaggagaccctggacatcctgtatgcccggcagaagatcgtggtgattgccaaggccttcggcctgcaggccatcgacctggtgtacatcgacttcagagatggagctggcctgctgcggcagagccgggagggcgccgccatgggcttcaccgggaagcaggtgatccaccccaaccagattgctgtggtgcaggagcagttcagccccagccctgagaagatcaagtgggccgaggagctgattgctgccttcaaggagcaccagcagctgggcaaaggagccttcaccttccagggctccatgattgacatgcccctgctgaagcaggcccagaacacagtgaccctggccaccagcatcaaggagaagtag

SEQ ID NO: 272894 - DNA, 312 bp, Artificial Sequence
  derived and/or modified sequence
ctgcaggccatcgacctggtgtacatcgacttcagagatggagctggcctgctgcggcagagccgggagggcgccgccatgggcttcaccgggaagcaggtgatccaccccaaccagattgctgtggtgcaggagcagttcagccccagccctgagaagatcaagtgggccgaggagctgattgctgccttcaaggagcaccagcagctgggcaagggggccttcaccttccagggctccatgattgacatgcccctgctgaagcaggcccagaacacagtgaccctggccaccagcatcaaggagaagtag

SEQ ID NO: 272895 - DNA, 270 bp, Artificial Sequence
  derived and/or modified sequence
gaggagctgattgctgccttcaaggagcaccagcagctgggcaaggtgggccgctactgctgctcctggctgtgcatccagcccttccccagcagccctggccagaggagccagagcatcagccgggtgcccggccgctactgggtgctgggcgcccgctcctgggagagcaagggggccttcaccttccagggctccatgattgacatgcccctgctgaagcaggcccagaacacagtgaccctggccaccagcatcaaggagaagtag

SEQ ID NO: 272896 - DNA, 444 bp, Artificial Sequence
  derived and/or modified sequence
aatgaggcccggctgagaattgtgaagaccctggaggacatcgacctgggccccacagagaagtgtgtgcgggtgaacagcgtgagcagcggcctggccgaggaggacctggagaccctgctgcagagccgggtgctgcccagcagcctgatgctgcccaaggtggagagccctgaggagatccagtgggccgtgtgtgaggagaccctgaaggtgggcccccaggtgggcctcttcctggatgctgtggtgtttggaggagaggacttccgggccagcattggagtgaaggacatcagcctgagcctcttcctgtgtgtgtgtgtgtacatgtgtgtgtacatcttcagcctgcccctgaaggatggccacctgcacaacaacgtgtacctgcccaccatgaccatggtgttccatgacaatggcatggacaccaccagctag

SEQ ID NO: 272897 - DNA, 909 bp, Artificial Sequence
  derived and/or modified sequence
atggccctgcggctgctgcggcgggccgcccggggagctgctgctgctgccctgctgcggctgaaggccagcctggccgctgacatcccccggctgggctacagcagcagcagccaccacaagtacatccccaggagagctgtgctgtatgtgcctggaaatgatgagaagaagatcaagaagatccccagcctgaatgtggactgtgctgtgctggactgtgaagatggagtggccgccaacaagaagaatgaggcccggctgcgcatcgtgaagaccctggaggacatcgacctgggccccacagagaagtgtgtgcgggtgaacagcgtgagcagcggcctggccgaggaggacctggagaccctgctgcagagccgggtgctgcccagcagcctgatgctgcccaaggtggagagccctgaggagatccagtgggccgtgtgtgaggagaccctgaaggtgggcccccaggtgggcctcttcctggatgctgtggtgtttggaggagaggacttccgggccagcattggagccaccagcagcaaggagaccctggacatcctgtatgcccggcagaagatcgtggtgattgccaaggccttcggcctgcaggccatcgacctggtgtacatcgacttcagagatggagctggcctgctgcggcagagccgggagggcgccgccatgggcttcaccgggaagcaggtgatccaccccaaccagattgctgtggtgcaggagcagttcagccccagccctgagaagatcaagtgggccgaggagctgattgctgccttcaaggagcaccagcagctgggcaagacagtgtcctgcagcgccagccaggccggcgtgcagtggagggacctgggcagcctgcagcccccacctcctggcttcaagtag

SEQ ID NO: 272898 - DNA, 921 bp, Artificial Sequence
  derived and/or modified sequence
atggccctgcggctgctgcggcgggccgcccggggcgccgccgccgccgcactgctgcgactgaaagctagcctggcggcagacatacctcgcctggggtatagcagctccagccaccacaaatacatcccccggcgcgccgtgctgtatgtaccagggaatgatgagaagaagatcaaaaagattccaagtctcaacgtggattgtgccgttctcgattgtgaggatggcgtcgccgcgaacaagaaaaatgaggcgcgcctacgaatcgtgaagactctcgaggacattgacttaggccctaccgagaaatgcgtgagggtaaattcagtcagtagtgggctagcagaggaggatctggagacactgctgcagagcagagtgctcccatcctcgttgatgttgcctaaggtggaatctcccgaggagattcagtgggcagtctgcgaagagactcttaaggtgggaccgcaggtgggattatttttagacgcagttgtgtttggtggcgaggactttcgtgcgtctatcggggccacctccagcaaggagaccctggatatcctctacgcaagacaaaaaatcgtggtgattgccaaagcctttgggctccaggctattgatctggtctacatagatttcagggacggggctggcctgttaagacagtccagagaaggcgctgctatggggtttacgggaaagcaggtaatccatccaaatcaaattgccgtagtccaggaacagttttcaccttctcctgaaaagataaagtgggctgaggagctcatcgcagccttcaaagaacaccagcagctgggcaaaggggcgttcaccttccaggggtctatgattgacatgcccctgttgaagcaagctcagaacaccgtaacactggcaacctccatcaaagaaaagtag

SEQ ID NO: 272899 - DNA, 921 bp, Artificial Sequence
  derived and/or modified sequence
atggccctgcggctgctgcggcgggccgcccggggcgccgccgccgcagccctactgagactcaaagcttccttggctgccgacattcctcgactgggctatagttctagctcccatcataaatatatcccaaggagagccgtgctgtacgttcccggaaacgacgaaaagaagatcaagaagatcccatccttgaacgtggattgcgcggtgttggattgtgaggatggcgtggcagccaataaaaagaacgaagctagactcagaattgtcaaaacgctagaggacattgatctcgggcctacagaaaaatgtgttcgggtgaactctgtctcctctggcctggccgaggaggatttagagaccctcctgcagtcccgggtgttaccctcctctttgatgctccctaaagtagagagcccagaggagatccaatgggctgtctgcgaagaaacactcaaggtcgggccacaggtaggcctttttctggacgccgtggtcttcgggggagaagatttccgggcgtcaattggagctacgtccagcaaagagacactggacattctctatgcaaggcaaaaaatagtggttatcgccaaagccttcggactacaggcaatcgatctcgtttatatcgactttcgagacggcgccgggctcctgcggcagtccagagaaggcgccgccatgggcttcacgggaaaacaggtgatccatccaaatcaaatagccgtcgtgcaagaacagttctcaccgtcaccggaaaaaataaagtgggctgaagagctgattgccgccttcaaagaacatcaacagctgggcaagggtgcattcacgtttcagggttccatgatcgacatgcctctcttaaagcaggcacagaacaccgtgactctggcaacatcgataaaagagaaatag

SEQ ID NO: 272900 - DNA, 312 bp, Artificial Sequence
  derived and/or modified sequence
ctgcaggccatcgacctggtgtacatcgacttccgggacggcgccgggctattgaggcagagccgggaaggcgccgcaatgggattcactggaaaacaggtgatccaccccaaccaaatcgctgtcgtccaagagcaattctctcccagtcctgaaaagataaagtgggctgaggaacttatcgccgctttcaaggagcatcaacagttgggcaagggggcattcaccttccaaggctccatgatcgacatgcctctgcttaaacaggcgcaaaacacagtgacacttgcaacttcaatcaaagagaagtag

SEQ ID NO: 272901 - DNA, 270 bp, Artificial Sequence
  derived and/or modified sequence
gaggagctgatcgccgccttcaaggagcaccagcagctgggcaaggtgggaaggtattgttgcagctggctgtgcattcagccctttccatctagccccgggcagagatctcaaagtatctcccgggtgcccggaagatattgggtcttgggggcccggtcgtgggagtccaagggagcgtttacatttcagggatctatgatcgatatgccactgttgaaacaggcacagaataccgtgaccctcgcaacctcaatcaaggagaagtag

SEQ ID NO: 272902 - DNA, 444 bp, Artificial Sequence
  derived and/or modified sequence
aacgaggcccggctgcggatcgtgaagaccctggaggacatcgaccttgggcctactgaaaagtgtgttcgcgtgaactctgtttcatctggacttgcagaagaggaccttgagacccttcttcagtctagggtgcttcctagctcactgatgctgccgaaggtggagtcccccgaggagatccagtgggccgtgtgtgaggagactctgaaggtgggacctcaggtgggtttgttcctggatgcagtggttttcggcggtgaagacttcagggctagcatcggagtgaaagatatttctttgtctctattcctgtgtgtttgcgtgtatatgtgcgtgtacatattttccctgcccctcaaggatgggcacctgcataataacgtatacctgcccactatgactatggtctttcacgataatggcatggatacaacctcctag

SEQ ID NO: 272903 - DNA, 909 bp, Artificial Sequence
  derived and/or modified sequence
atggccctgcggctgctgcggcgggccgcccggggcgccgccgccgcggctctgcttagactgaaagcatcactggccgcagatatcccccggttgggctattcgtcgtcctcacaccataagtatattccacggcgtgcagttttgtatgtcccaggtaacgatgaaaagaagattaaaaaaataccatcactgaatgtggattgtgccgtgttggattgcgaggacggggtagcagccaataaaaagaatgaggctagacttcggatagtgaagaccctggaagatatagatcttggtccgaccgagaagtgtgtccgcgttaactcggtgtcaagcggcctggccgaggaggatctggagactcttctgcagtccagggtgctgccttcatcactcatgctccctaaagtggaaagtcctgaagaaatacaatgggccgtttgcgaggagactctgaaagtcgggccccaggtggggctgttcctagatgcggttgtgtttggaggcgaggattttagagcatctatcggcgcaacgtcgtctaaagaaactctcgatattctgtatgcacgccagaagatcgttgtaatcgcaaaagcattcgggcttcaggcgatcgacttagtgtatatcgactttcgcgacggggcaggactgctgaggcagtccagggagggagcagccatggggtttacaggcaaacaggtgattcacccaaaccaaatcgccgttgtgcaggagcagttcagcccgtcccctgaaaagatcaagtgggcggaggagctcatagcagcatttaaagagcatcagcagctcgggaaaacagttagctgttccgcaagccaggcgggcgttcagtggcgtgatctggggagcctccagcccccgccaccaggattcaaatag

SEQ ID NO: 272904 - DNA, 921 bp, Artificial Sequence
  derived and/or modified sequence
atggcactgcggctattgcgaagagccgctcgcggagctgccgcagctgctctgttaagactgaaagcttctcttgccgcagatattccacgactgggctactcatcgtccagtcatcacaaatacattcctagacgagcagtgctgtacgtccccggaaacgacgagaagaagattaagaaaatcccctccctgaacgtcgactgcgccgtcttggactgtgaggacggggtggccgctaataaaaaaaacgaggcaaggcttcgtattgtaaaaaccctggaagacatcgatcttgggccaactgaaaagtgtgtccgggtcaattccgtgtcctccggattagctgaggaggacctggaaactcttctccagtcacgagtgctgccctctagtctcatgctccccaaggttgagagccccgaggagatccagtgggccgtctgtgaagagacattgaaagtcgggcctcaggtgggactgttcctggatgcggtggtatttggaggagaagacttccgcgcatctattggagccacctcttcgaaagagacgttagacatcctttatgctcggcagaagattgtggttatagcgaaggcattcggattgcaggccatagatctcgtgtacatcgacttccgggacggcgctggtctgctgaggcagtcccgggagggagctgcaatggggttcacaggaaaacaggtgattcacccgaaccaaatagccgtggtccaggagcagtttagcccaagcccagagaaaataaaatgggcggaagaactgatagccgctttcaaggagcaccaacagcttgggaaaggcgcattcacatttcagggaagtatgattgacatgccactgctgaagcaggcacagaacacggtgaccctggccacctctatcaaagaaaagtag

SEQ ID NO: 272905 - DNA, 921 bp, Artificial Sequence
  derived and/or modified sequence
atggctctgaggttgttgcgcagggccgctcggggtgccgctgctgccgcacttttaaggctaaaggctagtcttgccgcagatattcctcggctgggttatagttcatctagccaccacaagtacatacccagacgtgccgtgttgtacgtgcccggaaacgacgagaagaagataaaaaagatccccagtctgaacgtggactgcgcagtgctagattgtgaagatggcgttgcagccaacaaaaagaacgaggcaagactgcggatcgtcaaaaccctagaggacatcgaccttggacctactgagaaatgcgtccgcgttaacagcgtgtcgagcggcctcgccgaggaggacctggaaaccctcctacagagtagggtgttgccaagctcactgatgctgcccaaggtcgagagccctgaagagatccagtgggccgtgtgcgaggagactctgaaagtgggccctcaggtgggtctatttctcgacgccgtggtattcggaggagaggactttcgcgcttcaattggggcaacatcgagcaaggagactcttgatattctttacgctagacagaaaatcgtggttattgctaaggcattcggtcttcaggccatcgatctggtgtatattgattttcgggatggagctggactgctgcgtcagtccagggaaggagcagcgatgggattcacaggaaagcaggtgatacaccctaaccagattgctgtcgtccaggaacagtttagtcctagcccggagaaaattaagtgggcagaggagctaatcgccgcatttaaggaacaccagcagctgggtaagggtgcctttacgtttcaaggctcgatgattgatatgcccctgctaaaacaggcccaaaacactgtcactcttgcaacttcaatcaaggaaaaatag

SEQ ID NO: 272906 - DNA, 312 bp, Artificial Sequence
  derived and/or modified sequence
ctgcaggccattgacctggtctacatcgatttcagggatggggcaggactgctgcgccagagtcgcgaaggggctgccatggggtttacaggaaaacaggtgatacaccctaatcagatcgcggttgttcaagaacaattttcccctagccctgaaaaaataaagtgggcagaagagcttattgcggcttttaaggaacaccagcagctgggtaaaggcgcatttacttttcagggttcaatgatcgacatgccactattgaaacaggcacaaaatacggtaacactcgccacctcgatcaaggagaaatag

SEQ ID NO: 272907 - DNA, 270 bp, Artificial Sequence
  derived and/or modified sequence
gaggaactgatcgcggctttcaaggagcaccagcaactgggaaaagtggggcgatattgctgcagctggctgtgtattcagcctttcccaagcagcccaggccaaagatctcagagcatttccagggtgcccggtcgctactgggtccttggggctaggtcctgggagtccaagggagcctttacctttcagggatccatgatcgacatgcctctgttgaagcaggctcagaatactgtgactctggccactagcatcaaggagaagtag

SEQ ID NO: 272908 - DNA, 444 bp, Artificial Sequence
  derived and/or modified sequence
aatgaggcacggctccggatcgttaagacgctcgaggacatagatctcggcccaaccgagaaatgtgtgagagtaaattcggtgagttctggcctggccgaagaggacttagaaacgttgctgcaatctagggtgcttccgtcgtctctgatgttgcctaaggtggagtcgccggaggagatacagtgggcagtctgcgaggaaacgctgaaagtcgggccacaggtgggtctgttcctggacgctgttgtgtttggaggtgaggactttagggcttccattggggtaaaggacatttcattaagtctgttcctgtgcgtttgcgtgtacatgtgcgtgtatattttttcacttcctttgaaggacggccacttgcataacaatgtgtatcttcctacaatgacaatggtgtttcacgataatgggatggacaccacgtcgtag

SEQ ID NO: 272909 - DNA, 909 bp, Artificial Sequence
  derived and/or modified sequence
atggcgctgcgactgctcaggagagctgccagaggcgctgccgcagccgctctgttgaggctcaaggcgtccttagcagctgatattccaagactgggctattccagctctagtcaccacaaatacattcctcgccgagctgtattatacgtgccaggcaacgacgagaaaaagattaagaagatcccgagcctgaacgtggactgtgccgttctggattgcgaagacggcgttgccgcaaacaaaaagaacgaagcacgccttagaattgtcaaaaccctcgaagatattgacttgggaccaacagagaaatgtgtgcgtgttaactccgtgagctcaggactcgctgaggaagatttagagactttactgcagtcgagggtcctgcccagttcccttatgctgccgaaagtggagtcacctgaagagattcagtgggccgtgtgcgaggagaccctcaaggtgggaccacaggtgggtcttttcttggacgccgtcgtattcgggggagaagattttagggccagcattggggcaactagttccaaggaaactcttgatatactatatgcccgacaaaaaatcgtggtgatagccaaggccttcggtctgcaggctattgatcttgtttatattgatttccgggatggggctggtctcttgcgccaatcgcgggaaggggctgctatgggattcacgggaaaacaagttattcacccaaatcagatcgccgtggtccaggagcagttttccccttcccccgaaaaaattaaatgggccgaggaattaattgccgctttcaaagagcaccagcagttgggaaagacagtttcttgctccgcgtcccaagctggggtgcagtggagagacctcggaagtcttcagcccccaccaccgggattcaaatag

SEQ ID NO: 272910 - DNA, 1127 bp, Artificial Sequence
  derived and/or modified sequence
gggaagatggcgctacgtctgctgcggagggcggcgcgcggagctgcggcggcggcgctgctgaggctgaaagcgtctctagcagctgatatccccagacttggatatagttcctcatcccatcacaagtacatcccccggagggcagtgctttatgtacctggaaatgatgaaaagaaaataaagaagattccatccctgaatgtagattgtgcagtgctcgactgtgaggatggagtggctgcaaacaaaaagaatgaagctcgactgagaattgtaaaaactcttgaagacattgatctgggccctactgaaaaatgtgtgagagtcaactcagtttccagtggtctggcggaagaagacctagagacccttttgcaatcccgggtccttccttccagcctgatgctaccaaaggtggaaagtcctgaagaaatccagtgggcagtgtgtgaagaaaccctgaaggtcgggcctcaagtaggtctctttctagatgcagtcgtttttggaggagaagactttcgagccagcataggtgcaacaagtagtaaagaaaccctggatattctctacgcccggcaaaagattgttgtcatagcgaaagcctttggtctccaagccatagatctggtgtacattgactttcgagatggagctgggctgcttagacagtcacgagaaggagccgccatgggcttcactggtaagcaggtgattcaccctaaccaaattgccgtggtccaggagcagttttctccttcccctgaaaaaattaagtgggctgaagaactgattgctgcctttaaagaacatcaacaattaggaaagggggcctttactttccaagggagtatgatcgacatgccattactgaagcaggcccagaacactgttacgcttgccacctccatcaaggaaaaatgatctgttaaatgaagctgtcatcaggtgggctgaacatatacagtggggttcttaaagacaaaccacaatactcaaagcaacttgttaggatgccagattgggacctgactccatttacagttcatgttaatcacaattttgttgttgttgtctcactggccagttattcccctaaaaaaatgaacgcttttccctttgga

SEQ ID NO: 272911 - DNA, 5667 bp, Artificial Sequence
  derived and/or modified sequence
aggcaaagggcggggcgcgcgcgtcgggaagatggcgctacgtctgctgcggagggcggcgcgcggagctgcggcggcggcgctgctgaggctgaaagcgtctctagcagctgatatccccagacttggatatagttcctcatcccatcacaagtacatcccccggagggcagtgctttatgtacctggaaatgatgaaaagaaaataaagaagattccatccctgaatgtagattgtgcagtgctcgactgtgaggatggagtggctgcaaacaaaaagaatgaagctcgactgagaattgtaaaaactcttgaagacattgatctgggccctactgaaaaatgtgtgagagtcaactcagtttccagtggtctggcggaagaagacctagagacccttttgcaatcccgggtccttccttccagcctgatgctaccaaaggtggaaagtcctgaagaaatccagtgggcagtgtgtgaagaaaccctgaaggtcgggcctcaagtaggtctctttctagatgcagtcgtttttggaggagaagactttcgagccagcataggtgcaacaagtagtaaagaaaccctggatattctctacgcccggcaaaagattgttgtcatagcgaaagcctttggtctccaagccatagatctggtgtacattgactttcgagatggagctgggctgcttagacagtcacgagaaggagccgccatgggcttcactggtaagcaggtgattcaccctaaccaaattgccgtggtccaggagcagttttctccttcccctgaaaaaattaagtgggctgaagaactgattgctgcctttaaagaacatcaacaattaggaaagggggcctttactttccaagggagtatgatcgacatgccattactgaagcaggcccagaacactgttacgcttgccacctccatcaaggaaaaatgatctgttaaatgaagctgtcatcaggctaaagggtattgaagctgcagagggatcaacttgtgcttgccagaggacgccaatgaagtttgaaacaccaacaatcagagattttgtttctgttcctcattaaatcatgagcttttgtgccgagactctggacgactgttccttaagaaattaacagaatgggaagttttaaactctacaccaaccttttcatgacctacacagcagcaacgctgctactcttagacaaacaccgcggggaaggctgttctgtttatttaaatttgtaaatagaaaacagttgttttttactttcatttttcacctcctcctacgcccttttggattatttcctctgcggcccctagcatgagccccaaccaggcctccccttttccccacttctctcaattcccacaggaagcccgagaggtgaggagctgaggttagacaccaggagaggcaccatcacacaaaagcgcggccgcagagtcccaccgccaccaggcgacccccacccagagagggacagacatgcggggagccagcaccgggcaagatggctctggggatcctcattctgtgaagacaccaactcatttctcaaacacaggatccaggagacagatagctcctaaatggagatggcacatgctccgtggggtccctcatagaggagtgccaccctccacactggccacgctgggctgccccagagcggccagaaaggaaggtgggagctagccccatcctcactcagaggccggaaggaggaagatggcatctcgccaacttcagagccgaatggcctctagccacactgcttccagaccccagacggggcagcagcagcagttcccagaggagcacccattgttgcagctaggacccaccaaggatgggactcctggagtcaggtgcacaccaggtaacccaggaccacgctgtgcacccccagtctgcccctctgctcagaacacagagggatgggaggatggcttggcagtgggaaggcaaaagaaggcctctctcactctgcccctgccatacgcacccgctgagggtgttagaagcagtggaggcagagctggccctaagcaaaagaagaaaataaacctcaccttgtccttcctatgggcagccctcaccccaatctaactaaccttcccatcctccagcctaatccaaagaagcccttggcttgaggggatgaagggcttgcgttctagtctccaccccagccccacaggcagccagccagccagccccacacagaggggcctcctcaaggcctcactgggagcctcctgtccccagccaaggagccctacagacctggggaaaagcaggcccctccgcaaggcccctgggtggtgcggaggccggaccggctaggcctcccgctgctggccactcccaggccacgggttcctaggtcccaaccacattggactgctcgccacgccactgccctcatcccaaactgctttgttcaaacaaaaccaccttgtttcagtctccccaaatgtccagttcattatcttcctcataacccatggtccctattagggtaggatcatgagactaagacctatgagagccacaaatctggaccaaagtcccattccctgaacagagacccaaacgacgagggtcccagaagagagttcagtcctgatcagaaacccatggtgccttagtccttgaagaacaaaactctaggaagaagatgctggaaggcaaagggtattccccctctttccccacccgcgtctctgtggtgccatgggtgggcccaggtaccctgggaaaggtgggagagcagtcaagggtgggtgtgtgatctccactgggctcactgggcacccccgacacggggaagtgagagctgcccgactcctgagccaggcgtgggtgacaggaagaggaccttgcagctaatctgattcattagaaaccatacctgtttatgttttgtgtagctcatcacaagccgcttagccatatcacccccgttattaattcttggggtctaaattatgggtaacactattaaaacattatcagaactaatgagaaacaattacttagaaaatgagccgggacaagactgagttgggaacatcagtggtgatcactgtagattagtttaataaatcatcaggtgcaaggcaagactgactgtatgtatgcaaagccccgtcacgggaaaatgaaattgagattttttttttttgcataattttttcattaatctcaataggacccgtgtggtgtagattgctttattcccctaataccttgcctgaggcgggggggggggggggtgcccaataatgtcttcattgttttactgaggtcttaatgacaatctgtgacaacctcattttaatgtatagaggattatatcaatacagtcatgttttattgaaatggtgaagggaactccagtcagagtcaggcagtgtctgtgagcacaagttaggaagtttctcggcatccgggagcgttcccgtctgatgtcccagtgttagtcctcccggccgccctcccctcctctcctccagggacggctgggaaaacagtcctgcgggatgaagacttcaccgcctccgatttgaatttgaaagtaactccttccgtggcatatttcgctgggcagatagaacaaaccatgtcgttttcccccgtctctaaaatagacatattattatcattcacacttttgcacccggtcgttttgcgggagttcgggaaactgactttcttcattggggacattgtaattttctgatgatgccacgaggagaaaaaaaatacgggtttgttttaattggaaggaccttccgcttttatgatttcggtttaccttggaaaactgaatcttctgtgttttatttctttcctctagtactagaaaagcaatgaattaattgcacaaaacaggttctgagacggcccgcaggccccgagctcgtggacgcggccgagggtcgggtgtgacccgcggagccgctgccaggcttcccagctcgtcttcgcggggaggcgggaggcaggaccagaccccagcatttcagcgtgaaagtcttcgcctttctttccgcgctgtctttcccgcgggcggagcggcgtacctgagcgcggtccccacggaggatcagtgactttcccagaccccgcgggcgagcccgcgcttgggacccggcagctctgcgcgggctggttttggagggggtggtgttcgtttgtttaaattccagttgttatttggcagcatatcgccttccgagtcagtaagaattgcccacgacgtaaagagcgacttgcaggaaggggccgaagccgtcgttagcgcccgggcggcggcggccactcgaaccccgtttccgccaagcgcgctgcaacctgcggggcgagttcgttttgttttgccaaaatcatttggggacttctttgtcattcatgcccttccttttaaatgatttttatttttttccactgtaagtgaccggctgggtttgacttttgcttcttccgacggaagggcaccgcgagccggggtgggcggccccgcgggcaggaggagcgcggggtacacgcggtggccgcagacgccgagccctgcggagccccgaggcctcgtcgcccgcgcccccggtgcgcgcggagccggggccgaggccgggccaggaggagtgtggcggcccaggaggcctggactgtgggccctgctcgcccgcccgccgcgggccgcccggagcccgcgcgcctgtcgcgcagcccggctgtaatggtggcagatcaaaggcggccccgtgtccccgcggagcccgggacaatcccgcgcctttgtgcgctgttgctaggagcccgagaaactaagagaaagtgtcaggagcatgttaatcagactcgttacactgtaacaataacgtctctctcgggtctcccaggccccagtacccccgcgcaccctgcgcgcaggccggacacctgcgcagggcccttgcgcccgccctggggtcccgccggccctggggtccctgcagccccgaatccgcacccgagccacgcggaacgactagccccgaggggccccgcaggctcccggtgcagctccctggtcgtggtctccttgaccgaagccccggcctcacaccgcctggccgcgagcccgagggacgcagggacgatcccggtcccctgcttttcagtcctccagtcgaatcgcccactttgttcaatcacagtattcgaatcaagaggaaaatgaacattccctttatggtagctttttggttatgagttttggcaaaactgttaaatcaactttgccgatttcccttgggaatccctggaggccactctaagtggtaatcccaagtttaagaaggaaatggggaaattttgctgagagtaaagatgtcgccgaactttttgaagggatttgcttcattcattcatttagtcattcaacagacacctgttgaacccgactgggtgccagaggggccagtcacaggacttattccagatgaacttttcttttgaaattagaatgcccttgtggaagccaaaggaggagcagaggcctaaaataatgtcaagtgtcaaagcaaaaagaagtgccattggctactacagtgtgtgatgataacaagagaggtgcgaattaggaattaaaaacgtttgaaaaactacaggcc

SEQ ID NO: 272912 - DNA, 386 bp, Artificial Sequence
  derived and/or modified sequence
ctccaagccatagatctggtgtacattgactttcgagatggagctgggctgcttagacagtcacgagaaggagccgccatgggcttcactggtaagcaggtgattcaccctaaccaaattgccgtggtccaggagcagttttctccttcccctgaaaaaattaagtgggctgaagaactgattgctgcctttaaagaacatcaacaattaggaaagggggcctttactttccaagggagtatgatcgacatgccattactgaagcaggcccagaacactgttacgcttgccacctccatcaaggaaaaatgatctgttaaatgaagctgtcatcaggaagcccgagaggtgaggagctgaggttagacaccaggagaggcaccatc

SEQ ID NO: 272913 - DNA, 470 bp, Artificial Sequence
  derived and/or modified sequence
gaagaactgattgctgcctttaaagaacatcaacaattaggaaaggtaggtcggtattgctgctcttggctttgcattcagccttttccatcatcaccaggtcagcggtcacagagcatctcccgtgtacctggcaggtactgggtgctgggtgccaggtcctgggagtcaaagggggcctttactttccaagggagtatgatcgacatgccattactgaagcaggcccagaacactgttacgcttgccacctccatcaaggaaaaatgatctgttaaatgaagctgtcatcaggtgggctgaacatatacagtggggttcttaaagacaaaccacaatactcaaagcaacttgttaggatgccagattgggacctgactccatttacagttcatgttaatcacaattttgttgttgttgtctcactggccagttattcccctaaaaaaatgaacgcttttccctttgga

SEQ ID NO: 272914 - DNA, 610 bp, Artificial Sequence
  derived and/or modified sequence
aatgaagctcgactgagaattgtaaaaactcttgaagacattgatctgggccctactgaaaaatgtgtgagagtcaactcagtttccagtggtctggcggaagaagacctagagacccttttgcaatcccgggtccttccttccagcctgatgctaccaaaggtggaaagtcctgaagaaatccagtgggcagtgtgtgaagaaaccctgaaggtcgggcctcaagtaggtctctttctagatgcagtcgtttttggaggagaagactttcgagccagcataggtgtcaaagacatctctctctctctttttctgtgtgtgtgtgtgtatatgtgtgtatatattttttctttgcccctcaaggatggacatttacataacaatgtatatttgccaaccatgacaatggtttttcatgacaatggaatggacactacttcctgataatttagggctcctcatagctgccctgcttctagagcactgcattattacttctgttcatttataaaagacacgagcaatagaaagcctgttgcagccccaggcatgctcaggaatatatggcatctcctttgctcctaataaatatattatgtgaacagcctca

SEQ ID NO: 272915 - DNA, 1448 bp, Artificial Sequence
  derived and/or modified sequence
aaagggcggggcgcgcgcgtcgggaagatggcgctacgtctgctgcggagggcggcgcgcggagctgcggcggcggcgctgctgaggctgaaagcgtctctagcagctgatatccccagacttggatatagttcctcatcccatcacaagtacatcccccggagggcagtgctttatgtacctggaaatgatgaaaagaaaataaagaagattccatccctgaatgtagattgtgcagtgctcgactgtgaggatggagtggctgcaaacaaaaagaatgaagctcgactgagaattgtaaaaactcttgaagacattgatctgggccctactgaaaaatgtgtgagagtcaactcagtttccagtggtctggcggaagaagacctagagacccttttgcaatcccgggtccttccttccagcctgatgctaccaaaggtggaaagtcctgaagaaatccagtgggcagtgtgtgaagaaaccctgaaggtcgggcctcaagtaggtctctttctagatgcagtcgtttttggaggagaagactttcgagccagcataggtgcaacaagtagtaaagaaaccctggatattctctacgcccggcaaaagattgttgtcatagcgaaagcctttggtctccaagccatagatctggtgtacattgactttcgagatggagctgggctgcttagacagtcacgagaaggagccgccatgggcttcactggtaagcaggtgattcaccctaaccaaattgccgtggtccaggagcagttttctccttcccctgaaaaaattaagtgggctgaagaactgattgctgcctttaaagaacatcaacaattaggaaagacagtgtcttgctctgccagccaggctggagtgcaatggcgtgatctcggctccctgcaacctccgcctcccgggttcaagtgattctcctgcctcagcctcctgagtagctaggattacaggcgcacaacatgcctggctaatttttgtatttttagtagagacggtgtttcaccattttggtcaggctggtctcaaactcctgacctcatgatctgcccacctccgcctcccaaagtgctgggattacaggcgtaagccaccgcgcccagcccagaattttgtagttctttttatactgaattttattaaaaatacaaagcaaccatttctataattgtcttttttttcccccactttaggtcagtgggcctcaaaaaaaaagtgaggcaatttcttaccactaccttagggaataaagaattctctctaccgtagcacgcacctccctgcagcatcttgggcagaaataggtacacgaaacacatttagtaaacattatttagctaactggtttccaaattcctgacaatgctaaaaaaaaatttattagatgtacttttaacagtatatatgacatacttctgctgccttct

SEQ ID NO: 272916 - DNA, 921 bp, Artificial Sequence
  derived and/or modified sequence
atggccctgagactgctgagaagagccgccagaggcgccgccgccgccgccctgctgagactgaaggccagcctggccgccgacatccccagactgggctacagcagcagcagccaccacaagtacatccccagaagagccgtgctgtacgtgcccggcaacgacgagaagaagatcaagaagatccccagcctgaacgtggactgcgccgtgctggactgcgaggacggcgtggccgccaacaagaagaacgaggccagactgagaatcgtgaagaccctggaggacatcgacctgggccccaccgagaagtgcgtgagagtgaacagcgtgagcagcggcctggccgaggaggacctggagaccctgctgcagagcagagtgctgcccagcagcctgatgctgcccaaggtggagagccccgaggagatccagtgggccgtgtgcgaggagaccctgaaggtgggcccccaggtgggcctgttcctggacgccgtggtgttcggcggcgaggacttcagagccagcatcggcgccaccagcagcaaggagaccctggacatcctgtacgccagacagaagatcgtggtgatcgccaaggccttcggcctgcaggccatcgacctggtgtacatcgacttcagagacggcgccggcctgctgagacagagcagagagggcgccgccatgggcttcaccggcaagcaggtgatccaccccaaccagatcgccgtggtgcaggagcagttcagccccagccccgagaagatcaagtgggccgaggagctgatcgccgccttcaaggagcaccagcagctgggcaagggcgccttcaccttccagggcagcatgatcgacatgcccctgctgaagcaggcccagaacaccgtgaccctggccaccagcatcaaggagaagtag

SEQ ID NO: 272917 - DNA, 312 bp, Artificial Sequence
  derived and/or modified sequence
ctgcaggccatcgacctggtgtacatcgacttcagagacggcgccggcctgctgagacagagcagagagggcgccgccatgggcttcaccggcaagcaggtgatccaccccaaccagatcgccgtggtgcaggagcagttcagccccagccccgagaagatcaagtgggccgaggagctgatcgccgccttcaaggagcaccagcagctgggcaagggcgccttcaccttccagggcagcatgatcgacatgcccctgctgaagcaggcccagaacaccgtgaccctggccaccagcatcaaggagaagtag

SEQ ID NO: 272918 - DNA, 270 bp, Artificial Sequence
  derived and/or modified sequence
gaggagctgatcgccgccttcaaggagcaccagcagctgggcaaggtgggcagatactgctgcagctggctgtgcatccagcccttccccagcagccccggccagagaagccagagcatcagcagagtgcccggcagatactgggtgctgggcgccagaagctgggagagcaagggcgccttcaccttccagggcagcatgatcgacatgcccctgctgaagcaggcccagaacaccgtgaccctggccaccagcatcaaggagaagtag

SEQ ID NO: 272919 - DNA, 444 bp, Artificial Sequence
  derived and/or modified sequence
aacgaggccagactgagaatcgtgaagaccctggaggacatcgacctgggccccaccgagaagtgcgtgagagtgaacagcgtgagcagcggcctggccgaggaggacctggagaccctgctgcagagcagagtgctgcccagcagcctgatgctgcccaaggtggagagccccgaggagatccagtgggccgtgtgcgaggagaccctgaaggtgggcccccaggtgggcctgttcctggacgccgtggtgttcggcggcgaggacttcagagccagcatcggcgtgaaggacatcagcctgagcctgttcctgtgcgtgtgcgtgtacatgtgcgtgtacatcttcagcctgcccctgaaggacggccacctgcacaacaacgtgtacctgcccaccatgaccatggtgttccacgacaacggcatggacaccaccagctag

SEQ ID NO: 272920 - DNA, 909 bp, Artificial Sequence
  derived and/or modified sequence
atggccctgagactgctgagaagagccgccagaggcgccgccgccgccgccctgctgagactgaaggccagcctggccgccgacatccccagactgggctacagcagcagcagccaccacaagtacatccccagaagagccgtgctgtacgtgcccggcaacgacgagaagaagatcaagaagatccccagcctgaacgtggactgcgccgtgctggactgcgaggacggcgtggccgccaacaagaagaacgaggccagactgagaatcgtgaagaccctggaggacatcgacctgggccccaccgagaagtgcgtgagagtgaacagcgtgagcagcggcctggccgaggaggacctggagaccctgctgcagagcagagtgctgcccagcagcctgatgctgcccaaggtggagagccccgaggagatccagtgggccgtgtgcgaggagaccctgaaggtgggcccccaggtgggcctgttcctggacgccgtggtgttcggcggcgaggacttcagagccagcatcggcgccaccagcagcaaggagaccctggacatcctgtacgccagacagaagatcgtggtgatcgccaaggccttcggcctgcaggccatcgacctggtgtacatcgacttcagagacggcgccggcctgctgagacagagcagagagggcgccgccatgggcttcaccggcaagcaggtgatccaccccaaccagatcgccgtggtgcaggagcagttcagccccagccccgagaagatcaagtgggccgaggagctgatcgccgccttcaaggagcaccagcagctgggcaagaccgtgagctgcagcgccagccaggccggcgtgcagtggagagacctgggcagcctgcagccccccccccccggcttcaagtag

SEQ ID NO: 272921 - DNA, 2514 bp, Artificial Sequence
  derived and/or modified sequence
tttgtcttatagtgatgaaataggccagagatttttagtagacttcctctttgtgaagattttctttttctgttaacattgttcttttctggggatatttgagaaattttcagaattacattttatgttaagaagtaaacatgtatgttttctttttaaaagaagcaaatttagaatttttgcattttcctcctattaatattttctatttttcattgaaatgtggtagcacttaaagttctctaatcttaactgttttattttttatcacaacagtaattttatatttgagttttggagtactaaatgcaagtatatacaaggtgtccttataccagcaacgtcttctaccttgacttggattctccctgactttgtcccatgaagatgggcaaacagtaaattctgtcacagaaaggcactgtgctgggctagcttcactttttgcagtgacacctacgtcacaagatggcatttggagaatattgtgccaagtagaataaaatgcctcacagcttaaaacagtgaatgtgagaagctgaagatttctgtcccaacaaaatgttttagaatcgggttttgtgaaatggttaacgtatttttttcagtggatataaatttaacttcttaaaagaaaatcttcctacttcataagcaccctgtatatatttgcatataaaagtgtggactgccttaaaaatagatgggccaaggaaaacaggagtggagatgatgtgactttgctccatgcactgtggaaagatatgctctgctctatacaaaaattgccatggttctctgctgcatgtgaaaaagatcctgaactagactgtgaaccttgtacatgtttgccatccacggtggtcgagtttgatgaacactgtgccttcttattgtcactttgaagtcacccagcagcatgcagtcgatgatagtccatgcatgtccctgttctcctacacacaataacacagtgagggggacggttggctccgggacaggggacaggtgtcattgcagccctggtctcattttcatctgctctggtgatggtacacagcaggaagttagctgtttgattgctaacccaaatcactcttctgttttctctacttgactgctgacaagtttaacaaagtgtgtggctcttctccttcctgcttgggaaccaggaggggttgggacccatagttcatgatcgaaagtctcagacattgcctgtttcccgtaacagaacaggaatgatgcatgccagattgcagcagctgggcagcctggataactctctcacttttaaccacagctatggccactcggacgcagatgttctgcaccagtcattacttgaagccaacattgctactgaggtttgcctgacagctctggacacgctttctctatttacattggcgtttaagaaccagctcctggccgaccatggacataatcctctcatgaaaaaagtttttgatgtctacctgtgttttcttcaaaaacatcagtctgaaacggctttaaaaaatgtcttcactgccttaaggtccttaatttataagtttccctcaacattctatgaagggagagcggacatgtgtgcggctctgtgttacgagattctcaagtgctgtaactccaagctgagctccatcaggacggaggcctcccagctgctctacttcctgatgaggaacaactttgattacactggaaagaagtcctttgtccggacacatttgcaagtcatcatatctgtcagccagctgatagcagacgttgttggcattgggggaaccagattccagcagtccctgtccatcatcaacaactgtgccaacagtgaccggcttattaagcacaccagcttctcctctgatgtgaaggacttaaccaaaaggatacgcacggtgctaatggccaccgcccagatgaaggagcatgagaacgacccagagatgctggtggacctccagtacagcctggccaaatcctatgccagcacgcccgagctcaggaagacgtggctcgacagcatggccaggatccatgtcaaaaatggcgatctctcagaggcagcaatgtgctatgtccacgtaacagccctagtggcagaatatctcacacggaaaggcgtgtttagacaaggatgcaccgccttcagggtcattaccccaaacatcgacgaggaggcctccatgatggaagacgtggggatgcaggatgtccatttcaacgaggatgtgctgatggagctccttgagcagtgcgcagatggactctggaaagccgagcgctacgagctcatcgccgacatctacaaacttatcatccccatttatgagaagcggagggattttgagaggctggcccatctgtatgacacgctgcaccgggcctacagcaaagtgaccgaggtcatgcactcgggccgcaggcttctggggacctacttccgggtagccttcttcgggcaggtgagcctcctgtccattctgcagactgtcctaagtcctttaa

SEQ ID NO: 272922 - protein, 250 aa, Artificial Sequence
  derived and/or modified sequence
ADSRGSLISTDSGNSLPERNSEKSNSLDKHQQSSTLGNSVVRCDKLDQSEIKSLLMCFLYILKSMSDDALFTYWNKASTSELMDFFTISEVCLHQFQYMGKRYIASVRKISSVLGISVDNGYGHSDADVLHQSLLEANIATEVCLTALDTLSLFTLAFKNQLLADHGHNPLMKKVFDVYLCFLQKHQSETALKNVFTALRSLIYKFPSTFYEGRADMCAALCYEILKCCNSKLSSIRTEASQLLYFLMRN

SEQ ID NO: 272923 - protein, 203 aa, Artificial Sequence
  derived and/or modified sequence
RKTWLDSMARIHVKNGDLSEAAMCYVHVTALVAEYLTRKGVFRQGCTAFRVITPNIDEEASMMEDVGMQDVHFNEDVLMELLEQCADGLWKAERYELIADIYKLIIPIYEKRRDFERLAHLYDTLHRAYSKVTEVMHSGRRLLGTYFRVAFFGQGFFEDEDGKEYIYKEPKLTPLSEISQRLLKLYSDKFGSENVKMIQDSGK

SEQ ID NO: 272924 - DNA, 753 bp, Artificial Sequence
  derived and/or modified sequence
gccgacagcagaggcagcctgatcagcaccgacagcggcaacagcctgcccgagagaaacagcgagaagagcaacagcctggacaagcaccagcagagcagcaccctgggcaacagcgtggtgagatgcgacaagctggaccagagcgagatcaagagcctgctgatgtgcttcctgtacatcctgaagagcatgagcgacgacgccctgttcacctactggaacaaggccagcaccagcgagctgatggacttcttcaccatcagcgaggtgtgcctgcaccagttccagtacatgggcaagagatacatcgccagcgtgagaaagatcagcagcgtgctgggcatcagcgtggacaacggctacggccacagcgacgccgacgtgctgcaccagagcctgctggaggccaacatcgccaccgaggtgtgcctgaccgccctggacaccctgagcctgttcaccctggccttcaagaaccagctgctggccgaccacggccacaaccccctgatgaagaaggtgttcgacgtgtacctgtgcttcctgcagaagcaccagagcgagaccgccctgaagaacgtgttcaccgccctgagaagcctgatctacaagttccccagcaccttctacgagggcagagccgacatgtgcgccgccctgtgctacgagatcctgaagtgctgcaacagcaagctgagcagcatcagaaccgaggccagccagctgctgtacttcctgatgagaaactag

SEQ ID NO: 272925 - DNA, 612 bp, Artificial Sequence
  derived and/or modified sequence
agaaagacctggctggacagcatggccagaatccacgtgaagaacggcgacctgagcgaggccgccatgtgctacgtgcacgtgaccgccctggtggccgagtacctgaccagaaagggcgtgttcagacagggctgcaccgccttcagagtgatcacccccaacatcgacgaggaggccagcatgatggaggacgtgggcatgcaggacgtgcacttcaacgaggacgtgctgatggagctgctggagcagtgcgccgacggcctgtggaaggccgagagatacgagctgatcgccgacatctacaagctgatcatccccatctacgagaagagaagagacttcgagagactggcccacctgtacgacaccctgcacagagcctacagcaaggtgaccgaggtgatgcacagcggcagaagactgctgggcacctacttcagagtggccttcttcggccagggcttcttcgaggacgaggacggcaaggagtacatctacaaggagcccaagctgacccccctgagcgagatcagccagagactgctgaagctgtacagcgacaagttcggcagcgagaacgtgaagatgatccaggacagcggcaagtag

SEQ ID NO: 272926 - DNA, 750 bp, Artificial Sequence
  derived and/or modified sequence
gctgattcgagaggatctctcataagcacagattcgggtaacagccttccagaaaggaatagtgagaagagcaattccctggataagcaccaacaaagtagcacattgggaaattccgtggttcgctgtgataaacttgaccagtctgagattaagagcctactgatgtgtttcctctacatcttaaagagcatgtctgatgatgctttgtttacatattggaacaaggcttcaacatctgaacttatggatttttttacaatatctgaagtctgcctgcaccagttccagtacatggggaagcgatacatagccagtgtgagaaagatatcaagtgtgcttggaatttctgtagacaatggctatggccactcggacgcagatgttctgcaccagtcattacttgaagccaacattgctactgaggtttgcctgacagctctggacacgctttctctatttacattggcgtttaagaaccagctcctggccgaccatggacataatcctctcatgaaaaaagtttttgatgtctacctgtgttttcttcaaaaacatcagtctgaaacggctttaaaaaatgtcttcactgccttaaggtccttaatttataagtttccctcaacattctatgaagggagagcggacatgtgtgcggctctgtgttacgagattctcaagtgctgtaactccaagctgagctccatcaggacggaggcctcccagctgctctacttcctgatgaggaac

SEQ ID NO: 272927 - DNA, 609 bp, Artificial Sequence
  derived and/or modified sequence
aggaagacgtggctcgacagcatggccaggatccatgtcaaaaatggcgatctctcagaggcagcaatgtgctatgtccacgtaacagccctagtggcagaatatctcacacggaaaggcgtgtttagacaaggatgcaccgccttcagggtcattaccccaaacatcgacgaggaggcctccatgatggaagacgtggggatgcaggatgtccatttcaacgaggatgtgctgatggagctccttgagcagtgcgcagatggactctggaaagccgagcgctacgagctcatcgccgacatctacaaacttatcatccccatttatgagaagcggagggattttgagaggctggcccatctgtatgacacgctgcaccgggcctacagcaaagtgaccgaggtcatgcactcgggccgcaggcttctggggacctacttccgggtagccttcttcgggcagggattctttgaagatgaagatggaaaggagtatatttacaaggaacccaaactcacaccgctgtcggaaatttctcagagactccttaaactgtactcggataaatttggttctgaaaatgtcaaaatgatacaggattctggcaag

SEQ ID NO: 272928 - DNA, 753 bp, Artificial Sequence
  derived and/or modified sequence
gccgatagccgcgggtctcttattagtactgactccggtaactccctgccagaacgtaactccgagaagagtaattcactggacaagcaccagcagtcttctaccctaggcaatagtgtcgtccggtgcgataaactggatcaaagtgagatcaaatccttacttatgtgcttcctctacatcctcaaatctatgtccgacgatgcattatttacctattggaacaaagcatcaacctcagagctgatggacttcttcacaattagtgaggtctgccttcatcagtttcagtatatgggcaaacgatatatcgctagcgtgcgcaaaatctcttcagtgctgggtatatcagtcgataacggttacggccactcagatgccgacgtgcttcaccagtcacttcttgaggcaaatatcgccactgaggtgtgtttgacagcgctggataccttaagcctgttcactcttgccttcaaaaaccagttactggccgaccacggccacaaccccctgatgaagaaggtatttgatgtctacctgtgttttctgcagaagcatcagagcgaaaccgccctgaaaaatgtttttacggcgctgagatctctaatttataagttcccttccacattttacgagggtcgcgccgacatgtgcgcagccctgtgctatgaaattttgaagtgctgcaactcgaagctaagctccatcagaactgaagcatcacagttactctactttttgatgagaaattag

SEQ ID NO: 272929 - DNA, 612 bp, Artificial Sequence
  derived and/or modified sequence
aggaaaacgtggctcgactccatggccagaattcacgtgaagaatggtgacctgtccgaggcagcgatgtgctacgttcatgtgaccgcactcgtagccgaatacctgacgcgcaagggggtattccgacagggctgtacagctttccgcgtgataactcctaacatagacgaggaggcttctatgatggaagatgtcggcatgcaggacgtccactttaatgaagatgtgctaatggagctactcgagcaatgtgctgacggtttatggaaggccgaaaggtacgagttgatagccgacatttacaaattaataattccgatttacgagaagcggcgcgacttcgagaggttagcacatctctatgacactctgcaccgggcctacagcaaagtgactgaagtgatgcatagtgggcgaaggctgcttgggacctatttcagagtggcgttcttcggccaggggttctttgaggatgaggacgggaaagagtatatctacaaggaacccaaactgacgcctttatccgagatatcacaacggttgctgaaactttactctgataagttcgggagtgaaaacgtgaagatgattcaggacagcggtaaatag

SEQ ID NO: 272930 - DNA, 753 bp, Artificial Sequence
  derived and/or modified sequence
gctgacagccggggcagcctcatcagcacagacagcggcaacagcctgcctgagagaaattctgagaagagcaacagcctggacaagcaccagcagagcagcaccctgggcaacagcgtggtgcgctgtgacaagctggaccagagcgagatcaagagcctgctgatgtgcttcctgtacatcctgaagtccatgtctgatgatgccctcttcacctactggaacaaggccagcaccagcgagctgatggacttcttcaccatcagcgaggtgtgcctgcaccagttccagtacatgggcaagcgctacatcgcctctgtgaggaagatcagctctgtgctgggcatctctgtggacaatggctacggccacagtgatgctgatgtgctgcaccagagcctgctggaggccaacatcgccacagaggtgtgcctgacagccctggacaccctgagcctcttcaccctggccttcaagaaccagctgctggccgaccacggccacaaccccctgatgaagaaggtgtttgatgtgtacctgtgcttcctgcagaagcaccagagcgagacagccctgaagaatgtgttcaccgccctgcggagcctcatctacaagttccccagcaccttctatgagggccgggctgacatgtgtgccgccctgtgctatgagatcctgaagtgctgcaacagcaagctgagcagcatcagaacagaggccagccagctgctgtacttcctgatgagaaattag

SEQ ID NO: 272931 - DNA, 612 bp, Artificial Sequence
  derived and/or modified sequence
aggaagacctggctggacagcatggcccgcatccacgtgaagaatggagacctgtctgaggccgccatgtgctacgtgcacgtgacagccctggtggccgagtacctgaccaggaaaggagtcttccggcagggctgcacagccttccgggtcatcacccccaacattgatgaggaggcctccatgatggaggatgtgggcatgcaggatgtgcacttcaatgaagatgtgctgatggagctgctggagcagtgtgctgatggcctgtggaaggccgagagatatgagctgattgctgacatctacaagctgatcatccccatctatgagaagaggcgggactttgagcggctggcccacctgtatgacaccctgcaccgggcctacagcaaggtgacagaggtgatgcacagcggccggcggctgctgggcacctacttccgggtggccttcttcggccagggcttctttgaagatgaagatggcaaggagtacatctacaaggagcccaagctgacccccctgtctgagatcagccagaggctgctgaagctgtacagcgacaagtttggaagtgaaaatgtgaagatgatccaggacagcggcaagtag

SEQ ID NO: 272932 - DNA, 753 bp, Artificial Sequence
  derived and/or modified sequence
gccgacagccggggcagcctgatcagcaccgacagcggcaacagcctcccggagaggaactcagagaaatccaatagcttagacaagcatcagcagtcaagcaccctcggaaattccgttgtacggtgcgataaattagatcaatcagagatcaagtctctcctgatgtgcttcctatatatcctgaaaagcatgtcagatgatgcactgtttacctattggaataaagcttcaacctccgaactcatggacttttttaccatctccgaggtgtgcctgcatcagttccagtatatggggaagcgctacattgcatctgtgaggaaaatctcatcggtcctagggatctcagtggataacggttacgggcattctgacgccgatgtgttgcatcagagtctgctggaggccaacattgcgaccgaggtctgcctcactgctctggacacactgtcgctttttaccttggcctttaagaaccagcttctggcagatcatggccataatcccctgatgaagaaagtgttcgacgtctacctatgtttcctacagaaacaccagtcagagactgccctgaaaaacgtctttacggcgctccgctcactgatatataagttccccagtactttctatgaaggccgcgcagacatgtgcgctgctttgtgttacgaaatcctgaagtgctgcaacagtaaactttcttctattcggaccgaagcctcccaactgctgtacttccttatgcggaattag

SEQ ID NO: 272933 - DNA, 612 bp, Artificial Sequence
  derived and/or modified sequence
cggaagacctggctggacagcatggcccggatccacgtgaagaacggtgacctctccgaagcagctatgtgctatgttcacgtgaccgctttggtggcggagtacttaacacggaaaggagtatttagacagggatgcaccgcgtttcgggtgattacgccgaacatagacgaagaggctagtatgatggaggacgttggaatgcaggacgtgcatttcaatgaggatgtgctgatggagttgctggagcagtgtgctgatggcttatggaaggcagagcgatacgaactgatagctgacatctacaagcttattattccgatttatgagaagaggagggatttcgaaagactcgctcacctgtatgacacacttcaccgagcttactctaaagtgacagaggtgatgcactcaggccgccgactactaggcacctattttcgggtggctttcttcggacaagggttttttgaagacgaggacggaaaggagtacatttataaagagccaaaactgacccccctcagcgaaatttctcaacgactactgaaactgtacagcgataagttcggatcagagaacgtgaaaatgattcaggactcaggtaagtag

SEQ ID NO: 272934 - DNA, 753 bp, Artificial Sequence
  derived and/or modified sequence
gcggatagtcgcggttcactaatttctactgatagtggaaacagcttgccagagcgcaatagcgaaaagagcaatagtctggacaagcatcaacagtcatccacacttggcaatagtgtggtgcggtgtgacaagcttgaccagtccgagataaaaagcctgctaatgtgcttcttatatatcctgaagagtatgtcagatgatgcattgttcacatattggaataaagctagcacttcagaactgatggactttttcactatatcagaggtctgccttcatcagttccagtacatgggcaaacgatacatagcctcagtgcgcaaaatcagttcagtcctcgggatctccgtggataacggctacgggcactctgatgctgacgtcttacatcagagtctcctagaagctaacatcgctaccgaagtgtgtctcacggcgcttgataccttgtcgctctttaccctggccttcaaaaatcagttgctcgcggatcacgggcacaatccccttatgaagaaggtctttgatgtttacttgtgctttctgcagaaacatcagtccgaaaccgctctgaagaacgtgttcacggccctgcggtcgctgatctacaaattcccctcaactttctacgaaggtcgagcggacatgtgcgccgcactgtgttatgaaatactgaagtgttgcaatagtaagttgtcatcaataaggacggaggccagtcagctgctgtactttcttatgaggaattag

SEQ ID NO: 272935 - DNA, 612 bp, Artificial Sequence
  derived and/or modified sequence
aggaaaacctggttggattccatggctcggatccatgtaaaaaatggcgatctctccgaagccgctatgtgttacgtgcacgttaccgctcttgtggctgagtacttgacccgcaaaggggtattccgccaaggctgcactgccttccgcgtgataaccccaaatattgatgaggaggcttctatgatggaggacgttgggatgcaggatgtgcattttaacgaggatgtgctgatggagctcctggagcagtgtgccgacggtctatggaaagcagagcggtacgaactcatcgccgatatatataagcttataattccaatttatgagaagcggagggattttgagcggctggcacatttgtacgacacactgcaccgggcatactctaaggtgactgaggtcatgcactcaggccgtcgactgctgggcacttacttccgggtagctttcttcgggcaaggttttttcgaagacgaggacggaaaggagtacatctacaaggagcctaagcttaccccgctttcagaaattagccaaaggctcctgaaactgtatagcgacaagttcggaagtgaaaatgtcaagatgattcaagacagcggaaaatag

SEQ ID NO: 272936 - protein, 2079 aa, Artificial Sequence
  derived and/or modified sequence
MSQPPLLPASAETRKFTRALSKPGTAAELRQSVSEVVRGSVLLAKPKLIEPLDYENVIVQKKTQILNDCLREMLLFPYDDFQTAILRRQGRYICSTVPAKAEEEAQSLFVTECIKTYNSDWHLVNYKYEDYSGEFRQLPNKVVKLDKLPVHVYEVDEEVDKDEDAASLGSQKGGITKHGWLYKGNMNSAISVTMRSFKRRFFHLIQLGDGSYNLNFYKDEKISKEPKGSIFLDSCMGVVQNNKVRRFAFELKMQDKSSYLLAADSEVEMEEWITILNKILQLNFEAAMQEKRNGDSHEDDEQSKLEGSGSGLDSYLPELAKSAREAEIKLKSESRVKLFYLDPDAQKLDFSSAEPEVKSFEEKFGKRILVKCNDLSFNLQCCVAENEEGPTTNVEPFFVTLSLFDIKYNRKISADFHVDLNHFSVRQMLATTSPALMNGSGQSPSVLKGILHEAAMQYPKQGIFSVTCPHPDIFLVARIEKVLQGSITHCAEPYMKSSDSSKVAQKVLKNAKQACQRLGQYRMPFAWAARTLFKDASGNLDKNARFSAIYRQDSNKLSNDDMLKLLADFRKPEKMAKLPVILGNLDITIDNVSSDFPNYVNSSYIPTKQFETCSKTPITFEVEEFVPCIPKHTQPYTIYTNHLYVYPKYLKYDSQKSFAKARNIAICIEFKDSDEEDSQPLKCIYGRPGGPVFTRSAFAAVLHHHQNPEFYDEIKIELPTQLHEKHHLLLTFFHVSCDNSSKGSTKKRDVVETQVGYSWLPLLKDGRVVTSEQHIPVSANLPSGYLGYQELGMGRHYGPEIKWVDGGKPLLKISTHLVSTVYTQDQHLHNFFQYCQKTESGAQALGNELVKYLKSLHAMEGHVMIAFLPTILNQLFRVLTRATQEEVAVNVTRVIIHVVAQCHEEGLESHLRSYVKYAYKAEPYVASEYKTVHEELTKSMTTILKPSADFLTSNKLLKYSWFFFDVLIKSMAQHLIENSKVKLLRNQRFPASYHHAVETVVNMLMPHITQKFRDNPEASKNANHSLAVFIKRCFTFMDRGFVFKQINNYISCFAPGDPKTLFEYKFEFLRVVCNHEHYIPLNLPMPFGKGRIQRYQDLQLDYSLTDEFCRNHFLVGLLLREVGTALQEFREVRLIAISVLKNLLIKHSFDDRYASRSHQARIATLYLPLFGLLIENVQRINVRDVSPFPVNAGMTVKDESLALPAVNPLVTPQKGSTLDNSLHKDLLGAISGIASPYTTSTPNINSVRNADSRGSLISTDSGNSLPERNSEKSNSLDKHQQSSTLGNSVVRCDKLDQSEIKSLLMCFLYILKSMSDDALFTYWNKASTSELMDFFTISEVCLHQFQYMGKRYIARTGMMHARLQQLGSLDNSLTFNHSYGHSDADVLHQSLLEANIATEVCLTALDTLSLFTLAFKNQLLADHGHNPLMKKVFDVYLCFLQKHQSETALKNVFTALRSLIYKFPSTFYEGRADMCAALCYEILKCCNSKLSSIRTEASQLLYFLMRNNFDYTGKKSFVRTHLQVIISVSQLIADVVGIGGTRFQQSLSIINNCANSDRLIKHTSFSSDVKDLTKRIRTVLMATAQMKEHENDPEMLVDLQYSLAKSYASTPELRKTWLDSMARIHVKNGDLSEAAMCYVHVTALVAEYLTRKGVFRQGCTAFRVITPNIDEEASMMEDVGMQDVHFNEDVLMELLEQCADGLWKAERYELIADIYKLIIPIYEKRRDFERLAHLYDTLHRAYSKVTEVMHSGRRLLGTYFRVAFFGQAAQYQFTDSETDVEGFFEDEDGKEYIYKEPKLTPLSEISQRLLKLYSDKFGSENVKMIQDSGKVNPKDLDSKYAYIQVTHVIPFFDEKELQERKTEFERSHNIRRFMFEMPFTQTGKRQGGVEEQCKRRTILTAIHCFPYVKKRIPVMYQHHTDLNPIEVAIDEMSKKVAELRQLCSSAEVDMIKLQLKLQGSVSVQVNAGPLAYARAFLDDTNTKRYPDNKVKLLKEVFRQFVEACGQALAVNERLIKEDQLEYQEEMKANYREMAKELSEIMHEQVRRSAPWRRRRASYRIPFTSSTPSVGLQQAQWFTG

SEQ ID NO: 272937 - DNA, 1275 bp, Artificial Sequence
  derived and/or modified sequence
atgatgcacgccagactgcagcagctgggcagcctggacaacagcctgaccttcaaccacagctacggccacagcgacgccgacgtgctgcaccagagcctgctggaggccaacatcgccaccgaggtgtgcctgaccgccctggacaccctgagcctgttcaccctggccttcaagaaccagctgctggccgaccacggccacaaccccctgatgaagaaggtgttcgacgtgtacctgtgcttcctgcagaagcaccagagcgagaccgccctgaagaacgtgttcaccgccctgagaagcctgatctacaagttccccagcaccttctacgagggcagagccgacatgtgcgccgccctgtgctacgagatcctgaagtgctgcaacagcaagctgagcagcatcagaaccgaggccagccagctgctgtacttcctgatgagaaacaacttcgactacaccggcaagaagagcttcgtgagaacccacctgcaggtgatcatcagcgtgagccagctgatcgccgacgtggtgggcatcggcggcaccagattccagcagagcctgagcatcatcaacaactgcgccaacagcgacagactgatcaagcacaccagcttcagcagcgacgtgaaggacctgaccaagagaatcagaaccgtgctgatggccaccgcccagatgaaggagcacgagaacgaccccgagatgctggtggacctgcagtacagcctggccaagagctacgccagcacccccgagctgagaaagacctggctggacagcatggccagaatccacgtgaagaacggcgacctgagcgaggccgccatgtgctacgtgcacgtgaccgccctggtggccgagtacctgaccagaaagggcgtgttcagacagggctgcaccgccttcagagtgatcacccccaacatcgacgaggaggccagcatgatggaggacgtgggcatgcaggacgtgcacttcaacgaggacgtgctgatggagctgctggagcagtgcgccgacggcctgtggaaggccgagagatacgagctgatcgccgacatctacaagctgatcatccccatctacgagaagagaagagacttcgagagactggcccacctgtacgacaccctgcacagagcctacagcaaggtgaccgaggtgatgcacagcggcagaagactgctgggcacctacttcagagtggccttcttcggccaggtgagcctgctgagcatcctgcagaccgtgctgagccccctgtag

SEQ ID NO: 272938 - DNA, 1275 bp, Artificial Sequence
  derived and/or modified sequence
atgatgcatgctcgcctacagcagctgggtagcctggataatagtttgacttttaatcatagctatggtcatagcgatgccgacgtcctgcatcagtccctgctggaggctaatattgccaccgaggtgtgtctcactgccctggatactctctcgttattcacccttgcatttaagaatcagttgctggccgaccacggacacaacccgttgatgaaaaaagtattcgatgtctacttatgtttcttgcagaagcatcaatcagaaacagcccttaagaacgtttttaccgctttgaggtctctcatttacaagttcccttcaacattttacgagggtagagccgacatgtgcgccgctctgtgttatgagattctcaaatgctgcaattccaagctgtcctccattaggaccgaggcctctcaacttttgtatttcctgatgcgcaacaacttcgactacactggtaagaagagctttgtgcgaacacaccttcaggttataatctctgtttcacagctaattgctgatgtggtgggcatcggggggacccggtttcagcaatccctgagcattataaacaactgtgctaattctgacaggctaatcaagcacaccagcttttcttctgatgtgaaggaccttactaaaaggatcaggactgtgcttatggcaaccgcccaaatgaaggagcatgaaaacgaccccgagatgctggtcgacttacagtattccttggccaagtcttacgcgtcaaccccagaactgagaaaaacctggttagacagcatggctaggatccacgttaagaacggggacctctccgaagccgccatgtgctacgtccacgttacagcacttgtggctgaatacctgacaagaaaaggcgtgttcagacaggggtgtacagcattcagagtgattacccctaatattgacgaagaggcttccatgatggaagacgtgggaatgcaggatgtgcacttcaacgaagacgtcctcatggagttgctagagcaatgtgccgatgggttgtggaaagccgaacggtatgaacttattgcggacatatacaagctgattatacctatatacgagaagaggcgcgacttcgagcgattggcccacctttacgacacattgcaccgggcatattctaaggtgaccgaagtaatgcactccggaagacgtctgctcggcacttattttcgtgtggccttcttcggccaggtgtctttattatcgattctacagaccgtgctgtcacccctgtag

SEQ ID NO: 272939 - DNA, 1275 bp, Artificial Sequence
  derived and/or modified sequence
atgatgcacgcccggctgcagcagctgggcagcctggacaacagcctgaccttcaaccacagctatggccacagtgatgctgatgtgctgcaccagagcctgctggaggccaacatcgccacagaggtgtgcctgacagccctggacaccctgagcctcttcaccctggccttcaagaaccagctgctggccgaccacggccacaaccccctgatgaagaaggtgtttgatgtgtacctgtgcttcctgcagaagcaccagagcgagacagccctgaagaatgtgttcaccgccctgcggagcctcatctacaagttccccagcaccttctatgagggccgggctgacatgtgtgccgccctgtgctatgagatcctgaagtgctgcaacagcaagctgagcagcatcagaacagaggccagccagctgctgtacttcctgatgaggaacaactttgactacacaggcaagaagagctttgtgaggacccacctgcaggtgatcatctctgtgtcccagctgattgctgatgtggtgggcattggaggcacccgcttccagcagagcctgagcatcatcaacaactgtgccaacagcgacaggctcatcaagcacaccagcttcagcagtgatgtgaaggacctgaccaagaggatcagaacagtgctgatggccacagcccagatgaaggagcatgaaaatgaccctgagatgctggtggacctgcagtacagcctggccaagagctatgccagcaccccagagctgaggaagacctggctggacagcatggcccgcatccacgtgaagaatggagacctgtctgaggccgccatgtgctacgtgcacgtgacagccctggtggccgagtacctgaccaggaaaggagtcttccggcagggctgcacagccttccgggtcatcacccccaacattgatgaggaggcctccatgatggaggatgtgggcatgcaggatgtgcacttcaatgaagatgtgctgatggagctgctggagcagtgtgctgatggcctgtggaaggccgagagatatgagctgattgctgacatctacaagctgatcatccccatctatgagaagaggcgggactttgagcggctggcccacctgtatgacaccctgcaccgggcctacagcaaggtgacagaggtgatgcacagcggccggcggctgctgggcacctacttccgggtggccttcttcggccaggtgtccctgctgagcatcctgcagacagtgctgagccccctgtag

SEQ ID NO: 272940 - DNA, 1275 bp, Artificial Sequence
  derived and/or modified sequence
atgatgcacgcccggctgcagcagctgggcagcctggacaacagcttaactttcaatcattcttacggtcattcagacgctgacgtgctacatcagtcattgctggaggccaatatagcaacggaagtctgcttaaccgccctggatacgctgtccctttttactctggccttcaagaatcagctcctcgccgatcacggtcataacccgctgatgaaaaaagtgtttgatgtgtacttgtgttttctgcaaaagcatcagtctgaaacggccctgaagaatgttttcaccgccctgcggagccttatctacaaattccctagcacattctatgaaggaagagctgatatgtgcgcggccctttgttacgagatactcaagtgctgtaacagcaagctgtctagcattaggaccgaggcaagccagctcctctacttcctgatgcggaacaatttcgactacactggcaaaaagtctttcgtgcgtacacacctgcaggtcataatctctgtttcccagctgattgctgatgtcgtggggatcggtggaactcggttccagcagtccttgagcataatcaacaactgtgctaattcagacagacttataaagcacactagtttctcatctgatgttaaggacctcacaaaacggatccggaccgtcctgatggctaccgcgcaaatgaaggagcacgagaacgatccagagatgcttgttgaccttcagtacagcttggcaaaatcctatgcgagtacccccgagttaagaaagacttggttagattcaatggcccgaatccatgtgaagaacggcgatctgtccgaagcggctatgtgctacgttcatgtaactgcccttgtcgcagaatacctgactcggaagggagtgttccgtcagggctgcacggcatttcgtgttatcactcctaacatagatgaggaagcctctatgatggaggatgttggaatgcaggatgtacattttaatgaggacgtgcttatggagctactggaacaatgtgccgacggcctgtggaaagctgagaggtatgaactgatcgcagatatatataagcttatcattccaatctatgaaaagagacgcgacttcgaaagattggcccacctctacgacactcttcatcgcgcctattctaaagtaactgaggtaatgcatagcggccggcgcctcctgggcacctactttagggtagctttctttggccaagtgtccctcttatcaatccttcagaccgtgttatcacccctgtag

SEQ ID NO: 272941 - DNA, 1275 bp, Artificial Sequence
  derived and/or modified sequence
atgatgcacgcgaggctgcagcaactgggctctctggataattcccttaccttcaatcatagctatggccatagtgacgccgacgtgctgcatcagagcctgctggaagcaaacatagccaccgaggtttgtctgaccgctctggatacactctctctgttcacattggcttttaagaaccagcttcttgccgatcacggccataacccgcttatgaagaaagtgtttgatgtttacctctgctttttacagaagcaccagtcagaaacagcactcaaaaatgtcttcaccgcgctccggagtctaatctacaagtttccttctactttttacgaggggagagctgacatgtgcgccgcactttgttatgaaatattgaaatgctgcaactctaagctgagctccattcggacagaggcgtcccagctactgtacttcctgatgcgcaacaatttcgactatactgggaagaaatcctttgtacgtacacaccttcaagtgatcatttccgtatcacagctcatagctgacgttgtcgggattgggggaactcgatttcagcagagtctgtcaattattaacaattgtgccaattccgaccgactcatcaaacatacgtcctttagtagcgacgttaaggaccttactaagcgcattcggacagtattaatggctactgcacagatgaaggaacacgagaatgacccggaaatgctggtggacctccagtactctcttgcgaagtcttatgcctccaccccagagctccgaaagacctggctggatagtatggcgagaatccacgtgaagaatggcgacctctcagaggcagccatgtgttacgtgcacgtgaccgccctggtggcggaatatctcactagaaaaggcgtcttccgacagggctgtacagcttttagggtgatcacgcccaatatcgatgaggaggctagcatgatggaagacgtgggaatgcaggatgtgcactttaacgaggacgtgctgatggaactgctcgaacaatgtgctgatggcctctggaaggcagaaaggtatgagcttatagccgatatttataaactaattatccccatctacgagaagaggagggacttcgagcgactggcgcacctgtatgacacactccaccgggcttacagcaaggtgacagaggttatgcactccggcaggaggttgctgggaacctatttccgggtggctttcttcggccaggttagtctactaagtattctgcaaacagtcctaagcccattatag

SEQ ID NO: 272942 - protein, 337 aa, Artificial Sequence
  derived and/or modified sequence
MNEPLDYLANASDFPDYAAAFGNCTDENIPLKMHYLPVIYGIIFLVGFPGNAVVISTYIFKMRPWKSSTIIMLNLACTDLLYLTSLPFLIHYYASGENWIFGDFMCKFIRFSFHFNLYSSILFLTCFSIFRYCVIIHPMSCFSIHKTRCAVVACAVVWIISLVAVIPMTFLITSTNRTNRSACLDLTSSDELNTIKWYNLILTATTFCLPLVIVTLCYTTIIHTLTHGLQTDSCLKQKARRLTILLLLAFYVCFLPFHILRVIRIESRLLSISCSIENQIHEAYIVSRPLAALNTFGNLLLYVVVSDNFQQAVCSTVRCKVSGNLEQAKKISYSNNP

SEQ ID NO: 272943 - protein, 62 aa, Artificial Sequence
  derived and/or modified sequence
MNEPLDYLANASDFPDYAAAFGNCTDENIPLKMHYLPVIYGIIFLVGFPGNAVVISTYIFKM

SEQ ID NO: 272944 - protein, 69 aa, Artificial Sequence
  derived and/or modified sequence
MNEPLDYLANASDFPDYAAAFGNCTDENIPLKMHYLPVIYGIIFLVGFPGNAVVISTYIFKMRPWKSST

SEQ ID NO: 272945 - DNA, 1014 bp, Artificial Sequence
  derived and/or modified sequence
atgaacgagcccctggactacctggccaacgccagcgacttccccgactacgccgccgccttcggcaactgcaccgacgagaacatccccctgaagatgcactacctgcccgtgatctacggcatcatcttcctggtgggcttccccggcaacgccgtggtgatcagcacctacatcttcaagatgagaccctggaagagcagcaccatcatcatgctgaacctggcctgcaccgacctgctgtacctgaccagcctgcccttcctgatccactactacgccagcggcgagaactggatcttcggcgacttcatgtgcaagttcatcagattcagcttccacttcaacctgtacagcagcatcctgttcctgacctgcttcagcatcttcagatactgcgtgatcatccaccccatgagctgcttcagcatccacaagaccagatgcgccgtggtggcctgcgccgtggtgtggatcatcagcctggtggccgtgatccccatgaccttcctgatcaccagcaccaacagaaccaacagaagcgcctgcctggacctgaccagcagcgacgagctgaacaccatcaagtggtacaacctgatcctgaccgccaccaccttctgcctgcccctggtgatcgtgaccctgtgctacaccaccatcatccacaccctgacccacggcctgcagaccgacagctgcctgaagcagaaggccagaagactgaccatcctgctgctgctggccttctacgtgtgcttcctgcccttccacatcctgagagtgatcagaatcgagagcagactgctgagcatcagctgcagcatcgagaaccagatccacgaggcctacatcgtgagcagacccctggccgccctgaacaccttcggcaacctgctgctgtacgtggtggtgagcgacaacttccagcaggccgtgtgcagcaccgtgagatgcaaggtgagcggcaacctggagcaggccaagaagatcagctacagcaacaacccctag

SEQ ID NO: 272946 - DNA, 189 bp, Artificial Sequence
  derived and/or modified sequence
atgaacgagcccctggactacctggccaacgccagcgacttccccgactacgccgccgccttcggcaactgcaccgacgagaacatccccctgaagatgcactacctgcccgtgatctacggcatcatcttcctggtgggcttccccggcaacgccgtggtgatcagcacctacatcttcaagatgtag

SEQ ID NO: 272947 - DNA, 210 bp, Artificial Sequence
  derived and/or modified sequence
atgaacgagcccctggactacctggccaacgccagcgacttccccgactacgccgccgccttcggcaactgcaccgacgagaacatccccctgaagatgcactacctgcccgtgatctacggcatcatcttcctggtgggcttccccggcaacgccgtggtgatcagcacctacatcttcaagatgagaccctggaagagcagcacctag

SEQ ID NO: 272948 - DNA, 1014 bp, Artificial Sequence
  derived and/or modified sequence
atgaatgagcctcttgattatctggctaatgccagcgactttcccgactacgcagcggcattcggcaattgtactgacgagaacattcctctgaagatgcactaccttccagtgatttacgggatcatttttctggtggggtttcccggtaatgcggtggttatttccacttacatcttcaagatgcggccctggaaatcgtcgaccatcatcatgttgaacctggcttgtactgacctattgtaccttacatcgttgccttttcttatccactactatgcctccggcgaaaattggatctttggggattttatgtgtaaattcatccgtttttctttccattttaacctttattccagcattctttttctcacttgcttctcaatcttccgttactgtgtgatcatacacccaatgtcttgtttctcgattcataagacccgctgcgccgtggtggcctgcgctgtcgtgtggattatatcactggtagcggtcatccccatgacttttttgataacttctaccaatcgaacaaacagatcggcgtgcctggatcttactagcagtgatgagttgaacaccatcaaatggtataacctgattctcacagcaacgaccttctgcctcccattagtcatagtgacgttgtgctacacgacgataattcacactctgacccatggcctgcagactgattcatgtctaaagcaaaaggccaggcgacttaccattctgctgctgctggccttctatgtgtgtttcctgccttttcatatactcagagtgatcagaattgagagccggctgttatcaatctcatgtagcatcgaaaaccaaattcacgaggcttatatcgtctctaggcccctcgcagcactcaacacttttggaaatttgctcctgtatgttgtagtgtccgataacttccaacaggcggtgtgcagcactgtccgatgtaaggtatcaggcaatctcgaacaagccaagaagatttcctattccaacaacccatag

SEQ ID NO: 272949 - DNA, 189 bp, Artificial Sequence
  derived and/or modified sequence
atgaatgagcctctggactacctggcaaacgcatccgacttccccgattacgcggcagcctttgggaattgcactgatgaaaatatccctctgaaaatgcactacttgccagtgatttacggcattatattcctggtgggcttccctggaaatgcggtagtcatttcaacttatatttttaaaatgtag

SEQ ID NO: 272950 - DNA, 210 bp, Artificial Sequence
  derived and/or modified sequence
atgaacgagccacttgactatctagcgaacgcttccgatttcccagattatgctgctgctttcggcaattgtactgacgaaaacattccactgaaaatgcactacctgcctgtgatttatggcatcatatttctggtaggctttccagggaatgccgttgttatttctacatatattttcaaaatgcgcccatggaagtcaagcacgtag

SEQ ID NO: 272951 - DNA, 1014 bp, Artificial Sequence
  derived and/or modified sequence
atgaacgaacccctggactatctggctaatgcctccgacttcccagattacgcagcggcattcgggaattgtacggacgagaatatccctttgaagatgcactaccttccagtaatttacgggattatttttctcgtcgggtttccaggcaatgccgtagttatcagcacctatatcttcaagatgagaccatggaaatctagcactattatcatgctcaatctcgcctgcaccgatctcctttatcttaccagcctaccgttcctaatacactattacgcttccggggaaaactggattttcggcgacttcatgtgcaaattcatccgcttctcattccactttaatctgtactcttccatcctgtttcttacctgttttagcatctttagatactgcgtgataatccacccgatgtcttgcttctcaattcataagacacggtgtgcagtggtcgcctgcgctgtagtgtggatcattagccttgtcgctgtgataccaatgactttcctgattacctcaaccaatcgaacaaatcgctctgcctgcctagatctcacgagcagtgatgagctgaatactattaagtggtataatttgatactgaccgcgacaacattctgtctgcctctcgtaattgttactctctgctatacaacaataatccacacactgacccatggactgcagacagattcgtgtctgaagcagaaggcaagaaggctgaccatcctattactacttgccttctatgtctgtttcctcccatttcatatcctgagggttatccggatagagtcccgactgctctcaatctcttgtagcatcgaaaatcaaatccacgaggcctatattgtttctaggcccctcgctgctctcaatacattcggcaatctcctgctctacgtcgtggtctcagataatttccagcaggccgtgtgctccaccgtgcgatgcaaggtttctggaaatctcgagcaggccaaaaaaatttcatacagcaacaatccttag

SEQ ID NO: 272952 - DNA, 1014 bp, Artificial Sequence
  derived and/or modified sequence
atgaatgagcccctggactacctggccaatgccagtgacttcccagactatgctgctgcctttggaaactgcacagatgagaacatccccctgaagatgcactacctgcctgtgatctacggcatcatcttcctggtgggcttccctggaaatgctgtggtgatcagcacctacatcttcaagatgaggccctggaagagcagcaccatcatcatgctgaacctggcctgcacagacctgctgtacctgaccagcctgcccttcctgatccactactatgccagcggggagaactggatctttggagacttcatgtgcaagttcatccgcttctccttccacttcaacctgtacagcagcatcctcttcctgacctgcttcagcatcttccgctactgtgtgatcatccaccccatgagctgcttcagcatccacaagacccgctgtgctgtggtggcctgtgctgtggtgtggatcatcagcctggtggccgtcatccccatgaccttcctgatcaccagcaccaacagaaccaacagaagtgcctgcctggacctgaccagcagtgatgagctgaacaccatcaagtggtacaacctgatcctgacagccaccaccttctgcctgcccctggtgattgtgaccctgtgctacaccaccatcatccacaccctgacccacggcctgcagacagacagctgcctgaagcagaaggcccggcggctgaccatcctgctgctgctggccttctacgtgtgcttcctgcccttccacatcctgcgggtcatcagaattgagagccggctgctgagcatcagctgcagcattgagaaccagatccacgaggcctacatcgtgtcccggcccctggccgccctgaacaccttcggcaacctgctgctgtatgtggtggtgtctgacaacttccagcaggccgtgtgcagcacagtgcgctgcaaggtgtctggcaacctggagcaggccaagaagatctcctacagcaacaacccctag

SEQ ID NO: 272953 - DNA, 189 bp, Artificial Sequence
  derived and/or modified sequence
atgaatgagcccctggactacctggccaatgccagtgacttcccagactatgctgctgcctttggaaactgcacagatgagaacatccccctgaagatgcactacctgcctgtgatctacggcatcatcttcctggtgggcttccctggaaatgctgtggtgatcagcacctacatcttcaagatgtag

SEQ ID NO: 272954 - DNA, 210 bp, Artificial Sequence
  derived and/or modified sequence
atgaatgagcccctggactacctggccaatgccagtgacttcccagactatgctgctgcctttggaaactgcacagatgagaacatccccctgaagatgcactacctgcctgtgatctacggcatcatcttcctggtgggcttccctggaaatgctgtggtgatcagcacctacatcttcaagatgaggccctggaagagcagcacctag

SEQ ID NO: 272955 - DNA, 1014 bp, Artificial Sequence
  derived and/or modified sequence
atgaacgagcccctggactacctggccaacgccagcgacttccccgactacgccgcggccttcgggaactgcaccgacgagaatatcccgttaaagatgcattatctgcccgtcatctatggtatcattttccttgtggggttccctggaaacgctgtggtgatctccacttatatatttaagatgcggccctggaagtccagcaccattataatgctcaatctggcctgcactgatctgttatatttgacatcgctgcccttcctgattcactattacgcttccggtgagaactggatttttggtgactttatgtgcaagttcatcaggttctcatttcacttcaatctgtatagttccatcctattcttaacatgttttagtatctttcggtattgcgttatcatccaccctatgtcatgcttctcaatccacaaaacccgttgcgctgtcgtcgcttgtgctgttgtatggataattagtttagttgccgttataccaatgactttcctgattacaagcaccaatcgcacaaaccggagcgcttgcctggaccttacctcgtctgatgagctgaacactataaaatggtacaacctcatactcactgccaccacgttttgtctgccgctagtgattgttactctctgttacacgacaattattcacacactgacccatgggctgcagaccgattcctgcttgaagcaaaaagccaggcgcttaactattctactactcctcgctttctacgtttgttttctgccgtttcacatcctgagggtgatcagaattgagtcgcgactgctaagcatttcttgttcgattgagaatcagatacatgaagcttatatagtatccaggcctcttgcagctttaaacacgttcgggaatttactgctgtacgtagtggtgtctgacaacttccaacaagcggtatgttccacagtcaggtgcaaggtcagtggcaatctcgagcaggccaagaagatctcttactcgaacaacccatag

SEQ ID NO: 272956 - DNA, 189 bp, Artificial Sequence
  derived and/or modified sequence
atgaacgagcccctggactacctggccaacgccagcgacttccccgactatgccgccgcatttgggaattgtaccgacgagaacattccactgaaaatgcattacttgcccgtcatttacgggatcatttttttggtgggatttcctggcaatgccgttgtgatctcaacatatatttttaaaatgtag

SEQ ID NO: 272957 - DNA, 210 bp, Artificial Sequence
  derived and/or modified sequence
atgaacgagcccctggactacctggccaacgccagcgacttccccgattatgccgctgctttcggtaactgcactgacgaaaacatccctctaaagatgcactacctacccgtaatttatggaatcatctttctagtcggttttccagggaacgccgtggtgatcagtacttatatctttaaaatgcggccctggaagagcagcacttag

SEQ ID NO: 272958 - DNA, 1014 bp, Artificial Sequence
  derived and/or modified sequence
atgaacgagcccctggactacctggccaacgccagcgacttccccgattacgctgctgcgttcggtaattgcaccgacgagaatattcctttaaaaatgcactacttaccagtgatctatgggatcattttcctggtgggattccctgggaacgccgtggtcatatccacatacatattcaagatgcgcccctggaagtcctccaccatcataatgctcaatcttgcctgtaccgatcttctctacctaacttccctcccttttctgattcactattatgcaagcggagaaaattggattttcggcgacttcatgtgtaagtttatcaggttctcatttcatttcaacctgtacagctcgattttatttctcacctgtttttcaatcttccgatactgtgtcatcatccaccccatgtcttgcttcagtatacataagacaaggtgtgctgtagttgcctgtgcagttgtgtggattatctctcttgttgctgtgatcccaatgacttttctaattacaagcactaaccgtactaacaggtcagcatgccttgatcttacaagctccgatgagctaaacaccatcaagtggtacaatttgatattgacagccaccaccttctgcttgccacttgtgattgtgactctttgctatacgaccatcatccacactctaacccacggcttgcaaacagatagctgcctgaagcaaaaagcaagacggttgacaattctactgctccttgccttctatgtttgcttcttgccatttcacattctgagagtcatacgcattgaatcgagactgttgtccattagctgctccatcgaaaatcagattcacgaggcatacattgtctccaggcctttggccgccctcaacacttttgggaacctgctcctgtacgtggttgtgagcgacaattttcagcaggctgtgtgctccactgtaaggtgcaaagtgagcggcaacttggagcaggctaagaagattagctactctaacaatccttag

SEQ ID NO: 272959 - DNA, 2285 bp, Artificial Sequence
  derived and/or modified sequence
aactaggctgcacaggcacgctgggcgcatgtccgcctcgccggggctgccagaatcttggaatcccaatccgtgaggttcctgggtgtgctggcatcaggacagcggtccacgaacgggtaatcctgatgaaaatcaacaaaatacacatgaagagacagcactgagagcgagttactgctcatttgattcatattgccaaactgaactctcttgttttcttgcaagatgaaaggagacaaccatgaatgagccactagactatttagcaaatgcttctgatttccccgattatgcagctgcttttggaaattgcactgatgaaaacatcccactcaagatgcactacctccctgttatttatggcattatcttcctcgtgggatttccaggcaatgcagtagtgatatccacttacattttcaaaatgagaccttggaagagcagcaccatcattatgctgaacctggcctgcacagatctgctgtatctgaccagcctccccttcctgattcactactatgccagtggcgaaaactggatctttggagatttcatgtgtaagtttatccgcttcagcttccatttcaacctgtatagcagcatcctcttcctcacctgtttcagcatcttccgctactgtgtgatcattcacccaatgagctgcttttccattcacaaaactcgatgtgcagttgtagcctgtgctgtggtgtggatcatttcactggtagctgtcattccgatgaccttcttgatcacatcaaccaacaggaccaacagatcagcctgtctcgacctcaccagttcggatgaactcaatactattaagtggtacaacctgattttgactgcaactactttctgcctccccttggtgatagtgacactttgctataccacgattatccacactctgacccatggactgcaaactgacagctgccttaagcagaaagcacgaaggctaaccattctgctactccttgcattttacgtatgttttttacccttccatatcttgagggtcattcggatcgaatctcgcctgctttcaatcagttgttccattgagaatcagatccatgaagcttacatcgtttctagaccattagctgctctgaacacctttggtaacctgttactatatgtggtggtcagcgacaactttcagcaggctgtctgctcaacagtgagatgcaaagtaagcgggaaccttgagcaagcaaagaaaattagttactcaaacaacccttgaaatatttcatttacttaaccaaaaacaaatacttgctgatactttacctagcatcctaagatgttcaggatgtctccctcaatggaactcctggtaaatactgtgtattcaagtaatcatgtgccaaagccagggcagagcttctagttctttgcaatccctttattgagctcctccactggggagatataagaatgggatgcatgtatatcagcaaagtattcagacatagtattacaagctattggaactcagaggcatcttagagaacatctgttcccaccaacttactatatatacacggaaaccaatttcttacccttgccctagattgctcagtaaatttgtgccaagataggagaaaaccaatcttttcactcatcatttcatgcttctctgcactctgggcctatttgtattgaaccattagacaattcaaaccactacttgtatctttcttaatatttattttttacatctcagagctctacaatttgtttccttcaagcttaactttgagattataaaactgggtttagccagttctgtatattacttcaagccagtaagatacccttgaaataatccaaggacgtccatgcaaatagttgaaattagtacctgcaatatatttggagtattatgtctttattgttgttaaaaagtttttattgaatgtatgaaaattatcaaattgtattcatcattattaacatgtcctggggaaggaagggaaactttctaggacagaagtcactttcagatgtcatgtatgtattgggtgttcaatcatatctaacactgttttgatttttgtgggaaaatattccaggaaacgctaattctctttagactccttgttcttttatgactacaatgaacatatgtctatgtgatagctaaagatatttttgaattgtatgtgtgcttaattatcggtaagtataaatatttgagaaaacacatggtctggatatttaaaaccctcataaacatgttggtacagttaataaacttatttataatt

SEQ ID NO: 272960 - DNA, 643 bp, Artificial Sequence
  derived and/or modified sequence
ggatgctgctggccaggctgctcggggcgaggacccgagaacacgcacttgctcgctgggcctcggaggggtgggaggggcggggcggtgcgcagcctccccgggacaggtctgcggtccgggaccaactaggctgcacaggcacgctgggcgcatgtccgcctcgccggggctgccagaatcttggaatcccaatccgtgaggttcctgggtgtgctggcatcaggacagcggtccacgaacggtgtgttacccaaatattgacatcctgcagctagcctcaaacaatcacagctactttccaatttcagagaaaaaaaggctaaaattggtaatcctgatgaaaatcaacaaaatacacatgaagagacagcactgagagcgagttactgctcatttgattcatattgccaaactgaactctcttgttttcttgcaagatgaaaggagacaaccatgaatgagccactagactatttagcaaatgcttctgatttccccgattatgcagctgcttttggaaattgcactgatgaaaacatcccactcaagatgcactacctccctgttatttatggcattatcttcctcgtgggatttccaggcaatgcagtagtgatatccacttacattttcaaaatga

SEQ ID NO: 272961 - DNA, 588 bp, Artificial Sequence
  derived and/or modified sequence
agagcgagactccttctcaaaagaaaaaaaaaaaaaagaggcactgggctgtaggagagtggtgaaatttctggaccaagacaaggcggccacaaccctcctggggcaacaaccctcccgccgggctggttttttggaacctctgcaaacactttctcctggaatcttggaatcccaatccgtgaggttcctgggtgtgctggcatcaggacagcggtccacgaacggtgtgttacccaaatattgacatcctgcagctagcctcaaacaatcacagctactttccaatttcagagaaaaaaaggctaaaattggtaatcctgatgaaaatcaacaaaatacacatgaagagacagcactgagagatgaaaggagacaaccatgaatgagccactagactatttagcaaatgcttctgatttccccgattatgcagctgcttttggaaattgcactgatgaaaacatcccactcaagatgcactacctccctgttatttatggcattatcttcctcgtgggatttccaggcaatgcagtagtgatatccacttacattttcaaaatgagaccttggaagagcagcacc

SEQ ID NO: 272962 - DNA, 1305 bp, Artificial Sequence
  derived and/or modified sequence
aggtctgcggtccgggaccaactaggctgcacaggcacgctgggcgcatgtccgcctcgccggggctgccagaatcttggaatcccaatccgtgaggttcctgggtgtgctggcatcaggacagcggtccacgaacggtgtgttacccaaatattgacatcctgcagctagcctcaaacaatcacagctactttccaatttcagagaaaaaaaggctaaaattggtaatcctgatgaaaatcaacaaaatacacatgaagagacagcactgagagatgaaaggagacaaccatgaatgagccactagactatttagcaaatgcttctgatttccccgattatgcagctgcttttggaaattgcactgatgaaaacatcccactcaagatgcactacctccctgttatttatggcattatcttcctcgtgggatttccaggcaatgcagtagtgatatccacttacattttcaaaatgagaccttggaagagcagcaccatcattatgctgaacctggcctgcacagatctgctgtatctgaccagcctccccttcctgattcactactatgccagtggcgaaaactggatctttggagatttcatgtgtaagtttatccgcttcagcttccatttcaacctgtatagcagcatcctcttcctcacctgtttcagcatcttccgctactgtgtgatcattcacccaatgagctgcttttccattcacaaaactcgatgtgcagttgtagcctgtgctgtggtgtggatcatttcactggtagctgtcattccgatgaccttcttgatcacatcaaccaacaggaccaacagatcagcctgtctcgacctcaccagttcggatgaactcaatactattaagtggtacaacctgattttgactgcaactactttctgcctccccttggtgatagtgacactttgctataccacgattatccacactctgacccatggactgcaaactgacagctgccttaagcagaaagcacgaaggctaaccattctgctactccttgcattttacgtatgttttttacccttccatatcttgagggtcattcggatcgaatctcgcctgctttcaatcagttgttccattgagaatcagatccatgaagcttacatcgtttctagaccattagctgctctgaacacctttggtaacctgttactatatgtggtggtcagcgacaactttcagcaggctgtctgctcaacagtgagatgcaaagtaagcgggaaccttgagcaagcaaagaaaattagttactcaaacaacccttga

SEQ ID NO: 272963 - DNA, 1014 bp, Artificial Sequence
  derived and/or modified sequence
atgaatgaaccactggattatcttgctaacgcctcagactttcctgactacgccgcagcattcggcaactgtaccgatgagaacattcctctgaagatgcactatctgcctgtgatctacggcatcatctttctggtagggttccctggtaacgctgtagttatcagcacatacatctttaagatgcgcccatggaagtcaagcacgattatcatgctgaatctggcgtgcactgacctactatatctgactagcctgcccttcttgatccattactacgcttcaggtgagaactggatctttggtgacttcatgtgtaagttcatacggttctccttccactttaacctctattcttccatattgttcttgacatgtttctcaatcttccgctattgtgtgatcattcaccccatgagttgcttctccatacacaaaacaagatgcgcggttgtggcttgcgccgttgtctggattattagcttggtggccgttatacccatgaccttcctcatcacctccaccaatcgcaccaaccggtcggcatgcctcgacttaacttcctccgatgagctgaacacaattaagtggtataatctgatactgacagccaccaccttctgcctgccccttgtgattgtgaccctgtgctatacgacaattattcatactctgacccatgggctccagacggactcctgcctgaaacaaaaggcaaggcggctgaccatcttgttactgctagccttttacgtttgctttttaccttttcatatactcagggtgattcggatcgaaagtagattactctctatttcttgcagcatagaaaatcagatccacgaggcatacattgtgtcacgcccactggcggcactgaacacctttgggaacctcttgctctacgtggtggtctctgacaatttccagcaagccgtatgttctaccgttcgttgtaaggtatccggcaacttggagcaggccaagaaaatcagttactccaacaatccctag

SEQ ID NO: 272964 - DNA, 189 bp, Artificial Sequence
  derived and/or modified sequence
atgaatgaaccactggattacttggcaaacgccagtgacttccctgattacgccgctgcctttggcaactgtacagacgaaaacatccccctgaagatgcactatctgcctgtgatttacgggattatcttcctggtgggtttcccaggcaatgctgtcgtgatttctacatacatttttaaaatgtag

SEQ ID NO: 272965 - DNA, 210 bp, Artificial Sequence
  derived and/or modified sequence
atgaatgaaccgctggactatctggcgaacgctagcgactttcccgattatgccgctgcgtttggcaactgcaccgacgaaaacattcctctgaagatgcactatctgccagtgatttacggcataatattccttgtagggttcccaggcaacgctgtcgtcatcagcacttatatcttcaagatgcgcccatggaaaagcagcacatag

SEQ ID NO: 272966 - DNA, 1014 bp, Artificial Sequence
  derived and/or modified sequence
atgaacgagccactggactacctggccaacgcgagtgacttccccgattacgcggcagcatttggcaactgcacagatgagaacattccactgaaaatgcattacttgcccgtgatttatggcataatcttcttggtcgggttccccggaaacgccgtagtgatctccacgtacatcttcaaaatgcgaccatggaagtctagcacaataataatgctgaacctggcttgtaccgatctgctttatcttacatctctcccctttctcattcactactacgcgtctggggaaaattggatatttggcgatttcatgtgtaaatttatcaggttctctttccacttcaacctttactcttcaatcttgtttctgacatgtttctctatcttcaggtactgtgttattattcacccaatgtcctgtttctcaatacacaagacccggtgcgccgtggtggcatgtgcagttgtgtggatcatctccctcgtcgccgttatccctatgaccttcctgattacatcgaccaaccgaaccaataggtcagcatgtttagatcttacatcctccgatgagctgaataccattaaatggtacaatttaatcctgaccgctaccaccttttgcctgccactggtgatcgtgacactgtgttacactaccataatccatacactgacacacggtcttcagacagattcttgcttaaagcaaaaggccaggcggctcacgattctgcttctcttagctttctacgtctgtttcttaccctttcacatacttcgcgtgatcagaattgagtcacgactgctgagtatttcctgcagcattgaaaatcaaattcacgaagcctatattgtgtcccggcctcttgcggcattgaacacttttggaaatctgctgctgtacgtggtcgtcagcgacaacttccaacaagcggtctgcagtaccgttcgttgcaaagtgtcaggcaatctcgagcaggccaaaaaaatatcatactcgaataacccatag

SEQ ID NO: 272967 - protein, 911 aa, Artificial Sequence
  derived and/or modified sequence
MAASQTSQTVASHVPFADLCSTLERIQKSKGRAEKIRHFREFLDSWRKFHDALHKNHKDVTDSFYPAMRLILPQLERERMAYGIKETMLAKLYIELLNLPRDGKDALKLLNYRTPTGTHGDAGDFAMIAYFVLKPRCLQKGSLTIQQVNDLLDSIASNNSAKRKDLIKKSLLQLITQSSALEQKWLIRMIIKDLKLGVSQQTIFSVFHNDAAELHNVTTDLEKVCRQLHDPSVGLSDISITLFSAFKPMLAAIADIEHIEKDMKHQSFYIETKLDGERMQMHKDGDVYKYFSRNGYNYTDQFGASPTEGSLTPFIHNAFKADIQICILDGEMMAYNPNTQTFMQKGTKFDIKRMVEDSDLQTCYCVFDVLMVNNKKLGHETLRKRYEILSSIFTPIPGRIEIVQKTQAHTKNEVIDALNEAIDKREEGIMVKQPLSIYKPDKRGEGWLKIKPEYVSGLMDELDILIVGGYWGKGSRGGMMSHFLCAVAEKPPPGEKPSVFHTLSRVGSGCTMKELYDLGLKLAKYWKPFHRKAPPSSILCGTEKPEVYIEPCNSVIVQIKAAEIVPSDMYKTGCTLRFPRIEKIRDDKEWHECMTLDDLEQLRGKASGKLASKHLYIGGDDEPQEKKRKAAPKMKKVIGIIEHLKAPNLTNVNKISNIFEDVEFCVMSGTDSQPKPDLENRIAEFGGYIVQNPGPDTYCVIAGSENIRVKNIILSNKHDVVKPAWLLECFKTKSFVPWQPRFMIHMCPSTKEHFAREYDCYGDSYFIDTDLNQLKEVFSGIKNSNEQTPEEMASLIADLEYRYSWDCSPLSMFRRHTVYLDSYAVINDLSTKNEGTRLAIKALELRFHGAKVVSCLAEGVSHVIIGEDHSRVADFKAFRRTFKRKFKILKESWVTDSIDKCELQEENQYLI

SEQ ID NO: 272968 - DNA, 2736 bp, Artificial Sequence
  derived and/or modified sequence
atggccgccagccagaccagccagaccgtggccagccacgtgcccttcgccgacctgtgcagcaccctggagagaatccagaagagcaagggcagagccgagaagatcagacacttcagagagttcctggacagctggagaaagttccacgacgccctgcacaagaaccacaaggacgtgaccgacagcttctaccccgccatgagactgatcctgccccagctggagagagagagaatggcctacggcatcaaggagaccatgctggccaagctgtacatcgagctgctgaacctgcccagagacggcaaggacgccctgaagctgctgaactacagaacccccaccggcacccacggcgacgccggcgacttcgccatgatcgcctacttcgtgctgaagcccagatgcctgcagaagggcagcctgaccatccagcaggtgaacgacctgctggacagcatcgccagcaacaacagcgccaagagaaaggacctgatcaagaagagcctgctgcagctgatcacccagagcagcgccctggagcagaagtggctgatcagaatgatcatcaaggacctgaagctgggcgtgagccagcagaccatcttcagcgtgttccacaacgacgccgccgagctgcacaacgtgaccaccgacctggagaaggtgtgcagacagctgcacgaccccagcgtgggcctgagcgacatcagcatcaccctgttcagcgccttcaagcccatgctggccgccatcgccgacatcgagcacatcgagaaggacatgaagcaccagagcttctacatcgagaccaagctggacggcgagagaatgcagatgcacaaggacggcgacgtgtacaagtacttcagcagaaacggctacaactacaccgaccagttcggcgccagccccaccgagggcagcctgacccccttcatccacaacgccttcaaggccgacatccagatctgcatcctggacggcgagatgatggcctacaaccccaacacccagaccttcatgcagaagggcaccaagttcgacatcaagagaatggtggaggacagcgacctgcagacctgctactgcgtgttcgacgtgctgatggtgaacaacaagaagctgggccacgagaccctgagaaagagatacgagatcctgagcagcatcttcacccccatccccggcagaatcgagatcgtgcagaagacccaggcccacaccaagaacgaggtgatcgacgccctgaacgaggccatcgacaagagagaggagggcatcatggtgaagcagcccctgagcatctacaagcccgacaagagaggcgagggctggctgaagatcaagcccgagtacgtgagcggcctgatggacgagctggacatcctgatcgtgggcggctactggggcaagggcagcagaggcggcatgatgagccacttcctgtgcgccgtggccgagaagcccccccccggcgagaagcccagcgtgttccacaccctgagcagagtgggcagcggctgcaccatgaaggagctgtacgacctgggcctgaagctggccaagtactggaagcccttccacagaaaggccccccccagcagcatcctgtgcggcaccgagaagcccgaggtgtacatcgagccctgcaacagcgtgatcgtgcagatcaaggccgccgagatcgtgcccagcgacatgtacaagaccggctgcaccctgagattccccagaatcgagaagatcagagacgacaaggagtggcacgagtgcatgaccctggacgacctggagcagctgagaggcaaggccagcggcaagctggccagcaagcacctgtacatcggcggcgacgacgagccccaggagaagaagagaaaggccgcccccaagatgaagaaggtgatcggcatcatcgagcacctgaaggcccccaacctgaccaacgtgaacaagatcagcaacatcttcgaggacgtggagttctgcgtgatgagcggcaccgacagccagcccaagcccgacctggagaacagaatcgccgagttcggcggctacatcgtgcagaaccccggccccgacacctactgcgtgatcgccggcagcgagaacatcagagtgaagaacatcatcctgagcaacaagcacgacgtggtgaagcccgcctggctgctggagtgcttcaagaccaagagcttcgtgccctggcagcccagattcatgatccacatgtgccccagcaccaaggagcacttcgccagagagtacgactgctacggcgacagctacttcatcgacaccgacctgaaccagctgaaggaggtgttcagcggcatcaagaacagcaacgagcagacccccgaggagatggccagcctgatcgccgacctggagtacagatacagctgggactgcagccccctgagcatgttcagaagacacaccgtgtacctggacagctacgccgtgatcaacgacctgagcaccaagaacgagggcaccagactggccatcaaggccctggagctgagattccacggcgccaaggtggtgagctgcctggccgagggcgtgagccacgtgatcatcggcgaggaccacagcagagtggccgacttcaaggccttcagaagaaccttcaagagaaagttcaagatcctgaaggagagctgggtgaccgacagcatcgacaagtgcgagctgcaggaggagaaccagtacctgatctag

SEQ ID NO: 272969 - DNA, 2736 bp, Artificial Sequence
  derived and/or modified sequence
atggccgcgtcccaaacttcccagactgtggcttcccacgtcccatttgccgacctttgcagtaccctcgagcgcatccagaagtctaagggaagagccgaaaaaattagacactttcgagaatttttagactcatggaggaagttccacgacgccctgcacaaaaatcataaagatgtaacagacagcttctatcccgctatgcgcctgatccttccccagctggaaagagaacgcatggcttacggcatcaaggaaacaatgctcgccaaactatacatcgagctgctaaatttgcccagagacggcaaggatgccctgaagttgctcaattatcgcaccccgactgggacgcatggcgacgcaggagactttgcaatgatcgcctattttgtgctaaaacctagatgtctgcagaaaggctctcttacgattcagcaggtgaatgatctgctggattccatcgccagcaataacagcgctaaaagaaaggacttgataaagaagagcttactccaacttattacccagagctccgcacttgaacagaaatggcttatccggatgattatcaaggacttaaagctgggggtgagtcagcaaacaatattcagtgttttccataacgacgcagctgagctgcataacgtgaccactgatttggaaaaggtttgcaggcaacttcacgacccttccgtgggcttatcagacatctcaatcacactttttagtgctttcaaacccatgctggccgcaatcgctgacatcgaacacatcgagaaggacatgaaacaccagtccttctacattgaaacaaagctcgacggcgagaggatgcagatgcacaaagacggagatgtctacaagtactttagcagaaacggatataattacactgatcagttcggcgcttccccaacagaaggttcactaactcccttcatccacaatgcttttaaagcagatatacaaatctgcatactggatggggagatgatggcctacaacccgaacacacagacatttatgcagaagggcacaaagttcgatatcaagcggatggtcgaggattccgaccttcagacatgctactgtgtgtttgacgttttaatggtaaacaataaaaaactgggacacgaaacccttcgtaaaagatatgaaatcctgtcttccatatttactcctatccctggcaggatagaaatcgtacagaagacccaagcacacaccaagaacgaggtcatcgacgctctcaatgaggccattgataagagagaggagggcattatggtgaaacagcccttaagcatctacaaaccagacaaacgaggtgagggatggcttaaaatcaagcccgaatatgtgagcggccttatggatgaacttgacattcttattgttggcggttactggggaaagggaagtagaggtgggatgatgagccactttttgtgcgctgttgcagagaaacccccgcccggcgagaagccctctgtcttccacactctgagtcgggttggctctggatgtactatgaaggagctgtatgatcttggacttaaactagcaaagtattggaaaccctttcatcgcaaggcccctcctagttcaattctgtgcgggactgaaaaacctgaagtgtacatagagccctgtaatagcgttatcgtgcaaattaaggccgccgagatagtcccttccgacatgtataaaacggggtgtaccctcagattcccgcgcatcgaaaagattagagacgacaaagagtggcacgagtgcatgaccttggacgatttggagcagcttcgcgggaaagccagtggaaaactggcttccaaacatctctacataggtggcgatgatgagccacaggagaaaaagcgcaaagctgcacccaaaatgaagaaagtaattggcatcattgagcacctcaaagcacccaatctcactaatgtgaataaaatctccaacatcttcgaagacgtggaattttgtgtgatgtccgggactgatagccagccaaagcctgacctggagaatcgcatcgccgaattcggcggttacatcgttcaaaacccaggacctgatacttactgcgttatcgcaggcagtgaaaatattcgagtaaaaaatataatcctgtcaaataaacacgatgtggttaaaccagcttggctgctggagtgcttcaaaactaagagctttgttccatggcaaccccgatttatgattcacatgtgtccatctaccaaagaacatttcgctcgagagtatgattgctacggcgactcttactttattgacactgacctgaaccagctaaaggaagtttttagcgggattaaaaacagcaatgagcagacgcctgaggaaatggcctccctgattgcagatcttgagtacaggtacagctgggattgttcccccctgagcatgttccgccgacataccgtgtacctggatagctatgccgtgatcaatgacctttctactaagaatgagggcactagactcgctatcaaggccctagaactgcgtttccatggagcaaaggtggtttcgtgtcttgcagaaggagtcagccatgttatcattggtgaggatcatagtcgcgtggcagacttcaaggcgttccgccggactttcaagaggaagttcaagatactcaaggagtcctgggtaactgactccatcgacaaatgcgaattacaggaggaaaatcaatatctgatttag

SEQ ID NO: 272970 - DNA, 2736 bp, Artificial Sequence
  derived and/or modified sequence
atggcagcctcccaaacctcccagactgtcgcctcccacgtcccattcgctgatctttgcagcaccctggagagaatacagaaaagcaaaggaagagctgagaagattagacacttccgggagttcttggactcctggcggaagtttcacgatgctctgcacaaaaatcataaagacgttacagattctttttaccctgccatgcgcttgatacttccacagctggagcgagagcgaatggcatatgggattaaggagaccatgctggctaaactgtacattgagttgctgaacctgccaagagatggcaaggacgcactgaagttattgaactacagaacccccacaggcactcatggtgacgccggagatttcgcaatgatcgcatacttcgttcttaagcccaggtgcttgcaaaaggggtctctgactattcagcaggtaaatgacctgctggactcaatcgccagcaataattccgcaaagcgcaaagacctgatcaaaaaatccctgcttcagctgataactcaaagttcagccctcgaacaaaaatggctgatacggatgattataaaggatttaaaattgggggtgtctcagcagacgattttcagtgtcttccacaatgatgctgcggagcttcacaatgttactactgacctggaaaaggtgtgtaggcagctgcacgacccttccgtcggattgagcgatatatcaatcaccctgttctcggccttcaaacctatgcttgctgccatcgcagacattgaacacatcgagaaggatatgaaacaccagagcttttacattgaaactaagctcgatggcgaacgtatgcagatgcacaaagatggggatgtatataaatacttctcacgaaacggctacaactacacggaccagtttggggcctctcctacagaggggtctcttactccgttcattcacaacgcttttaaggccgacatccagatatgtattctggacggggagatgatggcttataatccaaatacccagacattcatgcaaaagggaacaaaattcgatattaagcgcatggtcgaggatagcgacctgcagacgtgttactgcgtattcgatgtgctcatggtcaacaacaaaaagcttggccatgaaactctgaggaaacgatacgagattttgtcttctatcttcacacccattcccggacgtatcgagatcgtccaaaaaactcaagcccacaccaagaatgaagtgattgacgccctgaatgaggcgattgacaaacgcgaggagggcattatggtaaaacagccactgtccatatacaagccagataagagaggggagggatggttgaagatcaaacccgagtacgtgtcaggactgatggacgagctcgacattctcattgtgggtggatattggggcaagggatccagaggcggaatgatgagtcatttcctttgtgcggtggccgagaaaccacctcctggcgagaaaccgtccgtgtttcatacactctccagggtgggatcaggctgtacaatgaaggagctatacgacctagggctgaagctggcgaaatattggaaaccttttcaccgcaaggcccctccaagtagcatcctgtgcggcactgaaaaaccggaggtttatatcgaaccctgcaattccgtaattgttcagattaaagccgctgagatcgtgcctagcgatatgtataaaacgggatgtacactcagattccccaggattgaaaaaattcgggacgacaaagaatggcacgagtgtatgaccttggacgacctcgagcaactgcgtggtaaggcaagtgggaagctagcctctaaacacctgtacatcggaggggatgacgaaccgcaggagaagaagcggaaagctgcaccaaaaatgaagaaagttataggaataattgaacaccttaaggcgcccaacctaactaacgtaaacaaaatttcgaatattttcgaggacgtggagttttgcgtgatgtcaggaacagattcacaacctaagcccgacctggagaacaggattgctgaattcgggggctacattgttcaaaacccaggccctgatacctactgtgtgattgctggctccgagaacattcgggttaagaacataattctctctaataagcacgacgttgtaaaacctgcctggctgctcgaatgcttcaagaccaagtcttttgtgccatggcagccacgtttcatgatccatatgtgcccaagtaccaaggagcactttgcaagagagtatgactgctacggcgacagttattttatcgacacagacttgaatcaactcaaagaagtgttttcggggatcaagaattcaaacgagcagacacccgaggaaatggcttccttaatcgccgacttggagtatagatacagctgggactgttcacccctgtccatgttccggaggcacaccgtatacctggattcctacgctgtcattaacgacctcagtacaaaaaacgaggggacacggcttgcgatcaaggcgctcgagcttcggttccacggcgctaaagtggtaagctgccttgccgagggcgtctcccacgttatcatcggggaggaccattcccgggtggccgattttaaggcattccggcgcactttcaaacgcaaatttaagatattgaaggagtcctgggtgaccgacagcatcgacaaatgtgagcttcaggaggagaaccagtacctgatttag

SEQ ID NO: 272971 - DNA, 2736 bp, Artificial Sequence
  derived and/or modified sequence
atggcggcctcacagaccagtcagactgtcgcttcccacgtgccgtttgctgacctctgcagcactctggaacgcatccagaagagcaaaggtcgggccgagaagatacgccatttcagggaattcctggactcttggcgtaagtttcatgatgctctacataaaaatcataaggatgttactgactctttttaccccgccatgcgcctgattctgccccagctagagagggaaagaatggcctatggtatcaaggagaccatgctggccaagctgtacatagaactgctgaatctcccgcgcgatggcaaggatgctctgaaactccttaattatagaacacctactggaactcacggggatgccggagacttcgcaatgattgcctacttcgtgcttaaacctcggtgtctccagaagggctctctaacgattcagcaggtgaatgatttactggactccattgcctccaacaatagcgccaaaaggaaggacctgataaagaaatccctgctccagctcatcacgcagtcgagcgccctggaacagaaatggctcatccgaatgataatcaaggacctcaagctgggcgtcagccagcagaccattttctccgtgttccacaatgatgccgctgagctgcacaatgttacaaccgatcttgagaaggtctgtcggcagctccacgatcccagtgtgggactgtcagacattagcatcactcttttcagcgcctttaagccaatgctggccgctattgctgatatcgagcacatcgagaaggacatgaagcaccaaagtttttacatagaaacgaagctggacggggaacgtatgcagatgcacaaggatggtgacgtgtataaatatttctctaggaatgggtataactacaccgatcagttcggcgcatcacccacggaaggcagtctgacccccttcatacataatgctttcaaggctgatatacaaatctgcattcttgatggtgagatgatggcatacaacccaaacacccagacattcatgcagaaagggaccaagttcgatatcaaacgtatggtcgaggactctgatctgcagacctgctattgtgtatttgacgtgcttatggtgaacaacaagaagctgggacatgaaacgttacggaaaaggtatgagattttgtctagtatctttacacctatcccaggtagaatcgagatcgttcagaaaacccaggcgcacactaagaatgaggttatcgatgctttgaatgaggctatcgataagcgggaggaaggaattatggtgaagcaacccctgagcatctataaacccgacaagaggggagaagggtggctaaaaattaaacccgagtacgtgtctggactgatggatgagctggatattctgattgtgggcgggtattggggtaagggctctagaggtggaatgatgtcccactttctttgtgctgtggctgaaaaacccccgccgggagaaaagccgtctgtgttccatacgctgtcacgcgtgggaagcggctgcaccatgaaagaactgtacgatctgggtctcaagctggccaaatattggaagccttttcacagaaaggcaccaccatcaagcatcctgtgtgggacggagaagccagaagtgtacattgaaccttgtaacagcgttatagtacagataaaagctgcagagattgtcccaagcgatatgtataagaccgggtgtacacttaggtttccacgtatcgaaaaaattagagacgataaggagtggcacgagtgcatgacgctggacgacttagagcaacttaggggcaaggctagtggtaagctggctagcaagcacctgtacatcgggggagatgatgagccacaagagaagaaaagaaaagctgcccccaagatgaaaaaggtaatcggtattattgagcacctgaaagctccaaaccttacgaacgtgaataagattagtaatattttcgaggacgtcgaattctgtgtaatgtctggtaccgattcccagcccaagccagatctggaaaacagaatcgccgagttcggggggtacatcgtgcagaaccccggtccagacacttattgcgtcatagcaggtagcgaaaacatccgagtgaaaaatattatacttagcaataaacatgacgttgtgaaacctgcctggctacttgaatgttttaagactaagtctttcgtcccctggcaacctaggtttatgattcatatgtgtccgagtacaaaagaacacttcgccagggaatacgactgttatggcgatagttactttatcgacaccgacctgaaccagctgaaagaggtattcagtggaatcaaaaactccaacgagcaaacacccgaggagatggcctccctgatcgcagatctggaataccgctatagctgggactgcagccctttgagcatgttccggaggcatacagtgtatctagattcctatgcggtgatcaatgacttatcgactaagaacgagggcactcgactcgccatcaaggccctggagctccgatttcacggggcgaaggtggtgagttgcctcgctgagggcgtgtctcacgttattataggcgaagaccactcccgtgttgcggattttaaagcttttcggcggacattcaaaagaaaattcaaaatcctgaaggagagctgggtaactgactcaatagacaagtgtgagctccaggaggagaatcaatacctaatatag

SEQ ID NO: 272972 - DNA, 2736 bp, Artificial Sequence
  derived and/or modified sequence
atggccgccagccagaccagccagacagtggccagccacgtgccctttgctgacctgtgcagcaccctggagcgcatccagaagagcaagggccgggcagagaagatccgccacttccgggagttcctggacagctggaggaagttccatgatgccctgcacaagaaccacaaggatgtgacagacagcttctacccagccatgaggctcatcctgccccagctggagcgggagaggatggcctacggcatcaaggagaccatgctggccaagctgtacatcgagctgctgaacctgcccagagatggcaaggatgccctgaagctgctgaactaccgcacccccaccggcacccatggagatgctggggactttgccatgattgcctactttgtgctgaagccccgctgcctgcagaagggcagcctgaccatccagcaggtgaatgacctgctggacagcatcgccagcaacaacagcgccaagaggaaggacctgatcaagaagagcctgctgcagctgatcacccagagcagcgccctggagcagaagtggctgatccgcatgatcatcaaggacctgaagctgggcgtgtcccagcagaccatcttctctgtgttccacaatgatgctgctgagctgcacaacgtgaccacagacctggagaaggtgtgccggcagctgcatgaccccagcgtgggcctgagtgacatcagcatcaccctcttcagcgccttcaagcccatgctggccgccatcgctgacatcgagcacatcgagaaggacatgaagcaccagagcttctacatcgagaccaagctggatggagagaggatgcagatgcacaaggatggagatgtgtacaagtacttcagcagaaatggctacaactacacagaccagtttggagccagccccacagagggcagcctgacccccttcatccacaatgccttcaaggctgacatccagatctgcatcctggatggagagatgatggcctacaaccccaacacccagaccttcatgcagaagggcaccaagtttgacatcaagaggatggtggaggacagcgacctgcagacctgctactgtgtgtttgatgtgctgatggtgaacaacaagaagctgggccacgagaccctgaggaagagatatgagatcctgagcagcatcttcacccccatccctggccgcatcgagatcgtgcagaagacccaggcccacaccaagaatgaggtgattgatgccctgaatgaggccatcgacaagcgggaggagggcatcatggtgaagcagcccctgagcatctacaagccagacaagagaggagagggctggctgaagatcaagccagaatatgtgtctggcctgatggatgagctggacatcctgattgtgggcggctactggggcaagggcagcagaggaggcatgatgagccacttcctgtgtgctgtggccgagaagcccccacctggagagaagcccagcgtcttccacaccctgagccgggtgggcagcggctgcaccatgaaggagctgtatgacctgggcctgaagctggccaagtactggaagcccttccacaggaaggccccacccagcagcatcctgtgtggcacagagaagccagaggtgtacatcgagccctgcaacagcgtcatcgtgcagatcaaggctgctgagatcgtgcccagcgacatgtacaagacaggctgcaccctgcgcttccccagaattgagaagatcagagatgacaaggagtggcatgagtgcatgaccctggatgacctggagcagctgcggggcaaggccagcggcaagctggccagcaagcacctgtacatcggaggagatgatgagccccaggagaagaagaggaaggccgcccccaagatgaagaaggtgattggcatcatcgagcacctgaaggcccccaacctgaccaacgtgaacaagatcagcaacatctttgaagatgtggagttctgtgtgatgagcggcacagacagccagcccaagccagacctggagaacagaattgctgagtttggaggctacatcgtgcagaaccctggccctgacacctactgtgtgattgctggcagcgagaacatccgggtgaagaacatcatcctgagcaacaagcatgatgtggtgaagccagcctggctgctggagtgcttcaagaccaagagctttgtgccctggcagccccgcttcatgatccacatgtgccccagcaccaaggagcactttgcccgggagtatgactgctatggagacagctacttcatcgacacagacctgaaccagctgaaggaggtgttttctggcatcaagaacagcaatgagcagaccccagaggagatggccagcctgattgctgacctggagtaccgctacagctgggactgcagccccctgtccatgttccgccgccacacagtgtacctggacagctatgctgtgatcaatgacctgagcaccaagaatgaaggcacccggctggccatcaaggccctggagctgcgcttccacggggccaaggtggtgtcctgcctggccgagggcgtgagccacgtgatcattggagaggaccacagccgggtggccgacttcaaggccttccggaggaccttcaagaggaagttcaagatcctgaaggagagctgggtgacagacagcattgacaagtgtgagctgcaggaggagaaccagtacctgatctag

SEQ ID NO: 272973 - DNA, 3325 bp, Artificial Sequence
  derived and/or modified sequence
ccacagcgctgtagactgcgccgcattagaagcctggcctcctgatgctgtgctcttcatctagacccaagccccaggtcgtgggacgatttctcccgtttttgactccctggaactgtattgcctgctttacctgcgtacatgttgattctttctcatggcaaccccgcaggaaaccatcaagatctcattttacagctgggattctctggttcacagaggtaacggagcttgcccgaggccagttaaacgagaagattcatcaccgctttgatggctgcctcacaaacttcacaaactgttgcatctcacgttccttttgcagatttgtgttcaactttagaacgaatacagaaaagtaaaggacgtgcagaaaaaatcagacacttcagggaatttttagattcttggagaaaatttcatgatgctcttcataagaaccacaaagatgtcacagactctttttatccagcaatgagactaattcttcctcagctagaaagagagagaatggcctatggaattaaagaaactatgcttgctaagctttatattgagttgcttaatttacctagagatggaaaagatgccctcaaacttttaaactacagaacacccactggaactcatggagatgctggagactttgcaatgattgcatattttgtgttgaagccaagatgtttacagaaaggaagtttaaccatacagcaagtaaacgaccttttagactcaattgccagcaataattctgctaaaagaaaagacctaataaaaaagagccttcttcaacttataactcagagttcagcacttgagcaaaagtggcttatacggatgatcataaaggatttaaagcttggtgttagtcagcaaactatcttttctgtttttcataatgatgctgctgagttgcataatgtcactacagatctggaaaaagtctgtaggcaactgcatgatccttctgtaggactcagtgatatttctatcactttattttctgcatttaaaccaatgctagctgctattgcagatattgagcacattgagaaggatatgaaacatcagagtttctacatagaaaccaagctagatggtgaacgtatgcaaatgcacaaagatggagatgtatataaatacttctctcgaaatggatataactacactgatcagtttggtgcttctcctactgaaggttctcttaccccattcattcataatgcattcaaagcagatatacaaatctgtattcttgatggtgagatgatggcctataatcctaatacacaaactttcatgcaaaagggaactaagtttgatattaaaagaatggtagaggattctgatctgcaaacttgttattgtgtttttgatgtattgatggttaataataaaaagctagggcatgagactctgagaaagaggtatgagattcttagtagtatttttacaccaattccaggtagaatagaaatagtgcagaaaacacaagctcatactaagaatgaagtaattgatgcattgaatgaagcaatagataaaagagaagagggaattatggtaaaacaacctctatccatctacaagccagacaaaagaggtgaagggtggttaaaaattaaaccagagtatgtcagtggactaatggatgaattggacattttaattgttggaggatattggggtaaaggatcacggggtggaatgatgtctcattttctgtgtgcagtagcagagaagccccctcctggtgagaagccatctgtgtttcatactctctctcgtgttgggtctggctgcaccatgaaagaactgtatgatctgggtttgaaattggccaagtattggaagccttttcatagaaaagctccaccaagcagcattttatgtggaacagagaagccagaagtatacattgaaccttgtaattctgtcattgttcagattaaagcagcagagatcgtacccagtgatatgtataaaactggctgcaccttgcgttttccacgaattgaaaagataagagatgacaaggagtggcatgagtgcatgaccctggacgacctagaacaacttagggggaaggcatctggtaagctcgcatctaaacacctttatataggtggtgatgatgaaccacaagaaaaaaagcggaaagctgccccaaagatgaagaaagttattggaattattgagcacttaaaagcacctaaccttactaacgttaacaaaatttctaatatatttgaagatgtagagttttgtgttatgagtggaacagatagccagccaaagcctgacctggagaacagaattgcagaatttggtggttatatagtacaaaatccaggcccagacacgtactgtgtaattgcagggtctgagaacatcagagtgaaaaacataattttgtcaaataaacatgatgttgtcaagcctgcatggcttttagaatgttttaagaccaaaagctttgtaccatggcagcctcgctttatgattcatatgtgcccatcaaccaaagaacattttgcccgtgaatatgattgctatggtgatagttatttcattgatacagacttgaaccaactgaaggaagtattctcaggaattaaaaattctaacgagcagactcctgaagaaatggcttctctgattgctgatttagaatatcggtattcctgggattgctctcctctcagtatgtttcgacgccacaccgtttatttggactcgtatgctgttattaatgacctgagtaccaaaaatgaggggacaaggttagctattaaagccttggagcttcggtttcatggagcaaaagtagtttcttgtttagctgagggagtgtctcatgtaataattggggaagatcatagtcgtgttgcagattttaaagcttttagaagaacttttaagagaaagtttaaaatcctaaaagaaagttgggtaactgattcaatagacaagtgtgaattacaagaagaaaaccagtatttgatttaaagctaggtttcctagtgaggaaagcctctgatctggcagactcattgcagcaggtggtaatgataaaatactaaactacattttatttttgtatcttaaaaatctatgcctaaaaagtatcattacatataggaaaacaataattttaacttttaaggttgaaaagacaatagcccaaagccaagaaagaaaaattatcttgaatgtagtattcaatgattttttatgatcaaggtgaaataaacagtctaaagaagaggtgtttttataatatccatatagaaatctagaatttttacttagatactaataaaat

SEQ ID NO: 272974 - DNA, 4058 bp, Artificial Sequence
  derived and/or modified sequence
gccagtgagcccccgcgacggtggcccggacggaaaagatacctcggcggcgtgggcccggctccctgctccaggacctagggatcttggccttccaccctcctccgagcaccaggactccctccagttccgtacccgaggcctccgtggtgaagaggtgccggacccgatgagctcgggagtccaccatcgctctgcaagccgcagttaaacgagaagattcatcaccgctttgatggctgcctcacaaacttcacaaactgttgcatctcacgttccttttgcagatttgtgttcaactttagaacgaatacagaaaagtaaaggacgtgcagaaaaaatcagacacttcagggaatttttagattcttggagaaaatttcatgatgctcttcataagaaccacaaagatgtcacagactctttttatccagcaatgagactaattcttcctcagctagaaagagagagaatggcctatggaattaaagaaactatgcttgctaagctttatattgagttgcttaatttacctagagatggaaaagatgccctcaaacttttaaactacagaacacccactggaactcatggagatgctggagactttgcaatgattgcatattttgtgttgaagccaagatgtttacagaaaggaagtttaaccatacagcaagtaaacgaccttttagactcaattgccagcaataattctgctaaaagaaaagacctaataaaaaagagccttcttcaacttataactcagagttcagcacttgagcaaaagtggcttatacggatgatcataaaggatttaaagcttggtgttagtcagcaaactatcttttctgtttttcataatgatgctgctgagttgcataatgtcactacagatctggaaaaagtctgtaggcaactgcatgatccttctgtaggactcagtgatatttctatcactttattttctgcatttaaaccaatgctagctgctattgcagatattgagcacattgagaaggatatgaaacatcagagtttctacatagaaaccaagctagatggtgaacgtatgcaaatgcacaaagatggagatgtatataaatacttctctcgaaatggatataactacactgatcagtttggtgcttctcctactgaaggttctcttaccccattcattcataatgcattcaaagcagatatacaaatctgtattcttgatggtgagatgatggcctataatcctaatacacaaactttcatgcaaaagggaactaagtttgatattaaaagaatggtagaggattctgatctgcaaacttgttattgtgtttttgatgtattgatggttaataataaaaagctagggcatgagactctgagaaagaggtatgagattcttagtagtatttttacaccaattccaggtagaatagaaatagtgcagaaaacacaagctcatactaagaatgaagtaattgatgcattgaatgaagcaatagataaaagagaagagggaattatggtaaaacaacctctatccatctacaagccagacaaaagaggtgaagggtggttaaaaattaaaccagagtatgtcagtggactaatggatgaattggacattttaattgttggaggatattggggtaaaggatcacggggtggaatgatgtctcattttctgtgtgcagtagcagagaagccccctcctggtgagaagccatctgtgtttcatactctctctcgtgttgggtctggctgcaccatgaaagaactgtatgatctgggtttgaaattggccaagtattggaagccttttcatagaaaagctccaccaagcagcattttatgtggaacagagaagccagaagtatacattgaaccttgtaattctgtcattgttcagattaaagcagcagagatcgtacccagtgatatgtataaaactggctgcaccttgcgttttccacgaattgaaaagataagagatgacaaggagtggcatgagtgcatgaccctggacgacctagaacaacttagggggaaggcatctggtaagctcgcatctaaacacctttatataggtggtgatgatgaaccacaagaaaaaaagcggaaagctgccccaaagatgaagaaagttattggaattattgagcacttaaaagcacctaaccttactaacgttaacaaaatttctaatatatttgaagatgtagagttttgtgttatgagtggaacagatagccagccaaagcctgacctggagaacagaattgcagaatttggtggttatatagtacaaaatccaggcccagacacgtactgtgtaattgcagggtctgagaacatcagagtgaaaaacataattttgtcaaataaacatgatgttgtcaagcctgcatggcttttagaatgttttaagaccaaaagctttgtaccatggcagcctcgctttatgattcatatgtgcccatcaaccaaagaacattttgcccgtgaatatgattgctatggtgatagttatttcattgatacagacttgaaccaactgaaggaagtattctcaggaattaaaaattctaacgagcagactcctgaagaaatggcttctctgattgctgatttagaatatcggtattcctgggattgctctcctctcagtatgtttcgacgccacaccgtttatttggactcgtatgctgttattaatgacctgagtaccaaaaatgaggggacaaggttagctattaaagccttggagcttcggtttcatggagcaaaagtagtttcttgtttagctgagggagtgtctcatgtaataattggggaagatcatagtcgtgttgcagattttaaagcttttagaagaacttttaagagaaagtttaaaatcctaaaagaaagttgggtaactgattcaatagacaagtgtgaattacaagaagaaaaccagtatttgatttaaagctaggtttcctagtgaggaaagcctctgatctggcagactcattgcagcaggtggtaatgataaaatactaaactacattttatttttgtatcttaaaaatctatgcctaaaaagtatcattacatataggaaaacaataattttaacttttaaggttgaaaagacaatagcccaaagccaagaaagaaaaattatcttgaatgtagtattcaatgattttttatgatcaaggtgaaataaacagtctaaagaagaggtgtttttataatatccatatagaaatctagaatttttacttagatactaataaaatacatttagaaacttttaaagtcatgaaaaagcattaaccttctaaacagtatattctaaaaagtcaaaacgttaacaatagtttttatctaataaaagcactgcaagaaaatagggtagaattgttacagctggacttgtaaaaatatgtctttttactcagggtttaaaatgtcccatttaaatatgaaatgtaaacaaatttgttttttaaggttaaggccaaatgtaacaataaaaccctgtcgatggttttagctaaattagaggaagttgtatgagacttaatgatctaaaaacttaaaattgaattggtttgattaaaaataaagcttgcaattttaaaagtagctcacatttaatttcttgtgtgaaatagaacatgctttaaaggaagtatttttatgtgaatttgcattccagtataaatagtattcacaaaaaagattttcctagattttatctattgaataggtgtcaatatggcatgcatattgtaactttcattagaaataagttgctttgacttttaaaaatgacatagttagattatttaaagtcaatgtatatagtatatattatgtatggatttatataccaaattttggaatacagcctatctcatgaccatattgaaatgtacggaatttgatccatgcgatactatgtgtgcattatttgaaagttattggaaattttattcaaaccgtggaacaaatgtatgtgattttgttatacttcttaatttaaataaaatatttaatgcactatt

SEQ ID NO: 272975 - DNA, 3953 bp, Artificial Sequence
  derived and/or modified sequence
cggcatcttctggcgccagcttccggcttagcggctgagcttcaggcttgacgtcaggtgggaagggtgtggggtggcaggtgggggcggttgggaggctagttaaacgagaagattcatcaccgctttgatggctgcctcacaaacttcacaaactgttgcatctcacgttccttttgcagatttgtgttcaactttagaacgaatacagaaaagtaaaggacgtgcagaaaaaatcagacacttcagggaatttttagattcttggagaaaatttcatgatgctcttcataagaaccacaaagatgtcacagactctttttatccagcaatgagactaattcttcctcagctagaaagagagagaatggcctatggaattaaagaaactatgcttgctaagctttatattgagttgcttaatttacctagagatggaaaagatgccctcaaacttttaaactacagaacacccactggaactcatggagatgctggagactttgcaatgattgcatattttgtgttgaagccaagatgtttacagaaaggaagtttaaccatacagcaagtaaacgaccttttagactcaattgccagcaataattctgctaaaagaaaagacctaataaaaaagagccttcttcaacttataactcagagttcagcacttgagcaaaagtggcttatacggatgatcataaaggatttaaagcttggtgttagtcagcaaactatcttttctgtttttcataatgatgctgctgagttgcataatgtcactacagatctggaaaaagtctgtaggcaactgcatgatccttctgtaggactcagtgatatttctatcactttattttctgcatttaaaccaatgctagctgctattgcagatattgagcacattgagaaggatatgaaacatcagagtttctacatagaaaccaagctagatggtgaacgtatgcaaatgcacaaagatggagatgtatataaatacttctctcgaaatggatataactacactgatcagtttggtgcttctcctactgaaggttctcttaccccattcattcataatgcattcaaagcagatatacaaatctgtattcttgatggtgagatgatggcctataatcctaatacacaaactttcatgcaaaagggaactaagtttgatattaaaagaatggtagaggattctgatctgcaaacttgttattgtgtttttgatgtattgatggttaataataaaaagctagggcatgagactctgagaaagaggtatgagattcttagtagtatttttacaccaattccaggtagaatagaaatagtgcagaaaacacaagctcatactaagaatgaagtaattgatgcattgaatgaagcaatagataaaagagaagagggaattatggtaaaacaacctctatccatctacaagccagacaaaagaggtgaagggtggttaaaaattaaaccagagtatgtcagtggactaatggatgaattggacattttaattgttggaggatattggggtaaaggatcacggggtggaatgatgtctcattttctgtgtgcagtagcagagaagccccctcctggtgagaagccatctgtgtttcatactctctctcgtgttgggtctggctgcaccatgaaagaactgtatgatctgggtttgaaattggccaagtattggaagccttttcatagaaaagctccaccaagcagcattttatgtggaacagagaagccagaagtatacattgaaccttgtaattctgtcattgttcagattaaagcagcagagatcgtacccagtgatatgtataaaactggctgcaccttgcgttttccacgaattgaaaagataagagatgacaaggagtggcatgagtgcatgaccctggacgacctagaacaacttagggggaaggcatctggtaagctcgcatctaaacacctttatataggtggtgatgatgaaccacaagaaaaaaagcggaaagctgccccaaagatgaagaaagttattggaattattgagcacttaaaagcacctaaccttactaacgttaacaaaatttctaatatatttgaagatgtagagttttgtgttatgagtggaacagatagccagccaaagcctgacctggagaacagaattgcagaatttggtggttatatagtacaaaatccaggcccagacacgtactgtgtaattgcagggtctgagaacatcagagtgaaaaacataattttgtcaaataaacatgatgttgtcaagcctgcatggcttttagaatgttttaagaccaaaagctttgtaccatggcagcctcgctttatgattcatatgtgcccatcaaccaaagaacattttgcccgtgaatatgattgctatggtgatagttatttcattgatacagacttgaaccaactgaaggaagtattctcaggaattaaaaattctaacgagcagactcctgaagaaatggcttctctgattgctgatttagaatatcggtattcctgggattgctctcctctcagtatgtttcgacgccacaccgtttatttggactcgtatgctgttattaatgacctgagtaccaaaaatgaggggacaaggttagctattaaagccttggagcttcggtttcatggagcaaaagtagtttcttgtttagctgagggagtgtctcatgtaataattggggaagatcatagtcgtgttgcagattttaaagcttttagaagaacttttaagagaaagtttaaaatcctaaaagaaagttgggtaactgattcaatagacaagtgtgaattacaagaagaaaaccagtatttgatttaaagctaggtttcctagtgaggaaagcctctgatctggcagactcattgcagcaggtggtaatgataaaatactaaactacattttatttttgtatcttaaaaatctatgcctaaaaagtatcattacatataggaaaacaataattttaacttttaaggttgaaaagacaatagcccaaagccaagaaagaaaaattatcttgaatgtagtattcaatgattttttatgatcaaggtgaaataaacagtctaaagaagaggtgtttttataatatccatatagaaatctagaatttttacttagatactaataaaatacatttagaaacttttaaagtcatgaaaaagcattaaccttctaaacagtatattctaaaaagtcaaaacgttaacaatagtttttatctaataaaagcactgcaagaaaatagggtagaattgttacagctggacttgtaaaaatatgtctttttactcagggtttaaaatgtcccatttaaatatgaaatgtaaacaaatttgttttttaaggttaaggccaaatgtaacaataaaaccctgtcgatggttttagctaaattagaggaagttgtatgagacttaatgatctaaaaacttaaaattgaattggtttgattaaaaataaagcttgcaattttaaaagtagctcacatttaatttcttgtgtgaaatagaacatgctttaaaggaagtatttttatgtgaatttgcattccagtataaatagtattcacaaaaaagattttcctagattttatctattgaataggtgtcaatatggcatgcatattgtaactttcattagaaataagttgctttgacttttaaaaatgacatagttagattatttaaagtcaatgtatatagtatatattatgtatggatttatataccaaattttggaatacagcctatctcatgaccatattgaaatgtacggaatttgatccatgcgatactatgtgtgcattatttgaaagttattggaaattttattcaaaccgtggaacaaatgtatgtgattttgttatacttcttaatttaaataaaatatttaatgcactatt

SEQ ID NO: 272976 - DNA, 2736 bp, Artificial Sequence
  derived and/or modified sequence
atggccgccagccagaccagccagaccgtggccagccacgtgcccttcgcggacttgtgttctacgctggagagaatccagaaatcaaagggccgcgctgagaagattcgccacttcagggagttcctcgatagttggcgaaaatttcacgacgcattgcataagaaccataaagacgttacggattcattttacccagccatgagactcatcctgccgcagctggaaagagagcggatggcatacgggatcaaagagaccatgcttgctaagctgtatatcgaactcctcaacctgccaagagatgggaaggatgcactcaagctgctcaattaccgaacccctactggcacccatggagatgccggcgacttcgcaatgatcgcctattttgtgctgaaacctaggtgtttgcagaaaggatcactcacaatccagcaggtgaacgacctcctagactctatcgcctctaataactccgccaagcggaaagacctcatcaaaaagtccctgctgcagcttatcactcaatcttctgcactggaacaaaaatggttgatcaggatgatcataaaagacctgaaactgggcgtctcacagcagacaatcttctcagttttccacaacgatgctgcggaattgcacaacgtgacgaccgacctagagaaagtgtgccgtcagctgcatgatccatccgtgggtctgagcgatataagcatcaccctcttctccgccttcaaacccatgctcgctgcaatcgcggatatcgaacacattgagaaagatatgaaacatcagagcttctacatagagactaagctggatggggaacggatgcagatgcataaagacggagacgtgtataaatacttcagcagaaacgggtataattacaccgaccagttcggagctagcccaaccgagggtagcctaactccctttatacataacgcattcaaagctgatattcagatatgcatcctggacggagaaatgatggcctacaatcccaatacccaaaccttcatgcagaaaggcacaaaatttgacatcaagaggatggtagaggatagcgatctacagacttgttattgtgtttttgacgttcttatggtaaataataagaagctgggacatgagaccctgagaaaaagatatgaaatcctctcatccatattcaccccaatcccaggacggatcgagatcgtacagaaaacacaggcacacactaagaatgaagtcatcgatgccctcaacgaagcaatcgacaagagagaggaaggaataatggtaaagcaaccattatccatttacaaacctgacaagaggggcgaggggtggctgaaaatcaagcctgaatatgtgtcaggattaatggacgagctggacatcctcattgttggcggctactggggaaaggggtcccgcggtggcatgatgtcccatttcctgtgcgctgtggctgagaagcctcctcccggcgagaagccctccgtgttccatacactgagccgagtcgggtccggctgtaccatgaaggaactctacgacctcgggctaaagctcgcgaaatactggaaacccttccatcgtaaagctccgccatcttccattctgtgcgggaccgagaagcctgaggtctatatcgagccttgtaacagtgtcattgtacagattaaagccgccgagatcgtcccctctgacatgtacaagaccggctgcacacttcgcttcccaaggattgagaaaattagagacgacaaggagtggcacgaatgtatgactctcgacgacctggagcagttaaggggcaaagcctcaggcaaattagcctctaagcatctgtatatcggtggagatgacgagcctcaggaaaaaaagaggaaagccgcccccaagatgaagaaggtcatcgggattatcgaacatctcaaggcccctaatctgactaatgttaacaaaatttctaacatcttcgaagatgtagagttctgtgtgatgagcggaacggactcacagccgaaaccagacttggagaaccggattgctgaattcggtgggtatatcgtgcagaaccctgggcccgatacttactgtgtgatagccgggtctgagaacattagggtgaagaacataattctaagtaacaagcacgacgtagtaaagccagcctggctgcttgaatgtttcaagacaaaatcctttgtgccctggcagccacgcttcatgattcatatgtgcccatcaaccaaagagcactttgccagagaatatgactgttacggcgactcatactttattgatacagacctgaatcagctaaaagaggtgttctccggcattaaaaactccaacgaacagactcccgaggaaatggcttcgttgattgccgacttagaatataggtattcctgggattgttccccactctccatgttcagacggcataccgtgtatctcgatagctacgctgtgattaacgatttgagcacgaagaacgagggcacacggttggccattaaggcacttgaactgaggtttcacggagccaaggtggtctcttgtctcgctgaaggtgtgtcccatgtcatcattggcgaggaccattcgcgagtcgccgattttaaagcgttcaggcgcacttttaaacgcaagtttaaaatcctgaaagagtcctgggtgacagattccattgataagtgcgaacttcaagaggagaatcagtatcttatatag

SEQ ID NO: 272977 - DNA, 2736 bp, Artificial Sequence
  derived and/or modified sequence
atggccgccagccagaccagccagaccgtggccagccacgtgccctttgcagacttgtgtagcaccctggaaaggatccagaagtctaaagggagggctgagaagattaggcacttccgagagtttctagactcctggagaaaattccacgacgcgctgcacaagaatcacaaagacgtgaccgatagcttttatcctgctatgcgcctgatccttcctcagctcgaaagggaaaggatggcctacggcataaaagagaccatgctcgccaagctctatattgaactgctaaatttgccacgggacggaaaagatgctctgaagctgctcaactaccgaacacctacagggacacatggcgacgccggggactttgctatgattgcgtacttcgtactcaaaccccgctgcctgcaaaaaggctccctaacaattcagcaggtgaatgatctcttagattccatcgcttccaacaacagcgccaaaagaaaagacctgataaaaaagtctcttttgcagctcattacccagtccagcgctctcgagcagaaatggttgattagaatgatcataaaggatttgaagctgggcgtgtcacaacagaccatcttctccgtctttcataatgacgcagcggaactgcataatgtgacaaccgacttagagaaggtgtgcaggcagcttcatgacccctctgtgggactgagtgacatcagcatcaccctgttctcagcatttaaaccgatgttggcagccatcgccgatatagagcacatcgaaaaagacatgaagcatcagagtttttatatagaaaccaagctcgatggcgagcggatgcagatgcataaggacggcgacgtctacaagtatttcagtcggaatggctataactacactgaccaatttggcgcttctcctaccgaaggttcactaacacccttcatacacaacgcctttaaggcagacatccagatttgcatattagacggggagatgatggcctataatccaaacacccagacattcatgcagaagggcacaaaattcgatataaagagaatggtagaggattctgatcttcagacttgctactgcgtgttcgatgttcttatggttaacaacaagaaactcgggcacgaaacccttcgtaaacggtatgagatccttagcagcatattcaccccaattcccgggaggatcgagatagtgcagaaaacacaagcccatactaaaaacgaagtcatcgatgccttgaatgaagccattgataagcgggaggaaggtatcatggtcaaacaaccgctgtctatctataagcctgacaagcgaggtgagggttggttaaaaattaaacccgaatacgtctctggactgatggatgagttggacatccttattgtaggcggttactgggggaagggctcgcgaggtggtatgatgagtcattttctgtgcgccgtggcagaaaaaccccccccaggggagaagccaagtgtgtttcacacgctttctagagtgggcagcggatgcacgatgaaagagctgtatgacctcggactgaagctggctaagtattggaaaccattccatcggaaagctccaccttcatcgattctgtgcggtacagaaaagcccgaggtctatatcgagccttgcaattccgtgatagtgcagataaaagccgctgaaattgtaccatccgatatgtataagacagggtgtaccctgagattcccccggatagagaagatcagggacgataaggagtggcacgaatgcatgaccctggacgacttagaacaactccgcggaaaggcttcagggaaactagcatccaagcatctatatatcggcggcgatgatgaaccccaggagaaaaaaaggaaggcagcgcctaagatgaaaaaagtgatcggcattatagagcaccttaaagctcctaacctcacgaatgtgaacaagattagcaacatttttgaggatgtagagttttgcgtcatgagtggaacggattcacaacctaagccagacctcgaaaacagaatcgcggaatttggaggctacatcgtgcagaacccagggcctgacacttattgcgtgattgccgggagcgagaatatcagagtgaagaatatcattttgtctaataagcacgacgtggtgaagccagcttggctccttgagtgttttaagacaaagagtttcgtgccctggcaaccaaggttcatgattcatatgtgtccaagcaccaaagaacactttgcacgagaatacgattgctatggtgacagttacttcattgacacagatctaaaccagcttaaagaggtgttctctggaattaaaaacagcaacgagcagacacctgaggaaatggctagccttatagcggacctcgagtataggtatagctgggactgcagccccctgagcatgtttcgtcggcatactgtgtacctggattcctacgccgtaatcaacgacttatccaccaagaatgagggaacaaggctcgccatcaaggctctcgagttgcggttccacggtgctaaagtggtcagctgcctcgctgagggggtgtcacatgtcataataggcgaggatcactccagagtcgccgactttaaagccttcagaagaacctttaagcgaaagttcaagattttgaaagagtcttgggtgacagatagcatcgacaagtgcgaactgcaagaggaaaaccagtaccttatttag

SEQ ID NO: 272978 - DNA, 2736 bp, Artificial Sequence
  derived and/or modified sequence
atggccgccagccagaccagccagaccgtggccagccacgtgccctttgccgacttgtgttctacactggaacgtatacagaaaagcaaagggagagctgagaaaataaggcatttccgggaatttctggacagttggaggaagtttcacgacgcacttcacaagaaccataaagatgtgacggactcattttaccctgccatgcggctgatcctgccccagctcgaacgggagcgcatggcttatggtataaaggaaactatgctggccaagttatatatagaactccttaacctcccacgcgacgggaaggacgccctgaaacttctgaactatcggacaccgacaggaacacatggtgacgccggagactttgcaatgatcgcctatttcgtgttgaagccacgatgcttgcagaaaggttccctcacaattcagcaggtcaatgaccttttggattcgattgctagtaataattctgccaaacgaaaagacctaatcaagaaatctttgctgcagcttatcacacagagtagcgcacttgaacagaagtggctgatcagaatgattataaaggacctgaaattaggggtgtcgcagcaaacgattttcagtgtctttcataatgatgctgcagagctgcacaacgttactacagatctcgaaaaggtttgtcggcagctgcacgaccctagcgtaggtttgtctgacatctcaatcacactgttcagcgcctttaagcctatgctagcggccatcgcagatattgaacatatcgagaaggatatgaaacatcagagtttttacatcgaaaccaagttggatggagagcggatgcaaatgcataaggacggcgatgtttataagtacttcagcaggaatggatacaactacactgatcagttcggcgcttcccccactgaggggtccctgaccccctttatccacaatgccttcaaagccgacattcagatctgtattttagacggcgagatgatggcgtataatcctaatactcagacattcatgcagaaaggtactaaatttgacatcaagaggatggtggaggacagtgacctgcagacctgttactgcgtttttgacgtcctcatggtgaacaacaaaaagttaggacacgaaactctgaggaaaaggtacgaaatcctgtcatccatttttactcccattccaggaagaatcgaaatagttcaaaagactcaggctcataccaagaatgaggtgatcgacgccctgaatgaggccatcgataagcgtgaagagggcattatggtgaaacagcccttgtcgatctataaacccgacaaacggggcgaaggttggctcaaaattaaacctgaatatgtctcgggcttgatggacgagcttgatatcctgatcgtcgggggatattggggcaaggggagtcgtggcgggatgatgagccactttctttgcgcggttgccgagaaacctccccctggagagaagccatccgtgttccatacactttcgcgcgtgggttcgggatgtaccatgaaggagctctacgaccttgggctgaaactggccaagtattggaagccttttcacagaaaggctcctccgtctagtatcctgtgcggcacagaaaaacctgaggtttacattgagccttgcaacagcgtgattgtccagatcaaagctgcagaaatcgttccgtctgacatgtacaagacagggtgtaccttgagattcccccgtatagagaagatcagagacgacaaggagtggcacgaatgtatgaccctcgacgatctggaacaacttcgtgggaaagcctccggtaagctggcatccaagcacctatacatcggtggcgacgatgagccacaggaaaagaaacggaaggcagcccccaagatgaaaaaggttatcggaatcatagagcacctgaaagctccaaaccttacaaatgtcaataaaatctcgaatatcttcgaagacgtggagttctgtgtcatgagcgggactgatagccagcccaaacccgatctcgagaatcgaattgccgaattcggcgggtatatcgtccagaacccaggaccagacacctactgtgtgatcgccggatctgagaatataagagtgaaaaatatcattctctctaataaacacgatgtggtcaaacctgcgtggttacttgagtgcttcaaaaccaagagctttgtcccatggcagccgcggtttatgatccatatgtgcccatccactaaggaacatttcgcaagggagtacgattgttatggagactcgtactttattgacactgacctgaatcagctcaaggaagtcttttcgggcattaaaaactcgaatgaacagacacctgaggagatggcttccctgatcgccgatttggagtaccggtattcctgggattgctctcccttgagtatgttccgacgacataccgtgtatctggactcttatgcggtgattaatgatctgtctaccaaaaacgagggtactcggctggcgatcaaagctctggagcttcggttccatggagcaaaggtggtatcttgtttagctgagggtgtgagtcacgtcatcataggggaagaccattcgcgagtggccgactttaaggcattcaggcggaccttcaagagaaaatttaagatattaaaggaatcatgggtcacagattctatcgacaagtgcgaactgcaagaggaaaaccaatacctaatctag

SEQ ID NO: 272979 - DNA, 2736 bp, Artificial Sequence
  derived and/or modified sequence
atggcagcgagccagacgtcccaaactgtggcctcccacgtacccttcgctgatctgtgctccacgctcgaacggatacagaaatccaaaggccgtgccgagaaaatcaggcatttccgagagtttctagactcatggcgaaagttccatgatgccctgcataaaaaccacaaagacgtaactgattctttttatccagccatgagattgatcctgcctcagttggagagggaacgaatggcatacggcattaaagaaactatgctggcaaaactttatatcgagctactgaatctgcctagagacggcaaggatgcacttaaattactgaattaccgtacaccaaccgggactcacggcgatgccggagacttcgctatgattgcttactttgtgcttaaacctagatgtctgcagaagggctcgctaacgattcagcaggtcaacgacctcctggactctatcgcttccaataacagcgccaaacggaaggatttgattaagaagtcactgcttcagctcataacacaatctagcgccttagaacagaagtggctcataagaatgattatcaaagatctgaagctgggcgtgtcccagcaaacgattttctccgtgttccacaacgacgccgcagagctccataatgtcacgaccgatttagaaaaagtgtgcagacaactgcacgatccctccgttggcctctcggatatcagcatcactctgttctcagcctttaagccgatgctggctgccatcgccgacatcgaacatatcgagaaagatatgaaacatcagagcttttatatcgagactaagctggacggcgagcggatgcaaatgcacaaggacggtgacgtgtacaagtattttagtcggaacgggtataactacacagatcagttcggagcatcccccactgagggttccctgacacccttcatccataacgcttttaaggcggacatccaaatctgtatcttggacggcgagatgatggcgtacaaccctaacacacagaccttcatgcagaagggtactaaattcgatattaaacgcatggtcgaggatagcgaccttcagacctgctactgtgtgtttgacgtactgatggtgaacaacaagaagctagggcatgagaccttgcggaaacgctacgaaattctctcctctatctttactccgatccccggacgaatcgaaattgttcagaagacgcaagctcacactaagaatgaagtcattgacgccctgaacgaagctatagacaagcgggaggagggcatcatggttaagcagcctctgagtatttacaagcccgataaacgaggggagggttggctcaagattaaaccggaatacgtctcaggcctaatggacgaactcgacattttgattgtcgggggttactggggcaagggttccagaggagggatgatgagccactttctgtgcgccgtggcagaaaaacccccaccgggagaaaagccaagcgtcttccatactctgtctagggtaggttctggatgcaccatgaaggagctctacgacttaggtcttaagctcgccaagtattggaagccctttcacagaaaggcccctccctcctcaatcctgtgcggaaccgagaaacctgaagtctacatcgaaccctgtaacagtgttattgtgcagattaaagcagctgaaatcgtgccgagcgacatgtacaaaaccggttgtaccttgagattccctagaatagaaaaaatcagggatgataaagaatggcacgagtgtatgactctggacgacctcgaacagctccggggaaaggcatctggcaaactggcctccaagcacctgtacattggtggcgatgatgagccccaggagaagaaaaggaaagccgctcctaaaatgaagaaggtcattggcataatcgaacatttgaaggccccaaatctgacaaatgtcaacaaaatctcaaatatatttgaagacgtggaattctgcgtgatgagcggcacggactcccaacccaagccggacctggaaaatcgcatcgcggagtttggtggctatatcgttcaaaatcccggaccggatacatattgtgtgattgccggatccgaaaatataagagtcaagaatattatcttatcaaataagcacgacgttgttaagcccgcatggttattagaatgttttaaaacaaaatctttcgttccctggcagcctcggtttatgatccacatgtgtcctagtacaaaagagcattttgcccgtgagtacgactgttatggagatagttacttcatcgacacagacctgaaccagttgaaggaagtcttctctggaatcaaaaacagtaacgagcagactcctgaagagatggcaagcctgatcgccgacctcgaatatagatacagttgggattgtagcccgctctcaatgttcaggaggcacacagtgtacctggattcttatgccgtgatcaacgatctttctacgaagaatgaagggaccagactcgcgatcaaggccttggaactccgtttccacggagccaaggttgtcagttgtttggctgagggagtgagccacgtgattatcggcgaggaccatagccgcgtcgcagattttaaagcctttaggcgaacatttaagcgaaagtttaagatcctgaaagaatcctgggtcactgattcgatcgacaagtgtgagctgcaggaggagaaccaatatctgatttag

SEQ ID NO: 272980 - DNA, 2736 bp, Artificial Sequence
  derived and/or modified sequence
atggccgcatcccaaacttcccagaccgttgccagtcatgtaccatttgctgacctgtgctcaacactggagcggatccagaaatcgaaaggcagggcggaaaaaatccgccattttcgtgaattcttggactcctggagaaagtttcatgacgcactccacaagaaccacaaagatgtgaccgactcattttatcccgctatgcgcctaatcctcccccaactggagcgagaaagaatggcgtacggtattaaagaaaccatgctagccaagctgtacatcgagctcctgaatctgccaagggatggcaaggacgctttaaagctgctgaattacaggaccccaaccggcacccatggtgatgctggggatttcgcaatgattgcatactttgtattgaagccaagatgtctgcagaagggtagtctcaccattcaacaagttaacgacttgctggactcaattgcttctaataattccgctaagagaaaagatctgattaaaaaatcccttcttcagctgatcactcaatcctctgcgctcgaacagaagtggctgatccggatgattatcaaggaccttaaactcggagtctcacagcagactattttttcagtttttcataacgatgcggctgaactgcacaatgtgaccacagacctggagaaagtctgcagacagctgcatgacccctcagtgggactgtcagacatcagcatcactctgttctcagctttcaagcctatgcttgcagctattgctgacatcgagcacatcgaaaaagacatgaagcatcaatctttctatatcgaaaccaaacttgacggtgagaggatgcagatgcataaggacggagacgtttataagtactttagccgcaatggctacaattatactgatcagtttggagcctcacctactgagggatctttgacccctttcattcacaatgccttcaaagctgatatacagatatgtatattagatggcgagatgatggcctacaatcccaatactcagacatttatgcagaagggaactaagttcgacatcaaaagaatggtggaagactccgacctgcagacgtgctattgcgtgtttgacgtgttgatggtcaacaacaagaagttaggacacgaaacccttagaaagagatacgagatattgagtagcatttttaccccaatccccggacggatcgagattgtgcagaagacgcaggctcataccaagaatgaggtcattgacgctctgaatgaggccattgacaagagagaggaaggaatcatggtgaagcaacccttaagtatctataagccagataagcggggagaggggtggcttaaaattaagccagaatatgtaagcggcctgatggatgagctcgatattctgatagtgggcggttattggggtaaaggttctcggggagggatgatgagccattttctgtgcgcagtcgccgaaaagccaccccctggagagaagccttcggtcttccatacactgagccgcgtcggatccgggtgtactatgaaggagctctacgatctgggccttaaacttgcaaagtactggaagccttttcatcgcaaagcaccgccttcttcaattttatgtggcaccgagaaaccagaagtttatattgaaccttgcaatagcgtgatcgtgcagattaaagccgctgagatcgtgccttcggacatgtataaaaccggatgtaccctgcgttttcctcgtattgaaaagattagagacgacaaggaatggcacgaatgcatgacactggacgatttagaacaactccggggaaaggcctccggtaagctagcgagtaagcacctctatattggcggagatgatgaaccccaggaaaaaaaacggaaggccgctcccaagatgaagaaggttatcggaattatcgagcacttgaaagctcccaatctcaccaacgtaaacaagatatctaacattttcgaagatgtcgagttctgcgtgatgtccggtactgacagtcaaccaaagcccgacctggagaatagaattgccgagttcggagggtatattgttcagaaccctggacctgatacctactgtgtgattgcgggaagtgagaacatccgtgtcaaaaatataatcctctccaataagcatgacgtggtgaaaccagcctggctgcttgagtgttttaaaacaaaatcttttgtgccctggcagccgaggtttatgattcatatgtgtcccagtacaaaagagcattttgctagagaatacgactgttatggggatagctactttatcgacaccgacctgaaccaactgaaagaagtgttcagtggaattaaaaactctaacgagcaaacccccgaggagatggcctctctcattgccgacctggagtataggtattcctgggactgctccccattatccatgttccgtagacataccgtgtacctggattcatatgccgttataaacgacttgagtactaaaaatgaaggcacccggctggctatcaaggctcttgagctcagatttcacggggcaaaagtggtaagctgtttagccgaaggtgtatctcatgtcattattggcgaggatcattcacgggttgccgacttcaaagcgtttagacgaacatttaaaagaaagttcaaaatcctgaaggagtcgtgggtcactgacagtattgacaagtgcgaactgcaagaggaaaaccagtacctaatttag

SEQ ID NO: 272981 - DNA, 2736 bp, Artificial Sequence
  derived and/or modified sequence
atggcagcaagtcaaacttcacaaaccgttgcatctcacgtgcctttcgctgacctgtgtagcacccttgaacgcatccagaaatctaagggacgggctgagaaaatcagacactttcgcgagtttctggattcatggagaaagttccatgacgcccttcataagaatcataaggacgtgacggatagcttctatcccgcaatgaggctcattttgccacagctggagcgtgagcgcatggcttatggaataaaagagacgatgctggcaaagttgtatatcgagttgcttaacctaccaagagatgggaaggatgccctgaagctgctgaattacaggacgcccactggtacgcatggcgacgccggtgattttgcgatgattgcttacttcgtacttaaaccaagatgcctgcaaaaaggaagcctgactatccagcaagttaatgatctgttggactccattgctagcaataactccgccaaacgcaaagacctgatcaaaaaaagtctgcttcagctgattacacagagttcagcactggagcaaaagtggctaattagaatgataataaaagacctgaagctgggggtctcacagcagacaatctttagcgtcttccataacgacgccgcagagctccacaacgtcaccacggatctggagaaagtttgccgtcagctacatgacccttcagtcggtctatcagacattagtataaccctgttttctgcatttaagccgatgttggcggctatcgccgacatcgagcacatcgagaaggacatgaagcaccagagtttttatatcgagaccaaattagatggcgaaaggatgcagatgcataaggatggggatgtttacaagtatttttccagaaatggatacaactacacagatcagtttggcgcaagtcccaccgaaggctccctgactcctttcattcacaacgcttttaaagctgatatccagatatgtatactggatggagaaatgatggcgtacaatccgaacacccagaccttcatgcagaaaggaacgaaatttgatatcaaaagaatggtggaagatagtgacttacagacctgttactgtgtcttcgatgtgttaatggtcaataacaagaagttgggacatgagactttgcgcaagcggtatgagatcctgtcctcaatctttaccccaatccctggtaggatcgagattgtgcagaaaacccaagcccatactaagaacgaggtgattgacgcacttaatgaagcaatagacaagcgggaagagggcatcatggtgaagcagcccctctctatttataagccagacaagagaggggaaggctggctcaagatcaaacccgagtacgttagtggcctgatggatgagctcgatatacttatcgtggggggatactggggcaaggggtctcgcggaggcatgatgagccatttcctgtgcgctgtggcagagaaaccccctcccggagaaaagccctcagtgtttcacacgctttcgcgcgtaggtagcgggtgcacgatgaaggaactgtacgatctcggcctgaagttggccaagtactggaagccgttccaccggaaagctccaccatccagtatcctgtgcgggacagagaaaccggaagtgtacattgagccgtgtaatagtgtgatcgtgcagataaaggccgctgagattgttccaagcgacatgtataaaactgggtgtactctgaggtttcctcgcatcgagaaaatccgggatgacaaggagtggcacgaatgcatgacactcgatgacttggaacaactccgcggaaaggccagtggcaaactggcctccaagcacctgtatatagggggtgatgacgagccccaggaaaaaaaaaggaaagccgcacccaagatgaaaaaagtgatcggcattatcgaacacctgaaagcccctaatctgaccaacgtgaataaaatctcaaatatttttgaagatgtcgagttctgtgtgatgtccggcactgattcacagccgaaacctgatcttgaaaatcggattgccgagttcggaggctacatcgtgcagaatcccggaccagacacatactgcgtgatcgctggctctgagaacattcgagttaagaatataattctttccaataaacacgatgtagtgaaaccagcctggctcctcgaatgtttcaaaaccaaatcattcgttccttggcagccccgattcatgatccatatgtgtccgtctacaaaggagcattttgcaagggagtatgattgttacggcgactcttactttattgacacagacctgaatcagctgaaagaggttttttccgggataaaaaatagcaacgagcagacccctgaggaaatggcctccctgatcgccgatctggagtaccgctattcctgggactgcagccccttaagcatgttcagacggcacacagtatacctggactcttacgccgtgatcaacgacctctctaccaagaatgaaggaacgcgcctggcaatcaaagcacttgagctccgcttccatggagcaaaggtggtcagctgcctcgccgagggcgtgtcacatgttataatcggtgaagaccatagccgggtcgcggattttaaggctttccgacggaccttcaagagaaaatttaagatcctgaaggagagctgggtgacagactcaatagataagtgcgagctgcaagaggagaaccagtaccttatctag

SEQ ID NO: 272982 - DNA, 2736 bp, Artificial Sequence
  derived and/or modified sequence
atggctgcctcacaaacttcacaaattgttgcatctcacgttccttttgcagatttgtgttcaactttagaacgaatacagaaaagtaaaggacgtgcagaaaaaatcagacacttcagggaatttttagattcttggagaaaatttcatgatgctcttcataagaaccacaaagatgtcacagactctttttatccagcaatgagactaattcttcctcagctagaaagagagagaatggcctatggaattaaagaaactatgcttgctaagctttatattgagttgcttaatttacctagagatggaaaagatgccctcaaacttttaaactacagaacacccactggaactcatggagatgctggagactttgcaatgattgcatattttgtgttgaagccaagatgtttacagaaaggaagtttaaccatacagcaagtaaacgaccttttagactcaattgccagcaataattctgctaaaagaaaagacctaataaaaaagagccttcttcaacttataactcagagttcagcacttgagcaaaagtggcttatacggatgatcataaaggatttaaagcttggtgttagtcagcaaactatcttttctgtttttcataatgatgctgctgagttgcataatgtcactacagatctggaaaaagtctgtaggcaactgcatgatccttctgtaggactcagtgatatttctatcactttattttctgcatttaaaccaatgctagctgctattgcagatattgagcacattgagaaggatatgaaacatcagagtttctacatagaaaccaagctagatggtgaacgtatgcaaatgcacaaagatggagatgtatataaatacttctctcgaaatggatataactacactgatcagtttggtgcttctcctactgaaggttctcttaccccattcattcataatgcattcaaagcagatatacaaatctgtattcttgatggtgagatgatggcctataatcctaatacacaaactttcatgcaaaagggaactaagtttgatattaaaagaatggtagaggattctgatctgcaaacttgttattgtgtttttgatgtattgatggttaataataaaaagctagggcatgagactctgagaaagaggtatgagattcttagtagtatttttacaccaattccaggtagaatagaaatagtgcagaaaacacaagctcatactaagaatgaagtaattgatgcattgaatgaagcaatagataaaagagaagagggaattatggtaaaacaacctctatccatctacaagccagacaaaagaggtgaagggtggttaaaaattaaaccagagtatgtcagtggactaatggatgaattggacattttaattgttggaggatattggggtaaaggatcacggggtggaatgatgtctcattttctgtgtgcagtagcagagaagccccctcctggtgagaagccatctgtgtttcatactctctctcgtgttgggtctggctgcaccatgaaagaactgtatgatctgggtttgaaattggccaagtattggaagccttttcatagaaaagctccaccaagcagcattttatgtggaacagagaagccagaagtatacattgaaccttgtaattctgtcattgttcagattaaagcagcagagatcgtacccagtgatatgtataaaactggctgcaccttgcgttttccacgaattgaaaagataagagatgacaaggagtggcatgagtgcatgaccctggacgacctagaacaacttagggggaaggcatctggtaagctcgcatctaaacacctttatataggtggtgatgatgaaccacaagaaaaaaagcggaaagctgccccaaagatgaagaaagttattggaattattgagcacttaaaagcacctaaccttactaacgttaacaaaatttctaatatatttgaagatgtagagttttgtgttatgagtggaacagatagccagccaaagcctgacctggagaacagaattgcagaatttggtggttatatagtacaaaatccaggcccagacacgtactgtgtaattgcagggtctgagaacatcagagtgaaaaacataattttgtcaaataaacatgatgttgtcaagcctgcatggcttttagaatgttttaagaccaaaagctttgtaccatggcagcctcgctttatgattcatatgtgcccatcaaccaaagaacattttgcccgtgaatatgattgctatggtgatagttatttcattgatacagacttgaaccaactgaaggaagtattctcaggaattaaaaattctaacgagcagactcctgaagaaatggcttctctgattgctgatttagaatatcggtattcctgggattgctctcctctcagtatgtttcgacgccacaccgtttatttggactcgtatgctgttattaatgacctgagtaccaaaaatgaggggacaaggttagctattaaagccttggagcttcggtttcatggagcaaaagtagtttcttgtttagctgagggagtgtctcatgtaataattggggaagatcatagtcgtgttgcagattttaaagcttttagaagaacttttaagagaaagtttaaaatcctaaaagaaagttgggtaactgattcaatagacaagtgtgaattacaagaagaaaaccagtatttgatttaa

SEQ ID NO: 272983 - protein, 84 aa, Artificial Sequence
  derived and/or modified sequence
  misc_feature (1)..(1): Xaa can be any naturally occurring amino acid
XNWELSVKLHDKVHTVVASNNGSVFSVEVDGSKLNVTSTWNLASPLLSVSVDGTQRTVQCLSREAGGNMSIQFLGTVPWRKLLD

SEQ ID NO: 272984 - DNA, 417 bp, Artificial Sequence
  derived and/or modified sequence
aatatctcactgtgcccagaaatctgctttcagaagattgaatctcaggtgtactttgtccgggtcgattccggaatccagccaggatcagatatcagtatctattacgatcctatgatttcgaaactcatcacatacggatcagaccgcactgaagctctcaaacggatggccgacgcactcgataattacgtaattcggggggtgactcacaacattgccctgttgagagaggttatcattaattccaggttcgtcaaaggcgatatttctaccaagttcttgagtgatgtttacccggacggttttaaaggccacatgctcacgaaatctgaaaagaaccagctgctcgcgattgcctcctcactgttcgtcgcattccaattgcgcgcgcagcattttcaggagaatagttag

SEQ ID NO: 272985 - DNA, 255 bp, Artificial Sequence
  derived and/or modified sequence
taaaactgggagctgagcgtgaagcttcatgacaaggtgcatacggtggttgccagtaacaatgggagcgtgttctcagttgaggtggatgggtctaaactaaacgtaacctcaacgtggaacttagcatctcctcttctgtctgtcagtgtggacgggacacagagaactgtgcagtgtctatctagagaagcggggggcaacatgagtatccaattcttagggacagtcccatggagaaagctgctcgactag

SEQ ID NO: 272986 - DNA, 309 bp, Artificial Sequence
  derived and/or modified sequence
agcgatgtataccctgacgggttcaaagggcacatgctcaccaaatcagaaaaaaatcagttgttggctatcgctagttccctgtttgtcgctttccagctccgagcgcaacactttcaagaaaacagccgaatgcccgttatcaaaccagatattgcaaactgggaactctcggtcaagctgcacgacaaagtgcatacagttgtggcatcaaacaacgggagcgtttttagcgtggaggtggatggatcaaagttgaatgtcacctccacctggaatttgttcgccctgattgtctgtcagaggtag

SEQ ID NO: 272987 - DNA, 417 bp, Artificial Sequence
  derived and/or modified sequence
aacatcagcctgtgcccagagatctgcttccagaagattgagagccaggtgtactttgtgcgggtggacagcggcatccagcccggcagtgacatcagcatctactatgaccccatgatcagcaagctgatcacctacggcagtgacagaacagaggccctgaagaggatggctgatgccctggacaactacgtgatccggggcgtgacccacaacatcgccctgctgcgggaggtgatcatcaacagcagatttgtgaagggggacatcagcaccaagttcctgagtgatgtgtacccagatggcttcaagggccacatgctgaccaagtctgagaagaaccagctgctggccatcgccagcagcctgtttgtggccttccagctgcgggcccagcacttccaggagaacagctag

SEQ ID NO: 272988 - DNA, 255 bp, Artificial Sequence
  derived and/or modified sequence
tgaaactgggagctgtctgtgaagctgcatgacaaggtgcacacagtggtggccagcaacaatggatctgtgttttctgtggaggtggatggcagcaagctgaatgtgaccagcacctggaacctggccagccccctgctgtctgtgtctgtggatggcacccagaggacagtgcagtgcctgagccgggaggccggcggcaacatgagcatccagttcctgggcaccgtgccctggaggaagctgctggactag

SEQ ID NO: 272989 - DNA, 309 bp, Artificial Sequence
  derived and/or modified sequence
agtgatgtgtacccagatggcttcaagggccacatgctgaccaagtctgagaagaaccagctgctggccatcgccagcagcctgtttgtggccttccagctgcgggcccagcacttccaggagaacagcaggatgcctgtgatcaagccagacatcgccaactgggagctgtctgtgaagctgcatgacaaggtgcacacagtggtggccagcaacaatggatctgtgttttctgtggaggtggatggcagcaagctgaatgtgaccagcacctggaacctgtttgccctgattgtgtgccagaggtag

SEQ ID NO: 272990 - DNA, 417 bp, Artificial Sequence
  derived and/or modified sequence
aacatcagcctgtgccccgagatctgcttccagaagatcgagagccaggtctactttgtcagggtggatagtgggatccagcctggctctgacatcagtatttactatgacccaatgatctcgaaactgatcacttatggcagtgacaggacggaggcgctcaaacggatggcggatgctctcgataactacgtgattcggggtgtgacccacaacattgcccttctgagagaagtgatcattaacagtcggttcgtcaagggcgatatctcaactaagttcctatccgacgtgtatcccgacggctttaaggggcatatgctgaccaagagcgaaaagaatcagttactggccatcgccagctcactctttgtcgccttccagctacgggctcagcatttccaagagaattcttag

SEQ ID NO: 272991 - DNA, 255 bp, Artificial Sequence
  derived and/or modified sequence
tgaaactgggagctgagcgtgaagctgcacgacaaggtgcacaccgttgttgcttccaataatggatcagttttctctgttgaggtcgatggctctaagttaaacgtaaccagcacatggaacctcgccagccccctgctgtccgtaagcgtggatggcacccagagaaccgtccagtgtctcagccgtgaggcaggtggtaacatgagtatccagtttctgggtacagtgccctggagaaaattgctggactag

SEQ ID NO: 272992 - DNA, 309 bp, Artificial Sequence
  derived and/or modified sequence
agcgacgtgtaccccgacggcttcaagggccacatgctgaccaagtccgagaagaatcagctgttggccattgcaagctcgttgttcgttgcattccagctcagggcccaacacttccaagagaattctcggatgcctgtgataaagccggatattgccaattgggagctctccgtaaaactgcacgataaagtccatactgtggttgcaagcaataatggaagcgtctttagcgtcgaggttgatggttcaaagcttaatgtcacctccacatggaatctcttcgctctgatcgtatgccaacggtag

SEQ ID NO: 272993 - DNA, 417 bp, Artificial Sequence
  derived and/or modified sequence
aacattagtctctgccctgaaatttgcttccagaaaattgaaagtcaggtgtactttgtgagagttgactccgggatccaacctggtagcgatatatcaatatactatgatcccatgataagcaaattaataacatatggcagcgatcgtaccgaagcgctgaagcgcatggccgacgccctcgacaattacgtcatccgtggagtgacacacaatatagccctcctgcgcgaggtcattatcaacagccgtttcgtcaagggcgacatatcaaccaagttcctgtccgatgtctatccggacgggttcaaaggacacatgctcacaaaatcagaaaaaaatcaattgctggccattgcttccagccttttcgtcgcattccagctgagagcacaacactttcaggaaaattcatag

SEQ ID NO: 272994 - DNA, 255 bp, Artificial Sequence
  derived and/or modified sequence
taaaattgggagctaagcgtgaagctacatgacaaggtgcacacagtcgtagctagtaacaacgggtctgtgttcagcgttgaggtggacggatcgaaactgaatgtgacttcaacttggaaccttgcttccccactcctttctgtgagcgttgacggcacacagagaaccgtgcagtgcctcagccgagaagctggcggaaatatgtccattcaattcctggggacagtcccatggcgaaaattgcttgactag

SEQ ID NO: 272995 - DNA, 309 bp, Artificial Sequence
  derived and/or modified sequence
tctgacgtgtaccccgacgggtttaaaggacacatgttaactaagtcagagaagaaccagttattggccatcgctagcagcctgttcgttgcctttcagcttagggctcagcacttccaagagaacagcaggatgcctgtgatcaaacctgatatagccaactgggaactgagtgtgaaactccatgacaaagttcacaccgtggtggctagtaataatggcagtgtcttcagcgttgaggtcgacgggagtaagttgaacgttacctccacatggaatttattcgccttgatcgtgtgtcagcggtag

SEQ ID NO: 272996 - DNA, 417 bp, Artificial Sequence
  derived and/or modified sequence
aatataagcctgtgtcccgaaatttgctttcagaaaattgagtcacaagtttacttcgttagagtggatagtggaattcagccaggctctgatatctcgatttactacgaccccatgataagcaaactaataacttacgggtctgaccgcactgaggctcttaaaaggatggccgacgcgctcgataattacgtaataaggggggtcacccataatatagcactgcttagagaagtgattattaattctagattcgtgaagggcgatatatctactaaatttttatcagacgtctatcccgatggtttcaagggacacatgctgacaaagtctgagaagaaccaattgcttgctatcgcctccagcctgtttgttgcttttcagctcagagctcaacacttccaggagaattcttag

SEQ ID NO: 272997 - DNA, 255 bp, Artificial Sequence
  derived and/or modified sequence
tagaattgggagctgagtgttaagctgcacgataaggtgcacaccgtcgtagctagtaacaacggaagcgttttcagtgttgaagtcgatggatcaaagctcaatgtgacctccacttggaatctagcctcaccactcttgtctgttagtgttgacggtacacaaagaacagtgcagtgcctgtcccgggaggctggcggcaacatgtctatccagtttctcggcaccgtaccatggagaaagttattagattag

SEQ ID NO: 272998 - DNA, 309 bp, Artificial Sequence
  derived and/or modified sequence
tcagatgtttatcccgacggtttcaaaggccacatgctgaccaaaagcgaaaaaaaccagttgctggcaatcgcatcttcactgttcgttgccttccagcttagagcacagcattttcaggagaattcgcggatgccagttataaagccagatatagcgaattgggaactgtctgttaagctgcatgacaaagtacacactgtggtggcgtccaacaacggttccgttttttcagtggaggtggatggatccaaactgaacgtcacttcaacatggaacttatttgctctcattgtttgtcagagatag

SEQ ID NO: 272999 - DNA, 417 bp, Artificial Sequence
  derived and/or modified sequence
aatataagcctgtgtcccgaaatttgctttcagaaaattgagtcacaagtttacttcgttagagtggatagtggaattcagccaggctctgatatctcgatttactacgaccccatgataagcaaactaataacttacgggtctgaccgcactgaggctcttaaaaggatggccgacgcgctcgataattacgtaataaggggggtcacccataatatagcactgcttagagaagtgattattaattctagattcgtgaagggcgatatatctactaaatttttatcagacgtctatcccgacgggtttaaaggacacatgctcactaagtcagaaaaaaatcagctcctagctatcgcctcttccctgtttgttgcattccaattgagagcccagcatttccaggagaacagctag

SEQ ID NO: 273000 - DNA, 309 bp, Artificial Sequence
  derived and/or modified sequence
tcagatgtttatcccgacggtttcaaaggccacatgctgaccaaaagcgaaaaaaaccagttgctggcaatcgcatcttcactgttcgttgccttccagcttagagcacagcattttcaggagaattcgcggatgccagttataaagccagatatagcgaattgggaactgtctgttaagctgcatgacaaagtacacactgtggtggcgtccaacaacggttccgttttttcagtggaggtggatggatccaaactgaacgtcacttcaacatggaacttatttgctctcattgtttgtcagcgatag

SEQ ID NO: 273001 - DNA, 417 bp, Artificial Sequence
  derived and/or modified sequence
aacatcagcctgtgccccgagatctgcttccagaagatcgagagccaggtgtacttcgtgagagtggacagcggcatccagcccggcagcgacatcagcatctactacgaccccatgatcagcaagctgatcacctacggcagcgacagaaccgaggccctgaagagaatggccgacgccctggacaactacgtgatcagaggcgtgacccacaacatcgccctgctgagagaggtgatcatcaacagcagattcgtgaagggcgacatcagcaccaagttcctgagcgacgtgtaccccgacggcttcaagggccacatgctgaccaagagcgagaagaaccagctgctggccatcgccagcagcctgttcgtggccttccagctgagagcccagcacttccaggagaacagctag

SEQ ID NO: 273002 - DNA, 255 bp, Artificial Sequence
  derived and/or modified sequence
tgaaactgggagctgagcgtgaagctgcacgacaaggtgcacaccgtggtggccagcaacaacggcagcgtgttcagcgtggaggtggacggcagcaagctgaacgtgaccagcacctggaacctggccagccccctgctgagcgtgagcgtggacggcacccagagaaccgtgcagtgcctgagcagagaggccggcggcaacatgagcatccagttcctgggcaccgtgccctggagaaagctgctggactag

SEQ ID NO: 273003 - DNA, 309 bp, Artificial Sequence
  derived and/or modified sequence
agcgacgtgtaccccgacggcttcaagggccacatgctgaccaagagcgagaagaaccagctgctggccatcgccagcagcctgttcgtggccttccagctgagagcccagcacttccaggagaacagcagaatgcccgtgatcaagcccgacatcgccaactgggagctgagcgtgaagctgcacgacaaggtgcacaccgtggtggccagcaacaacggcagcgtgttcagcgtggaggtggacggcagcaagctgaacgtgaccagcacctggaacctgttcgccctgatcgtgtgccagagatag

SEQ ID NO: 273004 - RNA, 255 nt, Artificial Sequence
  derived and/or modified sequence
uagaauugggagcugaguguuaagcugcacgauaaggugcacaccgucguagcuaguaacaacggaagcguuuucaguguugaagucgauggaucaaagcucaaugugaccuccacuuggaaucuagccucaccacucuugucuguuaguguugacgguacacaaagaacagugcagugccugucccgggaggcuggcggcaacaugucuauccaguuucucggcaccguaccauggagaaaguuauuagauuag

SEQ ID NO: 273005 - DNA, 672 bp, Artificial Sequence
  derived and/or modified sequence
atggccccagaggttatcaaacagagtgcctacgacagcaaggcagacatctggagtctgggcattacagctatcgagctggctaggggcgagccacctcactctgaactgcaccccatgaaggtactctttctgataccgaaaaataaccctcctacactcgagggtaattactccaagccgttgaaagagttcgtggaggcctgtttaaacaaggagccatcatttcgcccaactgcaaaagagctgctgaagcacaaattcatcctgcgtaatgcaaaaaaaacctcgtatctgaccgaattgatcgatcgctacaagcgctggaaagccgagcagtcacacgatgattcatcgtctgaagactctgatgcagagactgatggacaggcttccgggggctccgatagcggcgattggattttcacaattagggagaaagatcctaagaacctggaaaacggtgcccttcagccctctgacctagacaggaacaagctgaaggagaagtcccaagcatgcgggggcaacctggggagcattgaggaactgaggggagccatatacctggcagaggaagcttgtcccggcatatcggataccatggtagcgcagctggtgcagcggctgcagcgctactccctgtctggtggaggtactagtagccactag

SEQ ID NO: 273006 - DNA, 672 bp, Artificial Sequence
  derived and/or modified sequence
atggcccctgaggtgatcaagcagagcgcctatgacagcaaggctgacatctggagcctgggcatcacagccatcgagctggcccggggggagcccccccacagcgagctgcaccccatgaaggtgctcttcctgatccccaagaacaacccccccaccctggagggcaactacagcaagcccctgaaggagtttgtggaggcctgcctgaacaaggagcccagcttccggcccacagccaaggagctgctgaagcacaagttcatcctgagaaatgccaagaagaccagctacctgacagagctgattgaccgctacaagcgctggaaggccgagcagagccatgatgacagcagcagtgaagattctgatgctgagacagatggccaggccagcggcggcagtgacagcggggactggatcttcaccatccgggagaaggaccccaagaacctggagaatggagccctgcagcccagcgacctggacaggaacaagctgaaggagaagagccaggcctgtggcggcaacctgggcagcattgaggagctgcggggggccatctacctggccgaggaggcctgccccggcatcagtgacaccatggtggcccagctggtgcagaggctgcagcgctacagcctgagcggcggcggcaccagcagccactag

SEQ ID NO: 273007 - DNA, 672 bp, Artificial Sequence
  derived and/or modified sequence
atggcccccgaggtgatcaagcagagcgcctacgacagcaaggccgacatctggtctctcggtatcactgccattgaactcgcgcgaggggaaccaccacactccgagctacatcccatgaaagttcttttcttgattccaaaaaataatccgcccacacttgagggaaattacagtaagcccctgaaagaattcgtggaagcttgccttaacaaagagccatcttttcgccctaccgctaaagagctgctgaagcataagttcatcctccgtaacgccaaaaagacctcgtatctgactgagcttattgaccgctacaaaaggtggaaagctgagcaatcccacgacgactcctctagtgaggactccgatgccgagaccgatggccaggcgtctggaggcagtgacagcggcgactggatctttacaatcagggagaaagaccctaaaaacttagaaaacggcgcccttcagccctctgacctggatcgcaacaaactgaaggagaagtcgcaggcatgtgggggcaatcttggctcaatcgaagagctaaggggcgcaatctacttggctgaagaagcttgccccggcatttccgataccatggtcgcccagttggtacagaggctgcagcggtattccctgtccgggggaggaacatcgagtcattag

SEQ ID NO: 273008 - DNA, 672 bp, Artificial Sequence
  derived and/or modified sequence
atggccccagaagtgatcaagcagtcagcgtacgatagtaaagccgacatctggtcgctcggaataaccgcgatcgagcttgctcgcggagagcccccacatagcgaactgcacccgatgaaggtcctgttcctgattcccaaaaataaccctcctaccctagaagggaactactctaagcccttgaaggaattcgttgaagcctgcctaaataaagagccttcctttcggccaacggccaaagagctgctgaagcataaattcattttgagaaacgcgaaaaagactagttatctcaccgagttaattgaccgctataagcggtggaaggccgagcagtctcatgatgattcctcgtccgaggacagcgatgccgaaaccgacggccaagccagtgggggaagtgatagtggggactggatcttcacgatcagagaaaaggaccccaagaatctagagaatggggctctgcagccctccgaccttgatcgtaacaaattgaaggagaagagccaagcatgtggcggaaatctaggctcaatcgaggaactcaggggcgcaatatatctggccgaggaagcatgccctggaatttccgacactatggtggcccaactggtgcaacgactgcagcgctactcgctgtcaggcggaggcactagcagtcattag

SEQ ID NO: 273009 - DNA, 672 bp, Artificial Sequence
  derived and/or modified sequence
atggcccccgaggtgatcaagcagagcgcctacgacagcaaggccgacatctggagcctgggcatcaccgccatcgagctggccagaggcgagcccccccacagcgagctgcaccccatgaaggtgctgttcctgatccccaagaacaacccccccaccctggagggcaactacagcaagcccctgaaggagttcgtggaggcctgcctgaacaaggagcccagcttcagacccaccgccaaggagctgctgaagcacaagttcatcctgagaaacgccaagaagaccagctacctgaccgagctgatcgacagatacaagagatggaaggccgagcagagccacgacgacagcagcagcgaggacagcgacgccgagaccgacggccaggccagcggcggcagcgacagcggcgactggatcttcaccatcagagagaaggaccccaagaacctggagaacggcgccctgcagcccagcgacctggacagaaacaagctgaaggagaagagccaggcctgcggcggcaacctgggcagcatcgaggagctgagaggcgccatctacctggccgaggaggcctgccccggcatcagcgacaccatggtggcccagctggtgcagagactgcagagatacagcctgagcggcggcggcaccagcagccactag

SEQ ID NO: 273010 - DNA, 1501 bp, Artificial Sequence
  derived and/or modified sequence
gagattggtgcagccccggaggaagaaaaaagggtctaccccgagccccggagcgagagcgagtgcctgagcaacatccgcgagttcctgcgcggctgcggggcttccctgcggctggagacgtttgatgcaaatgatttgtatcaggggcagaattttaacaaggtcctcagttccttagtgactctaaataaagtaacagcaggacatgaccgataatagcaacaatcaactggtagtaagagcaaagtttaacttccagcagaccaatgaggacgagctttccttctcaaaaggagacgtcatccatgtcacccgtgtggaagagggaggctggtgggagggcacactcaacggccggaccggctggttccccagcaactacgtgcgcgaggtcaaggccagcgagaagcctgtgtctcccaaatcaggaacactgaagagccctcccaaaggatttgatacgactgccataaacaaaagctattacaatgtgccagtacttagccgcggagcggaaagcagtgctcatgaaggtggaggcacacccagagactgcatggaggtggaaccgggaagtccggggtctgaggtcctgcctgcagggttgaaaggcatgcctgccagcagacacatttgggagccagagtgtgctgtggtctgaatgtgtttccccagatcatctgttactacagatgatcaccaattggatggtattaaaagcacacgtgcccctgctccgggttgttgctgttgtccttcagaaactctgaggtctggagaggttgcccgaagctcagcagagagtcggaggctgctttttaaacctgatgccacagatgaaaaccctgtacctcacgtattgtgccaatcacccttctgcagtgaatgtcctcacggaacacaggattatcatacagatagacaagatattcaaaaatccatggctgccttcaaaaacctttcagcccaatgtcaagaagtccggaagaggaaagagcttgagctgcagatcctgacggaagccatccggaactgggagggcgatgacattaaaactctgggcaacgtcacttacatgtcccaggtcctgattcagtgtgccggaagtgaggaaaagaatgaaagatatcttctactcttcccaaatgttttgctaatgttgtctgccagtcctaggatgagtggctttatctatcagggagcatgattgagcggatattagtgtcgtgcaacaaccagcaggatctgcaggaatgggtggagcacctacagaagcaaacgaaggtcacgtctgtgggaaaccccaccataaagcctcattcagtgccatctcataccctcccctcccacccggtcactccgtccagcaagcacgcagacagcaagcccgcgccgctgacgcccgcctaccacacgctgccccacccctcccaccacggcaccccgcacaccaccatcaactggggacccctggagcctccgaaaacacccaagccct

SEQ ID NO: 273011 - protein, 705 aa, Artificial Sequence
  derived and/or modified sequence
MTDNSNNQLVVRAKFNFQQTNEDELSFSKGDVIHVTRVEEGGWWEGTLNGRTGWFPSNYVREVKASEKPVSPKSGTLKSPPKGFDTTAINKSYYNVVLQNILETENEYSKELQTVLSTYLRPLQTSEKLSSANISYLMGNLEEICSFQQMLVQSLEECTKLPEAQQRVGGCFLNLMPQMKTLYLTYCANHPSAVNVLTEHSEELGEFMETKGASSPGILVLTTGLSKPFMRLDKYPTLLKELERHMEDYHTDRQDIQKSMAAFKNLSAQCQEVRKRKELELQILTEAIRNWEGDDIKTLGNVTYMSQVLIQCAGSEEKNERYLLLFPNVLLMLSASPRMSGFIYQGKLPTTGMTITKLEDSENHRNAFEISGSMIERILVSCNNQQDLQEWVEHLQKQTKVTSVGNPTIKPHSVPSHTLPSHPVTPSSKHADSKPAPLTPAYHTLPHPSHHGTPHTTINWGPLEPPKTPKPWSLSCLRPAPPLRPSAALCYKEDLSKSPKTMKKLLPKRKPERKPSDEEFASRKSTAALEEDAQILKVIEAYCTSAKTRQTLNSTWQGTDLMHNHVLADDDQPSLDSLGRRSSLSRLEPSDLSEDSDYDSIWTAHSYRMGSTSRSRKESAPQVLLPEEEKIIVEETKSNGQTVIEEKSLVDTVYALKDEVQELRQDNKKMKKSLEEEQRARKDLEKLVRKVLKNMNDPAWDETNL

SEQ ID NO: 273012 - protein, 689 aa, Artificial Sequence
  derived and/or modified sequence
IPPSKPLRGSSLWGCWSRPKTISDPEGFLQASLKDGVVLCRLLERLLPGTIEKVYPEPRSESECLSNIREFLRGCGASLRLETFDANDLYQGQNFNKVLSSLVTLNKVTADIGLGSDSVCARPSSHRIKSFDSLGSQSLHTRTSKLFQGQYRSLDMTDNSNNQLVVRAKFNFQQTNEDELSFSKGDVIHVTRVEEGGWWEGTLNGRTGWFPSNYVREVKASEKPVSPKSGTLKSPPKGFDTTAINKSYYNVVLQNILETENEYSKELQTVLSTYLRPLQTSEKLSSANISYLMGNLEEICSFQQMLVQSLEECTKLPEAQQRVGGCFLNLMPQMKTLYLTYCANHPSAVNVLTEHSEELGEFMETKGASSPGILVLTTGLSKPFMRLDKYPTLLKELERHMEDYHTDRQDIQKSMAAFKNLSAQCQEVRKRKELELQILTEAIRNWEGDDIKTLGNVTYMSQVLIQCAGSEEKNERYLLLFPNVLLMLSASPRMSGFIYQGKLPTTGMTITKLEDSENHRNAFEISGSMIERILVSCNNQQDLQEWVEHLQKQTKVTSVGNPTIKPHSVPSHTLPSHPVTPSSKHADSKPAPLTPAYHTLPHPSHHGTPHTTINWGPLEPPKTPKPWSLSCLRPAPPLRPSAALCYKEDLSKSPKTMKKLLPKRKPERKPMRSSRPGKAQLLWKKMLRF

SEQ ID NO: 273013 - DNA, 5233 bp, Artificial Sequence
  derived and/or modified sequence
aaaaaagggtgaggagaagcagcggctgagcgggttggcatctggggcagcgggctcgctccaggccgtcgggggccgctcgccagcgtcgcccgctgtgttgggagcgcgggccgtgggcgtcgctcggccttgtccgcggcgtccccgctgccggccacggcgctcagcgcttgtgctctgtattgcaggtctaccccgagccccggagcgagagcgagtgcctgagcaacatccgcgagttcctgcgcggctgcggggcttccctgcggctggagacgtttgatgcaaatgatttgtatcaggggcagaattttaacaaggtcctcagttccttagtgactctaaataaagtaacagcagacatcgggctggggagtgactccgtgtgtgcccggccctcgtctcaccgcataaagtcttttgactcccttggatcacagtctttgcacactcggacttcaaaactgttccagggccagtatcggagtttggacatgaccgataatagcaacaatcaactggtagtaagagcaaagtttaacttccagcagaccaatgaggacgagctttccttctcaaaaggagacgtcatccatgtcacccgtgtggaagagggaggctggtgggagggcacactcaacggccggaccggctggttccccagcaactacgtgcgcgaggtcaaggccagcgagaagcctgtgtctcccaaatcaggaacactgaagagccctcccaaaggatttgatacgactgccataaacaaaagctattacaatgtggtgctacagaatattttagaaacagaaaatgaatattctaaagaacttcagactgtgctttcaacgtacctacggccattgcagaccagtgagaagttaagttcagcaaacatttcatatttaatgggaaatctagaagaaatatgttctttccagcaaatgctcgtacagtctttagaagaatgcaccaagttgcccgaagctcagcagagagtcggaggctgctttttaaacctgatgccacagatgaaaaccctgtacctcacgtattgtgccaatcacccttctgcagtgaatgtcctcacggaacacagtgaggagttgggggagttcatggagaccaaaggtgccagcagccctgggattctcgtgctgaccacgggcctgagcaaacccttcatgcgcctggataaataccctacgctgctcaaagagctcgagagacacatggaggattatcatacagatagacaagatattcaaaaatccatggctgccttcaaaaacctttcagcccaatgtcaagaagtccggaagaggaaagagcttgagctgcagatcctgacggaagccatccggaactgggagggcgatgacattaaaactctgggcaacgtcacttacatgtcccaggtcctgattcagtgtgccggaagtgaggaaaagaatgaaagatatcttctactcttcccaaatgttttgctaatgttgtctgccagtcctaggatgagtggctttatctatcagggaaagcttccaacgacaggaatgacaatcacaaagcttgaggacagtgaaaatcatagaaatgcatttgaaatatcagggagcatgattgagcggatattagtgtcgtgcaacaaccagcaggatctgcaggaatgggtggagcacctacagaagcaaacgaaggtcacgtctgtgggaaaccccaccataaagcctcattcagtgccatctcataccctcccctcccacccggtcactccgtccagcaagcacgcagacagcaagcccgcgccgctgacgcccgcctaccacacgctgccccacccctcccaccacggcaccccgcacaccaccatcaactggggacccctggagcctccgaaaacacccaagccctggagcctgagctgcctgcggcccgcgcctcccctccggccctcagctgctctctgctacaaggaggatcttagtaagagccctaagaccatgaaaaagctgctgcccaagcgcaaacctgaacggaagccttcagatgaggagttcgcgtcccggaaaagcacagctgctttggaagaagatgctcagattctgaaagtcattgaagcttactgcaccagcgccaaaacaaggcaaacactcaattcaacatggcaaggcactgacctgatgcataatcacgtcttggctgatgatgaccaaccaagcctagactccctggggcgtcgcagtagcctttctcgtttggagccttcagacctctcggaagactctgactatgacagtatatggacagcccatagttacagaatgggttctacatctcgttcacgcaaagaatctgctccacaagttttgcttccagaagaagagaaaattatagtggaagaaactaaaagtaatggtcagacagtgatagaagaaaagagtcttgtggataccgtatatgcattaaaggatgaagttcaagaattaagacaggacaacaaaaagatgaagaaatctctagaggaagaacagagagcccgcaaagacctggagaagctggtgaggaaagtcctgaagaacatgaatgatcctgcctgggatgagaccaatctataagggatgtcctcagttctttctgttgaagaccagttctgaggtgaagctgggcacccctgacccaagtcggggtgcactcaggaccacagggcagggctgggtggggcgccaccttgctctctgtatatagaaaagctggagcttattctgcgaatggagacgatcaaaccatgactgatgaatccagacaggagggattgactctgaggacctgagctacatcaatccactctgtgaacatctcagttacctcattctgcaataagttcagtgactgactaaaagtcttgtttttccagactttgaattgaatatataaatattatatatacatgtttcttgtaaatatcccattttgaatgcatacctgtggtggttctgtccgggctaatccccatgctagaatgtcctttccagctacgtgaataagaagtcccatgcccgcatccaccggaagcagaagcctggtggatgcctggttcgttccgcagcaccagggcctccaccgtgctgtggcagcaccccccatgtcggtatttctaaataaccttatttatacctgcagagatacacttcagtcccattcagaagtcttctcttaaagcagcattacagtcccagacctgcgggtttctgagggcaacttgctggctgacagactcagtcttgacctcaaggaaggcccatacggcactgccgcatccacctagaggtgtttgctcttgtccgctgtctgagtactgtgattctcagatgagtttgctgcgttttgggaggacacagacggttctgtataggctagttcagtaacaacaaaatacactgttttgtcttccctcaaagagagatcttactagaacctgtaaatagaatgtattatttattataagtcactgcagctgatgaaaacagatggaggccatgctgcaggctgatactgatgggtggagttttgtcatcaggccagcctcatcccgaggtctcctccaccattggccgtagccagcaggcttcagtgctcaccgaaagtaaaatcccctccttcagcaagaataaagcaatatacaccttaggttccactaagtaacataggcataagcagggaacgtttcccccactgtgttccagtgcagaggagacgaagcctgtcctcaccgcggctcgctgggcccaggctggctctggaaagcctgtgcggtcctgggcaggaagcccggcccgtggagcaggttttcgttctgcttcagcaataaataagggtgaccacagggactttgcttttggtttcctttcctgtgaaaaggttggttttaaagtgagatacacttttccgtagaacaagtgttctatctttaaaaacccaaattgcagcaccgtggattactggtctcagaacaactcattgcgcatcagatttgactctctgattttctgtctattggccaaattgccctttaactgcacctgaatcctttgtgtactgatgcctttgagctgggcaccttgggagagtgttgtgttgctgtttacggttcttccttgcccttgctaattacagtctctggtgcccagcaagcccctttggcttccttccgtgactggtcacgttgtctgcctgggctcagcgtggacctgccccatgctgcagaacctggcctcacctggacttttcactagaattgccagcttcctcaacttagcagatcattcactcatgcgggcacaagcaaagatcaacactttcttttttggtaagcttgagttttacaagttattttttggtgatgcgtaagacattgcagtgggaaaccattcaacttgagtttattggagtttgctgttgtagcaggttttaactcaggaacaactcttgtctgatctctccgcccctctgccgggaggcgacattaactgtcctctcggagccggtagcgttgctgtccgagtccccaggacggatctcctgcagacctgccttaatgctcagatcgaagtatttcacaagaatacttgtgtttttaacagcccttcccctggacggtgcggccatgagggcctcatgttacggcattgccttttctttctgtggatccagtatcttcctcggctttttagggagcaggaaaaatgcgtctgagagcaactctttttaaaaacctgccctgttgtatataactgtgtctgtttcaccgtgtgacctcccaagggggtgggaacttgatataaacgtttaaaggggccacgatttgcccgagggttactcctttgctctcaccttgtatggatgaggagatgaagccatttcttatcctgtagatgtgaagcactttcagttttcagcgatgttggaatgtagcatcagaagctcgttccttcacactcagtggcgtctgtgcttgtccacatgcgctgggcgtctgggaccttgaatgcctgccctggttgtgtggactccttaatgccaatcatttcttcacttctctgggacacccagggcgcctgttgacaagtgtggagaaactcctaatttaaatgtcacagacaatgtcctagtgttgactactacaatgttgatgctacactgttgtaattattaaactgattatttttcttatgtc

SEQ ID NO: 273014 - DNA, 5032 bp, Artificial Sequence
  derived and/or modified sequence
gctgagcgggttggcatctggggcagcgggctcgctccaggccgtcgggggccgctcgccagcgtcgcccgctgtgttgggagcgcgggccgtgggcgtcgctcggccttgtccgcggcgtccccgctgccggccacggcgctcagcgcttgtgctctgtattgcaggtctaccccgagccccggagcgagagcgagtgcctgagcaacatccgcgagttcctgcgcggctgcggggcttccctgcggctggagacgtttgatgcaaatgatttgtatcaggggcagaattttaacaaggtcctcagttccttagtgactctaaataaagtaacagcagacatcgggctggggagtgactccgtgtgtgcccggccctcgtctcaccgcataaagtcttttgactcccttggatcacagtctttgcacactcggacttcaaaactgttccagggccagtatcggagtttggacatgaccgataatagcaacaatcaactggtagtaagagcaaagtttaacttccagcagaccaatgaggacgagctttccttctcaaaaggagacgtcatccatgtcacccgtgtggaagagggaggctggtgggagggcacactcaacggccggaccggctggttccccagcaactacgtgcgcgaggtcaaggccagcgagaagcctgtgtctcccaaatcaggaacactgaagagccctcccaaaggatttgatacgactgccataaacaaaagctattacaatgtggtgctacagaatattttagaaacagaaaatgaatattctaaagaacttcagactgtgctttcaacgtacctacggccattgcagaccagtgagaagttaagttcagcaaacatttcatatttaatgggaaatctagaagaaatatgttctttccagcaaatgctcgtacagtctttagaagaatgcaccaagttgcccgaagctcagcagagagtcggaggctgctttttaaacctgatgccacagatgaaaaccctgtacctcacgtattgtgccaatcacccttctgcagtgaatgtcctcacggaacacagtgaggagttgggggagttcatggagaccaaaggtgccagcagccctgggattctcgtgctgaccacgggcctgagcaaacccttcatgcgcctggataaataccctacgctgctcaaagagctcgagagacacatggaggattatcatacagatagacaagatattcaaaaatccatggctgccttcaaaaacctttcagcccaatgtcaagaagtccggaagaggaaagagcttgagctgcagatcctgacggaagccatccggaactgggagggcgatgacattaaaactctgggcaacgtcacttacatgtcccaggtcctgattcagtgtgccggaagtgaggaaaagaatgaaagatatcttctactcttcccaaatgttttgctaatgttgtctgccagtcctaggatgagtggctttatctatcagggaaagcttccaacgacaggaatgacaatcacaaagcttgaggacagtgaaaatcatagaaatgcatttgaaatatcagggagcatgattgagcggatattagtgtcgtgcaacaaccagcaggatctgcaggaatgggtggagcacctacagaagcaaacgaaggtcacgtctgtgggaaaccccaccataaagcctcattcagtgccatctcataccctcccctcccacccggtcactccgtccagcaagcacgcagacagcaagcccgcgccgctgacgcccgcctaccacacgctgccccacccctcccaccacggcaccccgcacaccaccatcaactggggacccctggagcctccgaaaacacccaagccctggagcctgagctgcctgcggcccgcgcctcccctccggccctcagctgctctctgctacaaggaggatcttagtaagagccctaagaccatgaaaaagctgctgcccaagcgcaaacctgaacggaagccttcagatgaggagttcgcgtcccggaaaagcacagctgctttggaagaagatgctcagattctgaaagtcattgaagcttactgcaccagcgccaaaacaaggcaaacactcaattcaagttcacgcaaagaatctgctccacaagttttgcttccagaagaagagaaaattatagtggaagaaactaaaagtaatggtcagacagtgatagaagaaaagagtcttgtggataccgtatatgcattaaaggatgaagttcaagaattaagacaggacaacaaaaagatgaagaaatctctagaggaagaacagagagcccgcaaagacctggagaagctggtgaggaaagtcctgaagaacatgaatgatcctgcctgggatgagaccaatctataagggatgtcctcagttctttctgttgaagaccagttctgaggtgaagctgggcacccctgacccaagtcggggtgcactcaggaccacagggcagggctgggtggggcgccaccttgctctctgtatatagaaaagctggagcttattctgcgaatggagacgatcaaaccatgactgatgaatccagacaggagggattgactctgaggacctgagctacatcaatccactctgtgaacatctcagttacctcattctgcaataagttcagtgactgactaaaagtcttgtttttccagactttgaattgaatatataaatattatatatacatgtttcttgtaaatatcccattttgaatgcatacctgtggtggttctgtccgggctaatccccatgctagaatgtcctttccagctacgtgaataagaagtcccatgcccgcatccaccggaagcagaagcctggtggatgcctggttcgttccgcagcaccagggcctccaccgtgctgtggcagcaccccccatgtcggtatttctaaataaccttatttatacctgcagagatacacttcagtcccattcagaagtcttctcttaaagcagcattacagtcccagacctgcgggtttctgagggcaacttgctggctgacagactcagtcttgacctcaaggaaggcccatacggcactgccgcatccacctagaggtgtttgctcttgtccgctgtctgagtactgtgattctcagatgagtttgctgcgttttgggaggacacagacggttctgtataggctagttcagtaacaacaaaatacactgttttgtcttccctcaaagagagatcttactagaacctgtaaatagaatgtattatttattataagtcactgcagctgatgaaaacagatggaggccatgctgcaggctgatactgatgggtggagttttgtcatcaggccagcctcatcccgaggtctcctccaccattggccgtagccagcaggcttcagtgctcaccgaaagtaaaatcccctccttcagcaagaataaagcaatatacaccttaggttccactaagtaacataggcataagcagggaacgtttcccccactgtgttccagtgcagaggagacgaagcctgtcctcaccgcggctcgctgggcccaggctggctctggaaagcctgtgcggtcctgggcaggaagcccggcccgtggagcaggttttcgttctgcttcagcaataaataagggtgaccacagggactttgcttttggtttcctttcctgtgaaaaggttggttttaaagtgagatacacttttccgtagaacaagtgttctatctttaaaaacccaaattgcagcaccgtggattactggtctcagaacaactcattgcgcatcagatttgactctctgattttctgtctattggccaaattgccctttaactgcacctgaatcctttgtgtactgatgcctttgagctgggcaccttgggagagtgttgtgttgctgtttacggttcttccttgcccttgctaattacagtctctggtgcccagcaagcccctttggcttccttccgtgactggtcacgttgtctgcctgggctcagcgtggacctgccccatgctgcagaacctggcctcacctggacttttcactagaattgccagcttcctcaacttagcagatcattcactcatgcgggcacaagcaaagatcaacactttcttttttggtaagcttgagttttacaagttattttttggtgatgcgtaagacattgcagtgggaaaccattcaacttgagtttattggagtttgctgttgtagcaggttttaactcaggaacaactcttgtctgatctctccgcccctctgccgggaggcgacattaactgtcctctcggagccggtagcgttgctgtccgagtccccaggacggatctcctgcagacctgccttaatgctcagatcgaagtatttcacaagaatacttgtgtttttaacagcccttcccctggacggtgcggccatgagggcctcatgttacggcattgccttttctttctgtggatccagtatcttcctcggctttttagggagcaggaaaaatgcgtctgagagcaactctttttaaaaacctgccctgttgtatataactgtgtctgtttcaccgtgtgacctcccaagggggtgggaacttgatataaacgtttaaaggggccacgatttgcccgagggttactcctttgctctcaccttgtatggatgaggagatgaagccatttcttatcctgtagatgtgaagcactttcagttttcagcgatgttggaatgtagcatcagaagctcgttccttcacactcagtggcgtctgtgcttgtccacatgcgctgggcgtctgggaccttgaatgcctgccctggttgtgtggactccttaatgccaatcatttcttcacttctctgggacacccagggcgcctgttgacaagtgtggagaaactcctaatttaaatgtcacagacaatgtcctagtgttgactactacaatgttgatgctacactgttgtaattattaaactgattatttttcttatgtc

SEQ ID NO: 273015 - protein, 447 aa, Artificial Sequence
  derived and/or modified sequence
MTDNSNNQLVVRAKFNFQQTNEDELSFSKGDVIHVTRVEEGGWWEGTLNGRTGWFPSNYVREVKASEKPVSPKSGTLKSPPKGFDTTAINKSYYNVVLQNILETENEYSKELQTVLSTYLRPLQTSEKLSSANISYLMGNLEEICSFQQMLVQSLEECTKLPEAQQRVGGCFLNLMPQMKTLYLTYCANHPSAVNVLTEHSEELGEFMETKGASSPGILVLTTGLSKPFMRLDKYPTLLKELERHMEDYHTDRQDIQKSMAAFKNLSAQCQEVRKRKELELQILTEAIRNWEGDDIKTLGNVTYMSQVLIQCAGSEEKNERYLLLFPNVLLMLSASPRMSGFIYQGKLPTTGMTITKLEDSENHRNAFEISGSMIERILVSCNNQQDLQEWVEHLQKQTKVTSVGNPTIKPHSVPSHTLPSHPVTPSSKHADSKPAPLTPAYHTLPH

SEQ ID NO: 273016 - protein, 731 aa, Artificial Sequence
  derived and/or modified sequence
MNSAEQTVTWLITLGVLESPKKTISDPEGFLQASLKDGVVLCRLLERLLPGTIEKVYPEPRSESECLSNIREFLRGCGASLRLEDMTDNSNNQLVVRAKFNFQQTNEDELSFSKGDVIHVTRVEEGGWWEGTLNGRTGWFPSNYVREVKASEKPVSPKSGTLKSPPKGFDTTAINKSYYNVVLQNILETENEYSKELQTVLSTYLRPLQTSEKLSSANISYLMGNLEEICSFQQMLVQSLEECTKLPEAQQRVGGCFLNLMPQMKTLYLTYCANHPSAVNVLTEHSEELGEFMETKGASSPGILVLTTGLSKPFMRLDKYPTLLKELERHMEDYHTDRQDIQKSMAAFKNLSAQCQEVRKRKELELQILTEAIRNWEGDDIKTLGNVTYMSQVLIQCAGSEEKNERYLLLFPNVLLMLSASPRMSGFIYQGKLPTTGMTITKLEDSENHRNAFEISGSMIERILVSCNNQQDLQEWVEHLQKQTKVTSVGNPTIKPHSVPSHTLPSHPVTPSSKHADSKPAPLTPAYHTLPHPSHHGTPHTTINWGPLEPPKTPKPWSLSCLRPAPPLRPSAALCYKEDLSKSPKTMKKLLPKRKPERKPSDEEFASRKSTAALEEDAQILKVIEAYCTSAKTRQTLNSSSRKESAPQVLLPEEEKIIVEETKSNGQTVIEEKSLVDTVYALKDEVQELRQDNKKMKKSLEEEQRARKDLEKLVRKVLKNMNDPAWDETNL

SEQ ID NO: 273017 - DNA, 2196 bp, Artificial Sequence
  derived and/or modified sequence
atgaacagcgccgagcagaccgtgacctggctgatcaccctgggcgtgctggagagccccaagaagaccatcagcgaccccgagggcttcctgcaggccagcctgaaggacggcgtggtgctgtgcagactgctggagagactgctgcccggcaccatcgagaaggtgtaccccgagcccagaagcgagagcgagtgcctgagcaacatcagagagttcctgagaggctgcggcgccagcctgagactggaggacatgaccgacaacagcaacaaccagctggtggtgagagccaagttcaacttccagcagaccaacgaggacgagctgagcttcagcaagggcgacgtgatccacgtgaccagagtggaggagggcggctggtgggagggcaccctgaacggcagaaccggctggttccccagcaactacgtgagagaggtgaaggccagcgagaagcccgtgagccccaagagcggcaccctgaagagcccccccaagggcttcgacaccaccgccatcaacaagagctactacaacgtggtgctgcagaacatcctggagaccgagaacgagtacagcaaggagctgcagaccgtgctgagcacctacctgagacccctgcagaccagcgagaagctgagcagcgccaacatcagctacctgatgggcaacctggaggagatctgcagcttccagcagatgctggtgcagagcctggaggagtgcaccaagctgcccgaggcccagcagagagtgggcggctgcttcctgaacctgatgccccagatgaagaccctgtacctgacctactgcgccaaccaccccagcgccgtgaacgtgctgaccgagcacagcgaggagctgggcgagttcatggagaccaagggcgccagcagccccggcatcctggtgctgaccaccggcctgagcaagcccttcatgagactggacaagtaccccaccctgctgaaggagctggagagacacatggaggactaccacaccgacagacaggacatccagaagagcatggccgccttcaagaacctgagcgcccagtgccaggaggtgagaaagagaaaggagctggagctgcagatcctgaccgaggccatcagaaactgggagggcgacgacatcaagaccctgggcaacgtgacctacatgagccaggtgctgatccagtgcgccggcagcgaggagaagaacgagagatacctgctgctgttccccaacgtgctgctgatgctgagcgccagccccagaatgagcggcttcatctaccagggcaagctgcccaccaccggcatgaccatcaccaagctggaggacagcgagaaccacagaaacgccttcgagatcagcggcagcatgatcgagagaatcctggtgagctgcaacaaccagcaggacctgcaggagtgggtggagcacctgcagaagcagaccaaggtgaccagcgtgggcaaccccaccatcaagccccacagcgtgcccagccacaccctgcccagccaccccgtgacccccagcagcaagcacgccgacagcaagcccgcccccctgacccccgcctaccacaccctgccccaccccagccaccacggcaccccccacaccaccatcaactggggccccctggagccccccaagacccccaagccctggagcctgagctgcctgagacccgccccccccctgagacccagcgccgccctgtgctacaaggaggacctgagcaagagccccaagaccatgaagaagctgctgcccaagagaaagcccgagagaaagcccagcgacgaggagttcgccagcagaaagagcaccgccgccctggaggaggacgcccagatcctgaaggtgatcgaggcctactgcaccagcgccaagaccagacagaccctgaacagcagcagcagaaaggagagcgccccccaggtgctgctgcccgaggaggagaagatcatcgtggaggagaccaagagcaacggccagaccgtgatcgaggagaagagcctggtggacaccgtgtacgccctgaaggacgaggtgcaggagctgagacaggacaacaagaagatgaagaagagcctggaggaggagcagagagccagaaaggacctggagaagctggtgagaaaggtgctgaagaacatgaacgaccccgcctgggacgagaccaacctgtag

SEQ ID NO: 273018 - DNA, 2196 bp, Artificial Sequence
  derived and/or modified sequence
atgaactcagctgagcagacagtaacttggttgatcactctgggcgtccttgagtcgcccaagaaaacaataagcgacccagaaggcttcctccaagcctctcttaaggacggagtggtgctgtgtcgactgcttgagagacttctgcccggcaccatcgaaaaagtctaccccgaaccccggtctgaaagcgaatgccttagcaacattagagagtttttgcgcggctgtggcgcctcccttagattggaagacatgaccgataatagcaataaccaattggttgtcagagctaagttcaactttcagcaaactaatgaggacgaactgtccttctctaagggcgacgtgattcatgttaccagggtcgaagaaggtggatggtgggaggggaccttgaatggaaggactggctggtttcccagcaattacgtcagagaagttaaggcatcggagaagcccgtgtcccctaaaagcggcactcttaagagccctcccaagggatttgatacaacggccatcaataaatcgtactacaacgtggtgctccagaatatcctggagaccgagaacgagtactccaaggagttgcagacagttttatctacatatcttcgccccctacagaccagcgagaaattaagctccgctaacattagctacctgatgggtaaccttgaagaaatctgtagctttcaacagatgcttgttcagtctctagaagaatgtacaaaactgccagaagcccagcagagagttggaggctgtttcctgaatttaatgccccagatgaagactctctacttgacttattgtgcaaaccatccatcagcagtcaatgtattaaccgagcactcggaggaacttggcgagttcatggaaacaaagggcgccagtagccccggcatattggtcctgacgaccggcttgtctaagcctttcatgcggcttgataagtacccaactctcttaaaagaactggagcgccacatggaggactatcatacagatcggcaagacatacagaaaagtatggccgcatttaagaacttatctgcccagtgccaagaagtacgcaagcgcaaagaattggagctccaaatcctgacagaggcaatcaggaattgggagggagacgatatcaaaacacttggcaatgtgacatacatgtcacaggtgctgatacaatgtgccggaagcgaagagaaaaatgagcggtacctgctccttttcccgaatgtcctgttaatgctgagcgctagcccccgcatgtcaggcttcatctatcagggaaagttacccaccaccggaatgacaatcactaagctggaggattccgaaaaccaccgtaatgcctttgagatttcagggtcaatgattgaacgcatccttgtctcgtgcaacaatcagcaggacctacaggagtgggttgagcatctccaaaaacaaacaaaagtaacgtctgtcggaaatcccacgatcaagcctcacagcgtgccttcgcatacactgccatcccaccccgtaaccccctctagtaagcatgcagattctaaacccgctccgttgacgcctgcctaccacacacttccccatcctagtcaccacggaactccccatacaacaatcaattgggggcctctggaaccacccaaaactcccaaaccttggtccttgtcctgcctgcgcccggcgccccccctgaggccaagtgctgctctgtgctacaaagaagatcttagcaagtcacccaaaactatgaagaagctcctaccaaagcggaaaccggaaagaaaacccagcgatgaagagttcgcgagtaggaaatctaccgcagccttagaggaagacgctcagatcctgaaggtgatcgaggcctactgcacatcagccaaaaccagacaaaccctcaactccagctcaagaaaggagtcggccccgcaagtactcctgcctgaggaggaaaagatcatcgtcgaggaaacaaaatctaatggtcagacagtcatcgaagaaaagagtctggtcgacacagtgtacgccttgaaagacgaagttcaggaactgaggcaggataacaagaaaatgaagaaatccctcgaagaggagcaaagggcccgaaaggatctagaaaaactggtgcgcaaagtcctcaaaaacatgaacgacccagcctgggacgaaacgaacttgtag

SEQ ID NO: 273019 - DNA, 2196 bp, Artificial Sequence
  derived and/or modified sequence
atgaacagcgctgagcagacagtgacctggctgatcaccctgggcgtgctggagagccccaagaagaccatcagtgaccctgagggcttcctgcaggccagcctgaaggatggagtggtgctgtgccgcctgctggagcggctgctgcccggcaccatcgagaaggtgtacccagagcccaggtctgagagtgaatgtctgagcaacatccgggagttcctgcggggctgtggggccagcctgcggctggaggacatgacagacaacagcaacaaccagctggtggtgcgggccaagttcaacttccagcagaccaatgaagatgagctgtccttcagcaaaggagatgtgattcatgtgaccagggtggaggagggcggctggtgggagggcaccctgaatggccgcacaggctggttccccagcaactacgtgcgggaggtgaaggccagcgagaagcctgtgagccccaagagcggcaccctgaagagcccccccaagggctttgacaccacagccatcaacaagagctactacaacgtggtgctgcagaacatcctggagacagaaaatgagtacagcaaggagctgcagacagtgctgagcacctacctgcggcccctgcagaccagcgagaagctgagcagcgccaacatctcctacctgatgggcaacctggaggagatctgcagcttccagcagatgctggtgcagagcctggaggagtgcaccaagctgcctgaggcccagcagagggtgggcggctgcttcctgaacctgatgccccagatgaagaccctgtacctgacctactgtgccaaccaccccagcgctgtgaatgtgctgacagagcacagcgaggagctgggggagttcatggagaccaagggggccagcagccctggcatcctggtgctgaccaccggcctgagcaagcccttcatgaggctggacaagtaccccaccctgctgaaggagctggagcggcacatggaggactaccacacagaccggcaggacatccagaagtccatggccgccttcaagaacctgagcgcccagtgccaggaggtgaggaagaggaaggagctggagctgcagatcctgacagaggccatccggaactgggagggagatgacatcaagaccctgggcaatgtgacctacatgagccaggtgctgatccagtgtgccggcagcgaggagaagaatgaaagatacctgctgctcttccccaacgtgctgctgatgctgagcgccagccccaggatgagcggcttcatctaccagggcaagctgcccaccaccggcatgaccatcaccaagctggaggacagcgagaaccacagaaatgcctttgagatcagcggctccatgattgaaagaatcctggtgtcctgcaacaaccagcaggacctgcaggagtgggtggagcacctgcagaagcagaccaaggtgacctctgtgggcaaccccaccatcaagccccacagcgtgcccagccacaccctgcccagccaccctgtgacccccagcagcaagcacgccgacagcaagccagcccccctgaccccagcctaccacaccctgccccaccccagccaccacggcaccccccacaccaccatcaactggggccccctggagccccccaagacccccaagccctggagcctgagctgcctgcggcctgccccacccctgcggcccagcgctgccctgtgctacaaggaggacctgagcaagagccccaagaccatgaagaagctgctgcccaagaggaagccagagaggaagcccagtgatgaggagtttgccagcaggaagagcacagctgccctggaggaggatgcccagatcctgaaggtgattgaggcctactgcaccagcgccaagacccggcagaccctgaacagcagcagcaggaaggagagcgccccccaggtgctgctgcctgaggaggagaagatcatcgtggaggagaccaagagcaatggccagaccgtcatcgaggagaagagcctggtggacacagtgtatgccctgaaggatgaggtgcaggagctgcggcaggacaacaagaagatgaagaagagcctggaggaggagcagagggccaggaaggacctggagaagctggtgaggaaggtgctgaagaacatgaatgaccctgcctgggatgagaccaacctgtag

SEQ ID NO: 273020 - DNA, 2196 bp, Artificial Sequence
  derived and/or modified sequence
atgaacagcgccgagcagaccgtgacctggctgatcaccctgggcgtcctggaatctcccaaaaagacaatcagcgatcccgagggttttctccaagcatcactcaaagatggagtcgttctttgtcgcttactcgaacggctccttcctgggactattgagaaggtgtacccagagcccaggtctgaaagcgagtgtttgagcaatatccgtgagttccttaggggctgcggcgctagcctgagactggaagacatgaccgataattcaaacaatcagcttgtggttcgggctaaattcaatttccaacagacgaatgaagacgagctgagtttttccaagggagatgtgattcacgttaccagggtggaagaaggcggatggtgggaaggaacactcaatggacgtacgggatggttcccatctaactatgtgcgcgaagtcaaagcctccgagaagcctgtcagcccgaagtcaggcaccttaaaatcaccacccaagggattcgacaccacagctatcaataaaagttactataatgtagtactccagaatattctggagaccgagaacgagtacagtaaggagctgcaaacggtgctgagtacttacctccgaccccttcagaccagcgaaaaactgagctcagcaaacattagttacttgatgggaaacctggaggagatatgtagttttcagcaaatgctcgtccagtcattggaggagtgcacaaagcttcccgaagctcagcagcgggtgggcggttgcttcttgaatttgatgccacagatgaaaaccctgtacctgacatattgcgcaaaccacccctctgcagtaaatgtcctgacggagcactcagaggaattgggagaattcatggaaaccaagggggcgtcctcccccggcatcctggtcctgacaaccggcctgtctaagcctttcatgcgtctggacaaatatcctaccctgttgaaagaactggagcgtcacatggaagactatcatactgaccggcaggatatccagaagagcatggctgcttttaagaatctgtctgcccagtgccaggaggtccggaaaaggaaagaactggaactccagatacttacagaagctatccggaattgggaaggcgatgacatcaaaaccctgggaaacgtcacatatatgagccaagttctgatacagtgcgccggcagcgaggaaaaaaatgagagatacctgctgttgttccccaacgtcttgctgatgttgagcgcgtccccacggatgtccggattcatttatcagggaaaattaccaaccaccggcatgactatcaccaagttggaggactccgaaaatcaccgcaacgcatttgagatttcagggagcatgatcgagagaatcctcgtgtcttgcaacaatcaacaagatctacaggagtgggttgagcacctacagaaacagactaaagtgacttcagtggggaacccaactatcaagccacattccgttccatctcacactctgccatctcatcctgtgacgccatcctcgaaacacgccgactcgaaaccggccccattgacacccgcctaccatactctcccacatccgtcacaccacggcaccccccacactacaatcaattggggtcctcttgagccgcctaagacaccgaagccatggagcttgagttgcttgcgtcccgcacccccactcagaccatcggcggcactctgttacaaggaggacctctccaagagccccaagacaatgaaaaaactcctcccaaagagaaagcccgagcgcaaaccttccgatgaggagtttgccagtcggaagtcaacagccgcactcgaggaggatgctcagattctcaaggttatcgaagcttattgcactagtgccaagactcgccagacgttgaacagcagcagtcgcaaagagtccgccccccaggtgctcttaccagaggaagaaaagattatagttgaagagactaagtcaaatggccagacagtaatcgaggagaaaagtttggttgatacggtttacgctcttaaagacgaggtacaggaactacggcaagataacaagaagatgaagaaatccctcgaggaggagcaaagggcacgcaaggacctggagaagctggtccggaaggtactgaagaatatgaatgatcctgcttgggatgagaccaacctgtag

SEQ ID NO: 273021 - DNA, 2196 bp, Artificial Sequence
  derived and/or modified sequence
atgaattccgctgagcagaccgtgacatggcttattacactgggcgtgcttgagagccccaagaagaccatctcggaccccgagggattcctccaagcctcacttaaagacggtgttgtgctgtgccgtctgctagagagactactgcctgggaccattgaaaaggtgtacccagagcctcgctccgaaagtgagtgcttgagcaatattcgtgagttcctgaggggatgtggcgctagcctgcgtctagaagatatgaccgacaactctaacaaccagcttgtcgtccgtgccaaattcaacttccagcagaccaatgaagatgaactctcattctcaaagggcgacgtgattcacgttacaagggtggaagaagggggatggtgggaggggacactcaatggccgtacgggttggtttccaagtaactacgtgcgggaggtgaaagcatcagaaaaacccgtctcccccaagtccgggactctaaagagtcctcccaaaggattcgacacaaccgctatcaataaatcctattataatgttgtcttacaaaacatactcgaaacagagaacgaatacagtaaagagttgcagactgtactctctacctaccttagacccctgcagacaagtgagaagctgagttcagccaacatctcctatctgatggggaatctggaagagatctgttctttccagcagatgctggtccagagcctggaggagtgtaccaaattgcctgaagcccaacaacgtgttggcggttgtttcctgaatttgatgccacagatgaaaacgctgtatctgacgtattgcgctaatcacccaagcgcagttaacgttcttacagagcactcggaagagctgggagagtttatggaaaccaaaggcgcatcctccccgggaatactggtattgacaactggtctgagtaaaccatttatgcgtctggataagtatcctaccctactgaaggaactggagcgacacatggaggactatcatactgaccgtcaggatatccaaaagtccatggctgcgttcaagaacctgtctgctcagtgtcaggaagtgaggaaaagaaaggaactagaactgcaaattttaactgaggctattagaaactgggaaggtgatgacatcaagaccctggggaatgtgacgtacatgtcccaggtgctaatccaatgtgctggaagcgaagaaaagaacgagagatacctcctcctgttccccaatgtactcctgatgctttctgcctctcctagaatgtccgggttcatttaccagggcaagctgccaactacgggcatgactattaccaaactggaggatagtgagaatcacaggaatgccttcgagataagcggaagtatgatagaacgaatattggtctcctgtaataaccagcaggaccttcaggagtgggtcgaacacctgcagaaacagacgaaggtgacgtcagttggaaatcctacaataaagcctcacagcgtgccctcccatacccttccctctcaccctgtgacccccagctcaaagcatgcagactctaagcctgctcccttaacaccagcataccatactctcccccatcccagccaccatggcaccccgcacactacaataaactgggggccattggaaccaccaaaaacacccaagccatggagtctaagttgtctgcggcctgcacctccccttcggccatctgcagccctttgttataaagaagatttatccaagtctcctaagacaatgaagaagctcttgccaaagcgcaagccagagcggaaacccagcgacgaggaattcgccagtagaaagtctactgcggcactggaagaggacgcgcaaattctcaaggttatcgaggcgtactgcacatctgctaagacgaggcaaactctcaacagctcttcccggaaggagtccgcccctcaggtgctgctgcctgaagaagaaaagatcattgtagaggaaaccaaaagcaatgggcagaccgtgattgaagaaaagtcattagtggatactgtgtacgcacttaaagacgaggttcaagaattgaggcaggataacaagaagatgaaaaaaagtctggaggaggaacagagggctaggaaggatctagaaaaattggtaaggaaggtgctcaagaacatgaatgacccggcatgggacgagactaacctgtag

SEQ ID NO: 273022 - DNA, 4814 bp, Artificial Sequence
  derived and/or modified sequence
atgaattccgccgagcaaaccgttacgtggctcatcactctgggggtgctggagtcgcccaaaaaaaccatctcggacccggagggctttctgcaggcgtcgctgaaggatggggtggtcctctgcaggctgctggagcgcctgctccccgggaccatcgagaaagtctaccccgagccccggagcgagagcgagtgcctgagcaacatccgcgagttcctgcgcggctgcggggcttccctgcggctggaggacatgaccgataatagcaacaatcaactggtagtaagagcaaagtttaacttccagcagaccaatgaggacgagctttccttctcaaaaggagacgtcatccatgtcacccgtgtggaagagggaggctggtgggagggcacactcaacggccggaccggctggttccccagcaactacgtgcgcgaggtcaaggccagcgagaagcctgtgtctcccaaatcaggaacactgaagagccctcccaaaggatttgatacgactgccataaacaaaagctattacaatgtggtgctacagaatattttagaaacagaaaatgaatattctaaagaacttcagactgtgctttcaacgtacctacggccattgcagaccagtgagaagttaagttcagcaaacatttcatatttaatgggaaatctagaagaaatatgttctttccagcaaatgctcgtacagtctttagaagaatgcaccaagttgcccgaagctcagcagagagtcggaggctgctttttaaacctgatgccacagatgaaaaccctgtacctcacgtattgtgccaatcacccttctgcagtgaatgtcctcacggaacacagtgaggagttgggggagttcatggagaccaaaggtgccagcagccctgggattctcgtgctgaccacgggcctgagcaaacccttcatgcgcctggataaataccctacgctgctcaaagagctcgagagacacatggaggattatcatacagatagacaagatattcaaaaatccatggctgccttcaaaaacctttcagcccaatgtcaagaagtccggaagaggaaagagcttgagctgcagatcctgacggaagccatccggaactgggagggcgatgacattaaaactctgggcaacgtcacttacatgtcccaggtcctgattcagtgtgccggaagtgaggaaaagaatgaaagatatcttctactcttcccaaatgttttgctaatgttgtctgccagtcctaggatgagtggctttatctatcagggaaagcttccaacgacaggaatgacaatcacaaagcttgaggacagtgaaaatcatagaaatgcatttgaaatatcagggagcatgattgagcggatattagtgtcgtgcaacaaccagcaggatctgcaggaatgggtggagcacctacagaagcaaacgaaggtcacgtctgtgggaaaccccaccataaagcctcattcagtgccatctcataccctcccctcccacccggtcactccgtccagcaagcacgcagacagcaagcccgcgccgctgacgcccgcctaccacacgctgccccacccctcccaccacggcaccccgcacaccaccatcaactggggacccctggagcctccgaaaacacccaagccctggagcctgagctgcctgcggcccgcgcctcccctccggccctcagctgctctctgctacaaggaggatcttagtaagagccctaagaccatgaaaaagctgctgcccaagcgcaaacctgaacggaagccttcagatgaggagttcgcgtcccggaaaagcacagctgctttggaagaagatgctcagattctgaaagtcattgaagcttactgcaccagcgccaaaacaaggcaaacactcaattcaagttcacgcaaagaatctgctccacaagttttgcttccagaagaagagaaaattatagtggaagaaactaaaagtaatggtcagacagtgatagaagaaaagagtcttgtggataccgtatatgcattaaaggatgaagttcaagaattaagacaggacaacaaaaagatgaagaaatctctagaggaagaacagagagcccgcaaagacctggagaagctggtgaggaaagtcctgaagaacatgaatgatcctgcctgggatgagaccaatctataagggatgtcctcagttctttctgttgaagaccagttctgaggtgaagctgggcacccctgacccaagtcggggtgcactcaggaccacagggcagggctgggtggggcgccaccttgctctctgtatatagaaaagctggagcttattctgcgaatggagacgatcaaaccatgactgatgaatccagacaggagggattgactctgaggacctgagctacatcaatccactctgtgaacatctcagttacctcattctgcaataagttcagtgactgactaaaagtcttgtttttccagactttgaattgaatatataaatattatatatacatgtttcttgtaaatatcccattttgaatgcatacctgtggtggttctgtccgggctaatccccatgctagaatgtcctttccagctacgtgaataagaagtcccatgcccgcatccaccggaagcagaagcctggtggatgcctggttcgttccgcagcaccagggcctccaccgtgctgtggcagcaccccccatgtcggtatttctaaataaccttatttatacctgcagagatacacttcagtcccattcagaagtcttctcttaaagcagcattacagtcccagacctgcgggtttctgagggcaacttgctggctgacagactcagtcttgacctcaaggaaggcccatacggcactgccgcatccacctagaggtgtttgctcttgtccgctgtctgagtactgtgattctcagatgagtttgctgcgttttgggaggacacagacggttctgtataggctagttcagtaacaacaaaatacactgttttgtcttccctcaaagagagatcttactagaacctgtaaatagaatgtattatttattataagtcactgcagctgatgaaaacagatggaggccatgctgcaggctgatactgatgggtggagttttgtcatcaggccagcctcatcccgaggtctcctccaccattggccgtagccagcaggcttcagtgctcaccgaaagtaaaatcccctccttcagcaagaataaagcaatatacaccttaggttccactaagtaacataggcataagcagggaacgtttcccccactgtgttccagtgcagaggagacgaagcctgtcctcaccgcggctcgctgggcccaggctggctctggaaagcctgtgcggtcctgggcaggaagcccggcccgtggagcaggttttcgttctgcttcagcaataaataagggtgaccacagggactttgcttttggtttcctttcctgtgaaaaggttggttttaaagtgagatacacttttccgtagaacaagtgttctatctttaaaaacccaaattgcagcaccgtggattactggtctcagaacaactcattgcgcatcagatttgactctctgattttctgtctattggccaaattgccctttaactgcacctgaatcctttgtgtactgatgcctttgagctgggcaccttgggagagtgttgtgttgctgtttacggttcttccttgcccttgctaattacagtctctggtgcccagcaagcccctttggcttccttccgtgactggtcacgttgtctgcctgggctcagcgtggacctgccccatgctgcagaacctggcctcacctggacttttcactagaattgccagcttcctcaacttagcagatcattcactcatgcgggcacaagcaaagatcaacactttcttttttggtaagcttgagttttacaagttattttttggtgatgcgtaagacattgcagtgggaaaccattcaacttgagtttattggagtttgctgttgtagcaggttttaactcaggaacaactcttgtctgatctctccgcccctctgccgggaggcgacattaactgtcctctcggagccggtagcgttgctgtccgagtccccaggacggatctcctgcagacctgccttaatgctcagatcgaagtatttcacaagaatacttgtgtttttaacagcccttcccctggacggtgcggccatgagggcctcatgttacggcattgccttttctttctgtggatccagtatcttcctcggctttttagggagcaggaaaaatgcgtctgagagcaactctttttaaaaacctgccctgttgtatataactgtgtctgtttcaccgtgtgacctcccaagggggtgggaacttgatataaacgtttaaaggggccacgatttgcccgagggttactcctttgctctcaccttgtatggatgaggagatgaagccatttcttatcctgtagatgtgaagcactttcagttttcagcgatgttggaatgtagcatcagaagctcgttccttcacactcagtggcgtctgtgcttgtccacatgcgctgggcgtctgggaccttgaatgcctgccctggttgtgtggactccttaatgccaatcatttcttcacttctctgggacacccagggcgcctgttgacaagtgtggagaaactcctaatttaaatgtcacagacaatgtcctagtgttgactactacaatgttgatgctacactgttgtaattattaaactgattatttttcttatgtc

SEQ ID NO: 273023 - protein, 646 aa, Artificial Sequence
  derived and/or modified sequence
MTDNSNNQLVVRAKFNFQQTNEDELSFSKGDVIHVTRVEEGGWWEGTLNGRTGWFPSNYVREVKASEKPVSPKSGTLKSPPKGFDTTAINKSYYNVVLQNILETENEYSKELQTVLSTYLRPLQTSEKLSSANISYLMGNLEEICSFQQMLVQSLEECTKLPEAQQRVGGCFLNLMPQMKTLYLTYCANHPSAVNVLTEHSEELGEFMETKGASSPGILVLTTGLSKPFMRLDKYPTLLKELERHMEDYHTDRQDIQKSMAAFKNLSAQCQEVRKRKELELQILTEAIRNWEGDDIKTLGNVTYMSQVLIQCAGSEEKNERYLLLFPNVLLMLSASPRMSGFIYQGKLPTTGMTITKLEDSENHRNAFEISGSMIERILVSCNNQQDLQEWVEHLQKQTKVTSVGNPTIKPHSVPSHTLPSHPVTPSSKHADSKPAPLTPAYHTLPHPSHHGTPHTTINWGPLEPPKTPKPWSLSCLRPAPPLRPSAALCYKEDLSKSPKTMKKLLPKRKPERKPSDEEFASRKSTAALEEDAQILKVIEAYCTSAKTRQTLNSSSRKESAPQVLLPEEEKIIVEETKSNGQTVIEEKSLVDTVYALKDEVQELRQDNKKMKKSLEEEQRARKDLEKLVRKVLKNMNDPAWDETNL

SEQ ID NO: 273024 - protein, 721 aa, Artificial Sequence
  derived and/or modified sequence
MKTFDANDLYQGQNFNKVLSSLVTLNKVTADIGLGSDSVCARPSSHRIKSFDSLGSQSLHTRTSKLFQGQYRSLDMTDNSNNQLVVRAKFNFQQTNEDELSFSKGDVIHVTRVEEGGWWEGTLNGRTGWFPSNYVREVKASEKPVSPKSGTLKSPPKGFDTTAINKSYYNVVLQNILETENEYSKELQTVLSTYLRPLQTSEKLSSANISYLMGNLEEICSFQQMLVQSLEECTKLPEAQQRVGGCFLNLMPQMKTLYLTYCANHPSAVNVLTEHSEELGEFMETKGASSPGILVLTTGLSKPFMRLDKYPTLLKELERHMEDYHTDRQDIQKSMAAFKNLSAQCQEVRKRKELELQILTEAIRNWEGDDIKTLGNVTYMSQVLIQCAGSEEKNERYLLLFPNVLLMLSASPRMSGFIYQGKLPTTGMTITKLEDSENHRNAFEISGSMIERILVSCNNQQDLQEWVEHLQKQTKVTSVGNPTIKPHSVPSHTLPSHPVTPSSKHADSKPAPLTPAYHTLPHPSHHGTPHTTINWGPLEPPKTPKPWSLSCLRPAPPLRPSAALCYKEDLSKSPKTMKKLLPKRKPERKPSDEEFASRKSTAALEEDAQILKVIEAYCTSAKTRQTLNSSSRKESAPQVLLPEEEKIIVEETKSNGQTVIEEKSLVDTVYALKDEVQELRQDNKKMKKSLEEEQRARKDLEKLVRKVLKNMNDPAWDETNL

SEQ ID NO: 273025 - DNA, 2166 bp, Artificial Sequence
  derived and/or modified sequence
atgaagaccttcgacgccaacgacctgtaccagggccagaacttcaacaaggtgctgagcagcctggtgaccctgaacaaggtgaccgccgacatcggcctgggcagcgacagcgtgtgcgccagacccagcagccacagaatcaagagcttcgacagcctgggcagccagagcctgcacaccagaaccagcaagctgttccagggccagtacagaagcctggacatgaccgacaacagcaacaaccagctggtggtgagagccaagttcaacttccagcagaccaacgaggacgagctgagcttcagcaagggcgacgtgatccacgtgaccagagtggaggagggcggctggtgggagggcaccctgaacggcagaaccggctggttccccagcaactacgtgagagaggtgaaggccagcgagaagcccgtgagccccaagagcggcaccctgaagagcccccccaagggcttcgacaccaccgccatcaacaagagctactacaacgtggtgctgcagaacatcctggagaccgagaacgagtacagcaaggagctgcagaccgtgctgagcacctacctgagacccctgcagaccagcgagaagctgagcagcgccaacatcagctacctgatgggcaacctggaggagatctgcagcttccagcagatgctggtgcagagcctggaggagtgcaccaagctgcccgaggcccagcagagagtgggcggctgcttcctgaacctgatgccccagatgaagaccctgtacctgacctactgcgccaaccaccccagcgccgtgaacgtgctgaccgagcacagcgaggagctgggcgagttcatggagaccaagggcgccagcagccccggcatcctggtgctgaccaccggcctgagcaagcccttcatgagactggacaagtaccccaccctgctgaaggagctggagagacacatggaggactaccacaccgacagacaggacatccagaagagcatggccgccttcaagaacctgagcgcccagtgccaggaggtgagaaagagaaaggagctggagctgcagatcctgaccgaggccatcagaaactgggagggcgacgacatcaagaccctgggcaacgtgacctacatgagccaggtgctgatccagtgcgccggcagcgaggagaagaacgagagatacctgctgctgttccccaacgtgctgctgatgctgagcgccagccccagaatgagcggcttcatctaccagggcaagctgcccaccaccggcatgaccatcaccaagctggaggacagcgagaaccacagaaacgccttcgagatcagcggcagcatgatcgagagaatcctggtgagctgcaacaaccagcaggacctgcaggagtgggtggagcacctgcagaagcagaccaaggtgaccagcgtgggcaaccccaccatcaagccccacagcgtgcccagccacaccctgcccagccaccccgtgacccccagcagcaagcacgccgacagcaagcccgcccccctgacccccgcctaccacaccctgccccaccccagccaccacggcaccccccacaccaccatcaactggggccccctggagccccccaagacccccaagccctggagcctgagctgcctgagacccgccccccccctgagacccagcgccgccctgtgctacaaggaggacctgagcaagagccccaagaccatgaagaagctgctgcccaagagaaagcccgagagaaagcccagcgacgaggagttcgccagcagaaagagcaccgccgccctggaggaggacgcccagatcctgaaggtgatcgaggcctactgcaccagcgccaagaccagacagaccctgaacagcagcagcagaaaggagagcgccccccaggtgctgctgcccgaggaggagaagatcatcgtggaggagaccaagagcaacggccagaccgtgatcgaggagaagagcctggtggacaccgtgtacgccctgaaggacgaggtgcaggagctgagacaggacaacaagaagatgaagaagagcctggaggaggagcagagagccagaaaggacctggagaagctggtgagaaaggtgctgaagaacatgaacgaccccgcctgggacgagaccaacctgtag

SEQ ID NO: 273026 - DNA, 2166 bp, Artificial Sequence
  derived and/or modified sequence
atgaagacctttgacgccaatgatctgtatcagggtcagaatttcaataaggttctttcctctctggtgacccttaacaaagtgacagccgacatcggtttagggagtgacagtgtgtgcgcccgcccttcaagccataggatcaagagttttgatagtctcgggagccagagcttacacactagaacctctaagttattccagggccaataccgttctttggatatgactgataacagtaacaatcagctcgtggttagggccaaattcaatttccagcagacaaatgaagacgaattgtctttttcaaagggcgacgttatccacgtaacacgggtggaagaaggaggatggtgggagggtaccttgaacggtcgcaccgggtggttccccagcaactacgtgagggaggtcaaggctagtgaaaaacctgttagccccaaatctggtacactgaagtctccaccaaagggcttcgacacaaccgctattaataaatcctattacaatgtggtactgcagaacatcttagaaacagagaatgagtatagcaaagaattacagacagtgttgtcaacatacttgcggcccctgcagacctcggagaagctgtccagcgcaaacataagctacctgatgggtaacctcgaggagatttgtagctttcagcaaatgttggtacagagtctcgaggagtgtactaagttgcccgaggctcagcaaagggtgggaggctgcttcctgaatctcatgcctcagatgaagacactctacctgacctactgcgccaatcacccatcggctgtcaacgtactgaccgaacattctgaagagctcggagagttcatggaaaccaaaggtgcttcctcccctggaatcttagttctgacaacaggcctgtccaagccttttatgcgcttggacaagtatcccacgctgctaaaagaattggaaaggcacatggaagactaccacactgacagacaagacatccagaagtctatggcggcatttaagaatctgtccgcacagtgccaagaagtgcgtaaacgcaaagagctggaactgcagatcctgacagaggctatcagaaactgggagggcgacgacatcaagacacttgggaacgtgacatacatgtcccaggttctgattcagtgtgccgggagcgaagaaaaaaacgagcggtacctcctgctgttccctaacgtactgctgatgctgagtgcctccccacggatgtcggggttcatctatcagggaaaacttccaacgacagggatgactatcactaagctagaagatagcgaaaaccacaggaacgctttcgagatcagtggttcaatgattgagcgaattctcgtatcgtgcaataatcagcaagatctccaggagtgggtagagcatctgcagaaacagactaaggtcacaagcgtgggcaaccccacaatcaaaccacacagtgtgccaagccatacattgcccagtcaccctgtcaccccttcctccaaacacgccgacagtaagccggcaccactcactcccgcttaccatacgctaccacacccttcccaccacggcactccacacactaccatcaattggggcccactcgaacccccaaaaactcccaagccgtggagtctatcatgcctaagacctgctccccccctccggccctctgccgccttatgctataaagaggacctgtctaaaagcccaaagaccatgaaaaaattgctccctaagcgaaagcctgagcggaaaccatcagacgaggagtttgcctcgcggaagtccaccgcagctctcgaggaggacgcccagatactgaaagtcattgaagcctactgtacaagcgccaaaacccgacaaactctcaacagttctagtcggaaagaatccgcccctcaggtattattacccgaagaggaaaagatcattgtggaagaaactaagtcgaatggccaaaccgtcatcgaagagaagagcctggttgatacggtgtacgcgctgaaagatgaggtccaagagttgcgacaagacaacaaaaagatgaaaaagtccttggaggaggaacagcgtgcccgcaaggatctagaaaagcttgtacgcaaagtgttgaaaaacatgaatgacccggcctgggatgagacaaacctttag

SEQ ID NO: 273027 - DNA, 2166 bp, Artificial Sequence
  derived and/or modified sequence
atgaagacctttgatgccaatgacctgtaccagggccagaacttcaacaaggtgctgagcagcctggtgaccctgaacaaggtgacagctgacatcggcctgggcagtgacagcgtgtgtgcccggcccagcagccaccgcatcaagagctttgacagcctgggcagccagagcctgcacaccaggaccagcaagctgttccagggccagtaccgcagcctggacatgacagacaacagcaacaaccagctggtggtgcgggccaagttcaacttccagcagaccaatgaagatgagctgtccttcagcaaaggagatgtgattcatgtgaccagggtggaggagggcggctggtgggagggcaccctgaatggccgcacaggctggttccccagcaactacgtgcgggaggtgaaggccagcgagaagcctgtgagccccaagagcggcaccctgaagagcccccccaagggctttgacaccacagccatcaacaagagctactacaacgtggtgctgcagaacatcctggagacagaaaatgagtacagcaaggagctgcagacagtgctgagcacctacctgcggcccctgcagaccagcgagaagctgagcagcgccaacatctcctacctgatgggcaacctggaggagatctgcagcttccagcagatgctggtgcagagcctggaggagtgcaccaagctgcctgaggcccagcagagggtgggcggctgcttcctgaacctgatgccccagatgaagaccctgtacctgacctactgtgccaaccaccccagcgctgtgaatgtgctgacagagcacagcgaggagctgggggagttcatggagaccaagggggccagcagccctggcatcctggtgctgaccaccggcctgagcaagcccttcatgaggctggacaagtaccccaccctgctgaaggagctggagcggcacatggaggactaccacacagaccggcaggacatccagaagtccatggccgccttcaagaacctgagcgcccagtgccaggaggtgaggaagaggaaggagctggagctgcagatcctgacagaggccatccggaactgggagggagatgacatcaagaccctgggcaatgtgacctacatgagccaggtgctgatccagtgtgccggcagcgaggagaagaatgaaagatacctgctgctcttccccaacgtgctgctgatgctgagcgccagccccaggatgagcggcttcatctaccagggcaagctgcccaccaccggcatgaccatcaccaagctggaggacagcgagaaccacagaaatgcctttgagatcagcggctccatgattgaaagaatcctggtgtcctgcaacaaccagcaggacctgcaggagtgggtggagcacctgcagaagcagaccaaggtgacctctgtgggcaaccccaccatcaagccccacagcgtgcccagccacaccctgcccagccaccctgtgacccccagcagcaagcacgccgacagcaagccagcccccctgaccccagcctaccacaccctgccccaccccagccaccacggcaccccccacaccaccatcaactggggccccctggagccccccaagacccccaagccctggagcctgagctgcctgcggcctgccccacccctgcggcccagcgctgccctgtgctacaaggaggacctgagcaagagccccaagaccatgaagaagctgctgcccaagaggaagccagagaggaagcccagtgatgaggagtttgccagcaggaagagcacagctgccctggaggaggatgcccagatcctgaaggtgattgaggcctactgcaccagcgccaagacccggcagaccctgaacagcagcagcaggaaggagagcgccccccaggtgctgctgcctgaggaggagaagatcatcgtggaggagaccaagagcaatggccagaccgtcatcgaggagaagagcctggtggacacagtgtatgccctgaaggatgaggtgcaggagctgcggcaggacaacaagaagatgaagaagagcctggaggaggagcagagggccaggaaggacctggagaagctggtgaggaaggtgctgaagaacatgaatgaccctgcctgggatgagaccaacctgtag

SEQ ID NO: 273028 - DNA, 2166 bp, Artificial Sequence
  derived and/or modified sequence
atgaagaccttcgacgccaacgacctgtaccagggccagaacttcaacaaggtactttcttccctggtgaccctgaataaagttaccgccgatatagggctgggcagcgattccgtgtgtgcgcggcctagcagtcatcgtatcaagagtttcgacagcctcggatcccaaagcttgcacactcgcacatccaaactgttccaaggccagtataggagtctggacatgactgacaactctaacaatcaactcgtggtgagggcgaaatttaactttcagcagacaaacgaggatgagctctcttttagcaagggcgacgtcattcacgtgactcgagtggaggagggagggtggtgggagggaaccctgaatgggagaaccggctggtttccgtccaactatgtcagggaggttaaagcttcagaaaagcctgtgagccctaagagcggcacgctgaaatctcctcccaagggatttgacactaccgcaattaataaatcctactacaatgtcgttcttcagaatatcctggagactgaaaatgagtattccaaggagctccagaccgtgctcagcacatacctgaggcctttacagacttctgagaaactgtcctccgccaatatatcctacctgatgggaaatttagaagagatctgcagctttcagcagatgctagtccagagcctggaagaatgcactaagctgccagaggcgcaacagcgagtggggggttgcttcctgaacctgatgccacaaatgaagacgttgtatctgacttattgcgcaaaccacccctcagctgtcaacgtgctaacagaacactccgaagagctcggggaatttatggagactaagggtgcctcctccccagggatcttggtgctaacaaccggtctgagcaaaccctttatgagactcgataagtaccctaccctgttgaaggaactggaacgccacatggaggactatcatacagacagacaggacatccaaaaatcaatggctgcctttaaaaatctcagtgcgcaatgtcaagaagtgcgtaagcgtaaggagctggagttgcagattcttacagaggccattcgaaattgggaaggcgatgacattaagaccctggggaatgtgacgtatatgagtcaggtactcattcagtgcgccgggtcagaggaaaagaatgagaggtatcttctcctgtttcccaacgtcctccttatgctgtctgcaagcccccggatgtcgggttttatttatcaaggcaaattacccactacagggatgaccattaccaagctggaggattctgaaaaccaccggaatgcctttgaaatctctgggagcatgattgaaaggatcctagttagttgcaataaccagcaggacttgcaggaatgggtggagcacctacagaaacagacaaaagtgacatctgtggggaatcctactataaaacctcattccgttccctcccatactttaccttcacacccggtcacacctagctcaaagcacgcagattccaagcccgccccgctcacacctgcttaccacactttgccgcacccttcccaccacggaaccccacatacaacgattaattgggggcccctggaacctcccaagactccaaaaccctggtcactgagttgtctgcggccagcacctcctctccgtccgagcgccgcactgtgttacaaggaagacttatcaaaatcccctaagaccatgaagaagttgcttccaaaaagaaaacctgagcgcaaaccaagtgatgaagagtttgcatctcgtaagtccacagccgccttggaggaagatgcccagatactcaaggtgattgaggcatactgcacgtctgcaaagaccaggcaaaccctgaatagcagctccagaaaggaatctgctccacaggttctgttgccggaagaggaaaagataatagtcgaagagaccaagagcaacggtcagaccgtgatcgaggaaaaatcattggtggacacagtctatgccctgaaggacgaggttcaggagctgcgccaggataacaagaagatgaaaaaaagtcttgaggaggaacagcgcgcaagaaaggacctggagaaactcgtgaggaaagtgttaaagaacatgaatgatccggcttgggacgagaccaatctgtag

SEQ ID NO: 273029 - DNA, 2166 bp, Artificial Sequence
  derived and/or modified sequence
atgaaaactttcgatgctaatgatctttaccagggccagaatttcaataaagtgctgtcaagtttagtcacactcaacaaagttacagcagatatcggcctgggtagcgactcggtgtgtgctcgcccaagtagtcacagaattaagtcattcgattctctgggttctcagtcactccacacccgcacaagtaagctcttccagggtcagtatcgcagcctggacatgactgataattccaacaaccaactggttgtgcgggcaaagtttaactttcaacaaacgaatgaggacgagctatccttttccaaaggggacgtaattcacgtgactcgtgtcgaggagggcggatggtgggagggcactctaaatgggaggactgggtggttccctagcaactacgttagggaagtcaaagctagtgaaaaacctgtctccccgaagtccggtacactgaagtctcccccaaagggctttgatactaccgccatcaacaaatcttattacaacgtcgtgttgcaaaacatcctggagaccgaaaacgaatacagtaaggaactgcagacagtgctcagcacctatctccgcccattacagaccagcgaaaagctgtcctccgcaaacatcagctaccttatgggcaatctggaggagatctgcagctttcagcagatgctggttcaatccttggaggagtgcacgaaactgcctgaggcccagcagcgagtgggaggctgctttctgaatttgatgcctcagatgaaaacactgtacctgacctattgtgcaaaccacccgtctgcggttaacgtcttaactgagcactccgaggagttgggcgagtttatggagacaaagggagcgagctctcctgggatcctggtcctgacaacaggcctatcgaaacctttcatgcgcctcgacaaatatcccactctgttgaaggagctcgagaggcacatggaagactaccacactgatagacaggacattcaaaaatcaatggcagcattcaagaatctgtctgcccagtgtcaagaagtaaggaagagaaaagaactagaattacagatactgaccgaggcaattcgcaactgggagggcgatgacatcaaaactctaggtaatgtgacatacatgtcacaggtgttgatacaatgcgctggcagtgaggagaagaacgagaggtatctgctgctgttccctaacgtgctgctgatgctgagcgccagcccaaggatgtccgggtttatataccagggtaaattgcccacaacagggatgaccatcacaaagttggaggattccgagaaccaccggaatgcgttcgaaatttcgggatccatgattgagaggatactcgtgtcatgtaacaaccagcaggacctgcaggagtgggtggagcatctccagaagcagaccaaggtgacgagcgtgggcaatcccaccattaagcctcattcggtaccatcccacaccttgccatcacacccagtgactccatcatcaaagcacgccgacagcaagcccgcacccctcaccccagcataccacactctgccgcatccctcccaccacggaacgccacatactactattaactggggccctcttgaaccccctaagacccccaagccttggtccctttcttgcttgcgaccagctccgcctctgagaccttccgccgcactgtgctataaggaagatttaagtaaatctccaaaaaccatgaaaaagcttctgcctaagcggaagccagagcgtaaaccttccgatgaggagttcgccagtagaaagtcaacagcagcactggaagaagatgcccaaatactgaaggtgattgaagcatattgtaccagtgccaaaacacgtcagactctgaactccagctcccggaaagaaagcgcccctcaggtgctgctccctgaagaagaaaagataatagtagaggagacaaaaagtaacggtcaaacagtgatcgaggagaagtctctggtcgatactgtctatgccctgaaggatgaggtccaggagttgcgccaagataacaagaagatgaagaagagcctggaagaggaacaaagggccaggaaggatctcgaaaagctagtgcgtaaggttctcaaaaatatgaatgatcccgcttgggacgagacaaatctctag

SEQ ID NO: 273030 - DNA, 2400 bp, Artificial Sequence
  derived and/or modified sequence
cacatcctgttattctgggttttgtgacttgctgccttgccactatgaagacgtttgatgcaaatgatttgtatcaggggcagaattttaacaaggtcctcagttccttagtgactctaaataaagtaacagcagacatcgggctggggagtgactccgtgtgtgcccggccctcgtctcaccgcataaagtcttttgactcccttggatcacagtctttgcacactcggacttcaaaactgttccagggccagtatcggagtttggacatgaccgataatagcaacaatcaactggtagtaagagcaaagtttaacttccagcagaccaatgaggacgagctttccttctcaaaaggagacgtcatccatgtcacccgtgtggaagagggaggctggtgggagggcacactcaacggccggaccggctggttccccagcaactacgtgcgcgaggtcaaggccagcgagaagcctgtgtctcccaaatcaggaacactgaagagccctcccaaaggatttgatacgactgccataaacaaaagctattacaatgtggtgctacagaatattttagaaacagaaaatgaatattctaaagaacttcagactgtgctttcaacgtacctacggccattgcagaccagtgagaagttaagttcagcaaacatttcatatttaatgggaaatctagaagaaatatgttctttccagcaaatgctcgtacagtctttagaagaatgcaccaagttgcccgaagctcagcagagagtcggaggctgctttttaaacctgatgccacagatgaaaaccctgtacctcacgtattgtgccaatcacccttctgcagtgaatgtcctcacggaacacagtgaggagttgggggagttcatggagaccaaaggtgccagcagccctgggattctcgtgctgaccacgggcctgagcaaacccttcatgcgcctggataaataccctacgctgctcaaagagctcgagagacacatggaggattatcatacagatagacaagatattcaaaaatccatggctgccttcaaaaacctttcagcccaatgtcaagaagtccggaagaggaaagagcttgagctgcagatcctgacggaagccatccggaactgggagggcgatgacattaaaactctgggcaacgtcacttacatgtcccaggtcctgattcagtgtgccggaagtgaggaaaagaatgaaagatatcttctactcttcccaaatgttttgctaatgttgtctgccagtcctaggatgagtggctttatctatcagggaaagcttccaacgacaggaatgacaatcacaaagcttgaggacagtgaaaatcatagaaatgcatttgaaatatcagggagcatgattgagcggatattagtgtcgtgcaacaaccagcaggatctgcaggaatgggtggagcacctacagaagcaaacgaaggtcacgtctgtgggaaaccccaccataaagcctcattcagtgccatctcataccctcccctcccacccggtcactccgtccagcaagcacgcagacagcaagcccgcgccgctgacgcccgcctaccacacgctgccccacccctcccaccacggcaccccgcacaccaccatcaactggggacccctggagcctccgaaaacacccaagccctggagcctgagctgcctgcggcccgcgcctcccctccggccctcagctgctctctgctacaaggaggatcttagtaagagccctaagaccatgaaaaagctgctgcccaagcgcaaacctgaacggaagccttcagatgaggagttcgcgtcccggaaaagcacagctgctttggaagaagatgctcagattctgaaagtcattgaagcttactgcaccagcgccaaaacaaggcaaacactcaattcaagttcacgcaaagaatctgctccacaagttttgcttccagaagaagagaaaattatagtggaagaaactaaaagtaatggtcagacagtgatagaagaaaagagtcttgtggataccgtatatgcattaaaggatgaagttcaagaattaagacaggacaacaaaaagatgaagaaatctctagaggaagaacagagagcccgcaaagacctggagaagctggtgaggaaagtcctgaagaacatgaatgatcctgcctgggatgagaccaatctataagggatgtcctcagttctttctgttgaagaccagttctgaggtgaagctgggcacccctgacccaagtcggggtgcactcaggaccacagggcagggctgggtggggcgccaccttgctctctgtatatagaaaagctggagcttattctgcgaatggagacgatcaaaccatgactgatgaatccagaca

SEQ ID NO: 273031 - DNA, 4921 bp, Artificial Sequence
  derived and/or modified sequence
gatggtggaaagtgaggagaagcaaaaagacgactacttctttccccatttcccggtctggtctttttggggtctactacgtagaggtgcatcagccagcgctaccatggaggcaggaggcattcttttgctctcgtacgtttgatgcaaatgatttgtatcaggggcagaattttaacaaggtcctcagttccttagtgactctaaataaagtaacagcagacatcgggctggggagtgactccgtgtgtgcccggccctcgtctcaccgcataaagtcttttgactcccttggatcacagtctttgcacactcggacttcaaaactgttccagggccagtatcggagtttggacatgaccgataatagcaacaatcaactggtagtaagagcaaagtttaacttccagcagaccaatgaggacgagctttccttctcaaaaggagacgtcatccatgtcacccgtgtggaagagggaggctggtgggagggcacactcaacggccggaccggctggttccccagcaactacgtgcgcgaggtcaaggccagcgagaagcctgtgtctcccaaatcaggaacactgaagagccctcccaaaggatttgatacgactgccataaacaaaagctattacaatgtggtgctacagaatattttagaaacagaaaatgaatattctaaagaacttcagactgtgctttcaacgtacctacggccattgcagaccagtgagaagttaagttcagcaaacatttcatatttaatgggaaatctagaagaaatatgttctttccagcaaatgctcgtacagtctttagaagaatgcaccaagttgcccgaagctcagcagagagtcggaggctgctttttaaacctgatgccacagatgaaaaccctgtacctcacgtattgtgccaatcacccttctgcagtgaatgtcctcacggaacacagtgaggagttgggggagttcatggagaccaaaggtgccagcagccctgggattctcgtgctgaccacgggcctgagcaaacccttcatgcgcctggataaataccctacgctgctcaaagagctcgagagacacatggaggattatcatacagatagacaagatattcaaaaatccatggctgccttcaaaaacctttcagcccaatgtcaagaagtccggaagaggaaagagcttgagctgcagatcctgacggaagccatccggaactgggagggcgatgacattaaaactctgggcaacgtcacttacatgtcccaggtcctgattcagtgtgccggaagtgaggaaaagaatgaaagatatcttctactcttcccaaatgttttgctaatgttgtctgccagtcctaggatgagtggctttatctatcagggaaagcttccaacgacaggaatgacaatcacaaagcttgaggacagtgaaaatcatagaaatgcatttgaaatatcagggagcatgattgagcggatattagtgtcgtgcaacaaccagcaggatctgcaggaatgggtggagcacctacagaagcaaacgaaggtcacgtctgtgggaaaccccaccataaagcctcattcagtgccatctcataccctcccctcccacccggtcactccgtccagcaagcacgcagacagcaagcccgcgccgctgacgcccgcctaccacacgctgccccacccctcccaccacggcaccccgcacaccaccatcaactggggacccctggagcctccgaaaacacccaagccctggagcctgagctgcctgcggcccgcgcctcccctccggccctcagctgctctctgctacaaggaggatcttagtaagagccctaagaccatgaaaaagctgctgcccaagcgcaaacctgaacggaagccttcagatgaggagttcgcgtcccggaaaagcacagctgctttggaagaagatgctcagattctgaaagtcattgaagcttactgcaccagcgccaaaacaaggcaaacactcaattcaagttcacgcaaagaatctgctccacaagttttgcttccagaagaagagaaaattatagtggaagaaactaaaagtaatggtcagacagtgatagaagaaaagagtcttgtggataccgtatatgcattaaaggatgaagttcaagaattaagacaggacaacaaaaagatgaagaaatctctagaggaagaacagagagcccgcaaagacctggagaagctggtgaggaaagtcctgaagaacatgaatgatcctgcctgggatgagaccaatctataagggatgtcctcagttctttctgttgaagaccagttctgaggtgaagctgggcacccctgacccaagtcggggtgcactcaggaccacagggcagggctgggtggggcgccaccttgctctctgtatatagaaaagctggagcttattctgcgaatggagacgatcaaaccatgactgatgaatccagacaggagggattgactctgaggacctgagctacatcaatccactctgtgaacatctcagttacctcattctgcaataagttcagtgactgactaaaagtcttgtttttccagactttgaattgaatatataaatattatatatacatgtttcttgtaaatatcccattttgaatgcatacctgtggtggttctgtccgggctaatccccatgctagaatgtcctttccagctacgtgaataagaagtcccatgcccgcatccaccggaagcagaagcctggtggatgcctggttcgttccgcagcaccagggcctccaccgtgctgtggcagcaccccccatgtcggtatttctaaataaccttatttatacctgcagagatacacttcagtcccattcagaagtcttctcttaaagcagcattacagtcccagacctgcgggtttctgagggcaacttgctggctgacagactcagtcttgacctcaaggaaggcccatacggcactgccgcatccacctagaggtgtttgctcttgtccgctgtctgagtactgtgattctcagatgagtttgctgcgttttgggaggacacagacggttctgtataggctagttcagtaacaacaaaatacactgttttgtcttccctcaaagagagatcttactagaacctgtaaatagaatgtattatttattataagtcactgcagctgatgaaaacagatggaggccatgctgcaggctgatactgatgggtggagttttgtcatcaggccagcctcatcccgaggtctcctccaccattggccgtagccagcaggcttcagtgctcaccgaaagtaaaatcccctccttcagcaagaataaagcaatatacaccttaggttccactaagtaacataggcataagcagggaacgtttcccccactgtgttccagtgcagaggagacgaagcctgtcctcaccgcggctcgctgggcccaggctggctctggaaagcctgtgcggtcctgggcaggaagcccggcccgtggagcaggttttcgttctgcttcagcaataaataagggtgaccacagggactttgcttttggtttcctttcctgtgaaaaggttggttttaaagtgagatacacttttccgtagaacaagtgttctatctttaaaaacccaaattgcagcaccgtggattactggtctcagaacaactcattgcgcatcagatttgactctctgattttctgtctattggccaaattgccctttaactgcacctgaatcctttgtgtactgatgcctttgagctgggcaccttgggagagtgttgtgttgctgtttacggttcttccttgcccttgctaattacagtctctggtgcccagcaagcccctttggcttccttccgtgactggtcacgttgtctgcctgggctcagcgtggacctgccccatgctgcagaacctggcctcacctggacttttcactagaattgccagcttcctcaacttagcagatcattcactcatgcgggcacaagcaaagatcaacactttcttttttggtaagcttgagttttacaagttattttttggtgatgcgtaagacattgcagtgggaaaccattcaacttgagtttattggagtttgctgttgtagcaggttttaactcaggaacaactcttgtctgatctctccgcccctctgccgggaggcgacattaactgtcctctcggagccggtagcgttgctgtccgagtccccaggacggatctcctgcagacctgccttaatgctcagatcgaagtatttcacaagaatacttgtgtttttaacagcccttcccctggacggtgcggccatgagggcctcatgttacggcattgccttttctttctgtggatccagtatcttcctcggctttttagggagcaggaaaaatgcgtctgagagcaactctttttaaaaacctgccctgttgtatataactgtgtctgtttcaccgtgtgacctcccaagggggtgggaacttgatataaacgtttaaaggggccacgatttgcccgagggttactcctttgctctcaccttgtatggatgaggagatgaagccatttcttatcctgtagatgtgaagcactttcagttttcagcgatgttggaatgtagcatcagaagctcgttccttcacactcagtggcgtctgtgcttgtccacatgcgctgggcgtctgggaccttgaatgcctgccctggttgtgtggactccttaatgccaatcatttcttcacttctctgggacacccagggcgcctgttgacaagtgtggagaaactcctaatttaaatgtcacagacaatgtcctagtgttgactactacaatgttgatgctacactgttgtaattattaaactgattatttttcttatgtcacagaa

SEQ ID NO: 273032 - protein, 186 aa, Artificial Sequence
  derived and/or modified sequence
MNLPHLMSLASHLASHGFFCLRFTCKGLNIVHRIKAYKSVLNYLKTSGEYKLAGVFLGGRSMGSRAAASVMCHIEPDDGDDFVRGLICISYPLHHPKQQHKLRDEDLFRLKEPVLFVSGSADEMCEKNLLEKVAQKMQAPHKIHWIEKANHSMAVKGRSTNDVFKEINTQILFWIQEITEMDKKCH

SEQ ID NO: 273033 - protein, 227 aa, Artificial Sequence
  derived and/or modified sequence
MSHTEVKLKIPFGNKLLDAVCLVPNKSLTYGIILTHGASGDMNLPHLMSLASHLASHGFFCLRFTCKGLNIVHRIKAYKSVLNYLKTSGEYKLAGVFLGGRSMGSRAAASVMCHIEPDDGDDFVRGLICISYPLHHPKQQHKLRDEDLFRLKEPVLFVSGSADEMCEKNLLEKVAQKMQAPHKIHWIEKANHSMAVKGRSTNDVFKEINTQILFWIQEITEMDKKCH

SEQ ID NO: 273034 - DNA, 1689 bp, Artificial Sequence
  derived and/or modified sequence
ccaaccctgcacctggccctctaaccaattctgagtgcccgtagaaaaatgtacatgtaaagacaccagattttagggaagtaattctaaatgtttattttagctactgaatgtgttcattcatagtttttgtgtcatatccatgtctgccaactcacctttcacaacagaatcttcttttcagggagatgtcctttgcttctcagatgtaaatgcactttaagtttgttattcaacagtgaaaatgagtcatacagaggtaatattttcgtatgttctgcatcttcagggttcctggttttttgtttgtttgtaattatgtggcttcagagtaattttattttcaactttcactgtgggaggcagtatagcataagtggttaagagcgaggaatctagagcagactaccctgagtttaaatcctagctagcggctatataaccttgggcaagttacttaatctgctgtgccttatctataaaatggggataatgatagtgcttgcctcacagaattgttagaaaagtgaaataagttaatacatataaagcacttataataatacccgacacagtaagcacttaactactattattaatatcactactttttatttggaggctatgacttgaattatgagcctcacagagcaaacatatatatagctgttcagttgtcttaataggcaagaaagtaatttttgatccctttattctcttgaattccaggttaaattaaaaataccttttggaaataaattactagatgctgtttgtttggtacctaacaagagcttaacatatggaataattcttacacatggagcatcaggagatatgaatcttcctcatttgatgtcactggcatcccatcttgcatctcatgggtttttctgcctgagatttacctgtaaaggccttaatattgtacatagaattaaggcgtataaatcagttttgaattacctgaagacatcaggagaatacaaacttgcaggtgtttttcttggaggtcgttcaatgggctcaagagcagctgcttctgtaatgtgtcacattgagccagatgatggtgatgattttgttcggggtctcatttgtatttcttacccactgcaccatccaaagcagcagcataaactcagagatgaagacctctttcgtttaaaagagcctgtactgtttgtgtcaggctcagcagatgaaatgtgtgaaaagaacttgttggagaaagtggcacagaaaatgcaagctccccataaaatccactggattgagaaggcaaatcattccatggcagtgaaaggacggtcgacaaatgatgttttcaaagaaataaatacacagattttgttttggatccaagaaattactgaaatggacaagaaatgtcattagttaaaagccatgttatcttgagtacacatacagttaatttgataaagaagagtatgcctctcagcattgtgagatatatttcagactaatttgatgttctttaatgttcccttatttttgaaacacgttttaaatgtgaaattaatgtccttcacaaaatgtcttttgaaagcactgttacagttgtataaagatgatgtaaaaatattgaaggtggtctacatataatttattttcattagtatagttaagttttgaaaaaaattaaacatctgaattttgttacaaaaa

SEQ ID NO: 273035 - DNA, 1038 bp, Artificial Sequence
  derived and/or modified sequence
gtcgcttcgagcgcgctagtcagctccctgaagggagtgacggcggttgggtgcccgcggccacttttgccttcccgggttaaattaaaaataccttttggaaataaattactagatgctgtttgtttggtacctaacaagagcttaacatatggaataattcttacacatggagcatcaggagatatgaatcttcctcatttgatgtcactggcatcccatcttgcatctcatgggtttttctgcctgagatttacctgtaaaggccttaatattgtacatagaattaaggcgtataaatcagttttgaattacctgaagacatcaggagaatacaaacttgcaggtgtttttcttggaggtcgttcaatgggctcaagagcagctgcttctgtaatgtgtcacattgagccagatgatggtgatgattttgttcggggtctcatttgtatttcttacccactgcaccatccaaagcagcagcataaactcagagatgaagacctctttcgtttaaaagagcctgtactgtttgtgtcaggctcagcagatgaaatgtgtgaaaagaacttgttggagaaagtggcacagaaaatgcaagctccccataaaatccactggattgagaaggcaaatcattccatggcagtgaaaggacggtcgacaaatgatgttttcaaagaaataaatacacagattttgttttggatccaagaaattactgaaatggacaagaaatgtcattagttaaaagccatgttatcttgagtacacatacagttaatttgataaagaagagtatgcctctcagcattgtgagatatatttcagactaatttgatgttctttaatgttcccttatttttgaaacacgttttaaatgtgaaattaatgtccttcacaaaatgtcttttgaaagcactgttacagttgtataaagatgatgtaaaaatattgaaggtggtctacatataatttattttcattagtatagttaagttttgaaaaaaattaaacatctgaattttgttacaaaaa

SEQ ID NO: 273036 - DNA, 1165 bp, Artificial Sequence
  derived and/or modified sequence
gcctgcgcgcgcgtgcgtcgtagccgaacgctgtggcggggcaggcgaggcggtcgcttcgagcgcgctagtcagctccctgaagggagtgacggcggttgggtgcccgcggccacttttgccttcccggggagatgtcctttgcttctcagatgtaaatgcactttaagtttgttattcaacagtgaaaatgagtcatacagaggttaaattaaaaataccttttggaaataaattactagatgctgtttgtttggtacctaacaagagcttaacatatggaataattcttacacatggagcatcaggagatatgaatcttcctcatttgatgtcactggcatcccatcttgcatctcatgggtttttctgcctgagatttacctgtaaaggccttaatattgtacatagaattaaggcgtataaatcagttttgaattacctgaagacatcaggagaatacaaacttgcaggtgtttttcttggaggtcgttcaatgggctcaagagcagctgcttctgtaatgtgtcacattgagccagatgatggtgatgattttgttcggggtctcatttgtatttcttacccactgcaccatccaaagcagcagcataaactcagagatgaagacctctttcgtttaaaagagcctgtactgtttgtgtcaggctcagcagatgaaatgtgtgaaaagaacttgttggagaaagtggcacagaaaatgcaagctccccataaaatccactggattgagaaggcaaatcattccatggcagtgaaaggacggtcgacaaatgatgttttcaaagaaataaatacacagattttgttttggatccaagaaattactgaaatggacaagaaatgtcattagttaaaagccatgttatcttgagtacacatacagttaatttgataaagaagagtatgcctctcagcattgtgagatatatttcagactaatttgatgttctttaatgttcccttatttttgaaacacgttttaaatgtgaaattaatgtccttcacaaaatgtcttttgaaagcactgttacagttgtataaagatgatgtaaaaatattgaaggtggtctacatataatttattttcattagtatagttaagttttgaaaaaaattaaacatctgaattttgttacaaaaa

SEQ ID NO: 273037 - DNA, 684 bp, Artificial Sequence
  derived and/or modified sequence
atgagccacaccgaggtgaagctgaagatccccttcggcaacaagctgctggacgccgtgtgcctggtgcccaacaagagcctgacctacggcatcatcctgacccacggcgccagcggcgacatgaacctgccccacctgatgagcctggccagccacctggccagccacggcttcttctgcctgagattcacctgcaagggcctgaacatcgtgcacagaatcaaggcctacaagagcgtgctgaactacctgaagaccagcggcgagtacaagctggccggcgtgttcctgggcggcagaagcatgggcagcagagccgccgccagcgtgatgtgccacatcgagcccgacgacggcgacgacttcgtgagaggcctgatctgcatcagctaccccctgcaccaccccaagcagcagcacaagctgagagacgaggacctgttcagactgaaggagcccgtgctgttcgtgagcggcagcgccgacgagatgtgcgagaagaacctgctggagaaggtggcccagaagatgcaggccccccacaagatccactggatcgagaaggccaaccacagcatggccgtgaagggcagaagcaccaacgacgtgttcaaggagatcaacacccagatcctgttctggatccaggagatcaccgagatggacaagaagtgccactag

SEQ ID NO: 273038 - DNA, 684 bp, Artificial Sequence
  derived and/or modified sequence
atgagtcatactgaagtgaagttgaagatcccgttcggaaacaaactcttggatgccgtctgtctcgtgcctaacaagagtctgacttacggcattattctgactcatggagctagcggagatatgaatcttcctcacttaatgtctttagctagccacctggcgtctcatggattcttttgcctgcggttcacatgtaagggcctgaatattgtacatcgcattaaagcatataagagtgtgttgaattatcttaaaacttccggagaatataaactggccggcgttttcctgggtggccggtctatggggtcccgagctgcagcctccgtgatgtgccacatcgaaccagacgacggcgacgactttgtccggggactcatttgcatatcttacccactccaccaccctaagcagcaacataagttgcgggacgaagacttattcaggctaaaagaacccgttctgtttgtctctggctcagccgatgagatgtgtgagaaaaacctgctggagaaggtcgcccagaaaatgcaagctccccataaaatccattggatcgaaaaagccaaccatagcatggccgtgaaaggcagaagcacgaatgacgttttcaaggaaattaatacgcagatcttgttttggatccaagaaattactgagatggataagaagtgtcactag

SEQ ID NO: 273039 - DNA, 684 bp, Artificial Sequence
  derived and/or modified sequence
atgagccacacagaggtgaagctgaagatccccttcggcaacaagctgctggatgctgtgtgcctggtgcccaacaagagcctgacctacggcatcatcctgacccacggggccagcggggacatgaacctgccccacctgatgagcctggccagccacctggccagccacggcttcttctgcctgcgcttcacctgcaagggcctgaacatcgtgcaccgcatcaaggcctacaagtctgtgctgaactacctgaagaccagcggggagtacaagctggccggggtcttcctgggcggccgctccatgggcagcagagctgctgcctctgtgatgtgccacattgaaccagatgatggagatgactttgtgcggggcctcatctgcatctcctaccccctgcaccaccccaagcagcagcacaagctgagagatgaggacctcttccggctgaaggagcctgtgctgtttgtgtctggcagcgcagatgagatgtgtgagaagaacctgctggagaaggtggcccagaagatgcaggccccccacaagatccactggattgagaaggccaaccacagcatggctgtgaagggccgcagcaccaatgatgtgttcaaggagatcaacacccagatcctcttctggatccaggagatcacagagatggacaagaagtgccactag

SEQ ID NO: 273040 - DNA, 684 bp, Artificial Sequence
  derived and/or modified sequence
atgagccacaccgaggtgaagctgaagatccccttcggcaacaagctcctggatgccgtttgtcttgtgcctaataagtcattaacatatgggataatcttaacccacggggctagcggtgacatgaatctgccacatctcatgtctctggcaagccatttggcaagtcacggcttcttctgtttgcggttcacctgcaaaggactcaatatcgtgcatcgaattaaggcctataagagtgttctgaactatctaaagaccagcggggaatataagctggctggagttttccttggcgggcgtagtatgggcagcagggccgctgcatctgtgatgtgtcatattgaacctgacgacggcgatgactttgtgcgtggtctcatttgcatctcctacccactgcaccatcctaagcagcagcataagttgcgcgacgaagatctgtttagactaaaagaacctgtactgtttgtctccgggtccgctgatgaaatgtgtgagaaaaacttactcgagaaggtggcgcagaaaatgcaggcgccacacaaaatacattggattgagaaagccaaccactccatggctgtcaagggccggtcaaccaacgatgtgtttaaggagattaatacccaaatcctgttctggatccaggaaataaccgaaatggacaaaaagtgccactag

SEQ ID NO: 273041 - DNA, 684 bp, Artificial Sequence
  derived and/or modified sequence
atgtctcacaccgaagttaagttaaaaattcccttcggcaacaagctgctcgatgcagtgtgtctggtaccaaataagtctctgacgtatggaatcatcctgacccacggggcttcgggggacatgaacctgccccaccttatgtctctggccagccatctggctagccatggctttttctgccttaggttcacatgtaagggacttaatattgtgcacaggatcaaagcctacaagagtgtcctcaattatctgaaaacgtctggagagtataaactggccggtgtattcctcggcggaaggtcaatggggagtagagccgctgcctcagttatgtgtcatatagagcccgacgacggagatgatttcgtgcgtgggctgatctgcatttcttaccccttgcaccatccaaagcaacagcataagcttagagatgaagatctgtttaggctaaaggaaccagttctattcgtgtccggttccgcagatgaaatgtgcgagaagaacctgctagagaaagtggcccagaagatgcaggcacctcataagatacattggattgaaaaggcgaatcattcgatggcagttaagggaagatcaacgaacgacgtatttaaagagattaatactcagattcttttctggatccaggagattacagaaatggacaaaaagtgtcattag

SEQ ID NO: 273042 - DNA, 1543 bp, Artificial Sequence
  derived and/or modified sequence
tagagggaaggctgtctagctacatctagggcaacatgtctgtcatttacctctaagaattatttagcagcttagaacccattccagacactgatgcatttgaaaaaccccccaaacccaccacatttacctcctgtggaaagtgctagaaataagaccatcctcctgcagcagttgagtgccctgcccgactcacctctctggggcttggggatgacccgcgtgtttttggctgacttgactgaggcatctcttgcactctgcagtttaatttcccttaagtgtctccctggggactctggaaagagtgggaaggtgagtctgggattggcagggtgctcagggatccaaacatcagtcgcccccagcagccaacagcagaagacagcttcctgtgggacgggaggaaggtgctgtggaccccacccagcctctcccaggaagggagctggcagccattccacagcccgagcctggcccagcaagggagaagctcagctcttctcccctccggcctcagcaggctgctcagggactcagcctggggtcacataaggcctttccaacaggccactctgcatcccctgtcggcctcccaaatggtgagaccaagagtgtccaggacatggggaaactggaaggcagcagcctcgagggccgggtccaggatccatgtcctccagtgaggcctggcgcccttggccgtaacccagcagaggaaagggcgggccgtggacttggagaaggttttcccttggaccacacagaatgcggcactggcctggacacgatcacgctggtcactcgtatgcccatgttcagcctgctcagggagacaggaacagactacaggagcagcaggctgaggcacgcccccaggcaccccgtgaggcgggcagggcagggaagctggtgctccaggatgcgtttcctgcccgcgcaccaggcttggctcccgggcccccacagcctgtgggttttctgagcaagggacagggaggtgcccaggcctggttgcccaggcaggcctgacaggaactggcgagaagccaccctggagggccgggcgcaggccaaggcagggcggtggggcgctgaaccagctccaaactgctggcagagctggccagagtgaggaagtgaggttcccaagcacagaaggcaaatcaaaaaggaatgccacctccagggaagacactacactgccaaaggagatgcggccttgcccggctcgaaaagaggtcattttcagaacatgggactctccaagccctgaggacaggaggcagcctggggagtatgaacctcgcacctggtaggggaccccacacccgaggtaccacccaaaacacagcccagatctgcacggagggatggttccctgagcaggcgtgactgtcacagacaggctgggcctgggggctgtcgggaggctgctgtcccaggctgggtctggatacaaaacttggactgtgtcaagcagcgggacgctggcaggagcaccgggaaggccagcacgtggctgcaacgtctcccgccttca

SEQ ID NO: 273043 - DNA, 1344 bp, Artificial Sequence
  derived and/or modified sequence
atggtactcttacgggtattaatcctgcttctatcttgggccgctgggatgggtgaccgggacttcgatgatggcgtgctcggcctcgcctgggtaggcgctccttccggttctagtggcggcatatgcgaaaaaagcaaactgtacagtgatggcaaaaagaagagccttaacactggcattatcacagtgcaaaactacgggtcccatgttccgcccaaagtgagccacataacattcgcccatgaagtgggccataatttcggttctcctcacgatagcggcacggagtgcacaccaggggaatcaaaaaatttgggacagaaagagaatgggaattacatcatgtacgcaagagcgacaagtggcgacaaactaaacaataacaaattctctctctgttctatcaggaatattagtcaggtcttggagaaaaagcgaaataactgctttgtggagagtgggcagcctatctgcgggaacggcatggtcgagcagggtgaggaatgcgactgcggatacagcgatcaatgcaaggatgagtgttgctttgacgctaatcagccagaaggtcgcaagtgcaagctgaaaccaggcaaacagtgctcgccgagccagggcccgtgctgcactgctcagtgcgctttcaagtctaagtctgagaagtgccgagacgacagtgactgcgcaagggagggaatttgtaacggctttacggccctctgcccagcctccgatcctaagcctaacttcacagattgcaaccggcatacccaggtctgcattaatggacagtgtgcagggagcatctgcgagaagtatggattggaggaatgcacctgtgcatccagcgatggcaaagatgataaagaactgtgccatgtctgttgtatgaaaaaaatggatccttccacatgtgccagtaccggatctgtccagtggagccgtcacttttcgggtagaaccattactctgcagccaggaagtccatgtaatgacttccggggctattgtgacgtgtttatgcgctgccgactagtggacgccgatggcccactggcccgcctaaaaaaggcgatcttttcacctgagctctacgagaacatcgcggagtggatcgttgcccattggtgggccgtgctattgatgggtattgcattaataatgctgatggccggcttcattaaaatctgctctgtgcacactcctagtagcaatccaaaactccctccccccaagccgctccccggaacactgaagagacgaagaccacctcagccgatacagcagccgcaaagacagagaccccgggaatcttatcagatgggtcacatgcgtcgatag

SEQ ID NO: 273044 - DNA, 1344 bp, Artificial Sequence
  derived and/or modified sequence
atggtgctgctgcgggtgctgatcctgctgctgtcctgggccgccggcatgggagaccgggactttgatgatggagtgctgggcctggcctgggtgggcgcccccagcggcagcagcggcggcatctgtgagaagagcaagctgtacagtgatggcaagaagaagagcctgaacacaggcatcatcaccgtgcagaactacggcagccacgtgccccccaaggtgagccacatcacctttgcccacgaggtgggccacaactttggcagcccccatgacagcggcacagaatgtaccccaggagagagcaagaacctgggccagaaggaaaatggaaactacatcatgtatgcccgggccaccagcggggacaagctgaacaacaacaagttcagcctgtgcagcatccggaacatcagccaggtgctggagaagaagaggaacaactgctttgtggagagcggccagcccatctgtggaaatggcatggtggagcagggcgaggagtgtgactgtggctacagcgaccagtgcaaggatgagtgctgctttgatgccaaccagcctgagggcaggaagtgcaagctgaagccaggcaagcagtgcagccccagccagggcccctgctgcacagcccagtgtgccttcaagagcaagtctgagaagtgcagagatgacagcgactgtgcccgggagggcatctgcaatggcttcaccgccctgtgcccagccagtgaccccaagcccaacttcacagactgcaacagacacacccaggtgtgcatcaatggccagtgtgccggcagcatctgtgagaagtatggcctggaggagtgcacctgtgccagcagtgatggcaaggatgacaaggagctgtgccacgtgtgctgcatgaagaagatggaccccagcacctgtgccagcactggatctgtgcagtggagccgccacttcagcggccgcaccatcaccctgcagcccggcagcccctgcaatgacttccggggctactgtgatgtgttcatgcgctgccgcctggtggatgctgatggccccctggcccggctgaagaaggccatcttcagccctgagctgtatgaaaatattgctgagtggatcgtggcccactggtgggccgtgctgctgatgggcatcgccctgatcatgctgatggccggcttcatcaagatctgcagcgtgcacacccccagcagcaaccccaagctgcccccacccaagcccctgcccggcaccctgaagagaagaagaccaccccagcccatccagcagccccagaggcagaggccccgggagagctaccagatgggccacatgagaagatag

SEQ ID NO: 273045 - DNA, 1344 bp, Artificial Sequence
  derived and/or modified sequence
atggtgctgctgcgggtgctgatcctgctgctgagctgggccgccggcatgggagacagggattttgatgatggggtccttgggctggcctgggtcggcgctcctagcggctctagcggcgggatttgcgaaaagtctaaactatatagcgacggcaagaaaaagagtctcaatactggtatcataacagtgcagaattacggctcacatgtccccccaaaggtcagccatattacttttgcccacgaagtcggccataatttcgggagtccacacgacagtggcacagagtgtacaccaggagagtcgaagaatctgggccagaaagagaacggcaactacatcatgtatgcccgtgccacttcaggggataagctgaataacaataagttcagcctatgcagcatccgcaacatctcccaagttctggagaaaaagcgaaacaactgcttcgtcgaatcgggacagcctatatgtggaaacggcatggtggagcagggcgaggaatgtgattgtggatactccgatcaatgcaaggacgaatgctgttttgatgcaaaccagcccgaaggcaggaagtgtaagcttaaacctgggaagcaatgcagcccttcacaggggccctgctgcactgcccagtgtgcgttcaagtctaaatcagaaaagtgccgggacgatagtgactgcgcacgggaaggaatttgtaatggatttacagcgctgtgccccgcgtccgatcctaaaccaaattttacagactgtaataggcacactcaggtgtgtatcaacgggcagtgtgccggttccatctgcgagaaatacggcctggaagagtgtacatgtgcctctagcgacggcaaagacgacaaagagctctgtcatgtgtgctgtatgaagaaaatggatccatctacgtgtgcttccacggggagtgtgcaatggtcacgtcacttcagcggccgcacaatcactctacagcctggttccccgtgtaacgatttcaggggctactgtgatgtgttcatgcgttgccgtctggtcgatgccgacgggccactggcgcgattgaaaaaagccatttttagtccagagctgtatgagaacatagctgaatggatcgtggcccactggtgggctgttcttcttatgggcatcgctctgatcatgctgatggctggtttcattaaaatatgcagtgtgcatacccctagctccaatcccaagctccctccccctaaaccactgccgggaactctgaaacgtcgcagaccaccacagcctattcagcagccccagcgtcagagacctagggagagctatcagatgggtcatatgcgccgctag

SEQ ID NO: 273046 - DNA, 1344 bp, Artificial Sequence
  derived and/or modified sequence
atggtcctccttagagtgctgattctgctgctgtcatgggctgctggtatgggcgatagagactttgacgacggggttctcggactggcctgggtcggagctccctctggcagctccggtggcatttgcgagaaatcaaagttgtactcagacggcaaaaagaaaagtttgaataccgggataataacggttcagaactatggctcacacgtgccacccaaagtgagccatatcacgtttgcccatgaggttggccataatttcgggtccccccacgatagcggaaccgaatgcaccccaggcgagtctaaaaatttgggtcagaaggagaacggcaattacataatgtatgctcgcgctactagtggtgacaaactaaataataacaaattcagcctttgctccatacgaaacatcagtcaagttcttgaaaagaaaagaaataactgcttcgtcgaaagtggacagcccatttgtggtaatggcatggttgaacagggcgaggaatgtgactgtggctacagcgaccagtgcaaggatgaatgttgctttgacgccaaccagcccgagggacgtaaatgcaaactgaagcctggcaagcagtgcagtccatcgcaaggaccgtgttgtacagctcaatgtgcattcaaatccaagtctgagaagtgcagagatgactccgactgcgctagggagggtatatgtaatgggtttactgcactgtgccctgctagtgatcccaaaccaaattttacagattgtaacaggcacacgcaggtttgtataaacggacagtgcgcaggcagcatctgtgagaaatatggcctagaggaatgcacgtgcgcctcctccgatggaaaagatgataaggagctctgccacgtttgttgtatgaagaaaatggatccctccacttgcgcatctaccgggagtgtgcagtggagcagacatttcagcggaaggactatcactcttcagcccggaagcccgtgtaatgacttccgtggctattgcgacgtgttcatgagatgccgattggtggatgcggacgggccactggctagattaaaaaaagccatcttctcccccgagctttatgagaatatcgcagagtggattgttgcccattggtgggccgttctactcatggggatcgcattaattatgctaatggcaggattcatcaagatttgttcagtgcatacacccagtagcaaccccaaacttcctccaccaaaacccctcccagggacgctcaaacgcagacgcccaccccagccaattcagcagccacagcgtcaacgtcctagggagtcttatcaaatgggtcatatgcggagatag

SEQ ID NO: 273047 - DNA, 1344 bp, Artificial Sequence
  derived and/or modified sequence
atggtgctgctgagagtgctgatcctgctgctgagctgggccgccggcatgggcgacagagacttcgacgacggcgtgctgggcctggcctgggtgggcgcccccagcggcagcagcggcggcatctgcgagaagagcaagctgtacagcgacggcaagaagaagagcctgaacaccggcatcatcaccgtgcagaactacggcagccacgtgccccccaaggtgagccacatcaccttcgcccacgaggtgggccacaacttcggcagcccccacgacagcggcaccgagtgcacccccggcgagagcaagaacctgggccagaaggagaacggcaactacatcatgtacgccagagccaccagcggcgacaagctgaacaacaacaagttcagcctgtgcagcatcagaaacatcagccaggtgctggagaagaagagaaacaactgcttcgtggagagcggccagcccatctgcggcaacggcatggtggagcagggcgaggagtgcgactgcggctacagcgaccagtgcaaggacgagtgctgcttcgacgccaaccagcccgagggcagaaagtgcaagctgaagcccggcaagcagtgcagccccagccagggcccctgctgcaccgcccagtgcgccttcaagagcaagagcgagaagtgcagagacgacagcgactgcgccagagagggcatctgcaacggcttcaccgccctgtgccccgccagcgaccccaagcccaacttcaccgactgcaacagacacacccaggtgtgcatcaacggccagtgcgccggcagcatctgcgagaagtacggcctggaggagtgcacctgcgccagcagcgacggcaaggacgacaaggagctgtgccacgtgtgctgcatgaagaagatggaccccagcacctgcgccagcaccggcagcgtgcagtggagcagacacttcagcggcagaaccatcaccctgcagcccggcagcccctgcaacgacttcagaggctactgcgacgtgttcatgagatgcagactggtggacgccgacggccccctggccagactgaagaaggccatcttcagccccgagctgtacgagaacatcgccgagtggatcgtggcccactggtgggccgtgctgctgatgggcatcgccctgatcatgctgatggccggcttcatcaagatctgcagcgtgcacacccccagcagcaaccccaagctgcccccccccaagcccctgcccggcaccctgaagagaagaagacccccccagcccatccagcagccccagagacagagacccagagagagctaccagatgggccacatgagaagatag

SEQ ID NO: 273048 - DNA, 1523 bp, Artificial Sequence
  derived and/or modified sequence
gaggctccggaccaagccccttcagcttctccctccggatcgatgtgctgctgttaacccgtgaggaggcggcggcggcggcagcggcagcggaagatggtgttgctgagagtgttaattctgctcctctcctgggcggcggggatgggagaccgagattttgatgatggcgtacttggtctggcttgggttggagcaccttcaggaagctctggaggaatatgtgaaaaaagtaaactctattcagatggtaagaagaagtccttaaacactggaattattactgttcagaactatgggtctcatgtacctcccaaagtctctcacattacttttgctcacgaagttggacataactttggatccccacatgattctggaacagagtgcacaccaggagaatctaagaatttgggtcaaaaagaaaatggcaattacatcatgtatgcaagagcaacatctggggacaaacttaacaacaataaattctcactctgtagtattagaaatataagccaagttcttgagaagaagagaaacaactgttttgttgaatctggccaacctatttgtggaaatggaatggtagaacaaggtgaagaatgtgattgtggctatagtgaccagtgtaaagatgaatgctgcttcgatgcaaatcaaccagagggaagaaaatgcaaactgaaacctgggaaacagtgcagtccaagtcaaggtccttgttgtacagcacagtgtgcattcaagtcaaagtctgagaagtgtcgggatgattcagactgtgcaagggaaggaatatgtaatggcttcacagctctctgcccagcatctgaccctaaaccaaacttcacagactgtaataggcatacacaagtgtgcattaatgggcaatgtgcaggttctatctgtgagaaatatggcttagaggagtgtacgtgtgccagttctgatggcaaagatgataaagaattatgccatgtatgctgtatgaagaaaatggacccatcaacttgtgccagtacagggtctgtgcagtggagtaggcacttcagtggtcgaaccatcaccctgcaacctggatccccttgcaacgattttagaggttactgtgatgttttcatgcggtgcagattagtagatgctgatggtcctctagctaggcttaaaaaagcaatttttagtccagagctctatgaaaacattgctgaatggattgtggctcattggtgggcagtattacttatgggaattgctctgatcatgctaatggctggatttattaagatatgcagtgttcatactccaagtagtaatccaaagttgcctcctcctaaaccacttccaggcactttaaagaggaggagacctccacagcccattcagcaaccccagcgtcagcggccccgagagagttatcaaatgggacacatgagacgctaactgcagcttttgccttggttcttcctagtgcctacaatgggaaaacttcactccaaagagaaacctattaagtcatcatctcc

SEQ ID NO: 273049 - DNA, 645 bp, Artificial Sequence
  derived and/or modified sequence
tggaacctggtatggtatttcagacgtcttgacttgcccagtaacttacctggattgattctttcttctgagcactgtaacaagtattcaaagattccccgccactgtatgtctgaagatagcaaatatgttttaatacaaatgttatgggacaatatgaagttacatcaggatccgggacagcccttgtacattctctggaatgcacacacccaaaaatatccaatggtccatttattgcaaaaaagtgataactcatttaaccaggaactgttgaaaagtatggtaaaaagcattaaaatgaatgatgtctatggaccaatgagtcagattttagagacactgaataagtgtccacattttaaaagacagaggagtttatacagagaaatactatttctctcacttgtggcactgggaagagaaaacattgatatagatgcttttgataaagagtacaagatggcatacgatcgtctcacacctagtcaagtcaagagtacacacaactgtgatagaccaccaagtacaggggtgatggaatgtcgaaaaacctttggagaaccttatctttaagatgtatttgtatgtgtaaacattcaatgtatattgtatagtcagtgtataaaataacacttttagacg

SEQ ID NO: 273050 - DNA, 3611 bp, Artificial Sequence
  derived and/or modified sequence
acagattctgttgacctttagtaatgagggaggcagggctagagggtgactagcagccaggcctcccaggctcccaggcctctcagatgcctggaatttcggagctagaaggtagtcagattcccgttatcttgactgctgcagcggggtctctgggatggtgatgtgagtgcctcctgcacccgtggcccccatgtggcataactccttgggcgctattcatccacacggcccatctgtgcagggtacagccttcatggtcttagctggcagccctgacaacttggatgtgcaaagaagatacaagtttgtttcctctgaagcttgtctggtgtcatccaggagccccacctgatgtcctggcgtccgcaataccgtagctccaagttccggaatgtctacgggaaggtggccaaccgggagcactgcttcgatgggatccccatcaccaagaatgtgcacgacaaccacttctgtgccgtcaacacccgcttcctggccatcgtcaccgagagcgcagggggcggctccttcctcgtcatccccctggagcagacaggcaggattgaacccaactaccccaaggtctgcggccaccagggcaatgtgctggatatcaaatggaaccccttcatcgacaacatcattgcctcgtgctcggaggacacgtcggtgcggatctgggagatccccgagggcgggctgaagcggaacatgacggaggcgctcctggagctgcacgggcacagccggcgtgtggggctggtcgagtggcaccccaccaccaacaacatcctgttcagcgctggctacgactacaaggtcctcatctggaacctggatgtgggtgagccggtgaagatgattgactgccacacggatgtgatcctctgcatgtccttcaacacggacggcagcctgctcaccaccacgtgcaaggacaagaagctgcgtgtgattgagccccgctctggccgtgttctgcaggaggccaactgcaaaaaccacagagtgaaccgggtggtgttcctggggaacatgaagcggctcctcacgacaggggtctccaggtggaacacaagacagattgccctctgggaccaggaggacctctccatgcccctgatcgaagaggaaattgatgggctctctggcctcctgttccccttctatgatgctgacacccacatgctctacctggctggaaagggtgatggaaacatccggtactacgagatcagcactgagaagccctacctgagttacctcatggagttccgctccccagccccgcagaaaggcctaggggtcatgcccaagcacgggctggatgtgtcagcctgcgaggtgttccgcttctacaagctggtgactctcaagggcctgatcgagcccatctccatgatcgtgccccggaggtcagattcctaccaggaagacatttacccaatgacaccaggcacggagccagcactgaccccggatgaatggctgggaggcatcaaccgagatcccgtgctgatgtctttgaaagaaggctataagaagtcctcaaaaatggtatttaaggctcccatcaaagaaaagaagagtgttgtggtcaacggaatagatttattagaaaatgtcccacccaggacagagaatgagctccttcgaatgttcttccggcagcaggatgagattcgacggttgaaagaggagctggcccagaaggacatccgcattcggcagctccagctggaactgaaaaacttgcgcaacagccccaagaactgttagctccccagctgggctgttttctaagccgatctctccgtcgtttctactcatcccttaacttctcccttaccagtgaccccagagacagagccaggacaggagtgggggccagcctgaggacccccgcctaccacctcgagaactggaagccaacctctaacctcctgacctcatgctaataaaagtccccagcttctggagaccccctgccggcagcccctttccctgccaccccaggagccaggcttcccctcagctgggtgaagactacagactccctggggttggcaggggctccatctcagtggaccaggaagcaagaggggaagcgggatcccagctagacttagaacttggacttttcccctgtgaagggggctgccaggacatctcagcactcccgcctggagctctcagcatcactgaaggtaccacagtgtaagtgctggactgcaggctgcagtgatccctctttcgtcccaccccctcttccctcagcagccccggaagcctgcctcacccgacgaggacagcgagcggcccggctcctttctgtctcttcccttcccaccctcttgtcttcagggaattcagaggattgctctccaaggccataatgaccccttgccttccccatgattctctacaaagctcttgcacacccttttcccattcaatttgtgagccaggcagggtagggattagtgtccccctttgacaaatgacagaactgagggttgcaatggggaaatgacttataaagtcacccagcaggtcaacaatgggcccacgaccaagaccctgggtgttcagaccccaaggccagggcctttcccgctgcatcaagatgccaatccctttgtgggcttcaccagtgcccaagtctctatggagaatgagaactggaagccactgctaccgtctacccagcaccagtagtgccgatgtgccacactgcccagttgaggcccctcacgctctgtgcccctagatccttcaggtccccaccctcagctgtcaccaccaccctccccaggggactccatctgagatgaggcctcgtcctcctggaagctgaggctgagaagggtggagcttggccctggggaaggcagaccagggtctgatggcttctagggatgctctgcgtgtgtctcagcaccgctatctcagccactttcagccttatgcacgtagaatgaccacagccactcgcatccgtatagcactttaaagtttctgcagtcctttgacacataggatctcatggagcctcacgtctactcccttctgcagatgaggaaaccgagagaagtggcccaaggtcacgcaactctgagatgccacatttcatttgatcttgtacacattttcttttattccttcttttttcctcctttcatttcccactacgcacaaagagtttataaacactgttctcagaagagtcacagtttggggtgagatctggaaatcaagaaatgggtgtccactcttttctttcattagctaggatctactagatgcattatactccatacctgcttttcccatggccgccctacggaaaatcccatccacagaggccagggctacccaagcccctccaggtgagctgggcctttcctttatgaacctccatcctcccagccagctacagtagggcctcctcaccccgtaccccacagctagacagtgtcagcactcatctcctcctcccacatttctggagcttttttttttccttccccattgacctttgtggtcttctgtgattatttatgctgcctcccaaggatagaattgaaataaaatgttttcaacttatc

SEQ ID NO: 273051 - protein, 460 aa, Artificial Sequence
  derived and/or modified sequence
MPGGPSPRSPAPLLRPLLLLLCALAPGAPGPAPGRATEGRAALDIVHPVRVDAGGSFLSYELWPRALRKRDVSVRRDAPAFYELQYRGRELRFNLTANQHLLAPGFVSETRRRGGLGRAHIRAHTPACHLLGEVQDPELEGGLAAISACDGLKGVFQLSNEDYFIEPLDSAPARPGHAQPHVVYKRQAPERLAQRGDSSAPSTCGVQVYPELESRRERWEQRQQWRRPRLRRLHQRSVSKEKWVETLVVADAKMVEYHGQPQVESYVLTIMNMVAGLFHDPSIGNPIHITIVRLVLLEDEEEDLKITHHADNTLKSFCKWQKSINMKGDAHPLHHDTAILLTRKDLCAAMNRPCETLGLSHVAGMCQPHRSCSINEDTGLPLAFTVAHELGHSSCTTPLPSPGPAAAASISPGSLSVQRQNVYCLERQAGPVDEEHCDPLGRPDDQQRKCSEQPCPASAQ

SEQ ID NO: 273052 - protein, 532 aa, Artificial Sequence
  derived and/or modified sequence
MEGDSYHNATTVNGTPVNHQPLERHRLWEVITIAAVTAVVSLITIVGNVLVMISFKVNSQLKTVNNYYLLSLACADLIIGIFSMNLYTTYILMGRWALGSLACDLWLALDYVASNASVMNLLVISFDRYFSITRPLTYRAKRTPKRAGIMIGLAWLISFILWAPAILCWQYLVGKRTVPLDECQIQFLSEPTITFGTAIAAFYIPVSVMTILYCRIYRETEKRTKDLADLQGSDSVTKAEKRKPAHRALFRSCLRCPRPTLAQRERNQASWSSSRRSTSTTGKPSQATGPSANWAKAEQLTTCSSYPSSEDEDKPATDPVLQVVYKSQGKESPGEEFSAEETEETFVKAETEKSDYDTPNYLLSPAAAHRPKSQKCVAYKFRLVVKADGNQETNNGCHKVKIMPCPFPVAKEPSTKGLNPNPSHQMTKRKRVVLVKERKAAQTLSAILLAFIITWTPYNIMVLVSTFCDKCVPVTLWHLGYWLCYVNSTVNPICYALCNRTFRKTFKMLLLCRWKKKKVEEKLYWQGNSKLP

SEQ ID NO: 273053 - protein, 22 aa, Artificial Sequence
  derived and/or modified sequence
MEGDSYHNATTVNGTPVNHQPL

SEQ ID NO: 273054 - DNA, 1599 bp, Artificial Sequence
  derived and/or modified sequence
atggaaggggactcttatcataacgccacaactgtgaacggaacccccgtgaaccaccagcctttggagagacacaggttatgggaagtaatcaccatcgccgccgttaccgcagtggtctccctcataacaattgtgggcaacgttctagtgatgatttccttcaaggtaaatagccagttgaaaacggtcaataactattatctgctaagtttagcttgtgcagatcttatcattggcatcttttcgatgaatctatatacgacttacatcctgatgggacgctgggcattgggtagtctggcttgcgacctgtggctggccctggattacgtcgcatcaaatgcctcggttatgaacttacttgtgattagcttcgacagatacttttccatcactcggcccctcacataccgcgctaagcggacgcccaaaagagccggaatcatgataggtctggcctggctaatttctttcatcctctgggctcctgcaattttatgttggcagtacctggttgggaagcgtactgttccactagacgagtgccagatccagttcctatccgaacctacaataacttttggaacagctattgccgcgttttacatcccggtctctgtcatgaccatcttgtattgtagaatttatagagaaaccgaaaaaaggacaaaggacctcgcggatctccaggggagtgactctgtaaccaaagctgaaaaacgcaagcccgctcaccgagcactcttccgctcttgtctcagatgtccaagacccacactggcgcagcgggaaagaaatcaagccagttggtcaagtagtaggcggagcacttcaactacaggaaaacccagccaggcaactgggccctctgcaaattgggcgaaagcagagcagctgacgacttgctcttcatacccctcatccgaggatgaggacaaacccgctactgaccccgttcttcaggtagtttataagtctcaggggaaggaatcacctggagaagagttttcagccgaggaaacagaggagacattcgtcaaagccgagaccgagaagtcggattatgacactcctaattatctgctctcacctgccgccgctcacaggcccaagtcccagaagtgtgtggcctacaaatttcgcctagtagttaaagccgatggtaaccaggagactaataatgggtgccataaggtaaagattatgccatgccctttccccgtcgccaaggagccatcaaccaaagggttgaaccctaatcccagtcaccagatgaccaagcgaaagcgggttgtgctcgtgaaggaacgcaaggcagctcagactctgtccgctattttgctggcgttcataatcacttggacgccgtataatatcatggtactagtaagtaccttttgtgacaaatgtgtgcctgttactctctggcacctggggtattggttgtgttacgtcaattcaacggtgaaccctatttgttacgccctgtgtaatcggactttccgcaaaactttcaagatgcttttgctgtgtagatggaaaaaaaagaaagtggaagagaaattatattggcagggcaacagcaaactgccctag

SEQ ID NO: 273055 - DNA, 1599 bp, Artificial Sequence
  derived and/or modified sequence
atggagggcgactcctatcacaacgctacgacggtgaacggcacccctgtgaaccatcaacccttggagcgacataggctgtgggaggtcattaccattgcagcggtgaccgctgttgtgtcccttatcaccatagttggaaatgtgcttgtgatgatcagcttcaaggtgaattcgcagctaaaaacagttaataactattacctcttgagtctcgcctgtgcggatctgatcattggcattttctcaatgaacctgtatactacctacattttgatggggagatgggcactggggtcattggcttgcgatctgtggctggccctcgactacgtggcctcaaacgcctctgttatgaacttgttagtcatcagctttgatcgatattttagcatcacacgacctctaacatacagggctaaacgaactcccaagagggccggcatcatgattggcctggcatggttaatttcctttatactgtgggccccagctatactctgttggcagtatctggtgggtaaacggaccgtgcctcttgacgagtgtcagatccaatttctctccgaacctacaatcacattcggtactgctatcgcagcattctacatcccggtctctgtaatgacgatcttgtattgccgtatctaccgggaaaccgaaaagcgcactaaagacctcgctgacttgcagggatctgatagtgtaacaaaagctgagaagcgcaagccagcccatcgcgctctgtttaggtcatgtctccgatgcccccgcccaactcttgcgcaacgcgagcggaaccaggcatcctggagttccagtaggaggagcacctctaccacaggaaaaccctctcaggccacaggccccagcgcaaattgggcaaaggcggagcagctcactacctgcagctcatatccatcctctgaggacgaggataagccagctactgaccctgtgttgcaagtagtatacaaatcacaaggaaaggagtctccaggagaagaattcagtgccgaggaaacagaagaaacgtttgttaaagctgagactgagaagtcggactacgacactccgaattatctgctgagccccgctgctgcacatcgtcctaaaagtcagaaatgtgtcgcctataagttccgcttggtggtgaaggcagatggaaatcaggagaccaataatggctgccataaggtgaaaatcatgccatgtccatttcctgtggcgaaagaaccaagtacaaaaggattgaacccaaatccatcacatcaaatgactaagaggaagagggtggtcctggtcaaggaaagaaaagctgcccaaaccctgtctgctattctgttggcattcataatcacttggacaccgtataacataatggtgttggtgtcaaccttctgcgataaatgtgttccggtcaccctgtggcacctaggatactggctatgttatgtgaattcaactgtgaatcccatctgttatgctctgtgtaaccgtacctttaggaaaacctttaagatgcttcttctgtgcaggtggaagaaaaaaaaggttgaggagaagctgtactggcagggaaactccaagctcccctag

SEQ ID NO: 273056 - DNA, 69 bp, Artificial Sequence
  derived and/or modified sequence
atggaaggtgatagttaccataacgcaaccactgtgaacgggaccccagtaaatcaccaacccctttag

SEQ ID NO: 273057 - DNA, 1599 bp, Artificial Sequence
  derived and/or modified sequence
atggagggggacagctaccacaatgccaccaccgtgaatggcacccctgtgaaccaccagcccctggagcggcaccggctgtgggaggtgatcaccatcgctgctgtgacagctgtggtgtccctcatcaccatcgtgggcaatgtgctggtgatgatctccttcaaggtgaacagccagctgaagacagtgaacaactactacctgctgagcctggcctgtgccgacctgatcatcggcatcttctccatgaacctgtacaccacctacatcctgatgggccgctgggccctgggcagcctggcctgtgacctgtggctggccctggactatgtggccagcaatgcctctgtgatgaacctgctggtgatcagctttgaccgctacttcagcatcacccggcccctgacctaccgggccaagaggacccccaagagagctggcatcatgattggcctggcctggctgatctccttcatcctgtgggccccagccatcctgtgctggcagtacctggtgggcaagaggacagtgcccctggatgagtgccagatccagttcctgtctgagcccaccatcacctttggaacagccatcgccgccttctacatccctgtgtctgtgatgaccatcctgtactgccgcatctaccgggagacagagaagaggaccaaggacctggccgacctgcagggcagtgacagcgtgaccaaggccgagaagaggaagccagcccaccgggccctcttccgcagctgcctgcgctgcccccggcccaccctggcccagcgggagaggaaccaggcctcctggagcagcagcagaagaagcaccagcaccaccgggaagcccagccaggccaccggccccagcgccaactgggccaaggccgagcagctgaccacctgcagcagctaccccagcagtgaagatgaggacaagccagccacagatcctgtgctgcaggtggtgtacaagagccagggcaaggagagccctggagaggagttctctgctgaggagacagaggagacctttgtgaaggccgagacagagaagagtgactatgacacccccaactacctgctgagccctgctgctgcccaccggcccaagagccagaagtgtgtggcctacaagttccggctggtggtgaaggcagatggcaaccaggagaccaacaacggctgccacaaggtgaagatcatgccctgccccttccctgtggccaaggagcccagcaccaagggcctgaaccccaaccccagccaccagatgaccaagaggaagagggtggtgctggtgaaggagaggaaggccgcccagaccctgagcgccatcctgctggccttcatcatcacctggaccccctacaacatcatggtgctggtgtccaccttctgtgacaagtgtgtgcctgtgaccctgtggcacctgggctactggctgtgctacgtgaacagcacagtgaaccccatctgctacgccctgtgcaacagaaccttcaggaagaccttcaagatgctgctgctgtgccgctggaagaagaagaaggtggaggagaagctgtactggcagggcaacagcaagctgccctag

SEQ ID NO: 273058 - DNA, 69 bp, Artificial Sequence
  derived and/or modified sequence
atggagggggacagctaccacaatgccaccaccgtgaatggcacccctgtgaaccaccagcccctgtag

SEQ ID NO: 273059 - DNA, 1599 bp, Artificial Sequence
  derived and/or modified sequence
atggagggcgacagctaccacaacgccaccaccgtgaacggcacccctgtgaatcaccagcccctcgagcgccataggctgtgggaggtcatcaccatagcggccgttaccgctgtcgttagtcttattaccatcgtggggaacgtcttagtgatgatatctttcaaggttaactctcaactgaagactgttaataattattatctcctaagtttagcatgcgctgacctcatcattggaatcttttccatgaacttatataccacctatatccttatgggccggtgggctctcggctctctggcctgcgatctctggttagcgttggactatgtagcttcaaatgcgtccgtgatgaacctcctagtgattagtttcgaccggtatttctctatcacccgaccactgacataccgcgccaaaaggactcccaaaagggctgggatcatgataggacttgcctggctgatctcatttatactgtgggctccggccattctgtgttggcagtacttagtgggcaagaggaccgttcccctagatgaatgccagatacagtttctgtcagaacccacaattacttttggaaccgccatcgccgcgttctacatccctgtgtccgtcatgaccatactttattgcagaatctaccgggaaaccgaaaagagaactaaggacctcgcagacctccaggggtccgattcggtcaccaaagcagagaagagaaagcctgcacatcgagctctttttaggagctgtctccgctgtcctcgacccaccctggctcagcgagagcgcaaccaggcgagctggtctagctcccgaagaagcacttcaacaacaggaaagccttcacaggccactggcccgtccgcgaattgggccaaagccgagcaattaactacttgttctagctacccatccagcgaggacgaagataaacccgctaccgatcccgtgttgcaagttgtttataaaagtcaggggaaagaaagtccaggagaagaattctctgctgaagagacagaagagactttcgttaaggctgaaactgagaagtctgattacgacactccaaactacctgctctcacccgccgcagctcacaggcccaagagtcagaagtgcgtcgcgtacaagttccgacttgtggtgaaagccgatgggaaccaggaaaccaacaacggatgccacaaggttaagatcatgccttgcccatttcccgttgctaaggagccttctacaaagggactcaaccccaaccctagtcaccagatgacgaagcgtaagcgcgtggtccttgtgaaggagcggaaagcagcccaaactttaagcgcaattcttcttgcattcattattacctggaccccctacaacataatggtgttggtgtcaacattctgcgataagtgtgtgcccgtgaccctgtggcatttgggctattggctgtgctacgtaaattcgacagtgaaccccatctgctatgccctttgtaatcgcaccttccggaagactttcaagatgctgctgctttgtcggtggaagaagaagaaggtcgaggagaagttgtattggcaaggcaattcaaagctcccctag

SEQ ID NO: 273060 - DNA, 1599 bp, Artificial Sequence
  derived and/or modified sequence
atggagggcgacagctaccacaacgccaccaccgtgaacggcaccccagtgaaccatcagccactcgaaagacaccggctctgggaagttatcacaattgctgctgtgacggccgtagtctctttaattacaatagtcggaaatgtgcttgtcatgatcagctttaaggtgaacagccagctgaagactgttaacaactactacctgctcagcctcgcgtgtgcagacctgataatcggtatcttcagtatgaacctatacactacctatatcctgatgggcagatgggcactaggttcactcgcctgcgacctatggctggcacttgattacgtcgcatctaacgcgagcgtcatgaatctgctggtcatttcatttgataggtatttcagtatcacccgaccactgacctaccgggctaaacggacccccaagcgagccggtatcatgattggtctggcctggctgatcagcttcattttgtgggcgcctgcaatcctgtgctggcagtatttggtgggcaagcgtactgtgccgttggatgaatgccaaatccagttcttgtctgagcccactatcacatttggcacggccatagctgctttctacattcctgtgtcagttatgaccatcctgtactgcaggatttatcgcgaaaccgagaagcgtaccaaagatctggcagatctgcaaggttctgactcagtaaccaaggccgagaagagaaagccagctcatagggccctgttccggtcctgtctgcggtgtccacggcccaccctggcccagcgcgagaggaatcaagcatcctggagctcctcgcgacgttctacgtctaccaccggcaagccttcccaggcgacggggccctctgccaactgggccaaggccgagcagctcaccacttgctcatcttacccttcttcagaagatgaggacaaaccggcaacggacccggttcttcaggtcgtctacaaatctcaggggaaagaaagtcctggtgaggaattcagcgccgaagagaccgaggaaacattcgtaaaagcagaaacggaaaagagcgattatgacacccccaattatttgctttcccccgccgccgcccacagacctaagtcccagaagtgcgtcgcctacaaattccgtctcgtggtgaaggccgacgggaaccaggaaaccaacaacggttgccacaaggtaaagatcatgccgtgtccctttcccgtcgcgaaagagccaagtactaagggtctgaacccaaaccccagccatcagatgactaaacggaagagggtggtactagtgaaggaaaggaaggccgcccaaactctctctgccattctgctggctttcattatcacatggaccccatacaacattatggtcctggtgagcacattttgtgataaatgcgtgcccgtcaccctgtggcacctcggctattggttgtgttatgtcaacagcactgtgaaccctatctgctatgcactatgcaaccggaccttcagaaagacatttaaaatgcttctgctttgtagatggaaaaagaagaaggtggaggaaaagctgtattggcagggaaacagcaagctcccatag

SEQ ID NO: 273061 - DNA, 69 bp, Artificial Sequence
  derived and/or modified sequence
atggagggcgacagctaccacaacgccaccaccgtgaacggcacccccgtaaatcaccaacctctgtag

SEQ ID NO: 273062 - DNA, 1599 bp, Artificial Sequence
  derived and/or modified sequence
atggagggtgattcatatcataatgcaacaaccgtgaatggtacaccggtgaatcaccaaccgctagaaaggcacaggctgtgggaggtgataacgatagcagcagtgactgccgtggtctccctgattactattgtcggaaatgttctggtgatgattagctttaaggtgaactcccagctcaaaactgttaacaattattacttgctgagcctggcttgtgccgatctgatcataggtatcttcagcatgaacctatacactacgtatatcctaatgggtagatgggccctggggtctttggcctgtgatctctggttagcccttgactatgtggccagcaatgcttcagtgatgaatttgctggtgatctcctttgacagatacttcagtatcacccgtcccctgacttatagagcgaaacggacccctaaacgcgcaggcatcatgataggactggcatggcttatctcatttatactctgggccccagccattctttgttggcagtatttagtggggaagagaaccgtgccactcgacgagtgtcagattcaattcttgagtgagccaactatcacattcggaaccgcaatcgctgcattttatatccccgtttcagtgatgaccatcttgtattgtaggatctatcgagaaacagagaaaaggaccaaggacctcgccgaccttcaggggtctgatagcgtgaccaaggccgaaaaaaggaaaccggcacacagagctttgtttcgttcctgcttacggtgtccacggccaactttggcccaaagggaaaggaaccaggcttcctggtcgtcgtctcggcgatcaacctccacgacaggaaagcctagccaagccaccggcccatccgccaattgggctaaagcggagcagctcacaacatgcagctcctacccgagcagcgaagacgaagacaaacctgcaaccgatccagtcctgcaggtagtctacaagtctcagggaaaggagagcccaggggaagagtttagcgccgaagagacggaggagacattcgtgaaggcagagaccgaaaagagcgactacgatacccccaattacctgctgtcccccgctgccgcacacagacccaagtctcagaagtgcgtggcttataaatttaggctcgtggtaaaagcagatggaaaccaggagacgaataacggatgtcacaaggtcaaaattatgccttgtccatttcctgtggccaaagaaccaagtacaaagggcttgaatcctaaccccagtcaccagatgactaagagaaaacgcgtggtgcttgttaaggaacggaaagctgctcagaccctgtccgctattctacttgccttcatcatcacttggacaccctataacattatggttttagtctccactttctgtgataaatgtgtgcccgtgaccctctggcatctcggatactggctgtgctatgtcaactccaccgtaaacccaatctgctatgctctgtgtaatcggacatttcggaaaacctttaaaatgctgctcttgtgcagatggaagaagaagaaggtggaggagaaactctactggcaggggaatagcaagctaccatag

SEQ ID NO: 273063 - DNA, 1599 bp, Artificial Sequence
  derived and/or modified sequence
atggagggcgatagttaccacaatgcaaccaccgtaaacggtacaccagtgaaccatcaaccactcgaacggcataggctgtgggaagttatcacgatcgcagccgtcaccgctgtggtaagcttgatcactatcgtcggaaacgtgctggtaatgatctctttcaaagttaacagccaactgaagacagttaacaattactatttactatccttagcctgcgccgacctcattatcggcattttctcaatgaatttgtacaccacatacatattgatgggtcgttgggccctggggtccctggcttgtgacttgtggctcgcactggactacgttgcgtctaacgcctctgtcatgaacctgctcgtgattagcttcgaccgctacttcagtataacccgaccgctgacataccgggcaaagcgaacgccaaaaagagcagggatcatgattggcctcgcgtggctcatctcatttatattatgggcgccagccattctgtgttggcagtatttggtcggcaagaggaccgttccgttggacgagtgccaaatacagttcttaagtgagcccactattaccttcggtactgctattgcagccttctatattcccgtgagcgtaatgacaatcctgtactgcaggatctatcgcgagaccgaaaagcgaacaaaagacctggccgaccttcagggcagcgattctgtgaccaaggctgagaaaagaaaaccggctcatcgggctctctttcgatcctgtctgcgctgcccgagacctacactggcgcagcgcgaaaggaatcaggcctcttggtcgtcgtcccgacgctctacctctaccaccggaaaaccttcccaggctaccggtccgtcagcgaactgggccaaagctgaacagcttacgacgtgttcttcatatccttcgagcgaggacgaagacaaaccagcaactgatccagtgctgcaagtagtttataaatcacaggggaaagagtcaccaggcgaagagttcagcgcggaggaaaccgaggaaacctttgtaaaggccgagactgagaaatcagattatgacaccccaaactatttactgtcccccgctgccgctcaccgacctaagtcacagaaatgcgtagcatacaagttccgactagtggtcaaagctgatggtaatcaggaaactaataacggatgccacaaggtcaaaatcatgccctgccccttccccgtggctaaggaacctagcacgaagggcctgaacccgaatcctagtcaccagatgacaaaaagaaaacgcgttgtgctcgtgaaagagagaaaggcggcacagaccctgagcgcaattctcttggcctttatcattacgtggaccccttacaacattatggtactggtctctacattttgtgacaagtgtgtccccgtgacattgtggcacctcgggtactggttatgttacgtgaattccacagtgaaccccatttgttacgcactgtgtaatcggacatttaggaagacctttaagatgctcctgctctgcaggtggaaaaaaaagaaggtggaggagaagctttactggcaggggaactcaaaattgccctag

SEQ ID NO: 273064 - DNA, 69 bp, Artificial Sequence
  derived and/or modified sequence
atggaaggagacagctaccacaacgcaaccactgttaatgggaccccagtgaatcaccaacccctctag

SEQ ID NO: 273065 - DNA, 3043 bp, Artificial Sequence
  derived and/or modified sequence
atcagatcaactgctgttaccagataaaggcaaaactcacccttctggttctataatcctatccaaatggagtcttcatctaccgcatactatcctaactaatgctacaggattatcaggaatacagatataaagacactgcaagaaataaaacactggcaaaataaaacatgaaaggaaagtagagaaggcattttgggtctcgaagcttactatttccagccagagttcaaattactgagcttcaaacaaaccactgccaggaacctaggaaatcattctcagccttgcaacttaaaatatggtacatggatcagtagcatcaagaatactcaggagcttttcagaaatgtgcaattgtgaaatatggccaagatggcggattagaagcagcggcagcccgcagctctcatgcaaaggaatgaaaggtgtgagtgaatacagcgccttcaactgaaatatccaggttctcgctttgggactaattgggcaaacaacttgacccacagaaaacaaagaaaagcagggtggggtgacggcccacctgggagcagcacagagccaaaggaacccccacctccagccaagggaagcgatgctggccaagaagagctgaaatagaaaacagcctagaacctaacactatttactgtaaaatttttgcaccaggatggaaggggattcttaccacaatgcaaccaccgtcaatggcaccccagtaaatcaccagcctttggaacgccacaggttgtgggaagtcatcaccattgcagctgtgactgctgtggtaagcctgatcaccattgtgggcaatgtcttggtcatgatctccttcaaagtcaacagccagctcaagacagttaacaactattacctgctcagcttagcctgtgcagatctcatcattggaatcttctccatgaacctctacaccacctacatcctcatgggacgctgggctctcgggagtctggcttgtgacctttggcttgcactggactacgtggccagcaacgcttctgtcatgaaccttctggtgatcagttttgaccgttacttttccatcacaagacccttgacatatcgggccaagcgtactccgaaaagggctggcatcatgattggcttggcctggctgatctccttcatcctctgggccccagcaatcctctgctggcagtacttggttgggaagcggacagttccactggatgagtgccagatccagtttctctctgagcccaccatcacttttggcactgccattgctgccttctacatccctgtttctgtcatgaccatcctctactgtcgaatctaccgggaaacagagaagcgaaccaaggacctggctgacctccagggttctgactctgtgaccaaagctgagaagagaaagccagctcatagggctctgttcagatcctgcttgcgctgtcctcgacccaccctggcccagcgggaaaggaaccaggcctcctggtcatcctcccgcaggagcacctccaccactgggaagccatcccaagccactggcccaagcgccaattgggccaaagctgagcagctcaccacctgtagcagctacccttcctcagaggatgaggacaagcccgccactgaccctgtcctccaagtggtctacaagagtcagggtaaggaaagcccaggggaagaattcagtgctgaagagactgaggaaacttttgtgaaagctgaaactgaaaaaagtgactatgacaccccaaactaccttctgtctccagcagctgctcatagacccaagagtcagaaatgtgtggcctataagttccgattggtggtaaaagctgacgggaaccaggagaccaacaatggctgtcacaaggtgaaaatcatgccctgccccttcccagtggccaaggaaccttcaacgaaaggcctcaatcccaaccccagccatcaaatgaccaaacgaaagagagtggtcctagtcaaagagaggaaagcagcccagacactgagtgccattctcctggccttcatcatcacatggaccccgtataacatcatggtcctggtttctaccttctgtgacaagtgtgtcccagtcaccctgtggcacttgggctattggttgtgctatgtcaatagcactgtcaaccccatctgctatgccctctgcaacagaaccttcaggaagacctttaagatgctgcttctctgccgatggaaaaagaaaaaagtggaagagaagttgtactggcaggggaacagcaagctaccctgaaaagtcaacaactcctctcgaaagaacaatgaccacagtcaacatcctctgaggatgagcaagctgattctggtttgtatattttcaaaaagaagacatctcattttgagtccttgaagatttttgtaaaggctcaagtttggttgccaaatggaaggggccatagctgcagcaattgctgacatattaaatgactcttgcctatgaccaaggccatttgatgccaggggagtttgccaatgaagtaaagggataggctcatggcccttcacaagaggaagcacactgggtaacaatgaacagtgactcagggaacttatgccccttctgtaggaaacagcagagaccaggtggaaaccttttcctgtggaaacctgtcatagaattttgtgcaatatgtatgtgtctatgaagctgtcttgtgccagtgagaaccagcaggagaatgtacaacagtgtcacttgttaacgagactgatattcaacaggcttctaagaatatgtatcttcataaactgatcactatctattatgcagctattatgtggtctatactatactgtggtttgttttcctgtccccacatctgagtgaaggtcttgctcttccctttcatatccaatgtcaattccttgtactcactgaacccatgctgatctccagggaaccatccttcctctcagaatccagagtctggaaggactgaaacctggtcatacccagtcctttcaaggggcctcttttctactaataaagatggatcaagtctccaca

SEQ ID NO: 273066 - DNA, 2687 bp, Artificial Sequence
  derived and/or modified sequence
agtggtacaagatgtggaggtggaagacagtgatattgtgtccggaatttattccttcttgtgggttctcggtctcactaacttcaagaatgaagccgcagaccgtcgcggtgtgttacagttcttaaagatggtgtgtccagagtttgttccttcagatgttcagatgtgtcgagtttcttccttccggtgggttcgtggtctccctgacttcagaagtgaagccacataccttcgcaatgctggccaagaagagctgaaatagaaaacagcctagaacctaacactatttactgtaaaatttttgcaccaggatggaaggggattcttaccacaatgcaaccaccgtcaatggcaccccagtaaatcaccagcctttggaacgccacaggttgtgggaagtcatcaccattgcagctgtgactgctgtggtaagcctgatcaccattgtgggcaatgtcttggtcatgatctccttcaaagtcaacagccagctcaagacagttaacaactattacctgctcagcttagcctgtgcagatctcatcattggaatcttctccatgaacctctacaccacctacatcctcatgggacgctgggctctcgggagtctggcttgtgacctttggcttgcactggactacgtggccagcaacgcttctgtcatgaaccttctggtgatcagttttgaccgttacttttccatcacaagacccttgacatatcgggccaagcgtactccgaaaagggctggcatcatgattggcttggcctggctgatctccttcatcctctgggccccagcaatcctctgctggcagtacttggttgggaagcggacagttccactggatgagtgccagatccagtttctctctgagcccaccatcacttttggcactgccattgctgccttctacatccctgtttctgtcatgaccatcctctactgtcgaatctaccgggaaacagagaagcgaaccaaggacctggctgacctccagggttctgactctgtgaccaaagctgagaagagaaagccagctcatagggctctgttcagatcctgcttgcgctgtcctcgacccaccctggcccagcgggaaaggaaccaggcctcctggtcatcctcccgcaggagcacctccaccactgggaagccatcccaagccactggcccaagcgccaattgggccaaagctgagcagctcaccacctgtagcagctacccttcctcagaggatgaggacaagcccgccactgaccctgtcctccaagtggtctacaagagtcagggtaaggaaagcccaggggaagaattcagtgctgaagagactgaggaaacttttgtgaaagctgaaactgaaaaaagtgactatgacaccccaaactaccttctgtctccagcagctgctcatagacccaagagtcagaaatgtgtggcctataagttccgattggtggtaaaagctgacgggaaccaggagaccaacaatggctgtcacaaggtgaaaatcatgccctgccccttcccagtggccaaggaaccttcaacgaaaggcctcaatcccaaccccagccatcaaatgaccaaacgaaagagagtggtcctagtcaaagagaggaaagcagcccagacactgagtgccattctcctggccttcatcatcacatggaccccgtataacatcatggtcctggtttctaccttctgtgacaagtgtgtcccagtcaccctgtggcacttgggctattggttgtgctatgtcaatagcactgtcaaccccatctgctatgccctctgcaacagaaccttcaggaagacctttaagatgctgcttctctgccgatggaaaaagaaaaaagtggaagagaagttgtactggcaggggaacagcaagctaccctgaaaagtcaacaactcctctcgaaagaacaatgaccacagtcaacatcctctgaggatgagcaagctgattctggtttgtatattttcaaaaagaagacatctcattttgagtccttgaagatttttgtaaaggctcaagtttggttgccaaatggaaggggccatagctgcagcaattgctgacatattaaatgactcttgcctatgaccaaggccatttgatgccaggggagtttgccaatgaagtaaagggataggctcatggcccttcacaagaggaagcacactgggtaacaatgaacagtgactcagggaacttatgccccttctgtaggaaacagcagagaccaggtggaaaccttttcctgtggaaacctgtcatagaattttgtgcaatatgtatgtgtctatgaagctgtcttgtgccagtgagaaccagcaggagaatgtacaacagtgtcacttgttaacgagactgatattcaacaggcttctaagaatatgtatcttcataaactgatcactatctattatgcagctattatgtggtctatactatactgtggtttgttttcctgtccccacatctgagtgaaggtcttgctcttccctttcatatccaatgtcaattccttgtactcactgaacccatgctgatctccagggaaccatccttcctctcagaatccagagtctggaaggactgaaacctggtcatacccagtcctttcaaggggcctcttttctactaataaagatggatcaagtctccaca

SEQ ID NO: 273067 - DNA, 572 bp, Artificial Sequence
  derived and/or modified sequence
cagataatgttttttaaagcagcttgatttggaagcgtgtgtaattctgaaatacgaacaagcagaacttttccagggggtcaaatgcatataggaacaaccaggatttctcattgctgaagcattcaatgaatctttaataagttctcaacactcagattgtttgtgatcagatcaactgctgttaccagataaaggcaaaactcacccttctggttctataatcctatccaaatggagtcttcatctaccgcatactatcctaactaatgctacaggattatcaggaatacagatataaagacactgcaagaaataaaacactggcaaaataaaacatgaaaggaaagtagagaaggcattttgggtctcgaagcttactatttccagccagagttcaaattactgagcttcaaacaaaccactgccagatgctggccaagaagagctgaaatagaaaacagcctagaacctaacactatttactgtaaaatttttgcaccaggatggaaggggattcttaccacaatgcaaccaccgtcaatggcaccccagtaaatcaccagcctttg

SEQ ID NO: 273068 - DNA, 1599 bp, Artificial Sequence
  derived and/or modified sequence
atggagggcgacagctaccacaacgccaccaccgtgaacggcacccccgtgaaccaccagcccctggagagacacagactgtgggaggtgatcaccatcgccgccgtgaccgccgtggtgagcctgatcaccatcgtgggcaacgtgctggtgatgatcagcttcaaggtgaacagccagctgaagaccgtgaacaactactacctgctgagcctggcctgcgccgacctgatcatcggcatcttcagcatgaacctgtacaccacctacatcctgatgggcagatgggccctgggcagcctggcctgcgacctgtggctggccctggactacgtggccagcaacgccagcgtgatgaacctgctggtgatcagcttcgacagatacttcagcatcaccagacccctgacctacagagccaagagaacccccaagagagccggcatcatgatcggcctggcctggctgatcagcttcatcctgtgggcccccgccatcctgtgctggcagtacctggtgggcaagagaaccgtgcccctggacgagtgccagatccagttcctgagcgagcccaccatcaccttcggcaccgccatcgccgccttctacatccccgtgagcgtgatgaccatcctgtactgcagaatctacagagagaccgagaagagaaccaaggacctggccgacctgcagggcagcgacagcgtgaccaaggccgagaagagaaagcccgcccacagagccctgttcagaagctgcctgagatgccccagacccaccctggcccagagagagagaaaccaggccagctggagcagcagcagaagaagcaccagcaccaccggcaagcccagccaggccaccggccccagcgccaactgggccaaggccgagcagctgaccacctgcagcagctaccccagcagcgaggacgaggacaagcccgccaccgaccccgtgctgcaggtggtgtacaagagccagggcaaggagagccccggcgaggagttcagcgccgaggagaccgaggagaccttcgtgaaggccgagaccgagaagagcgactacgacacccccaactacctgctgagccccgccgccgcccacagacccaagagccagaagtgcgtggcctacaagttcagactggtggtgaaggccgacggcaaccaggagaccaacaacggctgccacaaggtgaagatcatgccctgccccttccccgtggccaaggagcccagcaccaagggcctgaaccccaaccccagccaccagatgaccaagagaaagagagtggtgctggtgaaggagagaaaggccgcccagaccctgagcgccatcctgctggccttcatcatcacctggaccccctacaacatcatggtgctggtgagcaccttctgcgacaagtgcgtgcccgtgaccctgtggcacctgggctactggctgtgctacgtgaacagcaccgtgaaccccatctgctacgccctgtgcaacagaaccttcagaaagaccttcaagatgctgctgctgtgcagatggaagaagaagaaggtggaggagaagctgtactggcagggcaacagcaagctgccctag

SEQ ID NO: 273069 - DNA, 69 bp, Artificial Sequence
  derived and/or modified sequence
atggagggcgacagctaccacaacgccaccaccgtgaacggcacccccgtgaaccaccagcccctgtag

SEQ ID NO: 273070 - DNA, 762 bp, Artificial Sequence
  derived and/or modified sequence
atggagaagtggcagaccagatcaatctacaacgcagcagtgtggtattatcatcattgccaggatcgcatgcccatcgtgatggtgacggaagacgaagaggctattcaacagtacggctcggagaccgaaggcgttttcgtgattacttttaagaattatcttgacaatttttggccagacctgaaggctgctcacgagctgtgcgactctattttgcagtccaggcgggaaagggagaatgagtcccaggagagccacggcaaggaatatcctgaacatctgccactagaggtgttagaggcggggatcaaatcggggaggtacatacaaggcatcttaaatgtaaacaaacatagggcccagatcgaagccttcgtgcgcttgcaaggcgctagttcaaaggattctgatctggtcagcgacatcctgatacatggaatgaaagcaagaaaccggtcgattcacggggatgtcgtcgtagtagagctcctgcccaagaatgagtggaaggggaggaccgtagcactgtgtgagaatgactgcgacgataaagctagtggcgaaagtccctctgagccaatgcccactggactccaggggggtcgggctcatcgctttttaggagtgaatatctgcgtgagtaaatggaccttctgcgcctgttttcggaaaaatcgcaggtccggtaggggaaattgcaatcaccctgggggcaagcagtacttctcatacagttttctccgcagcagcgatgtgtag

SEQ ID NO: 273071 - DNA, 453 bp, Artificial Sequence
  derived and/or modified sequence
atggagaaatggcaaacaaggtctatctataacgccgcggtgtggtattaccaccattgtcaggacagaatgcctattgtcatggtgaccgaggatgaggaggccatccagcaatatggatcagaaaccgagggggttttcgtgattacatttaagaactatctggacaacttttggcccgacctgaaagccgcccatgagctgtgcgattcaattctacagtcccgaagagaacgtgaaaatgagagccaggagtcccacgggaaggagtaccccgagcatttgcccctggaggtgctggaagctggcataaagagcgggagatacattcagggtattctgaatgtgaataaacatcgggctcagattgaagccttcgtgcgtctccagggtgccagctccaaggacagcgacctggtgtccgatatcttgatccacggtatgaaggcttag

SEQ ID NO: 273072 - DNA, 174 bp, Artificial Sequence
  derived and/or modified sequence
atgcaaaccgcatgtcaggccgtgcaacaccaaagaggcaggcgacaatataataaactgaggaacctgctcaaagacgccagacatgactgtattctatttgctaacgagtttcagcaatgctgctacctgccgcgcgaacgcggagaatcgatggagaaatggcaaacttag

SEQ ID NO: 273073 - DNA, 294 bp, Artificial Sequence
  derived and/or modified sequence
atgcagaccgcctgtcaggcagtccagcaccagaggggacgaaggcagtacaataaactccgcaatctcttgaaagacgcaaggcatgattgtattttgttcgcaaacgagttccagcaatgttgctacctccctcgagaaaggggggagagtatggaaaaatggcagactagatctatttataatgctgcagtgtggtactatcaccactgccaagatcgcatgccaatcgtgatggtgaccgaggacgaagaggcaattcagcagtatggtagcgagaccgagggcgtgtag

SEQ ID NO: 273074 - DNA, 312 bp, Artificial Sequence
  derived and/or modified sequence
atgcagaccgcttgccaggccgtgcagcaccagcgaggacggaggcaatacaacaagttgaggaatcttcttaaggatgccagacatgattgcatcctgttcgcaaacgaatttcagcagtgctgctaccttcctagagagcggggggagtctatggagaagtggcagacccgatccatttacaacgcagccgtatggtactaccaccactgccaggatcgtatgccgattgtgatggtcaccgaggatgaagaagccattcaacaatatggctctgaaactgagggcgtgttcgtgataacattcaagtag

SEQ ID NO: 273075 - DNA, 762 bp, Artificial Sequence
  derived and/or modified sequence
atggagaagtggcagaccaggagcatctacaatgctgctgtgtggtactaccaccactgccaggacaggatgcccatcgtgatggtgacagaagatgaggaggccatccagcagtatggcagcgagacagaaggagtgtttgtgatcaccttcaagaactacctggacaacttctggccagacctgaaggccgcccacgagctgtgtgacagcatcctgcagagccggcgggagcgggagaatgaaagccaggagagccacggcaaggagtacccagagcacctgcccctggaggtgctggaggccggcatcaagagcggccgctacatccagggcatcctgaatgtgaacaagcaccgggcccagatcgaggcctttgtgcggctgcagggcgccagcagcaaggacagcgacctggtgtctgacatcctgatccacggcatgaaggccaggaacagaagcatccatggagatgtggtggtggtggagctgctgcccaagaatgagtggaagggccgcacagtggccctgtgtgaaaatgactgtgatgacaaggccagcggggagagccccagcgagcccatgcccaccggcctgcagggcggccgggcccaccgcttcctgggcgtgaacatctgtgtgtccaagtggaccttctgtgcctgcttcaggaagaacagaagaagtggccggggcaactgcaaccaccctgggggcaagcagtacttctcctacagcttcctgcggagcagtgatgtgtag

SEQ ID NO: 273076 - DNA, 453 bp, Artificial Sequence
  derived and/or modified sequence
atggagaagtggcagaccaggagcatctacaatgctgctgtgtggtactaccaccactgccaggacaggatgcccatcgtgatggtgacagaagatgaggaggccatccagcagtatggcagcgagacagaaggagtgtttgtgatcaccttcaagaactacctggacaacttctggccagacctgaaggccgcccacgagctgtgtgacagcatcctgcagagccggcgggagcgggagaatgaaagccaggagagccacggcaaggagtacccagagcacctgcccctggaggtgctggaggccggcatcaagagcggccgctacatccagggcatcctgaatgtgaacaagcaccgggcccagatcgaggcctttgtgcggctgcagggcgccagcagcaaggacagcgacctggtgtctgacatcctgatccacggcatgaaggcctag

SEQ ID NO: 273077 - DNA, 174 bp, Artificial Sequence
  derived and/or modified sequence
atgcagacagcctgccaggccgtgcagcaccagaggggccggcggcagtacaacaagctgaggaacctgctgaaggatgcccggcatgactgcatcctgtttgccaatgagttccagcagtgctgctacctgccccgggagcggggggagagcatggagaagtggcagacctag

SEQ ID NO: 273078 - DNA, 294 bp, Artificial Sequence
  derived and/or modified sequence
atgcagacagcctgccaggccgtgcagcaccagaggggccggcggcagtacaacaagctgaggaacctgctgaaggatgcccggcatgactgcatcctgtttgccaatgagttccagcagtgctgctacctgccccgggagcggggggagagcatggagaagtggcagaccaggagcatctacaatgctgctgtgtggtactaccaccactgccaggacaggatgcccatcgtgatggtgacagaagatgaggaggccatccagcagtatggcagcgagacagagggcgtgtag

SEQ ID NO: 273079 - DNA, 312 bp, Artificial Sequence
  derived and/or modified sequence
atgcagacagcctgccaggccgtgcagcaccagaggggccggcggcagtacaacaagctgaggaacctgctgaaggatgcccggcatgactgcatcctgtttgccaatgagttccagcagtgctgctacctgccccgggagcggggggagagcatggagaagtggcagaccaggagcatctacaatgctgctgtgtggtactaccaccactgccaggacaggatgcccatcgtgatggtgacagaagatgaggaggccatccagcagtatggcagcgagacagagggcgtgtttgtgatcaccttcaagtag

SEQ ID NO: 273080 - DNA, 762 bp, Artificial Sequence
  derived and/or modified sequence
atggagaagtggcagacccggagcatctacaacgccgccgtgtggtattatcatcactgtcaggatcgcatgcctatcgtcatggtcactgaggacgaagaagcaatccagcagtacgggagcgaaaccgagggagtgttcgtcattaccttcaagaactacctcgacaacttctggccagacttgaaggcagcccatgaactgtgcgattcgattctccagtctcgcagagagagagaaaatgaatcacaggaaagccatgggaaggaatatcctgagcatctgccactggaggttctggaggcgggcataaaatcagggcgttatattcaggggatccttaacgtgaataagcacagggcccagatcgaggcttttgtgaggttgcagggtgccagttccaaggatagcgatctggtatccgatatactcattcatggcatgaaagcgcgaaatagatcgatccacggcgatgttgtggtggtggagcttctcccaaaaaatgaatggaaaggcaggacagtggctttgtgtgagaatgattgcgacgacaaggcaagtggagagagcccaagcgagcctatgcctactggactgcagggaggcagagcgcaccggtttcttggagtcaacatttgcgttagcaagtggacgttctgtgcatgttttcgaaagaacaggagatcagggagagggaattgcaaccatcctggtggcaagcagtacttttcgtatagcttcttacggtccagcgacgtgtag

SEQ ID NO: 273081 - DNA, 453 bp, Artificial Sequence
  derived and/or modified sequence
atggagaagtggcagacccggagcatctacaacgccgccgtgtggtactaccaccattgccaggataggatgcctatcgtgatggtgaccgaggacgaagaagctatccaacagtacgggagcgagacagaaggtgtatttgtcatcacctttaaaaactacctggataatttttggcccgacttaaaagccgcccatgagttgtgtgatagtatcctgcagtcgcggcgtgaacgggaaaatgagagccaggagtctcacggaaaggagtaccctgagcacttgcctctcgaagtgttggaggctggcattaagtctggtcggtatatacagggaatcttgaacgtaaataaacacagagctcaaatcgaagcctttgtccgtctccagggagcaagctccaaggattccgatctggtcagcgatatactaatccacggaatgaaggcctag

SEQ ID NO: 273082 - DNA, 174 bp, Artificial Sequence
  derived and/or modified sequence
atgcagaccgcctgccaggccgtgcagcaccagcggggccggcggcagtataataagctgcgaaacttactgaaggatgcacgtcatgactgtatcttgtttgccaatgagtttcagcagtgttgttatcttcccagagaacgcggagagagtatggagaaatggcaaacatag

SEQ ID NO: 273083 - DNA, 294 bp, Artificial Sequence
  derived and/or modified sequence
atgcagaccgcctgccaggccgtgcagcaccagcggggccggcggcagtacaataagcttagaaatctcctgaaagatgcgcggcatgattgtatcctgtttgccaacgagttccagcaatgctgctatctcccccgagagcgcggggaaagcatggagaaatggcagaccaggtcgatttacaatgccgctgtgtggtactaccatcattgtcaggacaggatgcctatcgtcatggtgacagaggacgaagaagccatccaacagtacggttccgaaactgagggcgtgtag

SEQ ID NO: 273084 - DNA, 312 bp, Artificial Sequence
  derived and/or modified sequence
atgcagaccgcctgccaggccgtgcagcaccagcggggccggcggcaatacaacaagctgcgaaacctgttaaaagatgctcgtcatgactgtatcctgtttgcaaacgagtttcagcagtgctgctacctgccacgagaaaggggagaatcgatggagaagtggcagacacggtccatatacaacgctgccgtgtggtattatcatcattgtcaagaccggatgcctatcgtcatggtgacagaagacgaggaagccatccagcagtacgggtctgaaactgagggtgtgtttgtcatcacgtttaaatag

SEQ ID NO: 273085 - DNA, 762 bp, Artificial Sequence
  derived and/or modified sequence
atggagaaatggcagactcgcagcatttacaacgcagccgtgtggtactaccatcactgtcaggataggatgcccatagtgatggtcaccgaggacgaggaggcgatccaacaatacggttctgaaacagaaggagtcttcgtgataacctttaagaattatctggacaatttctggcccgacttgaaggccgctcacgagctgtgtgactcgatcctgcagtctcgacgagagcgggaaaatgaaagtcaggaaagccacggaaaagagtatcctgaacacctacccctggaggttctcgaagcaggcattaaaagtggtagatacatccagggcattttgaacgtgaacaagcacagggcacagatcgaggcttttgtgcgactgcaaggagcctcatctaaagactcagacctggtgtccgacatactcatccacggaatgaaggcaaggaaccgaagcatccacggtgatgtggttgtggtggagctcctgcccaagaacgaatggaaggggagaaccgttgccctctgcgaaaatgattgtgatgataaggctagcggagagtcaccatccgaaccaatgccaacgggtcttcaaggcggtcgcgctcacaggtttttgggcgtgaatatctgtgtttccaagtggaccttctgcgcctgctttagaaagaacaggcggtcaggcagagggaattgcaaccatccaggaggcaagcagtatttctcctatagctttttacgctcatcagatgtgtag

SEQ ID NO: 273086 - DNA, 453 bp, Artificial Sequence
  derived and/or modified sequence
atggaaaagtggcagactcgctccatctataacgccgctgtctggtactaccatcactgtcaggatagaatgccaattgttatggtgacagaggacgaagaggcaatccagcagtacggatcagaaacagagggggtgttcgtaatcacatttaagaattacttggataatttctggcccgacctcaaggccgctcacgaattgtgcgacagtattctgcagtctagacgcgaacgggagaatgagagtcaggaatcccacggcaaagaatatcccgaacacctgccccttgaggtgcttgaggctggaattaaatccggaagatatattcagggtatcctgaatgtgaataagcatcgggcacaaatcgaggctttcgtgagactgcagggcgcttcttccaaagatagtgacctggtctctgatattctgatccacggcatgaaagcttag

SEQ ID NO: 273087 - DNA, 174 bp, Artificial Sequence
  derived and/or modified sequence
atgcagacagcttgtcaggctgttcagcatcaaagaggcaggaggcagtataacaagctacgcaatttgcttaaggacgctagacatgactgtatcctgttcgcgaacgaattccagcagtgttgttacctgcctcgagagagaggggaaagcatggaaaaatggcagacatag

SEQ ID NO: 273088 - DNA, 294 bp, Artificial Sequence
  derived and/or modified sequence
atgcagacagcttgtcaggcagtccagcaccaacgcggtaggagacagtataacaagctgcgcaatttgctcaaagacgctcgccacgactgtatcctttttgccaacgaatttcaacaatgttgctatttaccccgagagcggggagaaagcatggaaaaatggcaaaccagaagcatatacaatgccgctgtctggtactaccatcactgccaggatagaatgcctatcgtgatggtgacagaagatgaagaggcaattcaacaatatggctccgagaccgaaggggtgtag

SEQ ID NO: 273089 - DNA, 312 bp, Artificial Sequence
  derived and/or modified sequence
atgcagacagcctgccaggccgtgcagcatcagcgcggacgacgtcagtataacaagttacggaatcttcttaaagatgccagacacgactgtatactgttcgctaatgagttccaacaatgctgctacctcccaagagagcgaggggagtccatggaaaagtggcagacccggagcatctacaacgcggcagtatggtactatcatcactgtcaggataggatgccgattgtgatggttaccgaggatgaggaagcaatccagcagtatggcagtgagaccgaaggggtctttgtgattaccttcaagtag

SEQ ID NO: 273090 - DNA, 762 bp, Artificial Sequence
  derived and/or modified sequence
atggagaagtggcagaccagaagcatctacaacgccgccgtgtggtactaccaccactgccaggacagaatgcccatcgtgatggtgaccgaggacgaggaggccatccagcagtacggcagcgagaccgagggcgtgttcgtgatcaccttcaagaactacctggacaacttctggcccgacctgaaggccgcccacgagctgtgcgacagcatcctgcagagcagaagagagagagagaacgagagccaggagagccacggcaaggagtaccccgagcacctgcccctggaggtgctggaggccggcatcaagagcggcagatacatccagggcatcctgaacgtgaacaagcacagagcccagatcgaggccttcgtgagactgcagggcgccagcagcaaggacagcgacctggtgagcgacatcctgatccacggcatgaaggccagaaacagaagcatccacggcgacgtggtggtggtggagctgctgcccaagaacgagtggaagggcagaaccgtggccctgtgcgagaacgactgcgacgacaaggccagcggcgagagccccagcgagcccatgcccaccggcctgcagggcggcagagcccacagattcctgggcgtgaacatctgcgtgagcaagtggaccttctgcgcctgcttcagaaagaacagaagaagcggcagaggcaactgcaaccaccccggcggcaagcagtacttcagctacagcttcctgagaagcagcgacgtgtag

SEQ ID NO: 273091 - DNA, 453 bp, Artificial Sequence
  derived and/or modified sequence
atggagaagtggcagaccagaagcatctacaacgccgccgtgtggtactaccaccactgccaggacagaatgcccatcgtgatggtgaccgaggacgaggaggccatccagcagtacggcagcgagaccgagggcgtgttcgtgatcaccttcaagaactacctggacaacttctggcccgacctgaaggccgcccacgagctgtgcgacagcatcctgcagagcagaagagagagagagaacgagagccaggagagccacggcaaggagtaccccgagcacctgcccctggaggtgctggaggccggcatcaagagcggcagatacatccagggcatcctgaacgtgaacaagcacagagcccagatcgaggccttcgtgagactgcagggcgccagcagcaaggacagcgacctggtgagcgacatcctgatccacggcatgaaggcctag

SEQ ID NO: 273092 - DNA, 174 bp, Artificial Sequence
  derived and/or modified sequence
atgcagaccgcctgccaggccgtgcagcaccagagaggcagaagacagtacaacaagctgagaaacctgctgaaggacgccagacacgactgcatcctgttcgccaacgagttccagcagtgctgctacctgcccagagagagaggcgagagcatggagaagtggcagacctag

SEQ ID NO: 273093 - DNA, 294 bp, Artificial Sequence
  derived and/or modified sequence
atgcagaccgcctgccaggccgtgcagcaccagagaggcagaagacagtacaacaagctgagaaacctgctgaaggacgccagacacgactgcatcctgttcgccaacgagttccagcagtgctgctacctgcccagagagagaggcgagagcatggagaagtggcagaccagaagcatctacaacgccgccgtgtggtactaccaccactgccaggacagaatgcccatcgtgatggtgaccgaggacgaggaggccatccagcagtacggcagcgagaccgagggcgtgtag

SEQ ID NO: 273094 - DNA, 312 bp, Artificial Sequence
  derived and/or modified sequence
atgcagaccgcctgccaggccgtgcagcaccagagaggcagaagacagtacaacaagctgagaaacctgctgaaggacgccagacacgactgcatcctgttcgccaacgagttccagcagtgctgctacctgcccagagagagaggcgagagcatggagaagtggcagaccagaagcatctacaacgccgccgtgtggtactaccaccactgccaggacagaatgcccatcgtgatggtgaccgaggacgaggaggccatccagcagtacggcagcgagaccgagggcgtgttcgtgatcaccttcaagtag

SEQ ID NO: 273095 - DNA, 1504 bp, Artificial Sequence
  derived and/or modified sequence
gcgcccagcccttcttcacctgccgtccaggtatcatcctagtcttccctccgtctctgggatgggaaactcttgtctagtgatgtgactcattacgtgatcccagactggaaagttgttcaagattatcttgagatccttgagtttcctgagttgaagggaattattttcatgcagacagcttgtcaagctgtgcagcatcaaagaggcaggagcaatgctgctatctgccacgggaaagaggagagtccatggagaagtggcagaccaggagcatatacaacgcagctgtttggtactatcatcactgccaggacaggatgccaattgttatggtgacagaagatgaagaggcaattcagcagtatggaagtgaaacagaaggagtattcgtgattactttcaagaattacctggacaatttctggcctgatttaaaagctgcccacgagctttgtgattctatccttcagtctcgacgggagagagagaatgagagtcaggagagccatgggaaggagtacccagaacatcttcccctggaagtgttagaagctgggattaaatctggacgctatatccagggaattctgaatgtcaacaaacacagagcccaaatagaagcttttgttcgacttcaaggagccagcagtaaagattcagatttagtcagtgacatcctaatccacgggatgaaggctcgaaaccgctcaattcatggagatgtggtagttgtggagctgcttcctaaaaatgaatggaaaggaagaaccgtagccctgtgtgagaatgactgtgacgacaaggcttcgggcgagtccccaagtgagcccatgcctacaggacttcagggtggtcgtgcgcatcgattcctgggagtcaacatctgtgtatccaaatggacattttgtgcgtgttttaggaagaatcggagatctggaaggggaaattgcaaccatcctggtggaaaacagtatttcagttattcctttctcagaagctcagatgtgtgagatgccagtaaacacaccagaaagtccctggaaggtgagtcctgaagaggaacaaaaacgtaaagacttgaggaaaagccatctcgtattcagcattgaccccaaaggttgtgaagatgtggatgacacactctcagtcagaaccttaaataatggcaacctggaacttggggtccacatcgcagatgtaacacactttgtggcaccaaattcttacattgatattgaagctagaacaagggccaccacttattatctagcagatcgtcgctatgacatgctgccttccgtcctcagtgcagatttgtgttcccttctgggaggcgttgataggtatgctgtaagcatcatgtgggaactggataaagcctcttatgaaattaagaaagtgtggtatggcagaaccattattcgatcagcatacaaactgttctatgaagcagcccaagaactactggatggaaacttaagcgttgttgatgatattccag

SEQ ID NO: 273096 - DNA, 360 bp, Artificial Sequence
  derived and/or modified sequence
ctaatcttggacagctgcgcccagcccttcttcacctgccgtccaggtatcatcctagtcttccctccgtctctgggatgggaaactcttgtctagtgatgtgactcattacgtgatcccagactggaaagttgttcaagattatcttgagatccttgagtttcctgagttgaagggaattattttcatgcagacagcttgtcaagctgtgcagcatcaaagaggcaggagacagtataacaaactgcgaaacctgctgaaggatgcgcgtcatgattgcattctctttgctaatgaattccagcaatgctgctatctgccacgggaaagaggagagtccatggagaagtggcagaccag

SEQ ID NO: 273097 - DNA, 792 bp, Artificial Sequence
  derived and/or modified sequence
tcccgccgcaacctcgcgccgtggagaaatggggaggtcccgagctgggagcccccgggagctacaggccagctgctgccgctgcgaagctgacatcgcctgctttgcagccacaggtttcctgacctgcccgcactgttgccccagacttttcccccagtggagagccacttcaccgtagatttgtgaactctctgggcccgcactggagcggaaggtcacggggaagttggactggggactcctgggccccagtccttggtttctaggccacaagggtggccgatagaacgatgcacgttactggctctcttcccccatgggaggatgagaatgggctgggggtccttgtcagcgaatgtgtggaatcctccaaacattgtgattaagatgggaaactcttgtctagtgatgtgactcattacgtgatcccagactggaaagttgttcaagattatcttgagatccttgagtttcctgagttgaagggaattattttcatgcagacagcttgtcaagctgtgcagcatcaaagaggcaggagacagtataacaaactgcgaaacctgctgaaggatgcgcgtcatgattgcattctctttgctaatgaattccagcaatgctgctatctgccacgggaaagaggagagtccatggagaagtggcagaccaggagcatatacaacgcagctgtttggtactatcatcactgccaggacaggatgccaattgttatggtgacagaagatgaagaggcaattcagcagtatggaagtgaaacagaaggagtat

SEQ ID NO: 273098 - DNA, 504 bp, Artificial Sequence
  derived and/or modified sequence
gacacggaggcgtaggccccgcggcctgcgcccgctcgccggcctcaccccccggctctctgccggtggggacccagcggcccggatgggaaactcttgtctagtgatgtgactcattacgtgatcccagactggaaagttgttcaagattatcttgagatccttgagtttcctgagttgaagggaattattttcatgcagacagcttgtcaagctgtgcagcatcaaagaggcaggagacagtataacaaactgcgaaacctgctgaaggatgcgcgtcatgattgcattctctttgctaatgaattccagcaatgctgctatctgccacgggaaagaggagagtccatggagaagtggcagaccaggagcatatacaacgcagctgtttggtactatcatcactgccaggacaggatgccaattgttatggtgacagaagatgaagaggcaattcagcagtatggaagtgaaacagaaggagtattcgtgattactttcaag

SEQ ID NO: 273099 - protein, 450 aa, Artificial Sequence
  derived and/or modified sequence
MSAIQAAWPSGTECIAKYNFHGTAEQDLPFCKGDVLTIVAVTKDPNWYKAKNKVGREGIIPANYVQKREGVKAGTKLSLMPWFHGKITREQAERLLYPPETGLFLVRESTNYPGDYTLCVSCDGKVEHYRIMYHASKLSIDEEVYFENLMQLVEHYTSDADGLCTRLIKPKVMEGTVAAQDEFYRSGWALNMKELKLLQTIGKGEFGDVMLGDYRGNKVAVKCIKNDATAQAFLAEASVMTQLRHSNLVQLLGVIVEEKGGLYIVTEYMAKGSLVDYLRSRGRSVLGGDCLLKFSLDVCEAMEYLEGNNFVHRDLAARNVLVSEDNVAKVSDFGLTKEASSTQDTGKLPVKWTAPEALREKKFSTKSDVWSFGILLWEIYSFGRVPYPRIPLKDVVPRVEKGYKMDAPDGCPPAVYEVMKNCWHLDAAMRPSFLQLREQLEHIKTHELHL

SEQ ID NO: 273100 - protein, 399 aa, Artificial Sequence
  derived and/or modified sequence
MSAIQAAWPSGTECIAKYNFHGTAEQDLPFCKGDVLTIVAVTKDPNWYKAKNKVGREGIIPANYVQKREGVKAGTKLSLMPWFHGKLSIDEEVYFENLMQLVEHYTSDADGLCTRLIKPKVMEGTVAAQDEFYRSGWALNMKELKLLQTIGKGEFGDVMLGDYRGNKVAVKCIKNDATAQAFLAEASVMTQLRHSNLVQLLGVIVEEKGGLYIVTEYMAKGSLVDYLRSRGRSVLGGDCLLKFSLDVCEAMEYLEGNNFVHRDLAARNVLVSEDNVAKVSDFGLTKEASSTQDTGKLPVKWTAPEALREKKFSTKSDVWSFGILLWEIYSFGRVPYPRIPLKDVVPRVEKGYKMDAPDGCPPAVYEVMKNCWHLDAAMRPSFLQLREQLEHIKTHELHL

SEQ ID NO: 273101 - DNA, 1353 bp, Artificial Sequence
  derived and/or modified sequence
atgtctgccatccaggctgcgtggccatcaggcactgaatgtatagccaaatataactttcacgggacagcagagcaggatctaccattttgcaaaggtgacgttctgaccatagtcgcagttacaaaggaccctaattggtacaaagcaaagaacaaagttggtagggaggggatcatccctgccaattatgtgcaaaaaagagaaggggtgaaggccgggacaaagcttagcctcatgccatggttccatggaaagatcaccagggaacaggcggagcggctgctgtatccaccagaaacgggactttttctggtgcgtgagtcaacaaattatcccggagactataccctgtgcgtgagttgtgatggcaaagtggaacactacaggatcatgtatcatgcgagcaaactttctatagacgaagaagtttattttgagaaccttatgcagcttgtggagcattacacatctgacgccgatggactgtgtacccggttgatcaaaccaaaggtgatggaaggcacggtcgccgcgcaggacgagttctaccgatctggatgggccctgaacatgaaggaattaaaactcttgcagactatcgggaagggcgaatttggagacgtcatgctaggtgactaccgtgggaacaaggtggctgtcaaatgtattaaaaatgacgcaaccgctcaagcattcctggcagaagctagcgtaatgacgcaactccgccactccaatttagttcagttgctgggcgtcatcgtggaggaaaaaggtggtttgtatatagttacagagtatatggccaaggggtctctggtggattacttacgttccaggggacggtcggtcctgggcggtgactgtctgctgaaattctctttagacgtgtgcgaagctatggagtatctcgaaggtaacaattttgtccatcgggacctagctgcacggaacgtgttagtctcagaagataatgtagcgaaagtgtccgattttgggctgactaaagaagctagctctactcaggatacaggcaaactgcctgtaaagtggaccgctcccgaggcgctgagagaaaaaaaattctcaacaaagtccgatgtctggtcctttggaatcctgttgtgggaaatctattccttcggaagagtgccttatcctcgtatcccactcaaggatgtggttcccagagtggagaaggggtataaaatggacgctccagatggctgtccccctgcagtctatgaagtcatgaagaattgttggcacttagacgctgctatgaggccgagctttctgcagctgcgagagcaactggagcacatcaaaactcatgagctccacttgtag

SEQ ID NO: 273102 - DNA, 1353 bp, Artificial Sequence
  derived and/or modified sequence
atgtccgccatccaggcagcttggccatcaggcaccgagtgtatcgcaaaatataattttcacggcaccgccgagcaggatctccccttttgcaagggggatgttttgaccattgtcgcggtcactaaggatccaaattggtacaaagcgaaaaacaaagtgggccgcgaaggcataattcccgctaactatgtccagaagcgggagggagtgaaagctggaactaagctgtccctaatgccgtggtttcatggcaaaatcactagagagcaagccgagcgcctcttgtaccccccggagacagggcttttcctggtgagagaatccaccaattaccccggagactacaccctgtgcgtttcttgtgacggtaaggtcgagcactaccgaatcatgtatcatgcatccaagttatctatcgatgaagaggtttacttcgagaatctgatgcagctggtggagcattacactagtgatgctgacggactgtgcactcggctgatcaagcccaaagtgatggaagggacggtcgccgcccaagacgaattctatagaagtgggtgggcgttgaacatgaaggagctcaaactcctccagaccatcgggaagggggagttcggcgatgttatgctgggggactacagggggaacaaggttgccgtcaagtgtattaagaacgacgccaccgcccaagctttcctggccgaggctagcgtcatgactcaactgagacatagtaacctggtacaactgctaggagtgatcgttgaggaaaagggaggtttgtacatagtgaccgagtacatggccaaagggtccctggtggactacttacgcagccgcgggcgcagtgtactaggcggtgactgtctgctcaaattcagtctcgacgtttgtgaggccatggaatacctcgaaggcaacaacttcgtacatagagacctggcggccagaaacgtcctcgtgagcgaagacaatgtggcaaaagtctcagacttcggattaaccaaagaggccagcagtactcaggacaccggcaaacttccagtaaaatggaccgcacctgaagcactgagggaaaagaaattcagcaccaagagcgacgtgtggtcatttggcattctactctgggaaatatattcgtttgggcgcgttccttacccacgaatcccattgaaggacgtagtgcctagagtggaaaagggttataagatggatgcgcctgacgggtgcccacccgctgtgtacgaagtaatgaagaactgctggcatttggacgcagcaatgcgacctagcttccttcaactccgcgagcaactcgagcacatcaagacccacgagctgcacctctag

SEQ ID NO: 273103 - DNA, 1200 bp, Artificial Sequence
  derived and/or modified sequence
atgagcgctattcaagccgcttggccttcaggcactgagtgcattgccaaatacaattttcatggcacagcagaacaagacttgcccttctgtaagggtgacgtgcttaccatagttgcagttaccaaggaccccaattggtataaggcaaagaataaggtgggaagagagggcatcatcccggccaactacgtgcagaaacgtgaaggtgtcaaagctggaaccaaactctccttgatgccgtggttccacggcaaactctccattgacgaagaggtttactttgagaatctgatgcagttggtcgaacattatacctctgacgcagatggactatgtacacggctgatcaaaccgaaagtcatggagggcacagtagccgctcaggatgagttctaccggtccggctgggctttgaacatgaaggagctaaagctgcttcagaccattgggaaaggcgaatttggggacgtcatgctgggcgactaccgaggcaacaaggtggccgtgaagtgcatcaaaaatgacgcaacagctcaggcgttcttagcagaggccagcgtgatgacgcaactgcgccattctaatctcgtgcagcttctcggggtgattgtcgaggaaaaaggcggactgtacatcgttactgagtatatggcaaaaggtagcctggtcgattatctgcggtcaaggggccgaagcgtgttaggcggtgattgcttgctgaaattctcgctggacgtatgtgaagccatggaatatctggagggtaacaatttcgtgcacagagatctggctgcaagaaatgtattggtttcggaagacaacgtcgcaaaagtgagcgacttcgggctcacgaaggaagccagcagcactcaagacaccggaaagctacccgtcaaatggaccgctcccgaggccttgagagagaagaaattctctactaagagtgacgtctggagcttcggcattttactctgggaaatttacagctttggcagggtaccctaccccaggatccccctgaaggacgtggtgccgagggtcgagaaagggtataaaatggatgcacccgacgggtgtcccccggccgtctacgaggtcatgaaaaactgctggcatctggacgccgccatgcgtccgtcctttctccagctacgggagcagctggagcacataaagacccacgagttgcatctgtag

SEQ ID NO: 273104 - DNA, 1353 bp, Artificial Sequence
  derived and/or modified sequence
atgtccgccatccaagcagcctggccttcaggtaccgagtgtatcgccaagtacaacttccacggaactgccgagcaggacctgccattctgcaagggagacgtgctcacaattgttgctgttactaaggatcccaactggtataaagccaaaaataaggtgggaagagaagggatcatccctgctaactatgtgcagaaaagggagggcgtgaaagccgggaccaagctgtccctgatgccatggtttcacgggaagattaccagggaacaggcagagagattgctgtaccccccggagaccggcttatttttggtacgtgaaagtactaattatccaggcgactacaccctgtgtgtgagttgcgacggtaaggtcgagcactacaggatcatgtatcatgcctctaaactctcaatcgacgaagaagtgtattttgaaaacctgatgcagcttgtggagcactatacgtccgatgcagatgggctgtgtacacggcttatcaagcccaaggtgatggaggggaccgtggccgctcaggacgagttttaccgaagcggatgggctctgaacatgaaggagctgaaactgctccagaccatcgggaagggggaatttggcgacgtcatgttaggagattatagggggaacaaagtggccgtcaagtgtataaagaatgacgctacggcgcaagctttcttggcagaggcgagtgtgatgacacaactgaggcactctaatttagtacagctcctgggggtgattgtagaggagaaaggggggctctatatagtgacggaatatatggccaagggatccctcgtcgactatctgcgttctaggggtcgcagtgttttaggaggagattgtctcctgaagtttagcctggatgtgtgtgaggccatggaatatctggagggcaacaatttcgtgcaccgcgaccttgcagcaaggaatgtactcgtgagcgaggataatgttgccaaggtaagcgactttggtctgacgaaggaagcgtcatctacacaagacacaggcaaactgcctgttaaatggaccgctcctgaggctctgagagaaaagaagttctctacaaaaagtgatgtctggtctttcggaatcctgttgtgggagatttactcttttggtcgcgtgccgtacccccgcatccctctcaaagacgtcgttcctagggttgagaaggggtacaagatggatgctcccgatggctgccccccagcagtctacgaggtcatgaaaaactgttggcatctggacgccgccatgaggcccagttttttacagctgcgagaacaactggagcacattaagacacacgaattacatctgtag

SEQ ID NO: 273105 - DNA, 1353 bp, Artificial Sequence
  derived and/or modified sequence
atgtctgccatccaggccgcctggcccagcggcacagaatgtattgccaagtacaacttccatggaacagctgagcaggacctgcccttctgcaagggagatgtgctgaccatcgtggccgtgaccaaggaccccaactggtacaaggccaagaacaaggtgggccgggagggcatcatcccagccaactacgtgcagaagcgggagggcgtgaaggccggcaccaagctgagcctgatgccctggttccacggcaagatcacccgggagcaggccgagcggctgctgtacccacctgagaccggcctcttcctggtgcgggagagcaccaactacccaggggactacaccctgtgtgtgtcctgtgatggcaaggtggagcactaccgcatcatgtaccacgccagcaagctgagcattgatgaggaggtgtactttgagaacctgatgcagctggtggagcactacaccagtgatgctgatggcctgtgcaccaggctcatcaagcccaaggtgatggagggcaccgtggccgcccaggatgagttctaccgcagcggctgggccctgaacatgaaggagctgaagctgctgcagaccatcggcaaaggagaatttggagatgtgatgctgggggactaccggggcaacaaggtggccgtgaagtgcatcaagaatgatgccacagcccaggccttcctggccgaggcctctgtgatgacccagctgcggcacagcaacctggtgcagctgctgggcgtgattgtggaggagaagggcggcctgtacatcgtgacagagtacatggccaagggcagcctggtggactacctgcggagccggggccgctctgtgctgggcggggactgcctgctgaagttcagcctggatgtgtgtgaggccatggagtacctggagggcaacaactttgtgcaccgggacctggccgccagaaatgtgctggtgtctgaggacaacgtggccaaggtgtctgactttggcctgaccaaggaggccagcagcacccaggacaccgggaagctgcctgtgaagtggacagcccctgaggccctgcgggagaagaagttcagcaccaagagtgatgtgtggagctttggcatcctgctgtgggagatctacagctttggccgggtgccctacccccgcatccccctgaaggatgtggtgccccgggtggagaagggctacaagatggatgccccagatggctgccccccagctgtgtatgaggtgatgaagaactgctggcacctggatgctgccatgaggcccagcttcctgcagctgcgggagcagctggagcacatcaagacccatgagctgcacctgtag

SEQ ID NO: 273106 - DNA, 1200 bp, Artificial Sequence
  derived and/or modified sequence
atgtctgccatccaggccgcctggcccagcggcacagaatgtattgccaagtacaacttccatggaacagctgagcaggacctgcccttctgcaagggagatgtgctgaccatcgtggccgtgaccaaggaccccaactggtacaaggccaagaacaaggtgggccgggagggcatcatcccagccaactacgtgcagaagcgggagggcgtgaaggccggcaccaagctgagcctgatgccctggttccacggcaagctgagcattgatgaggaggtgtactttgagaacctgatgcagctggtggagcactacaccagtgatgctgatggcctgtgcaccaggctcatcaagcccaaggtgatggagggcaccgtggccgcccaggatgagttctacagaagtggctgggccctgaacatgaaggagctgaagctgctgcagaccatcggcaagggggagtttggagatgtgatgctgggggactaccggggcaacaaggtggccgtgaagtgcatcaagaatgatgccacagcccaggccttcctggccgaggcctctgtgatgacccagctgcggcacagcaacctggtgcagctgctgggcgtcatcgtggaggagaagggcggcctgtacatcgtgacagagtacatggccaagggcagcctggtggactacctgcggagccggggccgctctgtgctgggcggggactgcctgctgaagttcagcctggatgtgtgtgaggccatggagtacctggagggcaacaactttgtgcaccgggacctggccgccagaaatgtgctggtgtctgaagataatgtggccaaggtgtctgactttggcctgaccaaggaggccagcagcacccaggacaccgggaagctgcctgtgaagtggacagcccctgaggccctgcgggagaagaagttcagcaccaagagtgatgtgtggagctttggcatcctgctgtgggagatctacagctttggccgggtgccctacccccgcatccccctgaaggatgtggtgccccgggtggagaagggctacaagatggatgccccagatggctgccccccagctgtgtatgaggtgatgaagaactgctggcacctggatgctgccatgaggcccagcttcctgcagctgcgggagcagctggagcacatcaagacccatgagctgcacctgtag

SEQ ID NO: 273107 - DNA, 1353 bp, Artificial Sequence
  derived and/or modified sequence
atgagcgccatccaggccgcctggcccagcggcaccgagtgcatcgccaagtataactttcacgggacggcggagcaggatcttcccttctgtaaaggagatgtgctgactattgtggccgttaccaaggaccctaactggtataaagctaaaaacaaagtcggccgcgaggggataattccagccaattatgtgcagaagagggagggcgtgaaggcgggaaccaaactgagcctcatgccatggttccatggcaaaataaccagggagcaggcagaacgcctactgtacccacctgaaaccggtctcttcctggtgcgggaatccactaactatccaggggattacacattgtgtgttagttgtgatgggaaagttgaacactatcgtatcatgtatcacgcatcaaagttgagcattgacgaggaggtgtattttgaaaacctgatgcaactggtcgaacactatacatcagacgctgacggattatgtaccagactgatcaagcccaaagtcatggaagggacggtggccgctcaggatgaattttacaggagtgggtgggccttgaatatgaaggaattaaaattgcttcaaaccatcgggaagggtgaattcggcgacgtgatgctcggcgactatcgcgggaataaagtcgcagtgaagtgcataaaaaacgatgcaactgcccaggcattcctggctgaggccagcgtgatgacccagctgaggcattcgaatctcgtccagctgctgggtgttatcgtggaggagaaaggagggctgtatattgtaactgaatacatggctaaaggcagtctcgtggactacctgcgatcacgcggaagatccgttttagggggtgactgtctgctgaaattcagcctcgatgtctgtgaggcgatggagtacctggaaggaaataacttcgtccatcgggatctggccgccaggaacgtcctggtctcagaagataacgtagcgaaggttagcgatttcggtctgactaaagaggcctcaagtacccaggacacggggaagctccctgtgaagtggactgctcccgaggcgctccgggagaagaaattctccaccaaatctgatgtctggagcttcggaattctcttgtgggaaatctacagtttcggccgtgtgccctatccgaggattccactgaaagacgtggtaccccgagtggagaagggctataaaatggatgctcccgacgggtgtcccccagcagtgtatgaggtcatgaagaattgctggcacctggatgcagcaatgcgcccaagtttcttgcagctcagggagcagctcgagcatatcaaaactcatgaattgcacctctag

SEQ ID NO: 273108 - DNA, 1353 bp, Artificial Sequence
  derived and/or modified sequence
atgagcgccatccaggccgcctggcccagcggcaccgagtgcatcgcaaaatataactttcatggaactgccgagcaggacctgcctttctgtaagggcgacgtgctgacaatcgtggctgtcaccaaagatcctaactggtataaagccaaaaacaaggtcgggcgtgaagggatcatccctgctaattatgtgcagaagagggagggcgtaaaggccggaaccaagctatccctcatgccatggttccatggtaagattacgagagagcaagctgaaaggctgctgtatccccctgagaccggcctcttccttgtacgagagtccacaaactaccctggagactacaccctgtgtgtgtcttgcgatggcaaggtcgagcactatcgcatcatgtaccatgcatccaaactgagcattgatgaagaggtgtacttcgagaatcttatgcagctggttgaacattatacttccgacgctgacgggctctgcaccagactgatcaagcccaaagtgatggagggaaccgttgccgcccaggacgaattctataggtccggctgggcactgaacatgaaagagcttaaactcctgcagactataggaaagggtgaattcggtgacgttatgttgggggattatagaggcaataaagtggcagtcaagtgcatcaagaacgatgctaccgcccaggccttcctagcggaagcaagtgttatgacacagttgaggcattctaatctggtgcagctactgggcgttatcgtggaagagaagggagggctatatatcgtcactgagtacatggcaaagggcagtctggtcgattatcttcgatctagaggaagatctgtgttaggaggggactgcttgctcaagttttctctggacgtctgtgaggctatggaatacctggaaggcaataatttcgtacatagggacctggccgctcgtaatgtgctagtaagtgaagataacgtcgctaaggttagcgactttgggttgaccaaggaggccagcagcacacaggacacaggaaagctcccagttaaatggaccgcccctgaagcactgagagagaagaaattttctactaaatcagacgtgtggtcattcggcatcctgctgtgggaaatctattcttttgggagagtaccttaccctcgtatcccgctcaaagatgtggtccctcgcgtagagaagggatataagatggacgcccccgacgggtgccctccggcagtgtacgaggtcatgaaaaactgttggcacctcgacgccgcgatgagacccagctttctgcaattacgcgagcaactagaacacatcaaaacacacgaactccatctttag

SEQ ID NO: 273109 - DNA, 1200 bp, Artificial Sequence
  derived and/or modified sequence
atgagcgccatccaggccgcctggcccagcggcaccgagtgcatcgccaagtataatttccatggcacagccgaacaagacctccctttctgtaagggcgatgtcctcacaattgttgccgtaacaaaggacccaaattggtacaaggctaagaataaagttggcagggagggaattatacccgcgaactatgttcagaaacgtgagggggtgaaggctggtacaaaactttcattgatgccgtggttccacggcaaactaagtattgatgaggaagtgtacttcgaaaatctgatgcagctcgtcgagcactatacctcagacgctgacgggctttgcacgcggttaatcaagccgaaagtgatggagggtacggtcgccgcacaagacgagttctacagatctggctgggccctcaacatgaaggagttgaaactgctgcagacgattggaaagggagagtttggcgatgtgatgcttggagattatcgaggcaataaagttgccgtcaagtgcattaagaatgacgctacagcgcaagcctttcttgccgaagccagcgtaatgacccaactcaggcatagtaatttggttcagctgctgggcgttattgtcgaagagaaggggggcctgtatatcgttactgagtacatggccaagggatccctggttgattacctgaggtcacgagggaggtcagtgcttggtggcgattgtcttctcaagtttagccttgatgtgtgcgaggcgatggaatacctcgagggaaataatttcgtgcatagagatttggccgcccgaaacgtcctcgtgtcagaagataatgttgcgaaagtgagtgacttcggactgacaaaggaggccagctcaacgcaagatacaggtaagcttccagtaaagtggacagctccagaggcattaagagagaagaagtttagcaccaagtctgatgtgtggagtttcggcattcttctgtgggagatctactccttcggccgcgtgccctacccccgcattcctcttaaagacgtcgtgccacgagtggagaaggggtacaaaatggatgccccagatggctgccctcctgcagtgtatgaggtcatgaaaaattgctggcatctggatgctgccatgcgccccagtttcctgcaactccgcgagcagctggaacacattaagacccatgaactccatttgtag

SEQ ID NO: 273110 - DNA, 1353 bp, Artificial Sequence
  derived and/or modified sequence
atgagcgccatccaggccgcctggcccagcggcaccgagtgcatcgccaagtacaacttccacggcacagcggagcaagatctacccttttgtaagggagatgtgcttacgattgttgccgtgaccaaggatcccaactggtacaaagctaagaacaaagtggggcgcgaggggatcatcccagcaaattatgtgcagaaacgggagggcgtgaaggccgggacaaagctcagtcttatgccatggttccacgggaagattacccgggagcaggctgaacggctgctctatcctcccgagactggtctgtttttggtccgtgagagtacaaactaccccggggattataccttatgcgtctcctgcgacggtaaagtagaacattatcgaatcatgtaccatgcctccaaactgagcattgatgaagaggtctattttgagaatcttatgcaacttgtcgagcactatacatctgacgctgacggactatgcacccgcctgattaaacctaaagtaatggaaggcactgttgcagcccaggatgagttttaccgctctggttgggccctgaacatgaaggaactgaagttgctacagaccatcggaaaaggcgagtttggagacgtaatgctcggagactaccgaggcaacaaggtcgctgtaaaatgcattaaaaacgatgcaacagcccaggctttcctggccgaagcaagcgtcatgactcaactaagacattcaaacctggttcagctgctaggagtaatagttgaggagaagggaggcctttacatagtcacagagtatatggctaagggctcgttagttgattatctcaggagccgtggaagatctgtgcttgggggtgattgtctgcttaaattttctctggacgtatgtgaagctatggagtaccttgaaggtaataactttgtccatcgcgacttagctgctcgtaacgtgctggtgtcggaggataacgtcgcgaaggtgtcagacttcggcctcacaaaggaggcctcctctacccaagacaccggtaaactcccggtcaaatggacagcccctgaagcacttcgagaaaagaaattttccacaaaaagtgacgtctggtctttcgggattctgctgtgggaaatatacagcttcggcagagtcccatatccccgcattccgctgaaggacgtggttccacgcgtggagaagggctataagatggacgcacccgatggctgtccaccagcagtgtatgaggtcatgaagaactgttggcacttagacgcagccatgcgtccttcgtttttgcagctaagggagcaactggaacacattaagacccatgagcttcacctctag

SEQ ID NO: 273111 - DNA, 1353 bp, Artificial Sequence
  derived and/or modified sequence
atgtcagcaatccaggccgcatggccttctggcacagaatgcatcgctaaatacaatttccatggtaccgccgagcaggatctccctttttgcaaaggcgacgtcctgacgatcgtagccgtgactaaggaccccaattggtacaaggccaaaaacaaagtgggccgtgaaggcatcattccagccaattacgtacagaaaagggaaggggtgaaagcaggaactaagctttccctgatgccatggttccacggcaagatcactcgggagcaggcagagcgactgctgtaccctcccgagacaggcctattcctcgttagggaaagtacgaattacccgggtgactacactctctgtgtgagctgcgacgggaaagtggagcactataggattatgtaccatgcttctaagctaagcatcgacgaggaagtatactttgaaaacctcatgcagttagtcgaacattatacttcagacgccgacggcttatgcactcgcttgatcaaacccaaggttatggaaggaacagtcgccgctcaagacgagttctatcgtagcgggtgggctctgaacatgaaggaactgaagctactccagacgatcgggaagggcgaattcggcgatgtcatgcttggggactaccggggtaacaaagtggcggtgaagtgtattaaaaacgatgccactgctcaagctttccttgcagaggcttcagtaatgacacaactgaggcactccaaccttgttcagctgctcggggttatcgtcgaagaaaaaggcggtctatatattgtgaccgagtacatggcgaaaggcagcttggtcgactaccttagatcccggggtcggagtgtcttgggcggtgactgtctgctgaagttttctctcgacgtgtgtgaggccatggagtacctggaaggcaacaatttcgtgcatagggatctggccgctcggaatgttctggtgtctgaagacaatgtggccaaggtcagcgactttgggctcaccaaagaagccagtagcactcaggataccggcaagcttccagtgaagtggacagctccggaggcgttacgggaaaaaaagttctccactaagagcgatgtgtggtcattcggaattcttctttgggagatctatagcttcggacgcgtaccttaccccaggataccactgaaggatgtcgttccgagagtcgaaaagggatacaagatggatgccccagatggatgtcctcctgctgtatatgaagtgatgaagaattgttggcacctcgacgcggctatgcgaccgagcttcttacagctgcgggagcaactcgaacacatcaagacccacgagctgcatctttag

SEQ ID NO: 273112 - DNA, 1353 bp, Artificial Sequence
  derived and/or modified sequence
atgtccgctattcaagccgcttggcccagcggcactgagtgtatagccaagtataactttcacggtaccgcagagcaggacctccctttctgtaagggggacgtcttaaccattgtggctgtgactaaagatcccaattggtacaaggcaaagaacaaggtcggccgagagggaattatccctgcgaattacgtccagaagcgagagggggttaaggccggaactaagctgagcctcatgccctggttccacggaaagatcacacgtgaacaggctgagcgcttgctctacccccctgaaaccggcctgttcctggtgcgagaatctactaactacccaggtgattataccttgtgcgtaagctgcgatggtaaagtcgagcattaccgcatcatgtatcatgcgagcaagctgagcatcgacgaagaagtgtatttcgagaacctgatgcagctagtggaacattatacttcagatgccgacggcctgtgtacccgactaattaaaccaaaagtgatggaaggcactgtggcggctcaggacgagttctaccgctctggttgggctttgaacatgaaagagctcaagctgctccagaccatcggcaagggagagtttggagatgtgatgctgggcgattaccggggaaacaaagtcgctgtgaagtgcataaaaaacgacgcaaccgcacaagccttccttgccgaagccagcgtgatgacccagcttcggcactccaatctggtgcagctgttgggagtgatagtggaggagaagggaggactgtatattgtcacagaatatatggccaagggaagcctggtggactatcttcgttcaagaggcagaagtgtcttaggcggtgactgtctgctgaagttcagcctcgatgtgtgtgaagcaatggagtatctcgaaggaaacaactttgtgcacagggatttggcggcaaggaacgtgttggtgtctgaggacaatgtggcaaaagtcagcgatttcgggctcaccaaagaggccagttccacccaggatacaggcaagctcccagtgaaatggaccgcgccagaagccttaagggagaagaaattctccactaagtcagacgtctggtcttttggcatccttctttgggagatctatagcttcgggagggtgccttaccccagaatcccactgaaagatgtggtgcccagggtggagaaagggtacaaaatggacgccccagacggatgccctccagcagtttatgaggttatgaaaaattgctggcaccttgatgccgcaatgaggccgagctttcttcagcttagggaacagctcgaacacattaagacccatgagctacatctgtag

SEQ ID NO: 273113 - DNA, 1200 bp, Artificial Sequence
  derived and/or modified sequence
atgtcagccattcaggccgcatggcccagcggaactgagtgtatcgcaaagtataacttccatggcaccgcggaacaggaccttcctttttgtaagggcgacgttttgacaatagttgccgtaacaaaagaccccaattggtataaagccaagaataaagtgggtagagagggcatcattccagccaactatgtccaaaagagggaaggcgtaaaggctgggaccaagctgtccctgatgccttggttccatgggaagctttctatcgacgaggaggtgtacttcgaaaacttaatgcaactcgtcgagcattacacttcagacgccgatggcctctgtacccggctgattaagccaaaagtcatggaggggacggtggcagctcaggacgagttttatcggtcagggtgggcactgaatatgaaggaactcaagttgttgcaaactatagggaaaggcgagttcggtgacgttatgttaggcgattatcgtggaaataaagtggctgtgaaatgcataaagaacgacgccaccgcccaggctttcctggctgaggccagtgtgatgacacagctaaggcattccaacctagtccaactgctaggcgtaatcgtggaggagaaaggcggactgtacatcgtcacagagtacatggctaagggttccctggtggactacttaagatcccggggtaggagcgtgttaggaggcgactgcctgctaaaattttccctggatgtgtgcgaggccatggagtatctcgaaggaaacaatttcgtccatcgggatttggctgccaggaacgtgctcgtgtcggaagataatgttgctaaggtgtccgattttgggctgaccaaggaggcaagctcaacacaggacactggaaagctacctgtgaaatggactgcccctgaggctctcagagaaaagaaattctcaactaagtccgacgtgtggagttttggaatccttctgtgggaaatttacagcttcgggagggtgccttacccgagaatcccgttgaaagacgttgtgccccgagtggagaagggatataagatggatgcacccgatggctgtccgcctgcagtgtacgaagtgatgaagaactgttggcaccttgacgcggcaatgcggccatcatttctgcagcttcgggagcagttggagcatattaagacacacgaactgcatttatag

SEQ ID NO: 273114 - DNA, 1353 bp, Artificial Sequence
  derived and/or modified sequence
atgagcgccatccaggccgcatggccttccgggactgaatgcatagccaagtacaacttccacggaacagccgaacaggatctccccttctgcaaaggggacgtgttgaccatagtcgcggtcactaaggacccaaattggtataaagccaagaataaagtgggacgtgaaggcattatccctgctaactacgttcagaaaagggagggagtgaaggcgggtactaagctgtctctcatgccttggtttcacggtaaaatcactcgagagcaggcggaaagactgttgtatccacccgagaccggtctttttctcgtgcgggagagtaccaattatcctggcgattacacactgtgtgtgagttgcgacggtaaggtggaacactataggatcatgtaccacgctagcaagttatctatagatgaggaggtgtacttcgagaacctgatgcaattggttgagcactatacctcagatgccgacggcctgtgcacacgtctgatcaaacccaaagttatggaggggacagttgccgctcaggacgagttttaccggtccggatgggctttgaacatgaaggagctgaagttgctgcagacgatcggcaaaggcgaatttggcgacgtgatgttaggcgattacaggggcaacaaagttgcagtcaagtgcattaagaacgatgccactgcccaggcttttctcgccgaagcctcagtcatgacccagctccgtcatagcaacctggtacagcttctgggtgtgatcgtcgaggaaaaaggaggcctttatatcgtgaccgaatacatggccaaggggagcctagtggactatttaaggtctagaggcaggagtgtgcttgggggagactgtctcttgaaattctccctagacgtttgcgaggccatggagtacttagagggaaacaacttcgttcatagggatttggcagcaaggaatgtgctggtgagcgaggataatgtggcaaaggtgtccgactttgggttaactaaggaggcaagttccactcaagacaccggcaagctcccggtgaagtggacagccccagaggcccttagggagaagaagttcagcacaaagtctgatgtatggtcctttgggattctgctgtgggagatttactcctttgggagagttccctacccgaggatacccttgaaagatgtcgtcccgagggtggaaaaaggctacaagatggatgctcctgatggttgccctcccgcagtttacgaagtcatgaagaattgttggcatttggatgccgcaatgcggccaagcttcctgcaactgagggagcaactggaacacataaagacgcatgaattgcacctgtag

SEQ ID NO: 273115 - DNA, 2740 bp, Artificial Sequence
  derived and/or modified sequence
ccgggccgcgcttcctctcgccaggcctgcgagcttcctcccagcggagccctgggcgagccgaggttggccgccgccgccgccgagcccgctgccgccctcccgctcctgccccacccgcgccttgcccgggggcttctgccggggtggggtccgagccgggcgaccgcccggctgcgccgccgtcggggccgtaacccggcccgccgtccctcccgccccagccagcctctggccgccggagcccgcggggcgtggagcgcgaggagccccgcggccccgatcgagcgtccggggcggcccccggcagccagcgcgacgttccaaaatcgaacctcagtggcggcgctcggaagcggaactctgccggggccgcgccggctacattgtttcctccccccgactccctcccgcccccttcccccgcctttcttccctccgcgacccgggccgtgcgtccgtccccctgcctctgcctggcggtccctcctcccctctccttgcacccatacctctttgtaccgcaccccctggggacccctgcgcccctcccctcccccctgaccgcatggaccgtcccgcaggccgctgatgccgcccgcggcgaggtggcccggaccgcagtgccccaagagagctctaatggtaccaagtgacaggttggctttactgtgactcggggacgccagagctcctgagaagatgtcagcaatacaggccgcctggccatccggtacagaatgtattgccaagtacaacttccacggcactgccgagcaggacctgcccttctgcaaaggagacgtgctcaccattgtggccgtcaccaaggaccccaactggtacaaagccaaaaacaaggtgggccgtgagggcatcatcccagccaactacgtccagaagcgggagggcgtgaaggcgggtaccaaactcagcctcatgccttggttccacggcaagatcacacgggagcaggctgagcggcttctgtacccgccggagacaggcctgttcctggtgcgggagagcaccaactaccccggagactacacgctgtgcgtgagctgcgacggcaaggtggagcactaccgcatcatgtaccatgccagcaagctcagcatcgacgaggaggtgtactttgagaacctcatgcagctggtggagcactacacctcagacgcagatggactctgtacgcgcctcattaaaccaaaggtcatggagggcacagtggcggcccaggatgagttctaccgcagcggctgggccctgaacatgaaggagctgaagctgctgcagaccatcgggaagggggagttcggagacgtgatgctgggcgattaccgagggaacaaagtcgccgtcaagtgcattaagaacgacgccactgcccaggccttcctggctgaagcctcagtcatgacgcaactgcggcatagcaacctggtgcagctcctgggcgtgatcgtggaggagaagggcgggctctacatcgtcactgagtacatggccaaggggagccttgtggactacctgcggtctaggggtcggtcagtgctgggcggagactgtctcctcaagttctcgctagatgtctgcgaggccatggaatacctggagggcaacaatttcgtgcatcgagacctggctgcccgcaatgtgctggtgtctgaggacaacgtggccaaggtcagcgactttggtctcaccaaggaggcgtccagcacccaggacacgggcaagctgccagtcaagtggacagcccctgaggccctgagagagaagaaattctccactaagtctgacgtgtggagtttcggaatccttctctgggaaatctactcctttgggcgagtgccttatccaagaattcccctgaaggacgtcgtccctcgggtggagaagggctacaagatggatgcccccgacggctgcccgcccgcagtctatgaagtcatgaagaactgctggcacctggacgccgccatgcggccctccttcctacagctccgagagcagcttgagcacatcaaaacccacgagctgcacctgtgacggctggcctccgcctgggtcatgggcctgtggggactgaacctggaagatcatggacctggtgcccctgctcactgggcccgagcctgaactgagccccagcgggctggcgggcctttttcctgcgtcccagcctgcacccctccggccccgtctctcttggacccacctgtggggcctggggagcccactgaggggccagggaggaaggaggccacggagcgggaggcagcgccccaccacgtcgggcttccctggcctcccgccactcgccttcttagagttttattcctttccttttttgagattttttttccgtgtgtttattttttattatttttcaagataaggagaaagaaagtacccagcaaatgggcattttacaagaagtacgaatcttatttttcctgtcctgcccgtgagggtgggggggaccgggcccctctctagggacccctcgccccagcctcattccccattctgtgtcccatgtcccgtgtctcctcggtcgccccgtgtttgcgcttgaccatgttgcactgtttgcatgcgcccgaggcagacgtctgtcaggggcttggatttcgtgtgccgctgccacccgcccacccgccttgtgagatggaattgtaataaaccacgccatgaggacaccgccgcccgcctcggcgcttcctccaccgag

SEQ ID NO: 273116 - DNA, 2281 bp, Artificial Sequence
  derived and/or modified sequence
aggggtctcatgaccccaccagggaggagccgtccaagagagttagcagctcccacttgcaagatgtctgtggcaaggcaggcactgttctggtgctgagagctcaactccagtcctcacagcagcccccagagccaaggagtatcaccagtccattgcacagatggggaagctgggttctagagtcacagccagcagagtaaagctctaatggtaccaagtgacaggttggctttactgtgactcggggacgccagagctcctgagaagatgtcagcaatacaggccgcctggccatccggtacagaatgtattgccaagtacaacttccacggcactgccgagcaggacctgcccttctgcaaaggagacgtgctcaccattgtggccgtcaccaaggaccccaactggtacaaagccaaaaacaaggtgggccgtgagggcatcatcccagccaactacgtccagaagcgggagggcgtgaaggcgggtaccaaactcagcctcatgccttggttccacggcaagatcacacgggagcaggctgagcggcttctgtacccgccggagacaggcctgttcctggtgcgggagagcaccaactaccccggagactacacgctgtgcgtgagctgcgacggcaaggtggagcactaccgcatcatgtaccatgccagcaagctcagcatcgacgaggaggtgtactttgagaacctcatgcagctggtggagcactacacctcagacgcagatggactctgtacgcgcctcattaaaccaaaggtcatggagggcacagtggcggcccaggatgagttctaccgcagcggctgggccctgaacatgaaggagctgaagctgctgcagaccatcgggaagggggagttcggagacgtgatgctgggcgattaccgagggaacaaagtcgccgtcaagtgcattaagaacgacgccactgcccaggccttcctggctgaagcctcagtcatgacgcaactgcggcatagcaacctggtgcagctcctgggcgtgatcgtggaggagaagggcgggctctacatcgtcactgagtacatggccaaggggagccttgtggactacctgcggtctaggggtcggtcagtgctgggcggagactgtctcctcaagttctcgctagatgtctgcgaggccatggaatacctggagggcaacaatttcgtgcatcgagacctggctgcccgcaatgtgctggtgtctgaggacaacgtggccaaggtcagcgactttggtctcaccaaggaggcgtccagcacccaggacacgggcaagctgccagtcaagtggacagcccctgaggccctgagagagaagaaattctccactaagtctgacgtgtggagtttcggaatccttctctgggaaatctactcctttgggcgagtgccttatccaagaattcccctgaaggacgtcgtccctcgggtggagaagggctacaagatggatgcccccgacggctgcccgcccgcagtctatgaagtcatgaagaactgctggcacctggacgccgccatgcggccctccttcctacagctccgagagcagcttgagcacatcaaaacccacgagctgcacctgtgacggctggcctccgcctgggtcatgggcctgtggggactgaacctggaagatcatggacctggtgcccctgctcactgggcccgagcctgaactgagccccagcgggctggcgggcctttttcctgcgtcccagcctgcacccctccggccccgtctctcttggacccacctgtggggcctggggagcccactgaggggccagggaggaaggaggccacggagcgggaggcagcgccccaccacgtcgggcttccctggcctcccgccactcgccttcttagagttttattcctttccttttttgagattttttttccgtgtgtttattttttattatttttcaagataaggagaaagaaagtacccagcaaatgggcattttacaagaagtacgaatcttatttttcctgtcctgcccgtgagggtgggggggaccgggcccctctctagggacccctcgccccagcctcattccccattctgtgtcccatgtcccgtgtctcctcggtcgccccgtgtttgcgcttgaccatgttgcactgtttgcatgcgcccgaggcagacgtctgtcaggggcttggatttcgtgtgccgctgccacccgcccacccgccttgtgagatggaattgtaataaaccacgccatgaggacaccgcc

SEQ ID NO: 273117 - DNA, 2219 bp, Artificial Sequence
  derived and/or modified sequence
ccgggccgcgcttcctctcgccaggcctgcgagcttcctcccagcggagccctgggcgagccgaggccgctgatgccgcccgcggcgaggtggcccggaccgcagtgccccaagagagctctaatggtaccaagtgacaggttggctttactgtgactcggggacgccagagctcctgagaagatgtcagcaatacaggccgcctggccatccggtacagaatgtattgccaagtacaacttccacggcactgccgagcaggacctgcccttctgcaaaggagacgtgctcaccattgtggccgtcaccaaggaccccaactggtacaaagccaaaaacaaggtgggccgtgagggcatcatcccagccaactacgtccagaagcgggagggcgtgaaggcgggtaccaaactcagcctcatgccttggttccacggcaagatcacacgggagcaggctgagcggcttctgtacccgccggagacaggcctgttcctggtgcgggagagcaccaactaccccggagactacacgctgtgcgtgagctgcgacggcaaggtggagcactaccgcatcatgtaccatgccagcaagctcagcatcgacgaggaggtgtactttgagaacctcatgcagctggtggagcactacacctcagacgcagatggactctgtacgcgcctcattaaaccaaaggtcatggagggcacagtggcggcccaggatgagttctaccgcagcggctgggccctgaacatgaaggagctgaagctgctgcagaccatcgggaagggggagttcggagacgtgatgctgggcgattaccgagggaacaaagtcgccgtcaagtgcattaagaacgacgccactgcccaggccttcctggctgaagcctcagtcatgacgcaactgcggcatagcaacctggtgcagctcctgggcgtgatcgtggaggagaagggcgggctctacatcgtcactgagtacatggccaaggggagccttgtggactacctgcggtctaggggtcggtcagtgctgggcggagactgtctcctcaagttctcgctagatgtctgcgaggccatggaatacctggagggcaacaatttcgtgcatcgagacctggctgcccgcaatgtgctggtgtctgaggacaacgtggccaaggtcagcgactttggtctcaccaaggaggcgtccagcacccaggacacgggcaagctgccagtcaagtggacagcccctgaggccctgagagagaagaaattctccactaagtctgacgtgtggagtttcggaatccttctctgggaaatctactcctttgggcgagtgccttatccaagaattcccctgaaggacgtcgtccctcgggtggagaagggctacaagatggatgcccccgacggctgcccgcccgcagtctatgaagtcatgaagaactgctggcacctggacgccgccatgcggccctccttcctacagctccgagagcagcttgagcacatcaaaacccacgagctgcacctgtgacggctggcctccgcctgggtcatgggcctgtggggactgaacctggaagatcatggacctggtgcccctgctcactgggcccgagcctgaactgagccccagcgggctggcgggcctttttcctgcgtcccagcctgcacccctccggccccgtctctcttggacccacctgtggggcctggggagcccactgaggggccagggaggaaggaggccacggagcgggaggcagcgccccaccacgtcgggcttccctggcctcccgccactcgccttcttagagttttattcctttccttttttgagattttttttccgtgtgtttattttttattatttttcaagataaggagaaagaaagtacccagcaaatgggcattttacaagaagtacgaatcttatttttcctgtcctgcccgtgagggtgggggggaccgggcccctctctagggacccctcgccccagcctcattccccattctgtgtcccatgtcccgtgtctcctcggtcgccccgtgtttgcgcttgaccatgttgcactgtttgcatgcgcccgaggcagacgtctgtcaggggcttggatttcgtgtgccgctgccacccgcccacccgccttgtgagatggaattgtaataaaccacgccatgaggacaccgccgcccgcctcggcgcttcctccaccg

SEQ ID NO: 273118 - DNA, 1728 bp, Artificial Sequence
  derived and/or modified sequence
cttccctccgcgacccgggccgtgcgtccgtccccctgcctctgcctggcggtccctcctcccctctccttgcacccatacctctttgtaccgcaccccctggggacccctgcgcccctcccctcccccctgaccgcatggaccgtcccgcaggccgctgatgccgcccgcggcgaggtggcccggaccgcagtgccccaagagagctctaatggtaccaagtgacaggttggctttactgtgactcggggacgccagagctcctgagaagatgtcagcaatacaggccgcctggccatccggtacagaatgtattgccaagtacaacttccacggcactgccgagcaggacctgcccttctgcaaaggagacgtgctcaccattgtggccgtcaccaaggaccccaactggtacaaagccaaaaacaaggtgggccgtgagggcatcatcccagccaactacgtccagaagcgggagggcgtgaaggcgggtaccaaactcagcctcatgccttggttccacggcaagctcagcatcgacgaggaggtgtactttgagaacctcatgcagctggtggagcactacacctcagacgcagatggactctgtacgcgcctcattaaaccaaaggtcatggagggcacagtggcggcccaggatgagttctaccgcagcggctgggccctgaacatgaaggagctgaagctgctgcagaccatcgggaagggggagttcggagacgtgatgctgggcgattaccgagggaacaaagtcgccgtcaagtgcattaagaacgacgccactgcccaggccttcctggctgaagcctcagtcatgacgcaactgcggcatagcaacctggtgcagctcctgggcgtgatcgtggaggagaagggcgggctctacatcgtcactgagtacatggccaaggggagccttgtggactacctgcggtctaggggtcggtcagtgctgggcggagactgtctcctcaagttctcgctagatgtctgcgaggccatggaatacctggagggcaacaatttcgtgcatcgagacctggctgcccgcaatgtgctggtgtctgaggacaacgtggccaaggtcagcgactttggtctcaccaaggaggcgtccagcacccaggacacgggcaagctgccagtcaagtggacagcccctgaggccctgagagagaagaaattctccactaagtctgacgtgtggagtttcggaatccttctctgggaaatctactcctttgggcgagtgccttatccaagaattcccctgaaggacgtcgtccctcgggtggagaagggctacaagatggatgcccccgacggctgcccgcccgcagtctatgaagtcatgaagaactgctggcacctggacgccgccatgcggccctccttcctacagctccgagagcagcttgagcacatcaaaacccacgagctgcacctgtgacggctggcctccgcctgggtcatgggcctgtggggactgaacctggaagatcatggacctggtgcccctgctcactgggcccgagcctgaactgagccccagcgggctggcgggcctttttcctgcgtcccagcctgcacccctccggccccgtctctcttggacccacctgtggggcctggggagcccactgaggggccagggaggaaggaggccacggagcgggaggcagcgccccaccacgtcgggcttccctg

SEQ ID NO: 273119 - DNA, 1353 bp, Artificial Sequence
  derived and/or modified sequence
atgagcgccatccaggccgcctggcccagcggcaccgagtgcatcgccaagtacaacttccacggcaccgccgagcaggacctgcccttctgcaagggcgacgtgctgaccatcgtggccgtgaccaaggaccccaactggtacaaggccaagaacaaggtgggcagagagggcatcatccccgccaactacgtgcagaagagagagggcgtgaaggccggcaccaagctgagcctgatgccctggttccacggcaagatcaccagagagcaggccgagagactgctgtacccccccgagaccggcctgttcctggtgagagagagcaccaactaccccggcgactacaccctgtgcgtgagctgcgacggcaaggtggagcactacagaatcatgtaccacgccagcaagctgagcatcgacgaggaggtgtacttcgagaacctgatgcagctggtggagcactacaccagcgacgccgacggcctgtgcaccagactgatcaagcccaaggtgatggagggcaccgtggccgcccaggacgagttctacagaagcggctgggccctgaacatgaaggagctgaagctgctgcagaccatcggcaagggcgagttcggcgacgtgatgctgggcgactacagaggcaacaaggtggccgtgaagtgcatcaagaacgacgccaccgcccaggccttcctggccgaggccagcgtgatgacccagctgagacacagcaacctggtgcagctgctgggcgtgatcgtggaggagaagggcggcctgtacatcgtgaccgagtacatggccaagggcagcctggtggactacctgagaagcagaggcagaagcgtgctgggcggcgactgcctgctgaagttcagcctggacgtgtgcgaggccatggagtacctggagggcaacaacttcgtgcacagagacctggccgccagaaacgtgctggtgagcgaggacaacgtggccaaggtgagcgacttcggcctgaccaaggaggccagcagcacccaggacaccggcaagctgcccgtgaagtggaccgcccccgaggccctgagagagaagaagttcagcaccaagagcgacgtgtggagcttcggcatcctgctgtgggagatctacagcttcggcagagtgccctaccccagaatccccctgaaggacgtggtgcccagagtggagaagggctacaagatggacgcccccgacggctgcccccccgccgtgtacgaggtgatgaagaactgctggcacctggacgccgccatgagacccagcttcctgcagctgagagagcagctggagcacatcaagacccacgagctgcacctgtag

SEQ ID NO: 273120 - DNA, 1200 bp, Artificial Sequence
  derived and/or modified sequence
atgagcgccatccaggccgcctggcccagcggcaccgagtgcatcgccaagtacaacttccacggcaccgccgagcaggacctgcccttctgcaagggcgacgtgctgaccatcgtggccgtgaccaaggaccccaactggtacaaggccaagaacaaggtgggcagagagggcatcatccccgccaactacgtgcagaagagagagggcgtgaaggccggcaccaagctgagcctgatgccctggttccacggcaagctgagcatcgacgaggaggtgtacttcgagaacctgatgcagctggtggagcactacaccagcgacgccgacggcctgtgcaccagactgatcaagcccaaggtgatggagggcaccgtggccgcccaggacgagttctacagaagcggctgggccctgaacatgaaggagctgaagctgctgcagaccatcggcaagggcgagttcggcgacgtgatgctgggcgactacagaggcaacaaggtggccgtgaagtgcatcaagaacgacgccaccgcccaggccttcctggccgaggccagcgtgatgacccagctgagacacagcaacctggtgcagctgctgggcgtgatcgtggaggagaagggcggcctgtacatcgtgaccgagtacatggccaagggcagcctggtggactacctgagaagcagaggcagaagcgtgctgggcggcgactgcctgctgaagttcagcctggacgtgtgcgaggccatggagtacctggagggcaacaacttcgtgcacagagacctggccgccagaaacgtgctggtgagcgaggacaacgtggccaaggtgagcgacttcggcctgaccaaggaggccagcagcacccaggacaccggcaagctgcccgtgaagtggaccgcccccgaggccctgagagagaagaagttcagcaccaagagcgacgtgtggagcttcggcatcctgctgtgggagatctacagcttcggcagagtgccctaccccagaatccccctgaaggacgtggtgcccagagtggagaagggctacaagatggacgcccccgacggctgcccccccgccgtgtacgaggtgatgaagaactgctggcacctggacgccgccatgagacccagcttcctgcagctgagagagcagctggagcacatcaagacccacgagctgcacctgtag

SEQ ID NO: 273121 - protein, 288 aa, Artificial Sequence
  derived and/or modified sequence
MEISRLAQSKRNIISLNMDLERDTQRIDEANQKLLLKIQEREDKIQRLESEIIQTRGLVEDEEWEKENRTTMERERALQELEEETARLERKNKTLVHSITELQQKLTRKSQKITNCEQSSPDGALEETKVKLQQLEASYACQEKELLKVMKEYAFVTQLCEDQALYIKKYQETLKKIEEELEALFLEREVSKLVSMNPVEKEHTSQNNEGTPTQKTARLFSKKIFCCLFFITLFFIRLLSYMFFHVRFINPDLLVNVLPKVLGRSTLWKLRCFFFPSLTLETEDMLPH

SEQ ID NO: 273122 - protein, 81 aa, Artificial Sequence
  derived and/or modified sequence
MEISRLAQSKRNIISLNMDLERDTQRIDEANQKLLLKIQEREDKIQRLESEIIQTRGLVEDEEWEKENRTTMERERALQEL

SEQ ID NO: 273123 - DNA, 867 bp, Artificial Sequence
  derived and/or modified sequence
atggagatcagcagactggcccagagcaagagaaacatcatcagcctgaacatggacctggagagagacacccagagaatcgacgaggccaaccagaagctgctgctgaagatccaggagagagaggacaagatccagagactggagagcgagatcatccagaccagaggcctggtggaggacgaggagtgggagaaggagaacagaaccaccatggagagagagagagccctgcaggagctggaggaggagaccgccagactggagagaaagaacaagaccctggtgcacagcatcaccgagctgcagcagaagctgaccagaaagagccagaagatcaccaactgcgagcagagcagccccgacggcgccctggaggagaccaaggtgaagctgcagcagctggaggccagctacgcctgccaggagaaggagctgctgaaggtgatgaaggagtacgccttcgtgacccagctgtgcgaggaccaggccctgtacatcaagaagtaccaggagaccctgaagaagatcgaggaggagctggaggccctgttcctggagagagaggtgagcaagctggtgagcatgaaccccgtggagaaggagcacaccagccagaacaacgagggcacccccacccagaagaccgccagactgttcagcaagaagatcttctgctgcctgttcttcatcaccctgttcttcatcagactgctgagctacatgttcttccacgtgagattcatcaaccccgacctgctggtgaacgtgctgcccaaggtgctgggcagaagcaccctgtggaagctgagatgcttcttcttccccagcctgaccctggagaccgaggacatgctgccccactag

SEQ ID NO: 273124 - DNA, 867 bp, Artificial Sequence
  derived and/or modified sequence
atggagatttcccgactggcacagtcaaagagaaacattatcagcctcaacatggatctcgaaagagacacccagagaattgatgaggcaaaccaaaaactactgctgaaaatccaggagagggaagataagattcagagactcgaatctgagattatccagacccgggggctcgttgaagacgaggaatgggagaaggagaaccggacaacaatggagcgggagcgggcgctccaggagttagaagaggaaacagcccgcctagagaggaagaacaaaactctggtgcattccattacagagttacaacagaagctaacacgcaagtcacaaaaaattaccaattgcgaacaaagctcacccgacggcgcccttgaagagaccaaggtgaagttgcagcaactcgaggcttcgtacgcttgtcaggaaaaagaactactgaaagtaatgaaagagtacgccttcgtgacacagctctgcgaggaccaggccctctacattaagaagtaccaggagacgctgaagaaaattgaagaggagttggaggcccttttcctagaacgagaggtgtctaagctggtgtctatgaaccctgtggaaaaggagcacacctctcagaacaacgagggcacccctacacaaaagaccgcacgactcttctctaagaagatcttctgctgcctgtttttcataaccctgttcttcattagactcctgtcctacatgtttttccacgtgagatttatcaatcctgacctgctggtcaatgttcttccgaaggtactggggcgctcgaccctgtggaagctgagatgctttttctttccttccctcacgttggaaacggaggacatgctcccccactag

SEQ ID NO: 273125 - DNA, 867 bp, Artificial Sequence
  derived and/or modified sequence
atggagatcagccggctggcccagagcaagaggaacatcatcagcctgaacatggacctggagcgggacacccagagaattgatgaggccaaccagaagctgctgctgaagatccaggagcgggaggacaagatccagaggctggagagcgagatcatccagacccggggcctggtggaggatgaggagtgggagaaggaaaatagaaccaccatggagcgggagcgggccctgcaggagctggaggaggagacagcccggctggagaggaagaacaagaccctggtgcacagcatcacagagctgcagcagaagctgaccaggaagagccagaagatcaccaactgtgagcagagcagcccagatggagccctggaggagaccaaggtgaagctgcagcagctggaggccagctatgcctgccaggagaaggagctgctgaaggtgatgaaggagtatgcctttgtgacccagctgtgtgaggaccaggccctgtacatcaagaagtaccaggagaccctgaagaagattgaggaggagctggaggccctcttcctggagcgggaggtgtccaagctggtgtccatgaaccctgtggagaaggagcacaccagccagaacaatgaaggcacccccacccagaagacagcccggctcttcagcaagaagatcttctgctgcctcttcttcatcaccctcttcttcatccggctgctgagctacatgttcttccacgtgcgcttcatcaacccagacctgctggtgaatgtgctgcccaaggtgctgggccgcagcaccctgtggaagctgcgctgcttcttcttccccagcctgaccctggagacagaggacatgctgccccactag

SEQ ID NO: 273126 - DNA, 867 bp, Artificial Sequence
  derived and/or modified sequence
atggagatcagccggctggcccagagcaagcggaacatcatcagcctgaacatggacctggagcgtgacacacagagaattgatgaggctaaccagaaattgctattgaagatacaggagcgggaagataagattcaacgactggagagcgagatcattcagactaggggattagttgaggacgaggaatgggaaaaagagaatcgaaccaccatggagagagagagggcgttgcaggagctcgaggaggaaaccgccaggctcgaacgcaagaataaaacgcttgtgcactctattacggagctccagcaaaagctgactagaaagagccaaaagattactaattgcgagcagagcagtccagatggtgctcttgaagagacaaaggttaaactgcagcagttggaggcctcctatgcctgccaggagaaagaactcctcaaggtgatgaaggagtatgctttcgttacccagttatgtgaagatcaagcactatacatcaagaagtaccaggagacactgaagaaaatcgaagaagagcttgaagcgctcttcctggaacgcgaagtgtctaagttggtctcaatgaatcctgtcgaaaaggagcacaccagccagaataatgagggtaccccaactcagaaaactgccaggctcttctctaagaaaatattttgctgtttgttcttcatcacactgttcttcatcaggctcctttcatatatgttcttccacgtaagatttatcaatccggatctactggtaaacgtactacctaaagtacttggacgatccacgctgtggaagctccggtgctttttttttccctccttaaccctcgagaccgaagatatgctcccacactag

SEQ ID NO: 273127 - DNA, 867 bp, Artificial Sequence
  derived and/or modified sequence
atggagatctcacgcctggcccagagcaagaggaacatcatctctctgaacatggatctggaaagagatactcaacgaatcgatgaggctaatcagaagctcctgctgaaaatccaagaacgggaagacaagattcagagactagagtctgagatcattcagacccgcggtcttgtcgaagatgaggaatgggaaaaggaaaatcgtacgacgatggagagagaacgtgctctgcaggaactagaggaggaaactgctaggctcgagcgtaagaacaagacccttgtccactcaatcacagaactgcagcagaaactgacccgtaaatcccagaagataactaattgtgagcaaagttcccctgatggggctttggaggagaccaaggtcaagctgcagcaactagaggcatcatacgcttgccaggagaaagaactactcaaggtgatgaaagagtatgcctttgtgacccagctgtgcgaggaccaggctctgtatatcaagaagtaccaagagacactgaagaagattgaggaagaactagaggctttgtttctcgaacgcgaggtctccaagcttgtctctatgaatcccgtcgaaaaagaacacacgagccaaaataatgagggcacacccacacagaaaacagcgaggctgttctcaaagaagatattctgctgcctgttcttcatcaccctattcttcatcaggttactgtcctatatgttttttcacgttaggttcattaatcctgacctgcttgtgaacgtgctgcctaaggtgttaggcaggtccaccctgtggaagctccgctgtttctttttccccagccttaccttggaaacagaagacatgctgccccattag

SEQ ID NO: 273128 - DNA, 1274 bp, Artificial Sequence
  derived and/or modified sequence
ggaatctacaatggaaggacacaagaaagatcagctggattaagtagtcatgattatgcaaagccatatccagagaccaaggtgtaaagcaggtcggagaaaatggaaatctcaagattggctcagtcaaaaagaaacattatcagtttgaacatggaccttgaaagggatacgcagagaatagatgaagcaaatcagaaacttcttctcaaaatccaagagagggaagataagattcagaggctggaaagtgagatcattcagacgcggggcctggtggaagatgaagagtgggagaaggagaaccgcaccacgatggaaagggaaagagccttgcaggagctggaggaagaaacagccagacttgaaaggaagaataagacgttggtccacagtataacagaacttcaacaaaagcttacaaggaaatcacaaaagataaccaattgtgaacaaagcagtccagatggagccctagaagagacaaaggttaagttacaacagctggaagcttcctatgcatgccaagagaaggagctgctcaaggtaatgaaggagtatgcatttgtgacccagctctgtgaagatcaagccctctacataaagaagtaccaggaaacgttgaagaaaatagaagaagaactagaggctctgttccttgagagagaagtatcaaaactcgtgagcatgaaccctgtggaaaaagagcataccagccaaaataatgagggtactcctacccaaaagacagcaagattattcagtaaaaagattttttgctgtctctttttcatcaccctatttttcatcagactgctgagctacatgttttttcatgtaagattcataaatccagatctcctcgtcaatgtactgcccaaggtactgggcaggagcaccttgtggaagctcagatgcttcttctttccatctctcacacttgagacagaggacatgttaccccactgattccctaagaaatatccttgagcaatagaagggaagtgggatccgagcctgtagaagggaggcatgaaacttgtggaggaaagagatttgcttcagttttttcctcaccgtttgcctgcttgactaccttctgtcaccacgtcatctttccaggattaaccttgaccagtaaaaagctctgtaatagatttatgtggctctgtggatcggctgaatagtacttgatagtaaacaaatttgaccatttggggaattatatagatgctaagaaaagttaattgataaattattctagtgaatctcaa

SEQ ID NO: 273129 - protein, 1225 aa, Artificial Sequence
  derived and/or modified sequence
MAAVLESLLREEVSVAAVVRWIARSTQGSEDNAGEAAALSSLRALRKEFVPFLLNFLREQSSRVLPQGPPTPAKTPGASAALPGRPGGPPRGSRGARSQLFPPTEAQSTAAEAPLARRGGRRRGPGPARERGGRGLEEGVSGESLPGAGGRRLRGSGSPSRPSLTLSDPPNLSNLEEFPPVGSVPPGPTETQLSCRRWVPRRLWGVSHSSSALRSGAPGCRTKPSRRINPTPVSEERSLSKPKTCFTSPPISCVPSSKQLQQSPTPTCPTPELGSPLPSRTGSLTDEPADPARVSSRQRLELVALVYSSCIAENLVPNLFLELFFVFQLLTARRMVTAKDSDPELSPAVLDSLESPLFQSIHDCVFFAVQVLECHFQVLSNLDKGTLKLLAENERLLCFSPALQGRLRAAYEGSVAKVSLVMPPSTQAVSFQPETDNRANFSSDRAFHTFKKQRDVFYEVLREWEDHHEEPGWDFEKGLGSRIRAMMGQLSAACSHSHFVRLFQKQLLQMCQSPGGAGGTVLGEAPDVLSMLGADKLGRLWRLQERLMAPQSSGGPCPPPTFPGCQGFFRDFILSASSFQFNQHLMDSLSLKIQELNGLALPQHEPNDEDGESDVDWQGERKQFAVVLLSLRLLAKFLGFVAFLPYRGPEPPPTGELQDSILALRSQVPPVLDVRTLLQRGLQARRAVLTVPWLVEFLSFADHVVPLLEYYRDIFTLLLRLHRSLVLSQESEGKMCFLNKLLLLAVLGWLFQIPTVPEDLFFLEEGPSYAFEVDTVAPEHGLDNAPVVDQQLLYTCCPYIGELRKLLASWVSGSSGRSGGFMRKITPTTTTSLGAQPSQTSQGLQAQLAQAFFHNQPPSLRRTVEFVAERIGSNCVKHIKATLVADLVRQAESLLQEQLVTQGEEGGDPAQLLEILCSQLCPHGAQALALGREFCQRKSPGAVRALLPEETPAAVLSSAENIAVGLATEKACAWLSANITALIRREVKAAVSRTLRAQGPEPAARGERRGCSRACEHHAPLPSHLISEIKDVLSLAVGPRDPDEGVSPEHLEQLLGQLGQTLRCRQFLCPPAEQHLAKCSVELASLLVADQIPILGPPAQYRLERGQARRLLHMLLSLWKEDFQGPVPLQLLLSPRNVGLLADTRPREWDLLLFLLRELVEKGLMGRMEIEACLGSLHQAQWPGDFAEELATLSNLFLAEPHLPEPQLRACELVQPNRGTVLAQS

SEQ ID NO: 273130 - DNA, 3678 bp, Artificial Sequence
  derived and/or modified sequence
atggcagctgtgctggagtctttgctgagagaggaagtcagtgtggccgctgtggtccggtggatagcaagaagtactcaaggatccgaggacaatgctggtgaggcagctgccctctcaagccttcgtgctctccgtaaagagttcgttccatttctgttaaattttctcagagaacagagcagcagagttctgccccaggggcccccaacacccgcaaagacacccggcgcctccgccgccctgccaggcagaccagggggtccccccagggggagccgcggagcgcggagccaactgttccctccaaccgaagcccagtccaccgccgccgaagcacctcttgctagaagagggggacggaggcgaggccccggtccagcacgggagagaggtggacgcgggctagaggagggggtctccggagagagtctgccaggcgcaggcggaaggcggttacggggttccgggtctccaagtcggccgagcctcaccctttcagatccacccaacctgagcaacctcgaggagttcccacctgtaggctccgtgccaccaggcccaacagagacacagctgtcctgccgtcgatgggtgccgagaagactgtggggggtcagtcactcctcttcagctttacgctcaggcgcgcctgggtgtaggaccaaaccctctcggcggataaatcccactccggtttcggaagaacggagcctgtccaagcctaaaacctgtttcaccagccccccaatatcttgcgtgcccagcagtaaacaactgcagcagtctcctaccccgacttgtcccacccctgaactgggaagtcccctgccatccagaacaggaagcctgacagacgaaccggcagaccctgcccgggtgagcagcaggcagagactggaactcgtggctttggtctattccagttgcatcgccgagaacctcgttcccaatcttttcttagagcttttctttgtgtttcagctcctcaccgctagaagaatggtcactgccaaggacagtgaccctgaattgtccccggccgtgctggactccctggaatctcccttgtttcagtccatccatgactgtgtgttcttcgctgtgcaggtgctggaatgtcactttcaggtgctgagcaacttggataagggaactctgaagctcctggctgagaacgagcgcctgctttgcttttcacctgctctccaaggtcgcctgagagcggcatatgaaggcagcgtggccaaagtgtcactggtcatgccaccgtccacccaggccgtgtccttccagcctgaaacagacaatagagcgaacttttcatccgaccgagcctttcatacctttaagaaacagagggacgtcttctatgaagtcctgcgggaatgggaggaccaccatgaggagcccggttgggacttcgaaaaggggttgggatctcggattagggccatgatgggacagctctctgccgcctgtagccacagccatttcgtacgattattccagaagcaattattgcagatgtgtcagtcccccgggggagcagggggcacagtgcttggcgaagctcctgacgtgctttccatgttgggtgccgacaaacttggacgcctttggagattgcaggagcggctgatggctcctcagtctagtggcggaccctgccccccaccaacttttccagggtgccagggcttcttcagggatttcattttgtctgcaagctctttccaattcaaccagcacctgatggactccctctccctgaagatccaagaactgaacggactggcactgccccagcatgaaccgaacgatgaagatggggaaagcgacgtagattggcagggggagcgaaagcagtttgctgtggttcttctttcactccgactgctggccaagtttctcggcttcgtggccttcctgccgtacaggggacctgagccacccccgacaggcgaattgcaagattctatcctggccctgagaagccaagtgccgcctgttctcgacgtgcgaacactactgcagagggggctgcaggcacggagggccgtgctcactgtgccctggttagttgagtttctgagtttcgcagaccacgtcgtgcctctgctcgagtactatcgcgacatctttaccctattactgcgcctccatcgcagcttggtattgtcgcaggagagcgagggaaagatgtgttttctgaacaagctgttactgctagctgttctgggatggttgttccagattcctactgtgcccgaggatctgttcttcctcgaggagggaccttcttacgcatttgaggtggacacagtggcacctgaacacgggctagacaacgccccagtggtggaccagcagctgctatacacatgctgtccatacataggagagctgcggaagctactggcctcatgggtctctggtagtagtggacgcagtggtggatttatgcgcaaaataaccccaaccacgacaacctcactgggcgctcaaccaagccagacttcccaggggctgcaggctcagcttgcacaggcatttttccataaccaacctccatccttgcgccgcacggttgagtttgtagcagagcgcatcggttcaaattgcgtgaagcacataaaagcaacacttgtcgctgatctcgtgcgccaggctgaaagcctacttcaagagcagctggtcacccagggtgaggaaggcggagaccccgcccagttgttggaaatcttgtgctctcagctgtgtccccatggggcacaagccctagctttaggacgggaattttgccagcgcaagtcacccggggccgttagggccctgttgccagaggagacgccagcggctgtgctcagctctgccgaaaatattgcagtggggctggcaacagagaaagcctgtgcttggttgtcggctaatatcacagccctgattcggcgagaagttaaggcagctgtgagtcgtactttgcgagcacagggtcccgagcctgcagctagaggagaacggcgcgggtgctcacgggcttgtgagcaccatgctcccttaccaagccacctcatcagcgagattaaggacgttttgtccctggcagtcggaccacgcgacccggatgaaggcgtgagtcctgagcacttggagcagttactgggacagctgggacaaacgctgcgttgtcggcaatttctgtgtccacccgccgaacagcacctggccaagtgttccgtggagctcgcctcgctgcttgtggccgatcagattccgatcctgggccctcctgctcaataccggctggagcggggccaggcccgacggctcctgcatatgcttctttcactgtggaaagaagacttccagggtcccgtgccactccaacttctgctgagccccaggaacgtgggtctcctggcagacacaagaccgcgcgagtgggatcttctactgtttttactcagggaactcgttgagaaggggctgatgggccgtatggaaattgaggcctgcctcggatccctccaccaagctcaatggcctggggattttgccgaggaactggccactctctcaaatttgtttctcgctgaaccacaccttcccgagcctcagctccgcgcgtgcgagctggttcagccaaacagaggtacggtcctggcccagtcatag

SEQ ID NO: 273131 - DNA, 3678 bp, Artificial Sequence
  derived and/or modified sequence
atggctgctgtgctggagagcctgctgcgggaggaggtgtctgtggccgctgtggtgcgctggatcgcccggagcacccagggcagcgaggacaatgctggggaggccgccgccctgagcagcctgcgggccctgaggaaggagtttgtgcccttcctgctgaacttcctgcgggagcagagcagccgggtgctgccccagggcccccccaccccagccaagacccctggggccagcgctgccctgcccggccggcctgggggccccccccggggcagcagaggagcccggagccagctgttccccccaacagaggcccagagcacagctgctgaggcccccctggccaggagaggaggaagaagaagaggccctggccctgcccgggagcggggcggccggggcctggaggagggcgtgtctggagagagcctgcccggggccggcggccgccgcctgcggggcagcggcagccccagccggcccagcctgaccctgagtgacccccccaacctgagcaacctggaggagttcccccctgtgggctctgtgcccccaggccccacagagacccagctgagctgccgccgctgggtgccccggcggctgtggggcgtgagccacagcagcagcgccctgcggagcggggcccctggctgcaggaccaagcccagccgccgcatcaaccccacccctgtgtctgaggagaggagcctgagcaagcccaagacctgcttcaccagcccccccatcagctgtgtgcccagcagcaagcagctgcagcagagccccacccccacctgccccaccccagagctgggcagccccctgcccagcaggacaggcagcctgacagatgagcctgctgaccctgcccgggtgagcagccggcagaggctggagctggtggccctggtgtacagcagctgcatcgccgagaacctggtgcccaacctcttcctggagctgttctttgtgttccagctgctgacagcccggaggatggtgacagccaaggacagcgaccctgagctgagccctgctgtgctggacagcctggagagccccctcttccagagcatccatgactgtgtgttctttgctgtgcaggtgctggagtgccacttccaggtgctgagcaacctggacaagggcaccctgaagctgctggccgagaatgaaaggctgctgtgcttctccccagccctgcagggccgcctgcgggccgcctatgagggctctgtggccaaggtgtccctggtgatgccacccagcacccaggccgtgtccttccagcctgagacagacaacagagccaacttcagcagtgaccgggccttccacaccttcaagaagcagagagatgtgttctatgaggtgctgcgggagtgggaggaccaccacgaggagcccggctgggactttgagaagggcctgggcagccgcatccgggccatgatgggccagctgtctgctgcctgcagccacagccactttgtgcggctcttccagaagcagctgctgcagatgtgccagagccctgggggcgccggcggcaccgtgctgggggaggccccagatgtgctgtccatgctgggcgctgacaagctgggccgcctgtggaggctgcaggagcggctgatggccccccagagcagcggcggcccctgccccccacccaccttccctggctgccagggcttcttccgggacttcatcctgagcgccagcagcttccagttcaaccagcacctgatggacagcctgagcctgaagatccaggagctgaatggcctggccctgccccagcacgagcccaatgatgaagatggagagagtgatgtggactggcagggcgagaggaagcagtttgctgtggtgctgctgagcctgcggctgctggccaagttcctgggctttgtggccttcctgccctaccggggccctgagcccccacccaccggggagctgcaggacagcatcctggccctgcggagccaggtgccccctgtgctggatgtgaggaccctgctgcagaggggcctgcaggccaggagagctgtgctgactgtgccctggctggtggagttcctgagctttgctgaccacgtggtgcccctgctggagtactacagagacatcttcaccctgctgctgcggctgcacaggagcctggtgctgagccaggagagcgagggcaagatgtgcttcctgaacaagctgctgctgctggccgtgctgggctggctgttccagatccccaccgtgcctgaggacctcttcttcctggaggagggccccagctatgcctttgaggtggacacagtggcccctgagcacggcctggacaatgcccctgtggtggaccagcagctgctgtacacctgctgcccctacatcggggagctgaggaagctgctggcctcctgggtgtctggcagcagcggccgcagcggcggcttcatgaggaagatcacccccaccaccaccaccagcctgggcgcccagcccagccagaccagccagggcctgcaggcccagctggcccaggccttcttccacaaccagccccccagcctgcggaggacagtggagtttgtggccgagagaattggcagcaactgtgtgaagcacatcaaggccaccctggtggccgacctggtgcggcaggccgagagcctgctgcaggagcagctggtgacccagggcgaggagggcggggaccctgcccagctgctggagatcctgtgcagccagctgtgcccccatggagcccaggccctggccctgggccgggagttctgccagaggaagagccctggagctgtgcgggccctgctgcctgaggagaccccagctgctgtgctgagcagcgctgagaacattgctgtgggcctggccacagagaaggcctgtgcctggctgagcgccaacatcacagccctgatccggcgggaggtgaaggctgctgtgtccaggaccctgcgggcccagggccctgagcctgctgcccggggggagcggcggggctgcagccgggcctgtgagcaccacgcccccctgcccagccacctgatcagcgagatcaaggatgtgctgagcctggccgtgggcccccgggaccctgatgaaggagtgtccccagagcacctggagcagctgctgggccagctgggccagaccctgcgctgccggcagttcctgtgccccccagctgagcagcacctggccaagtgcagcgtggagctggccagcctgctggtggccgaccagatccccatcctgggccccccagcccagtaccgcctggagcggggccaggcccggcggctgctgcacatgctgctgagcctgtggaaggaggacttccagggccctgtgcccctgcagctgctgctgagccccagaaatgtgggcctgctggccgacacccggccccgggagtgggacctgctgctcttcctgctgcgggagctggtggagaagggcctgatgggccgcatggagattgaggcctgcctgggcagcctgcaccaggcccagtggccaggggactttgctgaggagctggccaccctgagcaacctcttcctggccgagccccacctgcctgagccccagctgcgggcctgtgagctggtgcagcccaacagaggcaccgtgctggcccagagctag

SEQ ID NO: 273132 - DNA, 3678 bp, Artificial Sequence
  derived and/or modified sequence
atggccgccgtgctggagagcctgctgcgggaggaggtgagcgtggctgcggttgtgagatggattgcgcggtccacccagggttctgaggataacgctggggaggccgccgctttgtccagtctccgggcactcagaaaagaatttgtccccttcctccttaactttctgagagagcagtccagccgggttttacctcaagggcctccgactccagctaagacccctggagcaagcgcagcactgcccggaaggccgggagggccgcccagaggctcacgtggcgcgaggtctcagcttttcccgccgacagaggcccagagcaccgcagcggaagctccactcgctcgaagaggagggcggcgtcgaggacctggtccagcccgcgagcgaggcggccgtggactggaggaaggcgtatcgggagaatccctgcctggcgccggtggtcgtagacttcgcggtagtggtagcccatcccggcccagtctgacgctctctgacccacctaacctatcaaaccttgaggaatttccccccgttggctccgtgccaccaggtccaactgagactcaactgagctgtcgccgctgggtgcctaggcgcctgtggggagtgagccacagcagtagcgcactgagatctggagcccccggatgtagaaccaagccctcccgccgaattaatccgactcctgtgagcgaggaaaggtcactgtcaaaaccaaaaacatgctttaccagcccccccatcagttgtgtgccatcttccaagcagcttcagcagtcccccacacctacatgtcccaccccagagctcgggtcaccgcttccgtctagaaccggatccctgaccgacgagcccgcagatccggcccgagtgagttccaggcaaaggctggaactcgtcgccctggtgtactcctcctgcatagctgagaacctcgtgccgaacctgttcttggagctttttttcgtgtttcaactcctgaccgctcggcgtatggtaaccgctaaagatagtgaccccgagctatccccagctgttctcgattcattagagagtccactgttccagtctatccatgactgcgtcttttttgccgtacaggtgctcgaatgccatttccaggtcttgtcaaatcttgataaggggactctcaaactcctggctgaaaatgagcgcctcctttgctttagccccgctctgcagggacggctgagagccgcttacgaaggttccgtggcaaaggtaagtctagtcatgcctccaagcacacaagctgtgtctttccagcctgagacggacaacagggcaaattttagctccgatagagcttttcacacattcaagaaacaaagagacgtgttttatgaagtgttgcgtgagtgggaggaccaccacgaagagcccggatgggactttgagaagggcctggggagcagaatccgcgccatgatggggcagctgagcgccgcctgctcacattctcattttgtccgattgttccagaagcagctgctgcagatgtgtcagtcacctgggggtgcaggcgggactgtgttgggggaggccccagatgttttatcaatgttgggcgccgataagctgggtagactttggcgtctccaggagcgtctcatggcaccccagagtagcggaggtccctgtccaccacccacttttccgggatgccagggattctttcgggattttatattgtcagcttccagtttccagttcaaccagcacttgatggactccctcagcttaaaaatacaggaactgaatggactggcattgccccagcacgagcccaacgatgaggatggcgaaagcgacgtggattggcagggagaacggaaacaatttgctgtggtactcttgtcactgaggcttttagccaagttcttagggttcgttgcatttctgccgtaccggggcccagagcctcctcctaccggggagttgcaggacagcattcttgccctccggtctcaggtgcccccagtgctagatgttcgcactctgctgcagcgcgggctccaggcaagacgcgctgtgctgaccgttccctggttggtcgagttcctcagtttcgcagatcacgtggtgcccttgctggagtattaccgggatattttcacacttctactacgattacataggtcactggttttgagccaagagtcggaaggcaagatgtgttttctaaataagcttcttcttctggcagtactcggatggctgtttcagattccgaccgtcccagaggacttattttttctcgaagaagggccatcttatgcctttgaggtcgatactgtggccccagagcacggcctcgataacgccccagtggtagatcaacagttgctatacacctgctgcccttacatcggggagctccggaaacttcttgcctcctgggtctccggatcctctggccgcagcggcgggttcatgcgaaagataactcctactaccacgacctctctgggagcccagccttcgcagacatcacagggcttacaggctcagcttgcccaggcattctttcataaccaacctccttccctaaggcgaaccgtcgagttcgtggccgagcgaattggctccaattgcgtgaaacacatcaaggccactctggtagctgacctcgtgcgtcaggccgagtctcttttgcaggagcagctggttacccaaggagaagaaggaggagatcccgcccagctgttggagatcttgtgtagtcagctgtgtccccacggcgcccaggctctggctctaggtcgtgaattctgccaacgtaaatcgcccggcgcagttcgagctctgctgcctgaggaaacacctgcagctgttctttcatccgcggaaaacattgccgtgggcctagccaccgagaaggcctgtgcatggcttagcgctaacatcaccgcactgatccggagagaggtgaaggcagctgtatcccgcaccctcagggcccagggtccggaacctgctgcacggggcgaacgacgagggtgttctcgggcttgcgagcaccatgctccactcccttcccacctgatctctgagatcaaagatgtcctgagcctggctgtcggtcctagagaccccgatgagggggtgtcgcccgaacacttagagcagctactgggccagttggggcagacgctgcgttgcagacagttcctgtgtccacccgcagaacaacatctcgctaagtgcagtgtggagctcgcctctttactggtggcagatcaaattcctatactcggaccaccagcccagtaccgcctggaaaggggccaggctcggcgcctcctacacatgctgttgtcactctggaaggaggacttccaaggacctgtccctctccagctgttgttatcccctaggaatgtggggctcctcgcggacacccggcctcgggagtgggatctgctcctgtttctgttgcgggaactggttgagaagggtttaatggggaggatggagattgaggcgtgcctgggctctctgcaccaagcacagtggcccggcgacttcgccgaggaactcgccacactgtcaaacttatttcttgccgaaccgcatctcccggagcctcagctgagggcatgtgaattagtgcaaccgaaccgaggcactgtgctcgcccagagctag

SEQ ID NO: 273133 - DNA, 3678 bp, Artificial Sequence
  derived and/or modified sequence
atggccgcagtgcttgagagtttattgcgcgaggaagtgtccgtggctgcagtggtccgttggattgctaggtcgacacaggggagtgaggacaatgctggcgaagccgctgctctaagcagcctgcgagcactgagaaaagagtttgttccatttctgttaaatttcctcagagagcaatcttctagggtgctgccccaagggccaccaacccccgctaagactccaggggcttctgccgctttacccggtcgccctgggggtccccctcgcggaagccgcggagccaggtcacaactcttcccacccactgaagctcagtcaactgcggctgaggcacccctcgctcgacgcggtggtcgccgacgagggcctggcccagcgcgtgagagggggggtaggggccttgaggaaggtgtttctggagagagcctgcctggagccggtgggagacgactgcggggtagcgggtccccttcccggccaagtctgactctgagtgatccacccaacttgagcaacctcgaggagtttccacccgttgggtcagtgccaccgggtccaacagagactcagcttagctgtcgacgttgggtgccgcgacggctgtggggggtgagtcacagttccagcgctctgcgctccggtgcgcctgggtgccgtactaaaccctcaagaagaatcaacccaaccccggtgtccgaagaaagaagcctgtctaaacctaaaacctgctttacaagccctcctatatcatgtgtgcccagcagcaaacagctgcaacagagcccaacaccaacctgtcccaccccggaactggggtctccattaccaagtcgaacagggagtctcacagatgagcctgcagatccagcacgggtctccagcaggcagcggttggagctggttgctctcgtgtactcgtcgtgcattgccgaaaacttggtgcctaacctgttcctcgagcttttctttgtcttccagctgttaactgcaagaagaatggtgaccgccaaggatagcgatccagaactgtccccagctgtgctcgacagcctggaaagtccactcttccagagcattcatgactgcgtctttttcgctgtccaggtgctggagtgccacttccaggtgctgagtaaccttgataaaggcactctcaaactgctagccgaaaatgaaagactgttgtgtttttcccctgctctacaaggcaggctgagggcggcttatgaaggatccgtggctaaagtgtctttggtaatgcctccttctacccaggctgtttcctttcagccagagaccgataacagggccaatttctccagcgaccgcgctttccacaccttcaaaaagcagagagacgtattctatgaagtcctaagggagtgggaggaccaccacgaggagccaggttgggatttcgagaaagggcttggcagccgaatcagggcgatgatgggccaattgtccgcagcatgctcccacagccatttcgttcggctttttcagaagcagcttctccagatgtgccagagtccgggaggagcagggggtactgttcttggcgaagcacctgatgttctgtccatgctgggcgcagacaagctgggcaggctttggaggctgcaggaacgcctgatggccccacagtcatcaggaggaccatgtccccctcctacgttccctgggtgtcaaggattctttcgggacttcatactgtccgcttcaagctttcaattcaaccagcacctgatggacagcctgtccctcaagatacaagagctgaatgggcttgctctgccacagcacgagccgaatgacgaagacggtgaatccgacgttgactggcagggagagaggaagcaatttgctgtagtcctcctttccctccggctcctggctaagttcttaggcttcgtggcgttcctgccctatcggggaccagaacctcctcctaccggtgagcttcaagattctatactggcgctgcgctctcaggtccccccagtactcgatgtaagaaccctgctacagagaggtttgcaggctagacgtgcggtgctgacagttccttggttggttgagtttttgtcatttgccgatcacgtggtcccgctgttagaatactaccgggacatttttactctgctgctgaggttgcacagaagcttggtcctgtcacaggaatctgagggtaaaatgtgcttcttgaataagctgctgctgctagctgttctaggatggctgtttcaaatccccactgtgcctgaggatctgttcttcttggaagaaggcccttcatacgcctttgaggttgacacagtcgcgcctgaacatggcttggacaatgccccagtggtcgatcagcagctgctgtacacttgctgtccgtacattggagagttaaggaagcttctcgcttcgtgggttagcgggtcttctggcagaagcggaggatttatgcgcaagatcaccccaactaccacaactagcctgggcgcacaaccgagccagacatcccagggacttcaggcgcagctcgctcaggcgttctttcacaaccagccacccagtttaaggcggaccgtcgaattcgtcgcggagcgaattggtagtaattgcgtgaaacatatcaaggccacactcgtggccgacctggtcaggcaagcagaatcattacttcaggaacagctggttactcagggagaagagggcggagatccagcgcagctgctggaaatcctgtgcagccagttgtgcccccacggggcacaggctctggctctggggagggaattctgtcagagaaagtctcctggagctgtgcgcgctctattgcccgaggagactcccgctgctgtgttgagttccgccgagaacatcgcagtcgggctggctaccgagaaagcttgcgcatggctgtccgccaatattaccgccctgatccggagggaagtcaaggcagccgttagtaggaccctgagggcgcagggcccagagcccgcagccagaggagagcggagggggtgctcaagggcctgtgagcatcacgctcccctcccttcacatctgatctctgagatcaaggatgttctctcgctggccgtgggaccccgtgatccagatgaaggagtgtctcctgaacatctggaacagctgctcgggcagctgggacaaactttgagatgtcgccagtttctttgccccccagcagagcagcatctagccaagtgttccgtggagttagcatccctgctggtcgctgaccagattcccattttagggcctcctgcccaatacaggctagaaagggggcaggcccgtcggctccttcatatgctgctgtcactttggaaggaagatttccaaggacccgtcccccttcagttgctgctgtccccgaggaatgtgggtctgctggccgatacccgtccccgtgagtgggaccttctcctgttcctgttgcgcgaacttgtcgaaaagggccttatggggcgaatggaaattgaggcgtgccttggatcgctgcaccaagcccagtggcctggggatttcgccgaagagctcgcgacactctctaatctgttcctggctgagccacacctgcctgagccccagctcagggcttgcgagcttgtgcagccaaacagaggtacagtcttggcccagagctag

SEQ ID NO: 273134 - DNA, 4722 bp, Artificial Sequence
  derived and/or modified sequence
ccgggtccctccccatcccgcgacccaacggtcgttccccgccgccggccccgcccctccctggccgcccgcggcgcgccggcgcctgcgcagtcgccccagagcgccccgaccgggatggcggccgttttggagtcgctgctgcgagaagaggtgtcggtcgcagccgtcgtgcggtggatcgcgcgcagcacccagggttcggaggataacgctggggaggcggccgcgctgagctcactccgggccctgcggaaagaattcgtaccgttcctgttgaacttcctgagggagcagagcagccgcgtcctcccgcaggggcccccgacccccgccaagaccccgggcgcctcggcagccttgccagggaggccgggaggcccgccgcggggtagccgcggggcgcgcagccagcttttccctccgaccgaggcccagagcaccgctgccgaggcccctctggcccgccgcgggggcaggaggcggggcccggggccggcccgcgagcgtggaggccgcggcctggaggagggggtcagcggggagagcctgcccggagccgggggccggaggcttaggggctctggcagccccagccgccccagcctcacgctgtctgatccgccaaacctcagcaacctggaggagttccctcccgtaggctcggttccccccggccctacagagactcagctctcatgcaggagatgggtaccacgaaggctctggggagtcagtcattcgagctcggcgctccgcagtggagcgccaggatgcaggacgaagccttctcgcaggatcaacccaactccggtgagcgaagagcggtcactctccaagcccaagacctgcttcacctcacccccaatcagctgtgtccccagctctaagcagctgcagcagtcacctacccccacctgtcccaccccagaattggggtcgcccctccccagccggacaggaagcctcacagatgaacctgcagaccctgccagagtgtcttcccgccagcgcctggagcttgtagcccttgtttactcctcgtgcattgctgagaacctggtaccaaacctcttcttggagcttttcttcgtctttcagctcctcactgcccggaggatggtgactgccaaggacagcgaccctgaactaagtccagctgtcctagattccctggaaagtccactgttccaaagcatccacgattgtgtcttctttgcagtgcaggttttggagtgtcactttcaggttctttccaacctggacaaagggaccttgaagctgctggctgagaatgagcggctgctgtgcttctcaccagctctgcaaggccgccttcgagctgcctatgagggcagtgttgccaaggtctctctggtgatgcctccctctactcaagctgtctcctttcagccagagactgacaatcgtgccaacttctccagtgaccgagcctttcatacttttaagaaacagagggatgtgttttatgaggtgctgcgagagtgggaagatcaccatgaggagcctggctgggattttgagaagggcttgggcagcagaatcagggccatgatgggtcagctctccgcagcctgcagccacagccactttgttcggcttttccaaaaacaactactccagatgtgtcagagccctggtggtgctgggggcaccgtcttgggcgaggccccagatgtgttgagtatgctgggagctgacaagctggggcggttgtggcgcctacaggaacggcttatggctcctcagagcagtggggggccctgcccaccccccaccttcccaggctgtcaaggcttctttagggacttcatccttagtgccagcagcttccagtttaaccagcatctcatggacagtctgagcttgaagatccaggagctcaatggtcttgccctgccccagcatgagcccaatgatgaagacggggagtcagacgtagactggcagggtgagcggaagcaatttgctgtggtgcttcttagcctgagacttttggctaaattcctgggctttgtggctttcctgccataccgggggcctgaacctcccccgaccggtgagcttcaggactccattctggccctcaggagccaggtccctccggtcctggatgtgcggactctgctgcagcgagggctgcaggcccgccgggcggtgctcaccgtgccctggctggtggagtttctctcctttgctgaccatgttgttcccttgctggaatattaccgggacatcttcactctcctgctgcgcctgcaccggagcttggtgttgtcgcaggagagtgaggggaagatgtgtttcctgaacaagctgctgctacttgctgtcctgggctggcttttccagattcccacagtccctgaggacttgttctttctggaagagggtccctcatatgcctttgaggtggacacagtagccccagagcatggcttggacaatgcgcctgtggtggaccagcagctgctctacacctgctgcccctacatcggagagctccggaaactgctcgcttcgtgggtgtcaggcagtagtggacggagtgggggcttcatgaggaaaatcacccccaccactaccaccagcctgggagcccagccttcccagaccagccaggggctgcaggcacagctcgcccaggcctttttccacaaccagccgccctccttgcgccggaccgtagagttcgtggcagaaagaattggatcaaactgtgtcaaacatatcaaggctacactggtggcagatctggtgcgccaggcagagtcacttctccaagagcagctggtgacacagggagaggaagggggagacccagcccagctgttggagatcttgtgttcccagctgtgccctcacggggcccaggcattggccctggggcgggagttctgtcaaaggaagagccctggggctgtgcgggcgctgcttccagaggagaccccggcagccgttctgagcagtgcagagaacattgctgtggggcttgcaacagagaaagcctgtgcttggctgtcagccaacatcacagcactgatcaggagggaggtgaaagcagcagtgagtcgcacacttcgagcccagggtcctgaacctgctgcccggggggagcggaggggctgctcccgcgcctgtgagcaccatgctcccctcccctcccacctcatctccgagataaaagacgtgctctccttggccgtggggccacgggaccctgacgagggagtctccccagagcatctggaacagctcctaggccagctgggccagacgctgcggtgccgccagttcctgtgcccacctgctgagcagcatctggcaaagtgctctgtggagttagcttccctcctcgttgcagatcaaattcctatcctagggcccccggcacagtacaggctggagagagggcaggctcgaaggcttctgcacatgctgctttccttgtggaaggaagactttcaggggccggttccgctgcagctgctgctgagcccaagaaatgtggggcttctggcagacacaaggccaagggagtgggacttgctgctattcttgctacgggagctggtggagaagggtctgatgggacggatggagatagaggcctgcctgggcagcctccaccaggcccagtggccaggggactttgctgaagaattagcaacactgtctaatctgtttctagccgagccccacctgccagaaccccagctaagagcctgtgagttggtgcagccaaaccggggcactgtgctggcccagagctagggctgagaagtggccctgccttgggcattgcaccagaaccctggacccccgcctcacgaggaggcccaagtgcccaatgcagaccctcactggttggggtgtagctgggtctacagtcagacttcctgctctaagggtgtcactgcctggcatcccaccacgcgaatcctagaggaaggagagttggcctgatttgggattatggcagaaaagtccagagatgccagtcctggagtagaagaggtggtgtttgtttatctcttggatactaaatgaaatgaggtgtgtgggcttgtcaacacagaattcaagcctcatttgctatcccagcatctcttaaaactttgtagtcttggaattcatgacagaggcaaatgactcctgcttaacttatgaagaaagttaaaacatgaatcttgggagtctacattttcttatcaccaggagctggactgccatctccttataaatgcctaacacaggccgggtctggtggctcatgcctgtaatcccagcactttgagaggcctgaggtcggcggactgcctgaggtcaggaattcaagaccagcctggccaacatggcaaaaccccatctctactaaaaataaaaaaattattagctgggcatggtggtgtgtgcctgtaatcccagctactcaggaggatgaggcaggagacctgcttgaacctggaggtggaggttgcagtgagccgaggtcgcaccactgcactccagtctgggtaacagagcgagactttctagaaaaagcctaacaaacagataaggtaggactcaaccaactgaaacctgactttccccctgtaccttcagcccctgtgcaggtagtaacctcttgagacctctccctgaccagggaccaagcacagggcatttagagctttttagaataaactggttttcttt

SEQ ID NO: 273135 - DNA, 3678 bp, Artificial Sequence
  derived and/or modified sequence
atggccgccgtgctggagagcctgctgagagaggaggtgagcgtggccgccgtggtgagatggatcgccagaagcacccagggcagcgaggacaacgccggcgaggccgccgccctgagcagcctgagagccctgagaaaggagttcgtgcccttcctgctgaacttcctgagagagcagagcagcagagtgctgccccagggcccccccacccccgccaagacccccggcgccagcgccgccctgcccggcagacccggcggcccccccagaggcagcagaggcgccagaagccagctgttcccccccaccgaggcccagagcaccgccgccgaggcccccctggccagaagaggcggcagaagaagaggccccggccccgccagagagagaggcggcagaggcctggaggagggcgtgagcggcgagagcctgcccggcgccggcggcagaagactgagaggcagcggcagccccagcagacccagcctgaccctgagcgacccccccaacctgagcaacctggaggagttcccccccgtgggcagcgtgccccccggccccaccgagacccagctgagctgcagaagatgggtgcccagaagactgtggggcgtgagccacagcagcagcgccctgagaagcggcgcccccggctgcagaaccaagcccagcagaagaatcaaccccacccccgtgagcgaggagagaagcctgagcaagcccaagacctgcttcaccagcccccccatcagctgcgtgcccagcagcaagcagctgcagcagagccccacccccacctgccccacccccgagctgggcagccccctgcccagcagaaccggcagcctgaccgacgagcccgccgaccccgccagagtgagcagcagacagagactggagctggtggccctggtgtacagcagctgcatcgccgagaacctggtgcccaacctgttcctggagctgttcttcgtgttccagctgctgaccgccagaagaatggtgaccgccaaggacagcgaccccgagctgagccccgccgtgctggacagcctggagagccccctgttccagagcatccacgactgcgtgttcttcgccgtgcaggtgctggagtgccacttccaggtgctgagcaacctggacaagggcaccctgaagctgctggccgagaacgagagactgctgtgcttcagccccgccctgcagggcagactgagagccgcctacgagggcagcgtggccaaggtgagcctggtgatgccccccagcacccaggccgtgagcttccagcccgagaccgacaacagagccaacttcagcagcgacagagccttccacaccttcaagaagcagagagacgtgttctacgaggtgctgagagagtgggaggaccaccacgaggagcccggctgggacttcgagaagggcctgggcagcagaatcagagccatgatgggccagctgagcgccgcctgcagccacagccacttcgtgagactgttccagaagcagctgctgcagatgtgccagagccccggcggcgccggcggcaccgtgctgggcgaggcccccgacgtgctgagcatgctgggcgccgacaagctgggcagactgtggagactgcaggagagactgatggccccccagagcagcggcggcccctgccccccccccaccttccccggctgccagggcttcttcagagacttcatcctgagcgccagcagcttccagttcaaccagcacctgatggacagcctgagcctgaagatccaggagctgaacggcctggccctgccccagcacgagcccaacgacgaggacggcgagagcgacgtggactggcagggcgagagaaagcagttcgccgtggtgctgctgagcctgagactgctggccaagttcctgggcttcgtggccttcctgccctacagaggccccgagcccccccccaccggcgagctgcaggacagcatcctggccctgagaagccaggtgccccccgtgctggacgtgagaaccctgctgcagagaggcctgcaggccagaagagccgtgctgaccgtgccctggctggtggagttcctgagcttcgccgaccacgtggtgcccctgctggagtactacagagacatcttcaccctgctgctgagactgcacagaagcctggtgctgagccaggagagcgagggcaagatgtgcttcctgaacaagctgctgctgctggccgtgctgggctggctgttccagatccccaccgtgcccgaggacctgttcttcctggaggagggccccagctacgccttcgaggtggacaccgtggcccccgagcacggcctggacaacgcccccgtggtggaccagcagctgctgtacacctgctgcccctacatcggcgagctgagaaagctgctggccagctgggtgagcggcagcagcggcagaagcggcggcttcatgagaaagatcacccccaccaccaccaccagcctgggcgcccagcccagccagaccagccagggcctgcaggcccagctggcccaggccttcttccacaaccagccccccagcctgagaagaaccgtggagttcgtggccgagagaatcggcagcaactgcgtgaagcacatcaaggccaccctggtggccgacctggtgagacaggccgagagcctgctgcaggagcagctggtgacccagggcgaggagggcggcgaccccgcccagctgctggagatcctgtgcagccagctgtgcccccacggcgcccaggccctggccctgggcagagagttctgccagagaaagagccccggcgccgtgagagccctgctgcccgaggagacccccgccgccgtgctgagcagcgccgagaacatcgccgtgggcctggccaccgagaaggcctgcgcctggctgagcgccaacatcaccgccctgatcagaagagaggtgaaggccgccgtgagcagaaccctgagagcccagggccccgagcccgccgccagaggcgagagaagaggctgcagcagagcctgcgagcaccacgcccccctgcccagccacctgatcagcgagatcaaggacgtgctgagcctggccgtgggccccagagaccccgacgagggcgtgagccccgagcacctggagcagctgctgggccagctgggccagaccctgagatgcagacagttcctgtgcccccccgccgagcagcacctggccaagtgcagcgtggagctggccagcctgctggtggccgaccagatccccatcctgggcccccccgcccagtacagactggagagaggccaggccagaagactgctgcacatgctgctgagcctgtggaaggaggacttccagggccccgtgcccctgcagctgctgctgagccccagaaacgtgggcctgctggccgacaccagacccagagagtgggacctgctgctgttcctgctgagagagctggtggagaagggcctgatgggcagaatggagatcgaggcctgcctgggcagcctgcaccaggcccagtggcccggcgacttcgccgaggagctggccaccctgagcaacctgttcctggccgagccccacctgcccgagccccagctgagagcctgcgagctggtgcagcccaacagaggcaccgtgctggcccagagctag

SEQ ID NO: 273136 - protein, 303 aa, Artificial Sequence
  derived and/or modified sequence
MAGQRTCQRRSSRAGPGKMQEPPKSIEEFLKFQNWDYWPREIHFRDDDKWSCTLKKIKEDSSFVSIYTHLWENVPRIFEALLIMESKLKEYSLILQNHTSEIFKWKSMISETSSYRKLERYGEFLKKYHKKKKIMLSDEMETEKNIEGCSFTGFKANELTQLPRHLDAEQIYLFILKAHNFDERVFKIWKTHFLSEASIALLHDSFWWWFLHKFRIYPDCLAQAIYATFHEAFPESSYLFNDEFKEDLGNNIFLWCSGLKPQKGFWIHWKLKELSTTTIHGSKKAPAKSVKERIADSQEHIST

SEQ ID NO: 273137 - protein, 182 aa, Artificial Sequence
  derived and/or modified sequence
MAGQRTCQRRSSRAGPGKMQEPPKSIEEFLKFQNWDYWPREIHFRDDDKWSCTLKKIKEDSSFVSIYTHLWENVPRIFEALLIMESKLKEYSLILQNHTSEIFKWKSMISETSSYRKLERYGEFLKKYHKKKKIMLSDEMETEKNIEGCSFTGFKANELTQLPRHLDAEQIYLFILKAHNFD

SEQ ID NO: 273138 - protein, 304 aa, Artificial Sequence
  derived and/or modified sequence
MAGQRTCQRRSSRAGPGKMQEPPKSIEEFLKFQNWDYWPREIHFRDDDKWSCTLKKIKEDSSFVSIYTHLWENVPRIFEALLIMESKLKEYSLILQNHTSEIFKWKSMISETSSYRKLERYGEFLKKYHKKKKIMLSDEMETEKNIEGCSFTGFKANELTQLPRHLDAEQIYLFILKAHNFDERVFKIWKTHFLSEASIALLHDSFWWWFLHKFRIYPDCLAQAIYATFHEAFPESSYLFNDEFKEDLGNNIFLWCSGLKPQKGFWIHWKLKELSTTTIHGSKKAPAKSVKERIADSQEHISTS

SEQ ID NO: 273139 - DNA, 1890 bp, Artificial Sequence
  derived and/or modified sequence
gggacgacagcggggggggggttagacgggaagttccgcctcagcctctcaatcagcggcggtgtcgcacttctcccgagaggctccggcgaggggcagggccgcgttcgtccgggacccgcctcaagcctcgcagcctttcacccagtttcctcccgattcttgctgggacaacaaaattgggaagcggttctcgaaacatactgtcaaggcgtagttgcatttggtcgcccaactcacattgaagcctaagacccagctgatttctcttcatttctgcaaagttactgtaccatggcaggccaacgaacatgtcaaaggaggagcagcagagctggccccgggaaaatgcaagaacctccaaagagcattgaagaattcttaaagtttcaaaattgggattattggccaagggaaatccattttagagatgatgataaatggtcatgcactctgaaaaaaataaaagaagatagttcatttgtttcaatttatacacacctatgggaaaatgttcctcgaatatttgaagcacttttgatcatggaatcaaaattaaaggaatattcacttattttgcaaaaccacacctctgaaatatttaagtggaaaagcatgatttctgagacaagttcttatagaaaattggaacgatatggggaatttctaaagaagtaccataagaaaaaaaagataatgctttcagatgaaatggagacagagaagaatatagagggttgcagcttcacaggattcaaagcaaatgaacttactcagctacccagacatttggatgctgaacaaatttatctttttattttaaaagcccataattttgatgaaagagtttttaaaatctggaagactcattttctctcagaagcctccattgctcttttgcatgactccttttggtggtggtttctccataaatttaggatatatcctgattgtttggcacaagccatatatgcaacgttccatgaagcatttccagaatcgagttacctctttaatgatgaatttaaagaagatctagggaataacatttttctttggtgttcaggtttaaaacctcaaaaaggcttttggatccactggaaactgaaagaactctccacaaccaccattcatggtagcaaaaaagcacctgcaaaatcagtaaaggaaagaattgcagacagtcaagaacatatatcaactagtatcgacttcaatattataaagattctgaacaacccaagagcatatacgttgcccatatccaaggaagaatcaagattatcaagactagcaacaaagtcgcactatagtagtactggtccagagtttaatcgtgttctcttcaattttggaggtcagagtccattgattttatattatcttaagatgcatgagctggctggtatttccaaagcacctaagaaaaccaagattaaactcactaagatattccaggaaccactacctgctccaacataccgtgatgttataaaggaggcaaaaagacaatttgcaaggaaccaaaaggattttaggatactccaagcaaaggctaccaagaaacctcatgaagtgaaacaggactttgagaagttcctacataaactgcgttccgaagctgaaattgagagagaatgtgtggcatcactatcgtcatcatcatcatcatcaccatcatcaacagacaactacaactttgaggaagaagaatactaagagaaaccagaaatgaactctattcaagaataatgcatacaattcagtggtatcagtttaattgtaacaatatatttaattcaagtccaatccatgtaatcagtattaagagtgtgttttaccattcatctttaaaatcttcaaatcaataaatctcagtaagttattctt

SEQ ID NO: 273140 - protein, 823 aa, Artificial Sequence
  derived and/or modified sequence
MSQTGFSSHVVEDGVLLGAVGAYDWNGAVLKETSAGKVIPLRESYLKEFPEELKNHGAYLGYTVTSVVSSRQGRVYVAGAPRFNHTGKVILFTMHNNRSLTIHQAMRGQQIGSYFGSEITSVDIDGDGVTDVLLVGAPMYFNEGRERGKVYVYELRQNLFVYNGTLKDSHSYQNARFGSSIASVRDLNQDSYNDVVVGAPLEDNHAGAIYIFHGFRGSILKTPKQRITASELATGLQYFGCSIHGQLDLNEDGLIDLAVGALGNAVILWSRPVVQINASLHFEPSKINIFHRDCKRSGRDATCLAAFLCFTPIFLAPHFQTTTVGIRYNATMDERRYTPRAHLDEGGDRFTNRAVLLSSGQELCERINFHVLDTADYVKPVTFSVEYSLEDPDHGPMLDDGWPTTLRVSVPFWNGCNEDEHCVPDLVLDARSDLPTAMEYCQRVLRKPAQDCSAYTLSFDTTVFIIESTRQRVAVEATLENRGENAYSTVLNISQSANLQFASLIQKEDSDGSIECVNEERRLQKQVCNVSYPFFRAKAKVAFRLDFEFSKSIFLHHLEIELAAGSDSNERDSTKEDNVAPLRFHLKYEADVLFTRSSSLSHYEVKPNSSLERYDGIGPPFSCIFRIQNLGLFPIHGMMMKITIPIATRSGNRLLKLRDFLTDEANTSCNIWGNSTEYRPTPVEEDLRRAPQLNHSNSDVVSINCNIRLVPNQEINFHLLGNLWLRSLKALKYKSMKIMVNAALQRQFHSPFIFREEDPSRQIVFEISKQEDWQVPIWIIVGSTLGGLLLLALLVLALWKLGFFRSARRRREPGLDPTPKVLE

SEQ ID NO: 273141 - protein, 602 aa, Artificial Sequence
  derived and/or modified sequence
MWDYFVAKPFLPLSDSGVIYDSDESIHSDEEDDAFFSDTQIQEHQDPNSYSWALLHLTMVKLALHNVKNFFPIAGLEFSELPVTSPLGIAVIKNLENWEQILQEKMDQFEGPPPNYINTYPTDLSVGAGPAILRNKAMLEPENTPFKSRDSSAFPVKRLWHFLVKQEVLQETFIRYIFTKKRKQSESIEEHVEQVNQNCIAEDCHIKVEADLGYPGGKAKVIHKESDMIMAFSVNKANCNEIVLASTHDVQELDVTSLLACQSYIWIGEEYDRESKSSDDVDYRGSTTTLYQPSATSYSASQVHPPSSLPWLGTGQTSTGASVLMKRNLHNVKRMTSHPVHQYYLTGAQDGSVRMFEWTRPQQLVCFRQAGNARVTRLYFNSQGNKCGVADGEGFLSIWQVNQTASNPKPYMSWQCHSKATSDFAFITSSSLVATSGHSNDNRNVCLWDTLISPGNSLIHGFTCHDHGATVLQYAPKQQLLISGGRKGHVCIFDIRQRQLIHTFQAHDSAIKALALDPYEEYFTTGSAEGNIKVWRLTGHGLIHSFKSEHAKQSIFRNIGAGVMQIDIIQGNRLFSCGADGTLKTRVLPNAFNIPNRILDIL

SEQ ID NO: 273142 - DNA, 79 bp, Artificial Sequence
  derived and/or modified sequence
actcaaaaggaattgattcgaatggaatagaatggcaaggaatagtattgaattgaatggaatggaatggacccaaatg

SEQ ID NO: 273143 - DNA, 79 bp, Artificial Sequence
  derived and/or modified sequence
aatggaatggaacgcaattgaatggaatggaatggaacggaatcaacctgagtcaaatggaatggaatggaatggaatg

SEQ ID NO: 273144 - DNA, 1809 bp, Artificial Sequence
  derived and/or modified sequence
atgtgggattacttcgtggccaaacccttcctcccactgagtgacagtggggtgatctacgactctgatgaaagcatacatagcgacgaggaggatgacgctttcttctccgacacacagatccaggaacaccaagaccctaattcttactcctgggctctcctgcatcttactatggtcaaactggcactgcataacgttaagaatttttttccaatcgctgggttggagttcagtgagctccccgtcacctccccactgggaatcgccgtcatcaaaaatttagagaactgggagcagatactccaggagaagatggaccagtttgaaggaccccccccaaattacatcaatacatatccaacagaccttagcgttggggctgggccagcaatacttcgtaataaagctatgctcgaacccgaaaacacccccttcaaatcgagggattcgagcgcttttcctgtaaaacggctgtggcattttctggtgaagcaggaggtgcttcaggaaacgttcataagatacatcttcaccaaaaaacgaaaacaatccgaatccatcgaggaacacgttgagcaggtgaatcagaactgtatcgccgaagattgtcacatcaaggtggaagcagacctgggctacccaggaggaaaggccaaggttattcataaggagtctgacatgattatggccttctctgttaacaaggccaattgcaatgaaatcgttttggcaagcacacatgacgttcaagagcttgatgtgactagccttctggcctgtcagtcctacatctggattggggaggaatatgatcgtgaatcaaaatcgtcagacgacgtcgattatcgcggaagcacaacgactctgtaccagccaagcgcaacgtcatacagcgctagccaagtgcaccctcccagttcacttccatggctcggcaccggccagacttccaccggagcaagtgtgctcatgaagaggaatctacacaacgtcaagcgtatgacgtctcaccccgttcaccagtactatctcaccggagcccaggacggttccgtgaggatgtttgagtggaccaggccccagcagctcgtatgtttcaggcaggcaggaaacgcccgagtgactaggctatacttcaattcccaggggaataagtgcggggttgccgatggagaaggatttcttagcatatggcaggtcaaccagaccgcatccaatccgaagccttatatgtcttggcaatgtcactccaaggctactagcgatttcgccttcatcacatcaagttccctcgtggccacttcagggcattctaacgacaacaggaacgtgtgcctatgggatacacttatctctcctggcaattcccttatacatggctttacatgccacgaccatggggccaccgtgctccaatacgccccgaagcaacagctgttaatctctggcggcaggaaagggcacgtctgcatattcgacatccgccagcgtcagctgatccatacttttcaggcccatgattctgctatcaaggccttagctctagatccttatgaagagtattttacaacaggcagtgcagagggcaatatcaaggtgtggcgcttaaccgggcatgggctgatccatagcttcaaatctgagcatgccaaacagtcaattttcagaaacatcggtgctggcgtcatgcagatcgatattattcagggtaataggctgttctcttgcggggctgacggcactctgaaaactagggttctgcctaacgcatttaacatcccgaatcggatattggacatcctgtag

SEQ ID NO: 273145 - DNA, 1809 bp, Artificial Sequence
  derived and/or modified sequence
atgtgggactactttgtggccaagcccttcctgcccctgagtgacagcggggtcatctatgacagtgatgagagcatccacagtgatgaagaagatgatgccttcttcagtgacacccagatccaggagcaccaggaccccaacagctacagctgggccctgctgcacctgaccatggtgaagctggccctgcacaacgtgaagaacttcttccccatcgccggcctggagttcagcgagctgcctgtgaccagccccctgggcattgctgtgatcaagaacctggagaactgggagcagatcctgcaggagaagatggaccagtttgagggccccccacccaactacatcaacacctaccccacagacctgtctgtgggcgccggccctgccatcctgaggaacaaggccatgctggagcctgagaacacccccttcaagagccgggacagcagcgccttccctgtgaagaggctgtggcacttcctggtgaagcaggaggtgctgcaggagaccttcatccgctacatcttcaccaagaagaggaagcagagcgagagcattgaggagcacgtggagcaggtgaaccagaactgcatcgccgaggactgccacatcaaggtggaggccgacctgggctacccaggcggcaaggccaaggtgatccacaaggagagtgacatgatcatggccttctctgtgaacaaggccaactgcaatgagatcgtgctggccagcacccatgatgtgcaggagctggatgtgaccagcctgctggcctgccagagctacatctggattggagaggagtatgaccgggagagcaagagcagtgatgatgtggactaccggggcagcaccaccaccctgtaccagcccagcgccaccagctacagcgccagccaggtgcacccccccagcagcctgccctggctgggcaccggccagaccagcactggagcctctgtgctgatgaagaggaacctgcacaacgtgaagaggatgaccagccaccctgtgcaccagtactacctgaccggggcccaggacggctctgtgaggatgtttgagtggacccggccccagcagctggtgtgcttccggcaggccggaaatgcccgggtgacccggctgtacttcaacagccagggcaacaagtgtggggtggctgatggagagggcttcctgagcatctggcaggtgaaccagacagccagcaaccccaagccctacatgtcctggcagtgccacagcaaggccaccagtgactttgccttcatcaccagcagcagcctggtggccaccagcggccacagcaatgacaacagaaatgtgtgcctgtgggacaccctcatcagccctggcaacagcctcatccacggcttcacctgccacgaccatggagccaccgtgctgcagtatgcccccaagcagcagctgctgatcagcggcggcaggaaaggacatgtgtgcatctttgacatccggcagaggcagctgatccacaccttccaggcccatgattctgccatcaaggccctggccctggacccctatgaggagtacttcaccactggatctgctgagggcaacatcaaggtgtggaggctgaccggccacggcctcatccacagcttcaagtctgagcacgccaagcagagcatcttcagaaatattggagctggggtgatgcagattgacatcatccagggcaacagactcttcagctgtggggctgatggcaccctgaagaccagggtgctgcccaatgccttcaacatccccaaccgcatcctggacatcctgtag

SEQ ID NO: 273146 - DNA, 1809 bp, Artificial Sequence
  derived and/or modified sequence
atgtgggactacttcgtggccaagcccttcctgcccctgagcgacagtggagtgatctatgactcagacgaaagcatacacagtgacgaagaagatgacgccttcttctctgacactcaaattcaggagcaccaggacccaaactcatactcatgggcccttctgcatctgactatggtcaaactggccctgcacaatgtcaaaaatttcttcccaatcgctggcctcgagttcagtgagctgccagtcacttcaccactcggaatcgccgtgattaagaatctggaaaattgggagcaaatcctgcaagaaaagatggatcagtttgaagggccaccaccgaactacatcaatacatacccaacagatctgtccgtcggagccgggcctgctatcctcaggaacaaagctatgctcgaaccagaaaatacacctttcaagagtcgggactcaagtgcattcccagtcaagcgcctctggcacttccttgtgaaacaggaagtccttcaagaaacattcattaggtacatttttactaaaaaaagaaaacaatccgagtctatcgaggaacacgtggagcaggtcaaccaaaactgcatcgccgaagactgccatatcaaagtggaagcagatctgggctatcccggaggaaaggcgaaggtcatccacaaggagtctgacatgatcatggcttttagtgtgaacaaggcaaattgcaatgagattgtactagcctctactcatgacgtccaggaactcgatgtcacatccctgctggcctgtcaatcctacatttggatcggcgaagaatatgatcgtgagtccaaatccagtgacgacgtagactacagaggttctacaaccaccctttaccagccctcagccacctcatatagcgcttcgcaggttcacccccccagctccctgccctggctgggtacggggcagacgtcaacgggagccagcgtgttgatgaagcgcaatctgcataatgtgaaaaggatgacctcccaccccgttcaccaatactacctgactggcgctcaagatggctctgtgcgaatgtttgagtggactcgccctcagcagcttgtgtgcttcaggcaggcaggtaacgcgcgggtcactaggttatactttaatagccaggggaacaaatgtggagtagctgacggggaaggctttctgagcatttggcaggttaaccagaccgcgtccaatcccaagccatacatgagttggcagtgccactcgaaagccaccagcgactttgcattcattacatcctcgtcccttgtggctacatcaggccacagcaatgacaataggaatgtctgtctctgggacaccctcatttcaccaggaaattctctgattcacgggtttacatgccacgaccacggggccactgtgcttcaatacgctcctaagcagcagctgctgatctcgggaggacgaaaggggcacgtgtgtatattcgacatcaggcagaggcagcttatccatactttccaagctcacgactctgctatcaaggccctagcccttgacccctacgaagaatattttactacaggtagcgcagaggggaacataaaggtgtggagactaactggacacgggctgattcattccttcaagagcgaacacgctaagcaatccatttttagaaacatcggggccggagtgatgcagatagatatcattcaggggaatcggttgttttcatgcggggccgacggtaccctgaagacacgtgttttgcctaacgcattcaacattcctaatagaatactggatatcttatag

SEQ ID NO: 273147 - DNA, 1809 bp, Artificial Sequence
  derived and/or modified sequence
atgtgggattacttcgtcgccaaaccgtttctacccctctccgattccggcgtgatctacgacagcgacgaatctattcactcggatgaggaagatgatgcattcttcagcgacacccagatccaggaacaccaggaccccaattcatattcctgggctctgctacacctgacgatggtgaagctggccctgcataatgtcaagaatttctttcccattgcagggcttgagtttagcgagcttcccgtaacctccccactcggcatagctgtcataaagaacctcgagaactgggaacaaatcctgcaggaaaaaatggaccagtttgaagggccaccacccaattacattaatacgtatcccaccgacctgtcagtcggggctggtccggctatcttaaggaataaggccatgctggagcccgaaaatactccctttaaatctcgtgactcttccgcctttcccgtgaaacgactttggcacttcctcgtgaagcaggaagtcctccaggaaacattcatccggtacatcttcactaaaaagagaaagcagtccgaatcgatcgaggagcatgtggagcaggtcaatcagaattgtatcgcagaggactgccatattaaagtggaggccgacctcggctaccccggaggaaaggccaaagtcatacacaaggagagtgatatgattatggctttctccgtgaacaaagctaactgcaatgagatcgtgctagcaagcacacacgacgtacaagaactggacgtgaccagcctgctggcgtgccaatcctatatctggatcggtgaagaatacgaccgggagtccaaatcaagtgacgacgtagattaccggggatccacaaccacactctatcagccctcggctacatcgtatagtgccagtcaggttcaccctccatccagcctgccctggctgggcactggtcagacttccactggtgcaagcgttttaatgaaacggaatctgcacaacgtgaaacggatgacctcacaccctgtgcatcagtactatctgacgggagcacaggatggctccgtccggatgtttgaatggacccgaccccaacagctcgtctgctttcggcaggcagggaacgcacgagttacaagactctactttaactcgcagggtaacaagtgtggcgtggccgacggggagggatttctgtccatttggcaggtcaatcagacagcaagcaacccaaaaccctacatgtcatggcaatgccattccaaggccaccagtgacttcgcatttattacctcctcatctctggtcgcaacctccggacatagcaacgataatcgcaatgtgtgcctgtgggataccctgatttcccctgggaattctctcatacacgggttcacatgtcatgatcacggcgcaaccgttcttcaatacgctccaaaacagcagcttttgataagcgggggtcgtaaggggcatgtctgcatcttcgacataagacagcgacagctgatccacacattccaggcccatgatagtgcaatcaaggccctcgctctggacccatacgaagagtacttcaccacaggctcagcggagggtaatatcaaagtctggcgactaaccggccatgggctgattcactcattcaaatccgagcacgccaagcagtccatcttcagaaatattggagcaggagtgatgcagatcgacatcatccagggaaacagactgttcagttgcggcgctgatggtacgttgaaaacccgggtgctgcctaacgcctttaatatcccgaaccggattctggacattctgtag

SEQ ID NO: 273148 - DNA, 1809 bp, Artificial Sequence
  derived and/or modified sequence
atgtgggactacttcgtggccaagcccttcctgcccctgagcgacagcggcgtgatctacgacagcgacgagagcatccacagcgacgaggaggacgacgccttcttcagcgacacccagatccaggagcaccaggaccccaacagctacagctgggccctgctgcacctgaccatggtgaagctggccctgcacaacgtgaagaacttcttccccatcgccggcctggagttcagcgagctgcccgtgaccagccccctgggcatcgccgtgatcaagaacctggagaactgggagcagatcctgcaggagaagatggaccagttcgagggccccccccccaactacatcaacacctaccccaccgacctgagcgtgggcgccggccccgccatcctgagaaacaaggccatgctggagcccgagaacacccccttcaagagcagagacagcagcgccttccccgtgaagagactgtggcacttcctggtgaagcaggaggtgctgcaggagaccttcatcagatacatcttcaccaagaagagaaagcagagcgagagcatcgaggagcacgtggagcaggtgaaccagaactgcatcgccgaggactgccacatcaaggtggaggccgacctgggctaccccggcggcaaggccaaggtgatccacaaggagagcgacatgatcatggccttcagcgtgaacaaggccaactgcaacgagatcgtgctggccagcacccacgacgtgcaggagctggacgtgaccagcctgctggcctgccagagctacatctggatcggcgaggagtacgacagagagagcaagagcagcgacgacgtggactacagaggcagcaccaccaccctgtaccagcccagcgccaccagctacagcgccagccaggtgcacccccccagcagcctgccctggctgggcaccggccagaccagcaccggcgccagcgtgctgatgaagagaaacctgcacaacgtgaagagaatgaccagccaccccgtgcaccagtactacctgaccggcgcccaggacggcagcgtgagaatgttcgagtggaccagaccccagcagctggtgtgcttcagacaggccggcaacgccagagtgaccagactgtacttcaacagccagggcaacaagtgcggcgtggccgacggcgagggcttcctgagcatctggcaggtgaaccagaccgccagcaaccccaagccctacatgagctggcagtgccacagcaaggccaccagcgacttcgccttcatcaccagcagcagcctggtggccaccagcggccacagcaacgacaacagaaacgtgtgcctgtgggacaccctgatcagccccggcaacagcctgatccacggcttcacctgccacgaccacggcgccaccgtgctgcagtacgcccccaagcagcagctgctgatcagcggcggcagaaagggccacgtgtgcatcttcgacatcagacagagacagctgatccacaccttccaggcccacgacagcgccatcaaggccctggccctggacccctacgaggagtacttcaccaccggcagcgccgagggcaacatcaaggtgtggagactgaccggccacggcctgatccacagcttcaagagcgagcacgccaagcagagcatcttcagaaacatcggcgccggcgtgatgcagatcgacatcatccagggcaacagactgttcagctgcggcgccgacggcaccctgaagaccagagtgctgcccaacgccttcaacatccccaacagaatcctggacatcctgtag

SEQ ID NO: 273149 - DNA, 10659 bp, Artificial Sequence
  derived and/or modified sequence
tttccgcagctgagcggcgacccgggcggcggcggcggtcgaggagctcccatggcagggacgaggcggagggaaggcgaaaggggggcgaggagttaagccagagcctccgcggggcgggtttccgagggaggcacagagggaaacggctctcgcagcccgaggagggtcaggcgcggagcttgtcgcacctcccgcgcattctgtccagcccgggctccggagatgcatctgcatcaggtcctcaccggagctgtcaaccctggagacaactgctactccgtgggcagcgtcggggatgtccccttcacggcatatggatcaggctgtgatattgttattttggcaaatgactttgaatgtgtacagatcattcctggtgctaagcatggaaacatccaagtcagctgtgtggagtgttctaaccaacaaggaagaattgcagcttcatatggtaatgctgtttgtatatttgagcccttgggcataaattctcataaaagaaattgtcaactcaagtgccagtggcttaaaactgggcagttttttttgagttctgtgacatacaacttagcatgggatcctcaagataatagattgttgacagcaactgattctattcagttgtgggctcctccaggagatgatattctggaagaggaggaagaaattgataatacagttcctcctgttttaaatgattggaagtgtgtctggcagtgcaaaacctcagtatctgtacatttgatggaatggtctcctgatggtgaatattttgctactgctggaaaggatgattgtcttttgaaagtgtggtatcctatgactggttggaagtcttcaattatacctcaggatcatcatgaagtaaaaaggagacagtcctctactcaattttcttttgtttacttggcacatccccgagctgtgacaggtttttcgtggcgcaaaactagcaagtatatgcccaggggttctgtctgtaatgtgttgttaacttcatgtcatgatggtgtgtgccggctctgggcagaaactttattaccagaagactgtcttttgggtgagcagatttgtgagactaccacttccagcattgccagcagcctttctcatgctggaagacacaaagacagaatacagcatgctcttgagacaatacaccatttgaaaaatttaaggaaaggacagaggaggtcatctgttcttgtaactcatgctgaattaatgcccgaccagacagcaatgcatgaagttcaaagacacatttcccaccatgcaaatgcactctgtcattttcatattgcagcaagcatcaaccctgccacagatattccaaatgtcttggttggcactgcatttaatgttgatgatggaaatgggggctttgtagttcattggttaaacaacaaggaatttcattttacatcatctacagaagtatttatgcatcaattacgaaaactttctgataagcaggtagatcatgaaaatgatgatgcagatagagaagatgaggaacattcacaggaggatagagaacggggtttacatatgaaattagaccatgatttatccctggatagagaatctgaggcaggtacaggatcatcagaacatgaagatggagaaagagaaggaagtcctagaacttactcacgacttagtgtaccaatgccactgcctacggttctgcttgatcggaagattgaaacgctgctaactgaatggaataagaatcctgatatgctttttacaatacaccctgtagatggtacctttctagtgtggcatgtgaagtatttggatgaatataatcctggaatatttagacaagttcaggtttctttttcttctcggattcctgttgcatttccctctggtgatgcaagctctcttagtaaaaatatcatgatgtatgcctgtataaatgcgacaaaagattctcaccacacgctgttacaccaggaggggatgtctgtaggcagtcctcacggatcacagccacactctagatcccacagtacacatatgaacatcttagctcccacagtaatgatgatctctaaacacatagatggttctttaaatcagtgggcagtcacttttgctgataagtctgcctttaccactgttctaactgtatctcacaaatttagatattgcggtcatcgatttcacctcaatgacctggcatgtcattcagttttaccactgttattgacatcctctcatcataatgctctattgactcctgaattagattgtcagtgggactcagacaataaattaagtagattaatggaccctgtaaaacatataaaaggttcctcgaaacaacctcttagaaatgcagcaactcgtacatttcatgacccaaatgcaatctacagtgaacttattctgtggcgtgtagacccaataggacctttgtcatacactggaggagtatcagaattggctcgaattaactctttacatacctcagcgttctctaatgtggcttggcttccaactctcattcccagttactgtctaggcacatactgcaattctgcaagtgcttgctttgttgcttctgatggcaaaaatctgagactctatcaagctgtagtggatgcaaggaaattattagatgaattgtcagacccagaatcttcaaaacttattggagaagtgtttaatattgtgagccaacagtctactgctcgacctggctgcattattgaactcgacgcaataaccaaccaatgtggctcaaatacacagttgcttcatgtgtttcaagaagacttcattataggatataaaccacataaggaagatatggagaaaaaggaaacagaaatattttttcagccatcacaaggataccgcccaccaccattttcagaaaagttctttctagtagtaattgagaaggacagcaataataactctattctgcatatgtggcaccttcatcttaaatctgtacaagcatgtttagctaaagcttcagaaggggcttcctctgagagtctactttcagtccctggacagaagaacgtagattcttctccagaaacctctcctagtgtgagccccatgccacattcttcatcaattgccaatcttcaaactgccagtaaacttattctgagttctagactggtgtatagccaaccccttgatctcccagaatcagttgaagtaataagagcaacgccttcagcaggccatctgagttcttcttcaatttatccagtgtgccttgcaccttatttagtggttacaacttgttctgacaataaagtacgcttctggaaatgttgtatggaagccaacccagagtgtaataaaagtgatgagaaagaaatttatcattggaagagatggcctttgatgaatgatgaaggagaagataatagcagtacagtgagcattgtgggaagaccagttgctgttagctgttcatacacaggtcgccttgcagtggcttataagcagcctatccaccataatggttttgtttctaaagaattttccatgcatgtttgtatatttgaatgtgaatctacaggaggatcagagtgggttttagaacaaacaattcatcttgatgatttggttaaggttgggagtgtacttgattcaagggtcagcgtcgacagtaatctgtttgtgtatagcaagtcagatgcactcttgagcaaggatagatatcttattccgaatatcaaacatttagtacatttggactgggtatcaaaagaagatggctcccacattcttacagtgggagtcggtgcgaatatcttcatgtatggaaggctttcaggaattgtgactgagcaaaccaacagtaaggatggagtagctgtcatcactttaccactaggtggtagtatcaagcaaggagttaagtcaagatgggttcttcttagatctatagacttggtatcttctgttgatggtactccttcactgcctgtttctctctcttgggtaagagatgggatattggtggtaggaatggattgtgaaatgcatgtatatgcacagtggaagcatgctgtcaaatttggagacactgaagctgatagttctaatgcagaagaggcagcaatgcaagatcattcgacctttaaatctaatatgctggcaagaaaaagtgttgttgaaggaacagctatttctgatgatgttttttgttcaccaactgtaattcaagatggtggcttatttgaggctgcacatgtactttcccctactcttccacaatatcatccaactcagctgttagaattgatggatttagggaaagtgcgaagggctaaagccattctctctcatttagtaaaatgtattgcaggtgaagtagcaatagttagagatcctgatgctggagaaggaactaagcgacatctctctcgaactattagtgtaagtggcagtacagcaaaggaaacagtcaccgtaggaaaagatggtactcgagattatactgagatagattctatccctccactaccactatatgcattacttgctgcagatcaagatacatcctacagaatttcagaagaaagtacaaagataccacagagctatgaagatcagacagtaagtcaaccagaggatcagtattcagagctgtttcaaatccaggatataccaacggatgatattgatttagagcctgaaaagagagaaaacaaatcaaaagtaataaatctttctcaatatggaccagcttactttggccaagaacatgcaagggtactttcaagtcatcttatgcactcaagtctaccaggccttacccgtttggagcagatgttccttgtagctttggctgatacagtggctactactagtactgagcttgatgaaagcagagataagagttgctcaggaagagatacattagatgagtgtggtttgagatacttgttagctatgcgcctacacacatgccttttgacatcgctgcctcctttataccgagtgcagctacttcatcaaggtgtctctacatgccattttgcctgggcttttcattctgaggctgaagaagaactgattaatatgattccagcaattcagagaggggacccccagtggtctgaattaagagctatgggcataggatggtgggtgaggaacattaacacgcttcgaagatgcattgaaaaggttgccaaagcttcttttcaaaggaacaatgatgccttagatgctgcactattctacctttcaatgaagaagaaagcagtagtgtggggtctgtttaggtcacagcatgatgaaaaaatgacaacatttttcagccacaactttaatgaagatagatggcgaaaagctgctttgaaaaatgctttttccttacttggaaaacaacgctttgaacaatcggctgcttttttcttgctagctggttcattgaaagatgccatagaggtatgtcttgaaaaaatggaagatattcagctagccatggttattgcccgtttatatgaatctgaatttgagacttcatccacttatatatccatcctaaatcagaagattttgggttgccaaaaggatggctcaggattcagttgcaaaagattacatcctgatcctttcctgcgtagtcttgcctattgggtaatgaaagattacacccgagccttggacacattactggaacaaacaccaaaggaggatgatgaacatcaagttatcatcaagtcttgtaacccggtggcatttagtttttataactaccttcgaactcatcctttgctcattcgaagaaatcttgcctcccctgaaggaactttggcaaccttaggtctcaaaactgagaagaactttgttgataaaattaacctcatagaaagaaaattattctttaccactgcaaatgctcattttaaagttggatgccctgttttagccttggaggtactctccaaaattccaaaagtaaccaaaacatctgccttatctgcaaaaaaagatcagcctgacttcatttctcacaggatggatgatgtaccttcacattcaaaagctctgagtgatggcaatggaagttctggcattgaatggtcaaatgtaacttcatcacagtatgactggagtcagccaatagtaaaagttgatgaggaacctcttaatcttgattggggtgaagatcacgacagtgccttagatgaagaggaagacgatgctgttggtttagtgatgaaaagtacagatgccagggaaaaagataaacaatcagatcagaaggcctcagaccctaacatgttattaacacctcaggaagaggatgatcctgaaggtgatactgaagttgatgtgattgctgaacaactaaaattcagagcttgtttaaagatccttatgactgaattaagaacattggctacaggttatgaagtagatggaggaaaactcagatttcaactctataactggcttgaaaaggaaattgctgccttgcatgagatatgtaatcatgaatcagttattaaagagtattccagtaagacatattccaaagtagagagtgatctgctggatcaggaagaaatggtagacaaaccagatattggttcctatgagcgccatcaaatagaaagaagaagattgcaggccaaacgagagcatgcagaaagacgaaagtcgtggttgcagaaaaaccaagatctcctgagagtatttctcagctactgtagccttcatggggcccaaggtggtggtttggcttcagtaaggatggaactcaaatttttgctacaagaatcacaacaggaaactacagtaaagcagctccagtctccactaccactgcctaccaccctacctctgctttcagcaagtattgcgtcaacaaaaacagtcatagctaatcctgtattgtacttaaataatcacatccatgatatactttatactattgttcagatgaaaacaccacctcatcccagtattgaagatgtgaaggtgcacacacttcattcactagcagcatcactttctgcatcaatttaccaagcattatgtgacagtcatagctacagtcaaacagaaggaaatcagtttacaggaatggcttatcaaggacttcttttaagtgatcgtagaagactaaggacagaaagcattgaagaacacgcaacaccaaattcatctcctgctcaatggcctggtgtgagctcacttattaatcttttgagttcagcccaagatgaagaccagccaaaactgaacattttgctatgtgaagctgttgttgctgtttacttaagtttattgatacatgctcttgccacaaattcctccagtgaattatttcggcttgcagcccacccattaaataatcgaatgtgggctgctgtttttggaggcggtgtaaaacttgttgtgaaacctcgaagacaatcagaaaatatttcagcacctcctgtcctttctgaagacatagataaacaccgtaggagatttaacatgagaatgctcgtccctggaaggcctgtaaaagatgctaccccaccaccggtgcctgcagaaagaccatcttacaaagaaaaatttattcctcccgaacttagtatgtgggattattttgttgcaaagccatttcttcctttgtctgatagtggtgttatatatgattctgatgaaagcattcatagtgatgaagaagatgatgcctttttttcagatacacaaatacaggagcaccaagatccaaattcctatagctgggctcttctacatttgacaatggttaaactagcacttcacaatgtcaagaatttctttcctattgctggactggaattctctgagctgcctgtaacatcaccattaggtattgctgtgattaaaaacttggagaactgggaacagatcttgcaagagaaaatggatcagtttgaaggtccaccccctaactatatcaacacatatccaactgacctttcagtgggagctggaccagctattcttcgaaataaagcaatgctagaacctgaaaataccccattcaagtcccgggattcttctgcatttccagtcaaacgactttggcatttccttgttaaacaagaggtccttcaagagacatttattagatatattttcactaagaaaagaaagcagagtgagtctatagaagaacatgtggagcaggtcaaccaaaactgcatagcagaagattgccacatcaaggttgaagctgatctgggctatccaggtggaaaggcgaaagtcatccataaggaatctgatatgatcatggcattttctgttaataaggcaaattgtaatgaaattgttttggcttcaacacatgatgttcaagaacttgatgttacttctctactggcctgtcagtcatacatatggatcggagaagaatatgacagagaatccaaaagttcagatgatgttgattatcgtggttccactacaactctttatcaacccagtgcaacatcctattcagcaagtcaggtgcatccaccttcatctctgccatggctgggcactggacagactagcactggagctagtgtgcttatgaaaaggaatctacataatgttaagagaatgacttcacacccagtccatcaatactatcttacaggtgctcaggacggcagtgtacgaatgtttgaatggacgcggcctcagcaacttgtctgctttcgtcaagctggcaatgcaagagttactagattatattttaattcacaaggcaacaagtgtggtgttgcggatggagagggttttctgagtatctggcaagttaaccaaactgcatcaaatcctaaaccttatatgagttggcagtgccacagtaaagccacaagtgactttgcatttattacctcttcaagtctagttgccacatctggacactccaatgacaatagaaatgtttgcctctgggacacattaatatcacccggaaacagcctcattcatggtttcacgtgccacgatcatggtgccacggtactgcagtatgcacccaaacagcaactcctaatctcggggggtaggaaaggacacgtctgcatttttgacatcaggcaaaggcagctcattcacacgttccaggcccatgactcagctattaaggctctggccttggatccctatgaggaatattttaccacaggttcagcagaaggtaacataaaggtttggagattgacaggccatggcctaattcattcatttaaaagtgaacatgctaagcagtccatatttcgaaacattggggctggagtcatgcagattgacatcatccagggcaatcggctcttctcctgtggtgcagatggcacgctgaaaaccagggttttgcccaatgcttttaacatccctaacagaattcttgacattctataaagattggggttttatttttatatacatttcagttaaaaggcacactacagtcatcactaggcaattctgctttctaagcagttgtattgaaaacagagaatctctgtgtagaatttgaatatgacccaagctgagtattatctaaacaggttggtggaatgaatgcgcatgtaccttattatgctgacatactaaaaaaaataaaacctagtattgtatgaaggatagctattctttacagcatttagcaaacctgattcagaaaacatttgagattagcaaattagtaacttgaaataatgaaaaggacgtttataccaaattaaggaagaaaatgttgctgatttgggtttttcttcctgttcttaccactgactgaagcatgcctgcagtctcctcctctgttgaatgaaggataatcataaggtgtttgttaggagcgctagaccacctggaaaactttcttagctgtggagcagtgcgcagtgaccagttctctgctgtgagaggccgtttccattctttcctgctgaatatttttcctgttagtgtttatactgagctagtactgtaacttgcaaatgagtgcaaatttaaatgcaatgttttactcacaatttgcacattcacattttttggactgctagtttttctatttaaatatttgccttcatgttaggaatgtactatgtgaacatgacatatttgtagttaaccaaacacaccttcttagtccagtttagtactttttcttttcgtgtattcaaggttaaacacccaaacatttaaggatatgttgaaactacaccaatagagcatttcatatcataattaaaatgaatgttaggcttcttgtggccagttaatagttgatgagattggtgacattatttattgccacagcctattgtataaactatgcagagttaaatatttgcttgtaaaatattagccaatgttgtcattattttgatgtatttccttggttatgaccaaaaatatgttgagatactgaaactaatgtctgtgtgtttaaatgtttaccagcaaattgtcttatcatgttaatgagaatgttcaatgcctgtgtggtaaatagtaaatacaatggcataaaagtaactttctctgaagatgtgatgttcaggctgtgaaatatatatgtaaaagaaaaataaatgttatttgttagagtttttagtttgatactgtttttgaccattgagatttttaatttgataaaatgtttaactgttagag

SEQ ID NO: 273150 - protein, 395 aa, Artificial Sequence
  derived and/or modified sequence
MSLVDLGKKLLEAARAGQDDEVRILMANGAPFTTDWLGTSPLHLAAQYGHYSTTEVLLRAGVSRDARTKVDRTPLHMAASEGHASIVEVLLKHGADVNAKDMLKMTALHWATEHNHQEVVELLIKYGADVHTQSKFCKTAFDISIDNGNEDLAEILQIAMQNQINTNPESPDTVTIHAATPQFIIGPGGVVNLTGLVSSENSSKATDETGVSAVQFGNSSTSVLATLAALAEASAPLSNSSETPVVATEEVVTAESVDGAIQQVVSSGGQQVITIVTDGIQLGNLHSIPTSGIGQPIIVTMPDGQQVLTVPATDIAEETVISEEPPAKRQCIEIIENRVESAEIEEREALQKQLDEANREAQKYRQQLLKKEQEAEAYRQKLEAMTRLQTNKEAV

SEQ ID NO: 273151 - protein, 89 aa, Artificial Sequence
  derived and/or modified sequence
MSLVDLGKKLLEAARAGQDDEVRILMANGAPFTTDWLGTSPLHLAAQYGHYSTTEVLLRAGVSRDARTKVDRTPLHMAASEGHASIVEV

SEQ ID NO: 273152 - DNA, 3069 bp, Artificial Sequence
  derived and/or modified sequence
gctttctttgtgtggctgaagcgctagaaatggcatattttctttcccttcgttaaaaaatcagaccctctttcccctctctccccgcgggaacacagctagggagtgggtaggagcaggatctgccgacgagggcagaggcggaaaatcctcgggcgatgagctgaagagggccgggtccgggagggatgctgggagcttgactcactcgcacaccatgtgtccctccgcgcgcagcacgggggacttttcggtggggattttgggcgccgaccagacgcggcattttcggaaaatagcgccctgtgcagctgaagcgctttgtgtgtagcggggccgcgtcagcccggccgggtacgaggcgcctcgggtccccgcaccacctcctgctgccttcccgtcgccgctcccgaagcttttccagatgtccctggtagatttgggaaagaagcttttagaagcggcacgagcaggtcaagatgatgaagttcgtattttgatggcaaatggagctccctttactacagactggctgggaacttctccacttcatctagcagcacagtatggtcattattccaccacagaggtactgctgcgagctggtgtgagcagagatgccagaaccaaagtggaccgaacaccattacatatggcagcttctgagggccatgccagcatagtagaggttttacttaagcatggtgctgatgtcaatgcaaaggacatgttaaagatgacagctctccattgggccacagaacacaatcatcaagaggtggtggaacttttaatcaaatatggtgctgatgtacacacgcaaagtaaattttgtaaaactgcatttgatatttcaatagacaatggaaatgaagatttagcagagatattacagattgctatgcagaaccaaatcaacacaaacccagagagtcctgacactgtgacaatacatgctgcaacaccacagtttatcattggacctggaggggtggtgaacctaacaggtctggtatcttcagaaaattcatccaaggcaacagatgaaacgggtgtatctgctgttcagtttggaaactcttctacatcagtattagctacattagctgccttagctgaagcatctgctccattgtccaattcttcagaaactccagtagtggccacagaagaagtagttactgcagaatctgtggatggtgccattcagcaagtagttagttcagggggtcagcaagtcatcacaatagttacagatggaattcagcttggaaatttgcactctattccaaccagtggaattggtcagcccatcattgtgaccatgccagatggacaacaagtattaacagtaccagcaacagacattgctgaagaaactgttataagtgaagaaccaccagctaagagacaatgtatcgaaataattgaaaaccgggtggaatctgcagaaatagaagagagagaagctcttcagaaacagctggatgaagcaaatcgagaagcacaaaaatatcgacagcagctcctaaagaaagaacaggaagcagaggcctacagacagaagttggaagctatgactcgtcttcagactaataaagaagctgtttaattgaaatgaacatgtagtttgattttacttttggtcaagaaagaatacaatcttgaactgtacacaacaaaggtacagccatgggaatacagaatgatagaagagactacagatggataattggacttaagccatgagctctgagttcttgtaacataaaactttactttagaagttgtgaaatgtatttaaaactgaattctgtaaatagtttttttttttttacagttccaaatgagttgataaagattgttgaagagatccaaaaccagaataagccactgtttttgtgaattctttttgattttagtacaaaccttaatttctcagaaacggaacagttttaagggtgatcgttgttggttaggccaaatgttgtgtaataattatggtggactgatgctggaattactcctgtaggtataaacctctgtatgaagagaagatttctcccaggaaatctttgtacagctttaagttgtgtcagattctctgaaaacattttttagaaagcaaaatttttatatttgttcaatttcagctatacccaagtagatttacatgtatatgaagcaaatatttttaaaaatttctgtttgtacatattctgcatgttttataatttcaaaatgcatcacttacataggtatttctcccacagaaatgatgaaagtgaccagaaaaaaacaaaaacaaaacccctttactctgtaggtcattgaaacgaagtaagctggcagctggttttattggaatgacagtgttctcggaaggagcagcctacaagataacttgaatttgccaattctgcaaaatctgtgcttttttgaaaatttaagagtggggacgtgaaactgtattctgtgccttccatcatgatttccacatgaaagcactttaaggcactgattttaagataatgtttttggaaaacccaatgcatatgggtttctgaaatattttatggacttatttctccccaggaaatgattcttacggaaaaaaattgcttttgtatgtagaacaggaactttttgtattacagtgatgcaatagacatgtctaatgtaacttctacttttccttttgaaagctcagtgtctgtgctatgacttgctctcatcacaatattgttgaattccacaatgtatggacattaaacactggcagactgttcactttttcttttttttttttggtaaaatattacttcaaacccctttttcttgctttatttttcagtgttttattgctttatgaactgtttaaccctgaaatccctctaggttatctatactgtataaaaaagcaattacccttaaaactgtactctggcctacttttctattttgcaattaaatatctttttcacatatgttcattgtagacttatgtttttatcacatcttattaacacattaaaaatgttatcctactgcaaaaaaaaaaaaaaaaaa

SEQ ID NO: 273153 - DNA, 1188 bp, Artificial Sequence
  derived and/or modified sequence
atgtctctggtggatctaggaaaaaagctacttgaagcggcaagggctggccaggatgacgaggtgaggattttgatggcgaatggagcaccattcaccaccgactggctgggtaccagtccactgcacttggctgcccagtatggccactactccaccaccgaggtgctgctgcgagccggcgtcagtagggatgcaaggacaaaagtggaccggactcccttacatatggctgcctctgagggccatgccagcatagtcgaggtcctactcaaacatggagccgatgtcaatgctaaggacatgttgaagatgaccgcattacattgggcaaccgagcacaaccatcaggaggtcgtggagctgctgattaagtacggggctgacgttcacacacaatcgaagttctgcaagactgccttcgacataagcattgacaatggcaatgaagacctcgcggaaatcctgcagattgccatgcagaatcagattaatacaaaccctgagtccccagataccgtaacgatccacgccgcgaccccacagtttatcatcggacccggcggtgtggtaaatctgaccggtctcgtcagttctgaaaactcctccaaggcaactgacgagactggggtcagcgccgtacaatttggcaatagctcaaccagcgtcctggccaccctcgccgctctcgcagaagcctcagctccccttagcaactcttcggaaaccccagtcgtcgccaccgaggaggtggtgaccgcagaaagtgtcgacggcgctattcagcaggtggtgagttcaggcggacagcaggtcattactatcgttaccgacggcatacagttgggaaatctccatagcatccccacctcagggatcgggcagcctatcatcgtgacgatgcctgatgggcaacaggttttgaccgtcccagccaccgacatcgctgaggaaacagttatatcagaggaacccccggctaaaagacagtgtattgaaattatagaaaatcgggtagaaagtgccgaaatcgaagaacgggaagctctacagaagcagctggatgaggcaaaccgagaagcacaaaaatatcgacagcaattactcaaaaaagagcaggaggctgaagcataccggcagaagctggaggctatgacccgcctgcaaaccaataaagaagcggtctag

SEQ ID NO: 273154 - DNA, 2726 bp, Artificial Sequence
  derived and/or modified sequence
ggggattttgggcgccgaccagacgcggcattttcggaaaatagcgccctgtgcagctgaagcgctttgtgtgtagcggggccgcgtcagcccggccgggtacgaggcgcctcgggtccccgcaccacctcctgctgccttcccgtcgccgctcccgaagcttttccagatgtccctggtagatttgggaaagaagcttttagaagcggcacgagcaggtcaagatgatgaagttcgtattttgatggcaaatggagctccctttactacagactggctgggaacttctccacttcatctagcagcacagtatggtcattattccaccacagaggtactgctgcgagctggtgtgagcagagatgccagaaccaaagtggaccgaacaccattacatatggcagcttctgagggccatgccagcatagtagaggttttacttaagcatggtgctgatgtcaatgcaaaggacatgttaaagatgacagctctccattgggccacagaacacaatcatcaagaggtggtggaacttttaatcaaatatggtgctgatgtacacacgcaaagtaaattttgtaaaactgcatttgatatttcaatagacaatggaaatgaagatttagcagagatattacagattgctatgcagaaccaaatcaacacaaacccagagagtcctgacactgtgacaatacatgctgcaacaccacagtttatcattggacctggaggggtggtgaacctaacaggtctggtatcttcagaaaattcatccaaggcaacagatgaaacgggtgtatctgctgttcagtttggaaactcttctacatcagtattagctacattagctgccttagctgaagcatctgctccattgtccaattcttcagaaactccagtagtggccacagaagaagtagttactgcagaatctgtggatggtgccattcagcaagtagttagttcagggggtcagcaagtcatcacaatagttacagatggaattcagcttggaaatttgcactctattccaaccagtggaattggtcagcccatcattgtgaccatgccagatggacaacaagtattaacagtaccagcaacagacattgctgaagaaactgttataagtgaagaaccaccagctaagagacaatgtatcgaaataattgaaaaccgggtggaatctgcagaaatagaagagagagaagctcttcagaaacagctggatgaagcaaatcgagaagcacaaaaatatcgacagcagctcctaaagaaagaacaggaagcagaggcctacagacagaagttggaagctatgactcgtcttcagactaataaagaagctgtttaattgaaatgaacatgtagtttgattttacttttggtcaagaaagaatacaatcttgaactgtacacaacaaaggtacagccatgggaatacagaatgatagaagagactacagatggataattggacttaagccatgagctctgagttcttgtaacataaaactttactttagaagttgtgaaatgtatttaaaactgaattctgtaaatagtttttttttttttacagttccaaatgagttgataaagattgttgaagagatccaaaaccagaataagccactgtttttgtgaattctttttgattttagtacaaaccttaatttctcagaaacggaacagttttaagggtgatcgttgttggttaggccaaatgttgtgtaataattatggtggactgatgctggaattactcctgtaggtataaacctctgtatgaagagaagatttctcccaggaaatctttgtacagctttaagttgtgtcagattctctgaaaacattttttagaaagcaaaatttttatatttgttcaatttcagctatacccaagtagatttacatgtatatgaagcaaatatttttaaaaatttctgtttgtacatattctgcatgttttataatttcaaaatgcatcacttacataggtatttctcccacagaaatgatgaaagtgaccagaaaaaaacaaaaacaaaacccctttactctgtaggtcattgaaacgaagtaagctggcagctggttttattggaatgacagtgttctcggaaggagcagcctacaagataacttgaatttgccaattctgcaaaatctgtgcttttttgaaaatttaagagtggggacgtgaaactgtattctgtgccttccatcatgatttccacatgaaagcactttaaggcactgattttaagataatgtttttggaaaacccaatgcatatgggtttctgaaatattttatggacttatttctccccaggaaatgattcttacggaaaaaaattgcttttgtatgtagaacaggaactttttgtattacagtgatgcaatagacatgtctaatgtaacttctacttttccttttgaaagctcagtgtctgtgctatgacttgctctcatcacaatattgttgaattccacaatgtatggacattaaacactggcagactgttcactttttcttttttttttttggtaaaatattacttcaaacccctttttcttgctttatttttcagtgttttattgctttatgaactgtttaaccctgaaatccctctaggttatctatactgtataaaaaagcaattacccttaaaactgtactctggcctacttttctattttgcaattaaatatcttttt

SEQ ID NO: 273155 - DNA, 1188 bp, Artificial Sequence
  derived and/or modified sequence
atgagcctggtggacctgggcaagaagctgctggaggccgcccgggccggccaggatgatgaggtgcgcatcctgatggccaacggggcccccttcaccacagactggctgggcaccagccccctgcacctggccgcccagtatggccactacagcaccacagaggtgctgctgcgggccggcgtgtccagagatgcccggaccaaggtggacaggacccccctgcacatggccgccagcgagggccacgccagcatcgtggaggtgctgctgaagcatggagcagatgtgaatgccaaggacatgctgaagatgacagccctgcactgggccacagagcacaaccaccaggaggtggtggagctgctgatcaagtacggggctgatgtgcacacccagagcaagttctgcaagacagcctttgacatcagcattgacaatggaaatgaagacctggccgagatcctgcagatcgccatgcagaaccagatcaacaccaaccctgagagcccagacacagtgaccatccacgccgccaccccccagttcatcatcggccctggaggagtggtgaacctgaccggcctggtgtcctctgagaacagcagcaaggccacagatgaaacaggagtgtctgctgtgcagtttggaaacagcagcacctctgtgctggccaccctggccgccctggccgaggccagcgcccccctgagcaacagcagcgagacccctgtggtggccacagaggaggtggtgacagctgagagcgtggatggagccatccagcaggtggtgtcctctgggggccagcaggtgatcaccatcgtgacagatggcatccagctgggcaacctgcacagcatccccaccagcggcatcggccagcccatcatcgtgaccatgccagatggccagcaggtgctgactgtgcctgccacagacattgctgaggagaccgtcatcagcgaggagcccccagccaagaggcagtgcatcgagatcatcgagaacagagtggagagcgctgagattgaggagcgggaggccctgcagaagcagctggatgaggccaaccgggaggcccagaagtaccggcagcagctgctgaagaaggagcaggaggccgaggcctaccggcagaagctggaggccatgacccggctgcagaccaacaaggaggccgtgtag

SEQ ID NO: 273156 - DNA, 1188 bp, Artificial Sequence
  derived and/or modified sequence
atgagcctggtggacctgggcaagaagctgctggaggccgcccgggccggtcaggatgacgaagtgcgcatcctgatggcaaacggggctccattcacaacagactggctgggcacttcaccactccacttagctgcccagtacggacattatagtaccactgaggtgcttcttcgggcgggtgtgtctcgagacgctagaaccaaagtggacaggactcccctgcatatggccgcaagcgaaggacacgcatctatcgtggaggtgttgctgaagcacggggccgatgttaatgccaaagatatgctgaaaatgactgcgcttcactgggcgaccgagcataaccatcaagaggtggtggaactcctgatcaaatatggggcggatgttcacacccagtctaagttctgcaaaactgcattcgatatctcaattgataatggaaacgaggacctggccgaaatcctgcagatcgcaatgcagaaccagatcaacacaaacccggaatctccggacactgtcaccatccacgccgctacgcctcagtttataatcgggccaggtggcgtggttaatttaacaggcctggtgtcgagcgagaattcatcaaaagctaccgatgagacgggcgtctccgccgtccagtttgggaatagctctacatccgtgctggcaactcttgctgctctggctgaagcatctgcgcccctctctaacagtagcgaaacacccgttgttgccaccgaggaggttgtcaccgccgagtcagtcgacggggctatccaacaggtggtgtcaagcgggggccagcaggtaatcaccatagtgacggatggtattcagctggggaatttacattcaattcccaccagtggcatcggacagcccataatcgtgacaatgccggatgggcagcaggtattaaccgtgcccgccactgacatcgccgaagaaacggtgatttccgaagagccccctgccaaaagacagtgtattgagattatagaaaaccgagtggaatctgccgagattgaagaacgggaggctttgcaaaagcagctcgatgaggcgaatcgggaggcgcagaaatataggcagcaactcctcaagaaggaacaagaggcagaggcctatcggcagaaattagaggcaatgactcggttgcagaccaataaagaagccgtctag

SEQ ID NO: 273157 - DNA, 1188 bp, Artificial Sequence
  derived and/or modified sequence
atgagtttagtggacttgggcaagaagctgttagaagcagcacgggctggccaggatgatgaagtgcggatcctcatggccaacggggcacccttcacgaccgactggttggggacctccccattgcatctcgccgcacagtatgggcactacagtaccacggaggtcctgttacgagcaggagtgtccagagacgcaaggacgaaggttgataggactcctctgcacatggccgctagtgagggacatgcctccattgtggaagttctcctgaagcacggagccgacgtgaacgccaaggacatgttgaaaatgactgctctccactgggctacagagcataatcatcaggaagttgtcgaattattgataaaatatggcgctgacgtgcatactcagtctaaattctgtaagacagcattcgacatatcaattgacaacggtaacgaagatctcgccgagatcctgcagatcgctatgcaaaaccagatcaacaccaacccagagtcacctgatactgttaccattcatgctgccactcctcagtttatcatcggcccaggcggagttgtgaacctgacagggctggtgtctagtgaaaactccagtaaggccaccgacgaaaccggcgtaagcgctgtgcaattcgggaacagctccactagcgtgctggcaacactggccgcactggcagaggccagcgcacctctcagcaacagcagcgaaactcctgtagttgctacagaagaggtagttacagccgaaagtgtggatggtgctatccagcaggtggtttcatcgggcggacagcaagtgatcaccattgtcaccgacggcattcaattgggaaatctgcattcaatacctacctcgggcatcggacagccgattatcgttacaatgcctgatggccagcaggtgctcactgtcccagccactgacattgcagaggaaacggtgatctctgaggaaccccctgccaaaaggcaatgcattgaaatcatcgagaaccgagtagagagcgcagagattgaggagagagaggctctccaaaagcaactggacgaggcaaatagggaagcccaaaaatatcgccagcagttgctgaagaaggaacaggaggccgaggcttatcggcagaagcttgaggctatgacaaggctccagacgaacaaagaagccgtatag

SEQ ID NO: 273158 - DNA, 1188 bp, Artificial Sequence
  derived and/or modified sequence
atgagcctggtggacctgggcaagaagctgctggaggccgccagagccggccaggacgacgaggtgagaatcctgatggccaacggcgcccccttcaccaccgactggctgggcaccagccccctgcacctggccgcccagtacggccactacagcaccaccgaggtgctgctgagagccggcgtgagcagagacgccagaaccaaggtggacagaacccccctgcacatggccgccagcgagggccacgccagcatcgtggaggtgctgctgaagcacggcgccgacgtgaacgccaaggacatgctgaagatgaccgccctgcactgggccaccgagcacaaccaccaggaggtggtggagctgctgatcaagtacggcgccgacgtgcacacccagagcaagttctgcaagaccgccttcgacatcagcatcgacaacggcaacgaggacctggccgagatcctgcagatcgccatgcagaaccagatcaacaccaaccccgagagccccgacaccgtgaccatccacgccgccaccccccagttcatcatcggccccggcggcgtggtgaacctgaccggcctggtgagcagcgagaacagcagcaaggccaccgacgagaccggcgtgagcgccgtgcagttcggcaacagcagcaccagcgtgctggccaccctggccgccctggccgaggccagcgcccccctgagcaacagcagcgagacccccgtggtggccaccgaggaggtggtgaccgccgagagcgtggacggcgccatccagcaggtggtgagcagcggcggccagcaggtgatcaccatcgtgaccgacggcatccagctgggcaacctgcacagcatccccaccagcggcatcggccagcccatcatcgtgaccatgcccgacggccagcaggtgctgaccgtgcccgccaccgacatcgccgaggagaccgtgatcagcgaggagccccccgccaagagacagtgcatcgagatcatcgagaacagagtggagagcgccgagatcgaggagagagaggccctgcagaagcagctggacgaggccaacagagaggcccagaagtacagacagcagctgctgaagaaggagcaggaggccgaggcctacagacagaagctggaggccatgaccagactgcagaccaacaaggaggccgtgtag

SEQ ID NO: 273159 - DNA, 2053 bp, Artificial Sequence
  derived and/or modified sequence
gattgctctgggagctttgcttagacacttgaaactacaggagaaagaaggatctagcgaaatatggctacagagagccctgctacgcgtcgggtccaggttactgaagctaaaggagatgtttaactccaagtttggatctattcccaagttttatgttcgagcaccaggaagagtcaacataataggagagcatatagattattgtggatattctgttcttcctatggctgtagaacaagatgtgctaatagctgtagaacctgtgaaaacgtacgctctccaactggccaatacaaatcccttgtatccgaaataaaaagggtcagttggaggtagtttagtcactaaggccactgcaacttcctctcttaactcttagcagctggagatgttttgctgtagacacacagtttgaacataaaagggacttcagtactagtgctaataacatccagattgataaaaccaagcctttgtggcacaactatttcttatgtggacttaaaggaattcaggaacactttggtcttagtaacctgactggaatgaactgcctggtagatggaaatatcccaccaagttctggcctctccagctccagtgctttggtctgttgtgctggcttggtgacgctcacagtgctgggaaggaatctatccaaggtggaacttgcagaaatctgtgccaagagtgagcgttacattggcactgaaggaggaggcatggaccagtctatatcatttcttgcagaagaaggaactgccaagttgatagaatttagtcctctgagggcaaccgatgtaaaactcccaagtggagcagtgtttgtgattgccaacagttgtgtggagatgaataaggcagcaacttcccatttcaatatcagggtgatggagtgtcggctggctgcgaagctcctggctaaatacaaaagcttgcaatgggacaaagtactgaggctggaggaggtgcaggctaaactagggattagtctagaagaaatgctgttggtcacagaagatgcccttcatcctgaaccctataaccctgaggagatctgcaggtgtctgggaattagcctggaggaactccgaacccaaatcctgagtccaaacactcaagatgacggagtcgtgctctatcgcccaggctggagtgcaacggcgtgatctcagctcactgcaacctctgcctcccaggttcaagcaattctcccacttcagtctctcaaatagctgggattacatgcacccaccatcatcatgcccagtgctcatcttcaaactctatcagcgggcaaagcatgtgtacagcgaggctgcgcgagtgctccagtttaagaagatatgtgaagaagcacctgaaaacatggtccagctgctgggagagttgatgaaccagagccacatgagctgccgggacatgtatgagtgcagctgccccgagctggatcagctggtggacatctgtcggaagtttggggctcaagggtcacgacttactggagcaggatggggaggctgcacagtatcaatggtacctgcggacaagctgcccagctttctagcaaatgtgcacaaagcttattaccagaggagtgatggaagcttagcaccggagaagcaaagtttgtttgctaccaaacctggaggtggggctttggttttgcttgaggcctgaaaaaatgtaaaaagtctgagagaaactacttagggcacttaggaattggcaggactttctgtgccacagtaaattaatcttccttctgttttgtattatgatgaacggttgctattatatcaagatatattttcaaagaaatggttgaaagctctctatgcttcataatgattctttttccatcttaaaatatggttttactattaagagccaagatcatgcttggacagatcttttaagaataacttactgagatttattgatttgaagattttaaagatgaatggtaaaacacactcttaatactgattacatggattggacttgaattaaatatattgttacaattaaactgataccactgaattgt

SEQ ID NO: 273160 - protein, 483 aa, Artificial Sequence
  derived and/or modified sequence
MQRNGSASRGLEKTRLRLCREARIPESAFLTGLTRESWEARCWCAKDTREVVAIKCVAKKSLNKASVENLLTEIEILKGIRHPHIVQLKDFQWDSDNIYLIMEFCAGGDLSRFIHTRRILPEKVARVFMQQLASALQFLHERNISHLDLKPQNILLSSLEKPHLKLADFGFAQHMSPWDEKHVLRGSPLYMAPEMVCQRQYDARVDLWSMGVILYEALFGQPPFASRSFSELEEKIRSNRVIELPLRPLLSRDCRDLLQRLLERDPSRRISFQDFFAHPWVDLEHMPSGESLGRATALVVQAVKKDQEGDSAAALSLYCKALDFFVPALHYEVDAQRKEAIKAKVGQYVSRAEELKAIVSSSNQALLRQGTSARDLLREMARDKPRLLAALEVASAAMAKEEAAGGEQDALDLYQHSLGELLLLLAAEPPGRRRELLHTEVQNLMARAEYLKEQVKMRESRWEADTLDKEGLSESVRSSCTLQ

SEQ ID NO: 273161 - DNA, 1452 bp, Artificial Sequence
  derived and/or modified sequence
atgcagagaaacggcagcgccagcagaggcctggagaagaccagactgagactgtgcagagaggccagaatccccgagagcgccttcctgaccggcctgaccagagagagctgggaggccagatgctggtgcgccaaggacaccagagaggtggtggccatcaagtgcgtggccaagaagagcctgaacaaggccagcgtggagaacctgctgaccgagatcgagatcctgaagggcatcagacacccccacatcgtgcagctgaaggacttccagtgggacagcgacaacatctacctgatcatggagttctgcgccggcggcgacctgagcagattcatccacaccagaagaatcctgcccgagaaggtggccagagtgttcatgcagcagctggccagcgccctgcagttcctgcacgagagaaacatcagccacctggacctgaagccccagaacatcctgctgagcagcctggagaagccccacctgaagctggccgacttcggcttcgcccagcacatgagcccctgggacgagaagcacgtgctgagaggcagccccctgtacatggcccccgagatggtgtgccagagacagtacgacgccagagtggacctgtggagcatgggcgtgatcctgtacgaggccctgttcggccagccccccttcgccagcagaagcttcagcgagctggaggagaagatcagaagcaacagagtgatcgagctgcccctgagacccctgctgagcagagactgcagagacctgctgcagagactgctggagagagaccccagcagaagaatcagcttccaggacttcttcgcccacccctgggtggacctggagcacatgcccagcggcgagagcctgggcagagccaccgccctggtggtgcaggccgtgaagaaggaccaggagggcgacagcgccgccgccctgagcctgtactgcaaggccctggacttcttcgtgcccgccctgcactacgaggtggacgcccagagaaaggaggccatcaaggccaaggtgggccagtacgtgagcagagccgaggagctgaaggccatcgtgagcagcagcaaccaggccctgctgagacagggcaccagcgccagagacctgctgagagagatggccagagacaagcccagactgctggccgccctggaggtggccagcgccgccatggccaaggaggaggccgccggcggcgagcaggacgccctggacctgtaccagcacagcctgggcgagctgctgctgctgctggccgccgagccccccggcagaagaagagagctgctgcacaccgaggtgcagaacctgatggccagagccgagtacctgaaggagcaggtgaagatgagagagagcagatgggaggccgacaccctggacaaggagggcctgagcgagagcgtgagaagcagctgcaccctgcagtag

SEQ ID NO: 273162 - DNA, 1452 bp, Artificial Sequence
  derived and/or modified sequence
atgcagcgaaatggatcagcctcccgtggacttgaaaagacaaggctgcgactatgccgcgaggctagaatcccagagtctgcctttcttacaggccttacacgagaatcctgggaggcaagatgttggtgtgctaaagatactcgcgaggtcgtagccatcaaatgtgtggccaaaaagagtttgaacaaagctagcgtggaaaacctgttgacagaaatcgagatcctgaaagggataaggcatcctcacattgtccagctgaaagactttcaatgggacagcgataatatatacttgatcatggaattctgtgctggcggcgacctgtctaggtttatccatacacggcgcatcctaccagagaaagttgcgcgcgtgttcatgcaacagctggctagcgcattgcagtttcttcatgagcgcaatatctcccacctagatctgaagccccaaaacatcctgctatcctctctggagaagcctcatctgaagcttgcagactttgggtttgctcagcatatgtcaccatgggacgaaaagcacgtgctccgtggaagtcccctctatatggcgcctgagatggtgtgccagcgccagtacgacgcccgcgtcgatctttggagcatgggagtgattctgtatgaagctctgtttggccagccgcctttcgccagcaggagttttagcgagctggaggagaaaattcggagcaacagagtgatcgagctccccctccgcccccttttgagtcgtgattgccgggacttgctgcagaggctgctagagcgcgaccctagtagaagaatttcatttcaggacttttttgcccacccatgggtggacctcgaacatatgccaagcggcgagagcctggggcgagccactgccctcgtggtgcaggcagtgaagaaagaccaggaaggcgatagcgccgcagccctaagcctgtactgtaaagctttggacttttttgtcccagccctacactatgaagtcgacgcacagcgcaaagaggccattaaagccaaggtcgggcagtatgtgtcccgagccgaagaattaaaagccatagtgagttcctccaatcaagcacttctcagacaagggacttccgcccgggaccttctgcgggagatggcccgggacaaaccacgactgttggctgcactcgaggtggccagcgccgccatggcaaaggaagaggccgccgggggggaacaagacgccctcgacctataccagcactctttgggcgagttgctactgctactggcagccgaaccccctggtcggaggcgggagctgctgcatacagaggtccagaatctaatggctagagccgagtacctgaaggaacaggtgaaaatgagagaatcacgatgggaagctgacacactggataaagagggcttgtcagaaagcgtgcgaagctcttgtaccttgcagtag

SEQ ID NO: 273163 - DNA, 1452 bp, Artificial Sequence
  derived and/or modified sequence
atgcagagaaatggcagcgccagccggggcctggagaagacccggctgcggctgtgccgggaggcccgcatccctgagagcgccttcctgaccggcctgacccgggagagctgggaggcccgctgctggtgtgccaaggacacccgggaggtggtggccatcaagtgtgtggccaagaagagcctgaacaaggcctctgtggagaacctgctgacagaaattgagatcctgaagggcatccgccacccccacatcgtgcagctgaaggacttccagtgggacagcgacaacatctacctgatcatggagttctgtgccggcggggacctgagccgcttcatccacacccggcgcatcctgcctgagaaggtggcccgggtcttcatgcagcagctggccagcgccctgcagttcctgcacgagaggaacatcagccacctggacctgaagccccagaacatcctgctgagcagcctggagaagccccacctgaagctggccgactttggatttgcccagcacatgagcccctgggatgagaagcacgtgctgcggggcagccccctgtacatggcccctgagatggtgtgccagaggcagtatgatgcccgggtggacctgtggagcatgggcgtcatcctgtatgaggccctgtttggccagcccccatttgccagccgctccttcagcgagctggaggagaagatccgcagcaacagagtcatcgagctgcccctgcggcccctgctgagccgggactgccgggacctgctgcagaggctgctggagcgggaccccagccgccgcatctccttccaggacttctttgcccacccctgggtggacctggagcacatgcccagcggggagagcctgggccgggccacagccctggtggtgcaggccgtgaagaaggaccaggagggggacagcgctgctgccctgagcctgtactgcaaggccctggacttctttgtgcctgccctgcactatgaggtggatgcccagaggaaggaggccatcaaggccaaggtgggccagtatgtgtccagagctgaggagctgaaggccatcgtgagcagcagcaaccaggccctgctgcggcagggcaccagcgcccgggacctgctgcgggagatggcccgggacaagccccggctgctggccgccctggaggtggccagcgctgccatggccaaggaggaggccgccggcggggagcaggatgccctggacctgtaccagcacagcctgggggagctgctgctgctgctggccgctgagcccccaggaagaagaagagagctgctgcacacagaggtgcagaacctgatggcccgggcagagtacctgaaggagcaggtgaagatgagggagagccgctgggaggccgacaccctggacaaggagggcctgtctgagagcgtgcgcagcagctgcaccctgcagtag

SEQ ID NO: 273164 - DNA, 1452 bp, Artificial Sequence
  derived and/or modified sequence
atgcagcggaacggcagcgccagccggggcctggagaagacccggctccgcctgtgtcgagaggcccggattcctgaaagcgccttcctgacaggcctgacacgtgaatcctgggaagcgagatgttggtgtgcgaaagacacaagagaagttgtggccatcaaatgtgtggccaaaaaatccctgaacaaagcctctgtggaaaacctattgaccgagatcgaaattctgaaagggattcgccatcctcatattgttcagctgaaagatttccagtgggactccgacaacatctacttgattatggaattctgcgcgggaggagatttgtcgagattcattcacaccagacgaatcctgccagaaaaggtggctcgtgtgttcatgcaacagttggcttccgcccttcagttcttacatgagcgaaacatatcccacctggacttgaaaccccagaatatccttctctcatccctcgagaagccgcatcttaagctggccgactttgggtttgcccaacacatgagtccttgggatgagaagcatgtcctgcgcggcagccctctctacatggccccggagatggtgtgtcagcgtcaatacgacgcccgcgtggacttatggagtatgggcgtcatcctttatgaagcactgttcggccaaccacctttcgcctctaggagttttagcgagttggaggaaaagataaggagcaaccgggttattgaactgccgctccgcccactgctgtccagagattgtcgggatctgcttcagcggctactggagcgcgatccctcgcggcgcatctccttccaggactttttcgcgcacccatgggtggatctggaacacatgccatccggagaaagtttaggcagagccaccgccctcgttgtgcaagctgtgaagaaggatcaggaaggcgactcagcagccgcccttagcctatactgcaaagcactcgatttcttcgttccagcactgcactatgaagtcgacgctcagcgaaaagaggctatcaaggctaaggtgggccagtacgtgtccagggcggaggagctcaaggctatcgttagctcatcaaaccaggctctgcttaggcaggggaccagcgcccgcgatctgctgcgtgaaatggcccgtgataaaccgcgccttctggcagcactggaggtggcctctgccgccatggctaaagaggaagcagccgggggcgagcaagacgcccttgacctgtaccagcactccctgggtgaattgttgctgctcctcgcagctgaacccccaggcagacgaagggagcttctgcatacagaggtgcagaatctcatggctcgggcggagtacctgaaagagcaggtcaaaatgcgcgagtctcggtgggaagctgacactctggataaggaaggattgagtgagagcgtccgttccagctgcacactccagtag

SEQ ID NO: 273165 - DNA, 1452 bp, Artificial Sequence
  derived and/or modified sequence
atgcagagaaatggcagcgccagccgtggactggagaagacacggcttcggctttgtcgggaagcccgtatccccgagagtgcttttctgactggcctgacccgggaaagctgggaggctcgttgttggtgtgcaaaagatactagggaggttgtagctatcaaatgcgtggccaagaaatcattgaataaggcatctgtggagaatctcctgaccgagatagaaatcttgaaggggattcgacacccacacatcgtgcagctcaaggattttcagtgggattcagacaacatatatcttatcatggagttctgcgcaggtggcgacctgagcaggttcatccacactcggcgaatccttcccgaaaaagtcgccagggtgtttatgcaacagctcgcatcagcccttcagtttttgcatgaacgcaatatcagccatctggacctgaagccccaaaacattctgctgtctagtctggaaaaaccacacctgaagctggcggattttggctttgcacagcatatgtccccctgggatgagaaacatgtgttacggggaagtcccttatacatggctcccgaaatggtgtgccagcgccaatacgatgctagagttgacctgtggtccatgggtgtgattctgtatgaagcgctgttcggtcaaccaccattcgccagtcgatcctttagtgagctcgaagagaaaatcaggagcaaccgggtcatagagctcccccttagaccactcctttctagggactgcagagaccttcttcagcgattgctggagcgggatcccagcagaagaatctcattccaagatttctttgctcatccatgggtggacctggagcatatgccgtcgggagagagcctggggagggccactgcccttgtggtccaggcggtaaagaaggatcaggaaggcgacagcgctgcagctttaagcctctattgtaaagccctggatttttttgtgcccgcactccactacgaggtcgacgcccagcggaaggaggcgattaaggctaaagtggggcagtatgttagcagggcagaggagttgaaggccattgtgtcaagctcgaatcaagcgctgttaaggcaggggacaagtgcacgggacctcctgagagagatggcaagagataaaccacgcctgttggctgccctggaggtagccagcgctgctatggccaaggaggaagcagcaggtggcgaacaagacgcattggatttgtatcagcattccctgggggagctcctcctcctgctagccgctgagccaccaggcaggcgcagagaactcctccacaccgaagttcagaacctgatggcacgtgccgaatatttgaaggaacaggtcaagatgcgcgagtccaggtgggaggcggacaccctcgacaaagagggtctctctgaatctgtccgctcttcttgcactttgcagtag

SEQ ID NO: 273166 - DNA, 1631 bp, Artificial Sequence
  derived and/or modified sequence
agaatgcaaagaaatggatcagctagccgagggttggagaagaccaggctgaggctgtgtcgggaagccaggattccagaatcagcattcctcactggcctcacaagggaaagctgggaagcccggtgctggtgtgcaaaggacactcgtgaagtggtagccataaagtgtgtagccaagaaaagtctgaacaaggcatcggtggagaacctcctcacggagattgagatcctcaagggcattcgacatccccacattgtgcagctgaaagactttcagtgggacagtgacaatatctacctcatcatggagttttgcgcagggggcgacctgtctcgcttcatccatacccgcaggattctgcctgagaaggtggcgcgtgtcttcatgcagcaattagctagcgccctgcaattcctgcatgaacggaatatctctcacctggatctgaagccacagaacattctactgagctccttggagaagccccacctaaaactggcagactttggtttcgcacaacacatgtccccgtgggatgagaagcacgtgctccgtggctcccccctctacatggcccccgagatggtgtgccagcggcagtatgacgcccgcgtggacctctggtccatgggggtcatcctgtatgaagccctcttcgggcagcccccctttgcctccaggtcgttctcggagctggaagagaagatccgtagcaaccgggtcatcgagctccccttgcggcccctgctctcccgagactgccgggacctactgcagcggctcctggagcgggaccccagccgtcgcatctccttccaggacttttttgcgcacccctgggtggacctggagcacatgcccagtggggagagtctggggcgagcaaccgccctggtggtgcaggctgtgaagaaagaccaggagggggattcagcagctgccttatcactctactgcaaggctctggacttctttgtacctgccctgcactatgaagtggatgcccagcggaaggaggcaattaaggcaaaggtggggcagtacgtgtcccgggctgaggagctcaaggccatcgtctcctcttccaatcaggccctgctgaggcaggggacctctgcccgagacctgctcagagagatggcccgggacaagccacgcctcctagctgccctggaagtggcttcagctgccatggccaaggaggaggccgccggcggggagcaggatgccctggacctgtaccagcacagcctgggggagctactgctgttgctggcagcggagcccccgggccggaggcgggagctgcttcacactgaggttcagaacctcatggcccgagctgaatacttgaaggagcaggtcaagatgagggaatctcgctgggaagctgacaccctggacaaagagggactgtcggaatctgttcgtagctcttgcacccttcagtgaccctagaagaatgattggacagtgctgagacccccatatcccagagtccccagcctccctcaggttactctgcaccccacagatggtttgatggctgtgctgtatactggaggggagggcaggactctgggagaacagcacttctttcatgagacctttgttactcggtggttact

SEQ ID NO: 273167 - protein, 617 aa, Artificial Sequence
  derived and/or modified sequence
MRCLAARVNYKTLIIICALFTLVTVLLWNKCSSDKAIQFPRRSSSGFRVDGFEKRAAASESNNYMNHVAKQQSEEAFPQEQQKAPPVVGGFNSNVGSKVLGLKYEEIDCLINDEHTIKGRREGNEVFLPFTWVEKYFDVYGKVVQYDGYDRFEFSHSYSKVYAQRAPYHPDGVFMSFEGYNVEVRDRVKCISGVEGVPLSTQWGPQGYFYPIQIAQYGLSHYSKNLTEKPPHIEVYETAEDRDKNKPNDWTVPKGCFMANVADKSRFTNVKQFIAPETSEGVSLQLGNTKDFIISFDLKFLTNGSVSVVLETTEKNQLFTIHYVSNAQLIAFKERDIYYGIGPRTSWSTVTRDLVTDLRKGVGLSNTKAVKPTKIMPKKVVRLIAKGKGFLDNITISTTAHMAAFFAASDWLVRNQDEKGGWPIMVTRKLGEGFKSLEPGWYSAMAQGQAISTLVRAYLLTKDHIFLNSALRATAPYKFLSEQHGVKAVFMNKHDWYEEYPTTPSSFVLNGFMYSLIGLYDLKETAGEKLGKEARSLYERGMESLKAMLPLYDTGSGTIYDLRHFMLGIAPNLARWDYHTTHINQLQLLSTIDESPVFKEFVKRWKSYLKGSRAKHN

SEQ ID NO: 273168 - protein, 553 aa, Artificial Sequence
  derived and/or modified sequence
MNHVAKQQSEEAFPQEQQKAPPVVGGFNSNVGSKVLGLKYEEIDCLINDEHTIKGRREGNEVFLPFTWVEKYFDVYGKVVQYDGYDRFEFSHSYSKVYAQRAPYHPDGVFMSFEGYNVEVRDRVKCISGVEGVPLSTQWGPQGYFYPIQIAQYGLSHYSKNLTEKPPHIEVYETAEDRDKNKPNDWTVPKGCFMANVADKSRFTNVKQFIAPETSEGVSLQLGNTKDFIISFDLKFLTNGSVSVVLETTEKNQLFTIHYVSNAQLIAFKERDIYYGIGPRTSWSTVTRDLVTDLRKGVGLSNTKAVKPTKIMPKKVVRLIAKGKGFLDNITISTTAHMAAFFAASDWLVRNQDEKGGWPIMVTRKLGEGFKSLEPGWYSAMAQGQAISTLVRAYLLTKDHIFLNSALRATAPYKFLSEQHGVKAVFMNKHDWYEEYPTTPSSFVLNGFMYSLIGLYDLKETAGEKLGKEARSLYERGMESLKAMLPLYDTGSGTIYDLRHFMLGIAPNLARWDYHTTHINQLQLLSTIDESPVFKEFVKRWKSYLKGSRAKHN

SEQ ID NO: 273169 - DNA, 1854 bp, Artificial Sequence
  derived and/or modified sequence
atgcggtgtctggctgcccgagtgaattataaaaccctcattataatttgcgcgctatttacgctagtcacagtcctgctgtggaataaatgcagctcggacaaggcaatccaattcccccgaaggagtagcagtggctttcgtgtggatggctttgaaaagagagccgccgctagcgaatctaataattatatgaaccacgtggcgaagcagcagtctgaagaggctttcccgcaagagcagcagaaagccccccctgttgttgggggcttcaatagcaacgtcgggagtaaagttctcgggctcaagtatgaagagatcgattgcttgattaacgatgagcacactatcaaagggcgcagggagggtaacgaagtattcttgccctttacatgggttgagaagtactttgatgtgtatggaaaggtggtgcagtacgatggatacgatagatttgagttttcacactcttactcgaaagtatacgcgcaacgcgcaccctaccaccctgacggagtgtttatgtccttcgagggctacaacgtcgaggtcagggacagggtgaagtgcattagcggtgtggaaggcgtgccgctttctacacaatgggggcctcagggatatttctaccccattcaaatcgcccaatacggactgagccattactccaagaacctgaccgagaaacccccacatatagaggtatacgagaccgcagaagaccgtgataaaaataagcccaatgattggacggttccaaagggctgctttatggctaatgtcgccgacaagtctcgattcacaaatgtaaagcagttcatagctcccgaaacatcagaaggggtgtcattgcagttggggaacaccaaagatttcattatatctttcgaccttaagttcttaactaacggttctgtgtctgtggtactggagacaaccgaaaagaaccagctgttcaccatccattacgtcagcaatgcacagcttattgctttcaaggagcgtgacatttattacggaatcggccctcgtaccagttggtcaaccgtaacacgtgatctggtcaccgacctgcgcaagggcgtcggactgtccaataccaaggccgtcaaacctaccaaaatcatgcccaagaaagtagtcagacttatcgctaaaggcaaaggattcctcgacaacatcaccatctccacaaccgcacacatggcggctttctttgcggccagcgactggttggttagaaatcaagatgagaaggggggatggccaattatggtaactcgcaaactgggggaaggattcaaatccctggagcccgggtggtactccgccatggcacaagggcaggcaattagcacactagtgcgagcttacctgctaaccaaggaccatatatttcttaacagtgctctccgagcaacagccccttacaaatttttatccgagcagcatggcgttaaagccgtctttatgaacaagcacgattggtatgaggaataccctacaaccccttcttcattcgtgttgaacggctttatgtattccctgattggtctctatgacctcaaagagacagctggcgaaaaactcggcaaggaagcgagaagtctttatgaaaggggcatggaatctctcaaagccatgctgccactgtacgatacaggttcagggaccatctacgatctgcgccacttcatgttagggatcgcccccaacctagcacggtgggactaccacaccacacacattaatcagctgcaactgttgagcactatcgacgagtcacctgttttcaaagaatttgtgaagaggtggaagagctatctcaaaggatccagagccaagcacaactag

SEQ ID NO: 273170 - DNA, 1662 bp, Artificial Sequence
  derived and/or modified sequence
atgaaccatgttgccaaacagcagtcagaggaagctttccctcaggagcagcagaaagcacctcctgtggtgggtggattcaactccaatgttggtagcaaggtgcttggccttaagtacgaggaaatcgattgcttgatcaatgatgagcatactattaaggggagacgtgaggggaatgaggtgttccttccctttacctgggtcgagaaatacttcgacgtgtacgggaaggtggtccagtacgatggatatgatcgtttcgagttctcgcactcctacagtaaggtttacgctcagagggcaccgtatcaccccgatggcgttttcatgagctttgagggctacaatgtcgaggtgagggacagggtgaagtgtataagcggggtggaaggcgtgccattatccacacagtgggggccccaagggtacttttatccaatccaaattgctcagtatggactcagtcactattcaaagaacctgaccgaaaagcccccccacattgaggtatatgaaacagctgaggacagagacaaaaataaacctaatgattggaccgtgccaaaaggctgttttatggctaacgtggccgacaagagccgctttaccaatgtgaagcagtttattgcacccgaaacgagcgaaggagtaagtctccaactcggcaacactaaggacttcatcatttcttttgatttaaaattcctcacgaatggatccgtgagtgtggtgctcgagactaccgagaagaatcagctgttcaccattcattacgtgagcaatgcacagctgatcgcgtttaaagagcgcgacatctattatgggataggcccacgcacatcatggtcaacggtcaccagggacctcgtaactgatttaaggaagggagtaggtctctctaacaccaaggccgttaagcccaccaagattatgcccaagaaggtggttaggctcatagctaagggaaaaggcttcctagacaatatcacaatcagcacaacagcgcacatggcggcattctttgctgcctctgattggctggtgcgcaaccaggacgagaaaggcggctggcccattatggttacacggaaattaggagaggggttcaaaagtcttgagccgggctggtactccgctatggcccaggggcaggcgatcagcaccttggtgcgcgcttatctgctcactaaggatcacatattcctcaacagtgcgctgagggctaccgccccctacaagtttctgagtgagcagcacggggtgaaagccgtgtttatgaacaaacacgattggtacgaagagtatccaactaccccgagctctttcgtgctaaacggatttatgtactctctaatcggcctctacgacctcaaagagacggctggggagaagcttggaaaggaagcgcggagcttgtatgagcggggaatggaaagtctgaaggcaatgctccctctgtatgacactggatctggcactatatacgacctgagacattttatgctgggcatcgccccaaacttggctagatgggactatcatacaacccatatcaatcagctccagctcttgagcacaattgacgagagcccagtgttcaaagagtttgttaagcgatggaaatcttatctgaagggaagtagagccaaacataattag

SEQ ID NO: 273171 - DNA, 5037 bp, Artificial Sequence
  derived and/or modified sequence
cacacaagcgcttccttgccgagaggctggagctgcggcaccgcaggcctgagccaccccttctctgctgtctccttctcttcctcagggctcccgtgtctgctcgccctccgacgctgctcaggaatttgacaagaaactgaagttttgattcagatatattttgaattgaaaccagagatgttctagagtttagattctttcatttgattaaggtatggtctgaatatgcgttgcttggcagctcgggtcaactataagactttgattattatctgcgcactcttcactttggtcacagtacttttgtggaataagtgttccagtgacaaagcaatccagtttccacggcgttcgagtagtggcttcagagtggatgggtttgaaaaaagagcagcagcatctgagagtaacaactatatgaaccacgtggccaaacaacagtctgaggaagcattccctcaggaacagcagaaagcaccccctgttgttgggggcttcaatagcaatgtgggaagtaaggtgttagggctcaaatatgaagaaattgactgtctcataaatgatgaacacacaattaaagggagacgagaggggaacgaagtctttcttccattcacttgggttgagaaatattttgatgtttatggaaaggtggttcagtatgatggctatgatcggtttgaattctctcatagctattccaaagtctatgcacagagagccccctatcaccccgatggtgtgtttatgtcttttgaaggctacaatgtggaagtccgagacagagtcaagtgcataagtggggttgaaggtgtgccattatctacacaatggggacctcaaggctatttctatccaatccagattgcacagtatggattaagtcattacagcaagaatctaactgagaaacctcctcacatagaggtatatgaaacagcagaagacagagacaaaaacaagcctaatgactggactgtgccaaagggctgctttatggcgaatgtggctgataagtctagattcaccaatgtcaaacagtttattgcaccagaaaccagtgaaggtgtatccttgcaactgggaaacacaaaagattttattatttcatttgacctcaagttcttgacaaatggaagtgtgtccgtggttctagagaccacagaaaagaatcagctcttcactatacattatgtctcaaatgctcagctaattgcttttaaagaaagagatatatactatggcattgggcccagaacttcatggagcacagttaccagggacctggtcactgacctcaggaaaggagtgggtctttcaaacacaaaagctgtcaagccaaccaaaataatgcccaagaaggtggttaggttgattgcaaaaggtaagggattcctcgacaacattaccatctctaccacagcccacatggctgcattttttgctgctagtgattggctagtaaggaaccaggatgagaaaggtggctggccaattatggtgacccgtaagttaggggaagggttcaagtctttagagccaggatggtattctgccatggcccaagggcaagccatttctacattagtcagggcctatctgttaacaaaagaccatatattcctcaattcagctttaagggcaacagccccttataagtttctatctgagcagcatggagttaaagctgtgtttatgaataaacatgactggtatgaagaatatccaaccacacctagctcttttgttttaaatggctttatgtattctttaattgggctgtatgacttaaaagaaactgcaggggaaaaactcggaaaagaagcaaggtccttgtatgagcgtggcatggaatctcttaaagccatgctgcccttgtatgacactggctcaggaaccatctatgacctccgtcacttcatgcttggcatcgctcctaacctggctcgctgggactatcataccacccacatcaatcagttgcagctactcagtaccattgatgagtccccagtcttcaaagaatttgtcaagaggtggaaaagctaccttaaaggcagcagggcaaagcacaactagagctcacaaccaaaactgcacttcagcctctgctgtacacagaaactacaggctctgtctcaggagagcataggcacattttaaaaggttatgtactaggtttttgtggattctatcaaagtgataagtgatccttaaaaccagccttctaaaataattgcattccatgggttgggtatttagaaatgtaggtggcatttagaacacaatgtttaatcaatgggctgaacaaagatgcttcactttgccttgcccatcaccctatacagtttcgcagatagtctagtcactctatgtgagaaagataatggtaagtagttgctactggccaactgtctagcacttacctgaaaacttagtatggagctcttttaaaatgtgattatttatatttatgttgaaagcggactttaaaaaaaataatgtgctgtaacacagtaaatatgtacttgtagcctggatagcagactgtgttcaactttttaaaaagatgtttcctttctaaagattaatttcttgggagcaaatgagtatttgttgcatttgttcaatttgttgtatatggtgaatatttaattatggttttcttgaaacgtgtaaattaaaaacacaatcagtgttcaggcttcagttatataatgtaagcacaactaaaatgaaacttgttgactgcacaagaaattacaaaaatgtttctgttttgaaacttgatctacaatcagtaaaagtttgataatcagtatatcccttcccaacccccattgtgacagtttctttttgtcactgtctagaattttgtattttatttcagactataccttggagttttgtatattttgagagagatatttttgggacattattttggaaacttattacaaatctaaatttggaaaggagctagtagctttaaggccaccaccatattttacttttttaggatttttccccctttaaataaaaatattagatcaaatactatatgcaagaaatcatagcaaagtttttttttcctaccaagatcattcttgatcatcagcttcccaaactagtaagtctgtgcatcattgggtgtttttttttaatttaattttaaattatcccagctattagatagaagggatgttactgcacttatgtgtaatcagatctttatttaggtatacatatcctcctataccgcacataaatagatttcagagcccccatacaatgggcagtgtctgctatagggcttcaggcattaaataaaaccgagggttgttgattttgctgtgacagtacactaaatcaatactatatcttatacagtttgaaaatatgataccctacactttcaggggaccgagtctgacaaacacaatacatttatctgtgacctatatcaagtacacatttaggagccaggtaggttacctgcttacacactatattttaattgaattcaaactatcaagcactacttagaaactggaaaacatatatatgttagcatcaaagggggcagaagcaaagaagatacagatctgcactgaagacattagactggccatagaaaagtaagcttgaactcccaattgatgtgaccacactcttcttaattttgttcacagtaaaaacacttttttgagttattaggcttacccctagcttttgacctttgcatttcatatatgttagatgtctcagcaagaatatctggtctcccctaatttttattcccagtgccgatgttcaaaataaactttctccagtctgggaaccttttttacttccccatatttgttattatttagaatggttcatacgtctgctttgtttgcatactggtcttcagattatgagactcgatgataacagtatggtactgcttctgtgacaaatatcgtgccttaacaatgtggctgtccttttccactgaagaaggaaagacgttttgatctagaaatagcgttgtgatttccttgctgttggttttacactgccttccacattgcaacagcaagttgatttcttgtgatcccagaattttctaagaggatgagttgaatctatagcagcattgtcagtacagaccagtggttctcaaactttaaaatgcctcagcatcacttgggagcttattgaaatgcagatcccagagtcagtaaatctgcctgtgaagtatgatagtctgcatttgtaatgagcattcaagtgattctgatgcaggtgagctgggggcatacagggaggaacactgccctggactatccattgcatttttgcctctaaacaactacagaattttctagggttttaaattatgtaaaatgtttacttattctgagcttagagagaatggggagggtatttttaaattttattgttttatttctttaagtttttctttgctttaagattataggtattaggtttgtttttgtttttccacttatcttgagttcactttgatgttaaatctattgctacttcagttgtaaaaccagccaaaagtttctggatgaaggtcaagtttgaccttttaggagttattgtacataaaggcttcatccacgaaccatccagcgcacagaagcaagtgcaaaaatgacacaagcacaactctccagacgtggctccttctcctttctcagtgcagactctcactgaaagctgctattttcatcctccttgtggttgcttttcttgtttctcttccattgtacatgtgggttatataccatatgttaaatatgcaataaagtgtttacaggatgcccttctgaagggtagtcctttgtaaagctgtacagactttgcagtttaagcacaatgtgcacatgttagttttatatacagcaaaacttgattttttgcagatggaaaggtattttgtttctatacaaagtaaatggattgtttgtgcttaatgtaaagccgctttataaaactgtaaaataaagtttttttctt

SEQ ID NO: 273172 - DNA, 4828 bp, Artificial Sequence
  derived and/or modified sequence
gtatggtctgaatatgcgttgcttggcagctcgggtcaactataagactttgattattatctgcgcactcttcactttggtcacagtacttttgtggaataagtgttccagtgacaaagcaatccagtttccacggcgttcgagtagtggcttcagagtggatgggtttgaaaaaagagcagcagcatctgagagtaacaactatatgaaccacgtggccaaacaacagtctgaggaagcattccctcaggaacagcagaaagcaccccctgttgttgggggcttcaatagcaatgtgggaagtaaggtgttagggctcaaatatgaagaaattgactgtctcataaatgatgaacacacaattaaagggagacgagaggggaacgaagtctttcttccattcacttgggttgagaaatattttgatgtttatggaaaggtggttcagtatgatggctatgatcggtttgaattctctcatagctattccaaagtctatgcacagagagccccctatcaccccgatggtgtgtttatgtcttttgaaggctacaatgtggaagtccgagacagagtcaagtgcataagtggggttgaaggtgtgccattatctacacaatggggacctcaaggctatttctatccaatccagattgcacagtatggattaagtcattacagcaagaatctaactgagaaacctcctcacatagaggtatatgaaacagcagaagacagagacaaaaacaagcctaatgactggactgtgccaaagggctgctttatggcgaatgtggctgataagtctagattcaccaatgtcaaacagtttattgcaccagaaaccagtgaaggtgtatccttgcaactgggaaacacaaaagattttattatttcatttgacctcaagttcttgacaaatggaagtgtgtccgtggttctagagaccacagaaaagaatcagctcttcactatacattatgtctcaaatgctcagctaattgcttttaaagaaagagatatatactatggcattgggcccagaacttcatggagcacagttaccagggacctggtcactgacctcaggaaaggagtgggtctttcaaacacaaaagctgtcaagccaaccaaaataatgcccaagaaggtggttaggttgattgcaaaaggtaagggattcctcgacaacattaccatctctaccacagcccacatggctgcattttttgctgctagtgattggctagtaaggaaccaggatgagaaaggtggctggccaattatggtgacccgtaagttaggggaagggttcaagtctttagagccaggatggtattctgccatggcccaagggcaagccatttctacattagtcagggcctatctgttaacaaaagaccatatattcctcaattcagctttaagggcaacagccccttataagtttctatctgagcagcatggagttaaagctgtgtttatgaataaacatgactggtatgaagaatatccaaccacacctagctcttttgttttaaatggctttatgtattctttaattgggctgtatgacttaaaagaaactgcaggggaaaaactcggaaaagaagcaaggtccttgtatgagcgtggcatggaatctcttaaagccatgctgcccttgtatgacactggctcaggaaccatctatgacctccgtcacttcatgcttggcatcgctcctaacctggctcgctgggactatcataccacccacatcaatcagttgcagctactcagtaccattgatgagtccccagtcttcaaagaatttgtcaagaggtggaaaagctaccttaaaggcagcagggcaaagcacaactagagctcacaaccaaaactgcacttcagcctctgctgtacacagaaactacaggctctgtctcaggagagcataggcacattttaaaaggttatgtactaggtttttgtggattctatcaaagtgataagtgatccttaaaaccagccttctaaaataattgcattccatgggttgggtatttagaaatgtaggtggcatttagaacacaatgtttaatcaatgggctgaacaaagatgcttcactttgccttgcccatcaccctatacagtttcgcagatagtctagtcactctatgtgagaaagataatggtaagtagttgctactggccaactgtctagcacttacctgaaaacttagtatggagctcttttaaaatgtgattatttatatttatgttgaaagcggactttaaaaaaaataatgtgctgtaacacagtaaatatgtacttgtagcctggatagcagactgtgttcaactttttaaaaagatgtttcctttctaaagattaatttcttgggagcaaatgagtatttgttgcatttgttcaatttgttgtatatggtgaatatttaattatggttttcttgaaacgtgtaaattaaaaacacaatcagtgttcaggcttcagttatataatgtaagcacaactaaaatgaaacttgttgactgcacaagaaattacaaaaatgtttctgttttgaaacttgatctacaatcagtaaaagtttgataatcagtatatcccttcccaacccccattgtgacagtttctttttgtcactgtctagaattttgtattttatttcagactataccttggagttttgtatattttgagagagatatttttgggacattattttggaaacttattacaaatctaaatttggaaaggagctagtagctttaaggccaccaccatattttacttttttaggatttttccccctttaaataaaaatattagatcaaatactatatgcaagaaatcatagcaaagtttttttttcctaccaagatcattcttgatcatcagcttcccaaactagtaagtctgtgcatcattgggtgtttttttttaatttaattttaaattatcccagctattagatagaagggatgttactgcacttatgtgtaatcagatctttatttaggtatacatatcctcctataccgcacataaatagatttcagagcccccatacaatgggcagtgtctgctatagggcttcaggcattaaataaaaccgagggttgttgattttgctgtgacagtacactaaatcaatactatatcttatacagtttgaaaatatgataccctacactttcaggggaccgagtctgacaaacacaatacatttatctgtgacctatatcaagtacacatttaggagccaggtaggttacctgcttacacactatattttaattgaattcaaactatcaagcactacttagaaactggaaaacatatatatgttagcatcaaagggggcagaagcaaagaagatacagatctgcactgaagacattagactggccatagaaaagtaagcttgaactcccaattgatgtgaccacactcttcttaattttgttcacagtaaaaacacttttttgagttattaggcttacccctagcttttgacctttgcatttcatatatgttagatgtctcagcaagaatatctggtctcccctaatttttattcccagtgccgatgttcaaaataaactttctccagtctgggaaccttttttacttccccatatttgttattatttagaatggttcatacgtctgctttgtttgcatactggtcttcagattatgagactcgatgataacagtatggtactgcttctgtgacaaatatcgtgccttaacaatgtggctgtccttttccactgaagaaggaaagacgttttgatctagaaatagcgttgtgatttccttgctgttggttttacactgccttccacattgcaacagcaagttgatttcttgtgatcccagaattttctaagaggatgagttgaatctatagcagcattgtcagtacagaccagtggttctcaaactttaaaatgcctcagcatcacttgggagcttattgaaatgcagatcccagagtcagtaaatctgcctgtgaagtatgatagtctgcatttgtaatgagcattcaagtgattctgatgcaggtgagctgggggcatacagggaggaacactgccctggactatccattgcatttttgcctctaaacaactacagaattttctagggttttaaattatgtaaaatgtttacttattctgagcttagagagaatggggagggtatttttaaattttattgttttatttctttaagtttttctttgctttaagattataggtattaggtttgtttttgtttttccacttatcttgagttcactttgatgttaaatctattgctacttcagttgtaaaaccagccaaaagtttctggatgaaggtcaagtttgaccttttaggagttattgtacataaaggcttcatccacgaaccatccagcgcacagaagcaagtgcaaaaatgacacaagcacaactctccagacgtggctccttctcctttctcagtgcagactctcactgaaagctgctattttcatcctccttgtggttgcttttcttgtttctcttccattgtacatgtgggttatataccatatgttaaatatgcaataaagtgtttacaggatgcccttctgaagggtagtcctttgtaaagctgtacagactttgcagtttaagcacaatgtgcacatgttagttttatatacagcaaaacttgattttttgcagatggaaaggtattttgtttctatacaaagtaaatggattgtttgtgcttaatgtaaagccgctttataaaactgtaaaataaagtttttttcttaaaaag

SEQ ID NO: 273173 - DNA, 1854 bp, Artificial Sequence
  derived and/or modified sequence
atgcgctgcctggccgcccgggtgaactacaagaccctcatcatcatctgtgccctcttcaccctggtgacagtgctgctgtggaacaagtgcagcagtgacaaggccatccagttccccaggaggagcagcagcggcttccgggtggatggctttgagaagagagctgctgccagcgagagcaacaactacatgaaccacgtggccaagcagcagagcgaggaggccttcccccaggagcagcagaaggcccctcctgtggtgggcggcttcaacagcaatgtgggcagcaaggtgctgggcctgaagtatgaggagattgactgcctgatcaatgatgagcacaccatcaagggccggcgggagggcaatgaggtgttcctgcccttcacctgggtggagaagtactttgatgtgtatggcaaggtggtgcagtatgatggctatgacagatttgagttcagccacagctacagcaaggtgtatgcccagagggccccctaccacccagatggagtcttcatgagctttgagggctacaacgtggaggtgcgggacagagtgaagtgcatcagcggcgtggagggcgtgcccctgagcacccagtggggcccccagggctacttctaccccatccagatcgcccagtatggcctgagccactacagcaagaacctgacagagaagccaccccacatcgaggtgtatgaaacagctgaggaccgggacaagaacaagcccaatgactggacagtgcccaagggctgcttcatggccaacgtggccgacaagagccgcttcaccaacgtgaagcagttcatcgcccctgagaccagcgagggcgtgtccctgcagctgggcaacaccaaggacttcatcatcagctttgacctgaagttcctgaccaatggatctgtgtctgtggtgctggagaccacagagaagaaccagctgttcaccatccactacgtgtccaatgcccagctgattgccttcaaggagcgggacatctactatggaattggccccaggacctcctggagcacagtgacccgggacctggtgacagacctgaggaagggcgtgggcctgagcaacaccaaggctgtgaagcccaccaagatcatgcccaagaaggtggtgcggctcatcgccaagggcaagggcttcctggacaacatcaccatcagcaccacagcccacatggccgccttctttgctgccagtgactggctggtgaggaaccaggatgagaagggcggctggcccatcatggtgaccaggaagctgggggagggcttcaagagcctggagcccggctggtacagcgccatggcccagggccaggccatcagcaccctggtgcgggcctacctgctgaccaaggaccacatcttcctgaacagcgccctgcgggccacagccccctacaagttcctgtctgagcagcacggcgtgaaggctgtgttcatgaacaagcatgactggtatgaggagtaccccaccacccccagcagctttgtgctgaatggcttcatgtacagcctgattggcctgtatgacctgaaggagacagctggggagaagctgggcaaggaggcccggagcctgtatgaaagaggcatggagagcctgaaggccatgctgcccctgtatgacaccggcagcggcaccatctatgacctgcggcacttcatgctgggcatcgcccccaacctggcccgctgggactaccacaccacccacatcaaccagctgcagctgctgagcaccattgatgagagccctgtgttcaaggagtttgtgaagcgctggaagagctacctgaagggcagccgggccaagcacaactag

SEQ ID NO: 273174 - DNA, 1662 bp, Artificial Sequence
  derived and/or modified sequence
atgaaccacgtggccaagcagcagagcgaggaggccttcccccaggagcagcagaaggcccctcctgtggtgggcggcttcaacagcaatgtgggcagcaaggtgctgggcctgaagtatgaggagattgactgcctgatcaatgatgagcacaccatcaagggccggcgggagggcaatgaggtgttcctgcccttcacctgggtggagaagtactttgatgtgtatggcaaggtggtgcagtatgatggctatgacagatttgagttcagccacagctacagcaaggtgtatgcccagagggccccctaccacccagatggagtcttcatgagctttgagggctacaacgtggaggtgcgggacagagtgaagtgcatcagcggcgtggagggcgtgcccctgagcacccagtggggcccccagggctacttctaccccatccagatcgcccagtatggcctgagccactacagcaagaacctgacagagaagccaccccacatcgaggtgtatgaaacagctgaggaccgggacaagaacaagcccaatgactggacagtgcccaagggctgcttcatggccaacgtggccgacaagagccgcttcaccaacgtgaagcagttcatcgcccctgagaccagcgagggcgtgtccctgcagctgggcaacaccaaggacttcatcatcagctttgacctgaagttcctgaccaatggatctgtgtctgtggtgctggagaccacagagaagaaccagctgttcaccatccactacgtgtccaatgcccagctgattgccttcaaggagcgggacatctactatggaattggccccaggacctcctggagcacagtgacccgggacctggtgacagacctgaggaagggcgtgggcctgagcaacaccaaggctgtgaagcccaccaagatcatgcccaagaaggtggtgcggctcatcgccaagggcaagggcttcctggacaacatcaccatcagcaccacagcccacatggccgccttctttgctgccagtgactggctggtgaggaaccaggatgagaagggcggctggcccatcatggtgaccaggaagctgggggagggcttcaagagcctggagcccggctggtacagcgccatggcccagggccaggccatcagcaccctggtgcgggcctacctgctgaccaaggaccacatcttcctgaacagcgccctgcgggccacagccccctacaagttcctgtctgagcagcacggcgtgaaggctgtgttcatgaacaagcatgactggtatgaggagtaccccaccacccccagcagctttgtgctgaatggcttcatgtacagcctgattggcctgtatgacctgaaggagacagctggggagaagctgggcaaggaggcccggagcctgtatgaaagaggcatggagagcctgaaggccatgctgcccctgtatgacaccggcagcggcaccatctatgacctgcggcacttcatgctgggcatcgcccccaacctggcccgctgggactaccacaccacccacatcaaccagctgcagctgctgagcaccattgatgagagccctgtgttcaaggagtttgtgaagcgctggaagagctacctgaagggcagccgggccaagcacaactag

SEQ ID NO: 273175 - DNA, 1854 bp, Artificial Sequence
  derived and/or modified sequence
atgcggtgcctggccgcccgggtgaactacaagaccctgatcatcatctgcgctttatttactctggtgaccgtactattgtggaataagtgttccagcgacaaggcaattcaatttccgcggcggagcagctccgggtttagagtagatggctttgagaaacgggctgccgcgtcagaaagcaataattatatgaatcacgttgcaaaacagcagtcagaggaagccttcccccaagagcagcagaaggcccctccagtggtgggtgggtttaatagcaatgtgggctctaaagtcttaggactgaagtatgaggagatagattgcctcatcaatgacgagcacaccatcaaaggcaggagggaaggtaacgaggtcttcttaccttttacctgggtggaaaaatattttgatgtgtatggtaaagtcgttcagtacgacggttatgatagatttgagttcagccattcttacagcaaggtttacgcccagagagccccataccatccggacggcgtgttcatgagctttgagggatataatgtggaagttagggaccgcgttaagtgcatctctggagtggaaggagtgccgctatctacacagtggggcccacaaggatacttttaccccatacagattgctcaatatggacttagtcattacagcaaaaacctgacagagaaacctccccacatcgaggtttacgaaacagccgaagacagagataaaaataagcctaatgattggacggtgcccaaagggtgttttatggccaatgtcgctgacaaatcaaggttcacaaatgtgaagcaattcatagcaccagaaaccagtgagggggtgtcactgcagctcggcaatactaaggacttcatcatctctttcgacctgaaatttttgactaatgggtctgtctccgtggtgctggaaacaacagaaaaaaatcagctgttcacgatccattatgtgtctaatgctcaactgatcgccttcaaggagagggacatctactacgggattggaccaagaacaagctggagcaccgtcactcgcgacctggtcacagatctgagaaagggtgtcggtcttagtaatacaaaagcagtcaagccaaccaagatcatgccaaaaaaagtggtgcgtctgattgctaaggggaaggggtttctagacaacatcaccatctcaaccaccgcccacatggctgccttctttgctgcttctgattggctggtgcgaaaccaggacgagaagggcgggtggcctatcatggtgactcgaaagctgggggagggatttaagtccctggaacccgggtggtactctgccatggctcagggccaagcaataagcacactggttagagcatacctgctaactaaggatcatatattccttaacagtgcgctccgcgcaacagcaccctataaatttctatcagaacagcatggggtgaaagccgtgttcatgaacaagcatgactggtatgaggagtacccaaccacaccgtccagtttcgttctcaacggctttatgtattcattgattggtttatacgacctgaaagaaaccgcgggagaaaaattagggaaggaagcccgatccctgtatgagcggggcatggagtccctgaaggccatgctccccctttatgataccggcagcggtacgatctatgacttacgacactttatgctgggtatagccccaaatctcgcgcgctgggactatcacactacccatatcaaccaacttcagctgctctcaacaatagatgagtcccctgtgtttaaagaatttgtgaaacgttggaaatcataccttaaggggtctcgggcaaagcataactag

SEQ ID NO: 273176 - DNA, 1662 bp, Artificial Sequence
  derived and/or modified sequence
atgaaccacgtggccaagcagcagagcgaggaggccttcccccaggaacagcaaaaagctccccctgtggtcggggggtttaattctaacgtgggttcaaaggttctcggactgaaatatgaggagatcgactgtctcataaacgatgagcatacaatcaagggccgcagagaggggaacgaggtttttctgccatttacatgggttgaaaaatatttcgacgtatacggtaaagttgtgcaatatgacggatacgacaggtttgagttctcccattcctattctaaagtgtatgcccagcgagccccataccaccctgacggagttttcatgagtttcgaaggatataacgttgaggtccgcgacagagttaagtgcatctccggcgttgaaggagtaccattgtccacccagtggggcccccagggctacttctatccaattcagatcgcgcagtatggcctgtcccactattcgaagaatttaaccgagaaaccgccacacattgaagtttatgagaccgccgaagatcgggacaagaataagcccaatgactggaccgtccctaagggttgttttatggcgaacgtggccgataagtctcgttttactaatgttaaacagtttatcgcgcccgagacgtcagaaggcgtctcgctgcagcttggtaacacaaaagattttattatctccttcgatttgaagttcttgaccaatggctctgtgtcagtggtgctggaaacgactgagaaaaaccagctcttcacaatccattacgtaagcaatgcacaactgatcgctttcaaagaacgggacatctattacggcatcggcccaagaacaagttggagcacagttacacgcgatcttgtgaccgaccttcgcaagggcgtggggctgagtaacaccaaagccgtaaaacccactaagatcatgcctaagaaggttgtgcgactgatcgccaagggcaaagggtttctggataacattacaatctccactactgcgcatatggctgctttcttcgcggcctccgattggctcgtacggaaccaggatgagaaaggtgggtggcccatcatggtgacacgtaaactgggcgagggtttcaagagcctggaacctggctggtattctgcaatggcccagggacaagctatttctaccttggtgcgggcttatctgctcacgaaggaccatatctttctgaactcagccttacgtgccacagccccctacaagtttctgagcgaacagcacggggtgaaggcggtcttcatgaacaaacacgattggtacgaggaatatcctacaacaccttcctcctttgtactgaatggttttatgtatagcctgatcggactttacgacctgaaggagactgccggcgagaagctcggcaaggaggctagatctttgtacgagaggggaatggagagcctgaaggctatgctgcccttgtatgatacaggcagtggaacaatctatgatctgcgtcattttatgctcggaatcgcaccgaatcttgctcggtgggactatcacactacacacattaatcagttacagctcctcagcactattgatgagtcccctgtgtttaaggaatttgtgaaaaggtggaagtcgtaccttaagggcagtcgagccaagcacaattag

SEQ ID NO: 273177 - DNA, 1854 bp, Artificial Sequence
  derived and/or modified sequence
atgagatgcctggcagccagagtaaattataaaacgttgatcataatctgtgcattgtttacgctggttacagtgctactgtggaacaagtgctcaagcgacaaagccatacaatttccgagacggtcaagcagtggcttccgggtagacggcttcgagaaacgggcagctgcaagcgagagcaataactatatgaaccacgtagctaaacagcagtccgaggaggcttttcctcaggaacaacagaaagctccaccagtcgtgggcggttttaattccaatgttggttctaaggtgctggggcttaagtacgaggaaattgactgtctcattaatgatgagcacacaatcaaaggacggagggagggtaacgaggtttttctacctttcacatgggtggaaaaatacttcgatgtctacggaaaggtagtgcagtacgatgggtacgaccggttcgaattctcgcacagctactcaaaggtgtatgctcagagagctccataccatcccgacggggttttcatgtcattcgaagggtataatgtggaagttagggatagggtgaagtgtataagcggcgtagagggggtgcctctgtctacacagtggggccctcaggggtatttttacccaatacaaatcgcccaatatggattgtcgcactactctaaaaatctcaccgagaagcctcctcatatagaagtgtacgaaacagccgaggatcgcgacaaaaacaagcctaacgactggaccgtgcccaaaggatgcttcatggccaatgtcgcggacaaatcccgtttcacaaacgtcaaacagtttatcgcccctgaaactagcgaaggcgtgtcacttcagcttggtaacaccaaagactttatcatctctttcgacctgaagttccttacgaacggttccgtatctgttgttctcgagacgacggagaagaatcagctgtttactattcactatgtgagtaatgctcagctgattgctttcaaggaacgggatatttattatgggataggacccaggacgtcttggtctacagtgaccagggatcttgtaaccgatctgaggaaaggggttggcttgtccaacactaaagcggttaagcccacgaaaattatgcccaaaaaagtcgtcagactcatcgctaaggggaaaggctttttggataatattacaatctctaccaccgcccatatggccgcattctttgccgctagtgattggcttgttaggaatcaggacgaaaaaggtgggtggccaattatggtcacaaggaaactgggagaggggttcaaatccctggaacccggatggtattccgcaatggcccagggacaggccattagtactcttgtgcgggcttatttactgaccaaggaccatatctttctgaatagcgctctccgggctaccgcaccgtataagtttctttcggagcagcacggagtgaaggcagttttcatgaacaaacacgactggtacgaggagtaccctaccactcctagctcatttgtactaaatggattcatgtactcactgatcggtctctatgatctgaaggagaccgcaggggagaagctgggcaaggaagccaggtcactttacgagcgtggcatggaatcgttgaaggccatgctgcctttatacgacacagggtccggcactatttacgacctgcgacacttcatgcttgggatcgctcccaacctggcacgctgggactaccatactacccacatcaaccagctgcaacttttgtccaccattgatgagtctcctgtgttcaaagagtttgttaagcggtggaaaagttacctaaaaggctcccgagcaaagcacaactag

SEQ ID NO: 273178 - DNA, 1662 bp, Artificial Sequence
  derived and/or modified sequence
atgaatcacgtcgccaagcaacaatccgaggaagccttcccacaagagcagcagaaagcccctcctgtggttgggggttttaacagtaacgtcggctctaaggtgttagggttgaagtacgaggagatcgattgccttattaatgatgagcataccattaaaggcagacgggaggggaatgaagtgttcctccccttcacctgggtagagaaatatttcgatgtgtacggaaaggtggtacaatacgatggctacgaccgtttcgagttctcacactcctacagcaaggtctatgctcagagggcaccgtaccacccggatggtgtgtttatgtcctttgaaggatataacgtggaggtgagagacagagtcaagtgcatctcgggtgtcgaaggtgtcccccttagtacgcaatggggccctcaaggatacttctacccgatacagattgcccaatacggtctctctcactattccaaaaatcttaccgagaagcccccacacattgaagtttacgagaccgctgaggaccgagataagaacaagcctaatgactggacagtgccaaagggatgtttcatggccaatgtggcagacaagagtcggtttacaaacgtgaaacaatttattgccccagaaacctcagaaggagtctccctacagctgggcaatacaaaagactttattatctctttcgaccttaagttcctcactaacggtagcgtctctgtggtgctcgaaaccacagagaagaaccaattgttcactatccactatgtttcaaacgctcagctcattgcctttaaggagagggatatctactacggcataggacctcgtaccagttggtcaactgtcactagagacctggttaccgacctccgaaagggggtggggttaagcaacaccaaggctgttaagccgactaagatcatgccaaaaaaagtggttcggctgatcgcaaaaggcaaggggttcctggacaatatcactataagcactacagctcacatggctgccttcttcgctgcgtcagactggctggtgaggaaccaggacgagaaagggggttggcctatcatggtgacgcggaagctcggagaggggtttaaaagcctcgagccgggatggtattcggcaatggcgcaaggacaggccatctctacattggtgagagcctatcttctgaccaaagaccatatttttctgaactctgcactgagggccacagcaccctataaatttctcagcgaacaacatggcgtgaaagcagtattcatgaataaacacgactggtacgaggagtacccgacaaccccctctagtttcgtactcaacgggtttatgtattccctgatcggactgtacgatctcaaggaaactgctggcgagaagctgggcaaggaggctcgttcattgtacgaaagggggatggagagcttaaaggcgatgctacccttatacgatactggcagcggaaccatttacgacctccggcacttcatgcttggcatcgcacccaacctggctaggtgggattatcacacaacccatatcaaccaactacagcttctaagtaccatagacgagagtcctgtgttcaaggaatttgtaaaacggtggaagtcttacctgaagggttcacgcgcaaagcacaactag

SEQ ID NO: 273179 - DNA, 1854 bp, Artificial Sequence
  derived and/or modified sequence
atgagatgcctggccgccagagtgaactacaagaccctgatcatcatctgcgccctgttcaccctggtgaccgtgctgctgtggaacaagtgcagcagcgacaaggccatccagttccccagaagaagcagcagcggcttcagagtggacggcttcgagaagagagccgccgccagcgagagcaacaactacatgaaccacgtggccaagcagcagagcgaggaggccttcccccaggagcagcagaaggccccccccgtggtgggcggcttcaacagcaacgtgggcagcaaggtgctgggcctgaagtacgaggagatcgactgcctgatcaacgacgagcacaccatcaagggcagaagagagggcaacgaggtgttcctgcccttcacctgggtggagaagtacttcgacgtgtacggcaaggtggtgcagtacgacggctacgacagattcgagttcagccacagctacagcaaggtgtacgcccagagagccccctaccaccccgacggcgtgttcatgagcttcgagggctacaacgtggaggtgagagacagagtgaagtgcatcagcggcgtggagggcgtgcccctgagcacccagtggggcccccagggctacttctaccccatccagatcgcccagtacggcctgagccactacagcaagaacctgaccgagaagcccccccacatcgaggtgtacgagaccgccgaggacagagacaagaacaagcccaacgactggaccgtgcccaagggctgcttcatggccaacgtggccgacaagagcagattcaccaacgtgaagcagttcatcgcccccgagaccagcgagggcgtgagcctgcagctgggcaacaccaaggacttcatcatcagcttcgacctgaagttcctgaccaacggcagcgtgagcgtggtgctggagaccaccgagaagaaccagctgttcaccatccactacgtgagcaacgcccagctgatcgccttcaaggagagagacatctactacggcatcggccccagaaccagctggagcaccgtgaccagagacctggtgaccgacctgagaaagggcgtgggcctgagcaacaccaaggccgtgaagcccaccaagatcatgcccaagaaggtggtgagactgatcgccaagggcaagggcttcctggacaacatcaccatcagcaccaccgcccacatggccgccttcttcgccgccagcgactggctggtgagaaaccaggacgagaagggcggctggcccatcatggtgaccagaaagctgggcgagggcttcaagagcctggagcccggctggtacagcgccatggcccagggccaggccatcagcaccctggtgagagcctacctgctgaccaaggaccacatcttcctgaacagcgccctgagagccaccgccccctacaagttcctgagcgagcagcacggcgtgaaggccgtgttcatgaacaagcacgactggtacgaggagtaccccaccacccccagcagcttcgtgctgaacggcttcatgtacagcctgatcggcctgtacgacctgaaggagaccgccggcgagaagctgggcaaggaggccagaagcctgtacgagagaggcatggagagcctgaaggccatgctgcccctgtacgacaccggcagcggcaccatctacgacctgagacacttcatgctgggcatcgcccccaacctggccagatgggactaccacaccacccacatcaaccagctgcagctgctgagcaccatcgacgagagccccgtgttcaaggagttcgtgaagagatggaagagctacctgaagggcagcagagccaagcacaactag

SEQ ID NO: 273180 - DNA, 1662 bp, Artificial Sequence
  derived and/or modified sequence
atgaaccacgtggccaagcagcagagcgaggaggccttcccccaggagcagcagaaggccccccccgtggtgggcggcttcaacagcaacgtgggcagcaaggtgctgggcctgaagtacgaggagatcgactgcctgatcaacgacgagcacaccatcaagggcagaagagagggcaacgaggtgttcctgcccttcacctgggtggagaagtacttcgacgtgtacggcaaggtggtgcagtacgacggctacgacagattcgagttcagccacagctacagcaaggtgtacgcccagagagccccctaccaccccgacggcgtgttcatgagcttcgagggctacaacgtggaggtgagagacagagtgaagtgcatcagcggcgtggagggcgtgcccctgagcacccagtggggcccccagggctacttctaccccatccagatcgcccagtacggcctgagccactacagcaagaacctgaccgagaagcccccccacatcgaggtgtacgagaccgccgaggacagagacaagaacaagcccaacgactggaccgtgcccaagggctgcttcatggccaacgtggccgacaagagcagattcaccaacgtgaagcagttcatcgcccccgagaccagcgagggcgtgagcctgcagctgggcaacaccaaggacttcatcatcagcttcgacctgaagttcctgaccaacggcagcgtgagcgtggtgctggagaccaccgagaagaaccagctgttcaccatccactacgtgagcaacgcccagctgatcgccttcaaggagagagacatctactacggcatcggccccagaaccagctggagcaccgtgaccagagacctggtgaccgacctgagaaagggcgtgggcctgagcaacaccaaggccgtgaagcccaccaagatcatgcccaagaaggtggtgagactgatcgccaagggcaagggcttcctggacaacatcaccatcagcaccaccgcccacatggccgccttcttcgccgccagcgactggctggtgagaaaccaggacgagaagggcggctggcccatcatggtgaccagaaagctgggcgagggcttcaagagcctggagcccggctggtacagcgccatggcccagggccaggccatcagcaccctggtgagagcctacctgctgaccaaggaccacatcttcctgaacagcgccctgagagccaccgccccctacaagttcctgagcgagcagcacggcgtgaaggccgtgttcatgaacaagcacgactggtacgaggagtaccccaccacccccagcagcttcgtgctgaacggcttcatgtacagcctgatcggcctgtacgacctgaaggagaccgccggcgagaagctgggcaaggaggccagaagcctgtacgagagaggcatggagagcctgaaggccatgctgcccctgtacgacaccggcagcggcaccatctacgacctgagacacttcatgctgggcatcgcccccaacctggccagatgggactaccacaccacccacatcaaccagctgcagctgctgagcaccatcgacgagagccccgtgttcaaggagttcgtgaagagatggaagagctacctgaagggcagcagagccaagcacaactag

SEQ ID NO: 273181 - protein, 720 aa, Artificial Sequence
  derived and/or modified sequence
MCSVLPVAVTGVKRLESSWHGRPTLEKEREKNSAPPHRRAQKVMIRSSSDSSYMSGSPGGSPGSGSAEKPSSDVDISTHSPSLPLAREPVVLSIASSRLPQESPPLPESRDSHPPLRLKKSFEILVRKPMSSKPKPPPRKYFKSDSDPQKSLEERENSSCSSGHTPPTCGQEARELLPLLLPQEDTAGRSPSASAGCPGPGIGPQTKSSTEGEPGWRRASPVTQTSPIKHPLLKRQARMDYSFDTTAEDPWVRISDCIKNLFSPIMSENHGHMPLQPNASLNEEEGTQGHPDGTPPKLDTANGTPKVYKSADSSTVKKGPPVAPKPAWFRQSLKGLRNRASDPRGLPDPALSTQPAPASREHLGSHIRASSSSSSIRQRISSFETFGSSQLPDKGAQRLSLQPSSGEAAKPLGKHEEGRFSGLLGRGAAPTLVPQQPEQVLSSGSPAASEARDPGVSESPPPGRQPNQKTLPPGPDPLLRLLSTQAEESQGPVLKMPSQRARSFPLTRSQSCETKLLDEKTSKLYSISSQVSSAVMKSLLCLPSSISCAQTPCIPKEGASPTSSSNEDSAANGSAETSALDTGFSLNLSELREYTEGLTEAKEDDDGDHSSLQSGQSVISLLSSEELKKLIEEVKVLDEATLKQLDGIHVTILHKEEGAGLGFSLAGGADLENKVITVHRVFPNGLASQEGTIQKGNEVLSINGKSLKGTTHHARPQLLH

SEQ ID NO: 273182 - DNA, 2825 bp, Artificial Sequence
  derived and/or modified sequence
caaatactcccagccgagaagctgccatcgatcctcccatggacccctgatcctggtttggaggaacttttcacagctctctctccctccctcaaaccctgtgcaatgagtttgcagaagagagtcttcccgagaaggcagaacgggactcatgaagtggcagctaagccctgtccagtggccacccgtcagccaagggccagagaccaggaaaggaagaaaggcagcttcacttcctctttgaggatggagtcgcacagccgcgctggaaagagcagaaaatctgcaaaatttcggtccatctccaggtccctgatgctctgtaatgctaagaccagtgatgatggctctagccctgatgagaaatatcctgatccctttgagatttccttggcccagggcaaggagggaattttccactcatctgtgcagctggcagacacatcggaggctgggcccagcagtgttcctgatctagcactggcctcggaggctgctcaactccaagcagctgggaatgatcgaggcaagacctgtaggaggatattcttcatgaaggaatcttccacagcttcctctcgagaaaagcctggaaaactagaagcacaaagtagtaacttcctgtttcctaaagcctgccaccaaagggcacgcagcaactcaaccagtgttaatccctattgcacaagagaaattgattttccaatgaccaagaaatctgcagcgcccacggacaggcagccttactctctctgcagtaacaggaagtccctctctcaacaattggactgtccagcaggaaaggctgcgggaacttcgagaccaacacggtccctgagcacagctcagctcgtgcagccatctgggggcctccaggcttcagtcatctccaacatcgtgctgatgaagggccaggctaagggtctgggcttcagcatcgttgggggaaaagacagcatttatggccccattgggatttacgtcaaaaccatttttgcagggggagcagcagcagccgatggaaggctacaggaaggtgatgaaattctggagctcaatggtgaatcaatggctggactaacacatcaggatgctttgcagaagttcaagcaagccaaaaaggggctcctcaccctcaccgtgagaacccgcctgacggcgcctccttccctgtgcagccacctgtctcccccactgtgccgctccctgagctccagcacttgtatcaccaaggacagcagctccttcgccttggaaagcccctcggctcccatcagcaccgccaagcccaattacagaatcatggtggaggtttctctgcagaaagaggccggcgtgggcctgggcatcggcctgtgcagcgttccctacttccaatgcatctctggcattttcgtccacacgctgtcaccaggatccgtggcgcacctggacggacgtctccggtgtggggacgagattgtggaaatcagtgattcccctgtgcactgcctgacgctcaatgaagtctacacgatcctgagtcactgtgatcccggtccagtccccatcattgttagccgacatccagacccacagaaggaagaaatggaggctcaggaggttaagtaacttgtctaggtgttcacacctagacagtagaggaaccgggactagaacacaagcctttttgactctaggactcatactcttaactattactccaaagtgataataaactgtctctgaacagcaactcaaagaagctgtggcccaggctgtggaaaacaccaagtttggaaaggagaggcatcagtggagtctggaagatgcagaaatggagttgggtcccccaggaagctgactctgagatggagtttggtctgcaggcagtgtcctggggttcactacctgtggcagggaggggagcaggcagggtagacagagggaggacggagctgaggtgcacacccaacagcttcagccaagccctggagctctgcagccaaagtccccattagagttgtcctatgttggccaacatagctgggcctctgtaaccctatctccagcagtccctggagatgggctgccccattggacaaggcagctgtctgcagctgtggcagcccctggagggacccacagctgaaagtagtctgccagcagcactccccacagctgggacaccaagcccttcctcgatgggtgatctgggtggcatatctccatatacatcagtcataggctcagaaagcttgaatgattttcccaacccaaagtcatacagctcgccagggaccaacaccaagactgccatactccagatccacagtgacttcagataagaagcagatggccgatgtgcagtgtgctgcccgtggcagtcacaggtgaggccagggggtatttctgttttctgaagctcagctgtgaagattctcttgtgcttcccacacaggtgtcaaaaggctggaaagcagttggcacgggcggcccaccttggagaaggaacgagagaagaactcagcacccccgcatcgcagggctcagaaggtcatgatccgctccagcagtgacagcagctacatgtctgggtccccagggggaagtcctgggagtggcagtgctgagaagccgtcctctgacgtggacatcagcacacacagccccagcttgcctctggcacgggagccagtggtgctttctatagcatcctccaggctgccccaggagagcccacccctcccagagagccgggacagccacccgccgctgagactgaagaaatcctttgagattttggtgagaaagcctatgtcctccaagcccaagcctccacccag

SEQ ID NO: 273183 - DNA, 8321 bp, Artificial Sequence
  derived and/or modified sequence
acatttgtcctgagtcacctgtccagagcaggtggtgaatattgtgtcctactcacggcatctcaactatcggagcctgggatctgactcaaaggccggcctccgtctgagaactgagcgtccatttctcaatccttgccggctctgacccaggcctgggccacaggctgtccgggaataagtggtgctgcaatccctgctgggcagatggagagaggagcaagggagatggcagccccgggggactgtgcatagggagggactcatgaagtggcagctaagccctgtccagtggccacccgtcagccaagggccagagaccaggaaaggaagaaaggcagcttcacttcctctttgaggatggagtcgcacagccgcgctggaaagagcagaaaatctgcaaaatttcggtccatctccaggtccctgatgctctgtaatgctaagaccagtgatgatggctctagccctgatgagaaatatcctgatccctttgagatttccttggcccagggcaaggagggaattttccactcatctgtgcagctggcagacacatcggaggctgggcccagcagtgttcctgatctagcactggcctcggaggctgctcaactccaagcagctgggaatgatcgaggcaagacctgtaggaggatattcttcatgaaggaatcttccacagcttcctctcgagaaaagcctggaaaactagaagcacaaagtagtaacttcctgtttcctaaagcctgccaccaaagggcacgcagcaactcaaccagtgttaatccctattgcacaagagaaattgattttccaatgaccaagaaatctgcagcgcccacggacaggcagccttactctctctgcagtaacaggaagtccctctctcaacaattggactgtccagcaggaaaggctgcgggaacttcgagaccaacacggtccctgagcacagctcagctcgtgcagccatctgggggcctccaggcttcagtcatctccaacatcgtgctgatgaagggccaggctaagggtctgggcttcagcatcgttgggggaaaagacagcatttatggccccattgggatttacgtcaaaaccatttttgcagggggagcagcagcagccgatggaaggctacaggaaggtgatgaaattctggagctcaatggtgaatcaatggctggactaacacatcaggatgctttgcagaagttcaagcaagccaaaaaggggctcctcaccctcaccgtgagaacccgcctgacggcgcctccttccctgtgcagccacctgtctcccccactgtgccgctccctgagctccagcacttgtatcaccaaggacagcagctccttcgccttggaaagcccctcggctcccatcagcaccgccaagcccaattacagaatcatggtggaggtttctctgcagaaagaggccggcgtgggcctgggcatcggcctgtgcagcgttccctacttccaatgcatctctggcattttcgtccacacgctgtcaccaggatccgtggcgcacctggacggacgtctccggtgtggggacgagattgtggaaatcagtgattcccctgtgcactgcctgacgctcaatgaagtctacacgatcctgagtcactgtgatcccggtccagtccccatcattgttagccgacatccagacccacaggtctctgaacagcaactcaaagaagctgtggcccaggctgtggaaaacaccaagtttggaaaggagaggcatcagtggagtctggaaggtgtcaaaaggctggaaagcagttggcacgggcggcccaccttggagaaggaacgagagaagaactcagcacccccgcatcgcagggctcagaaggtcatgatccgctccagcagtgacagcagctacatgtctgggtccccagggggaagtcctgggagtggcagtgctgagaagccgtcctctgacgtggacatcagcacacacagccccagcttgcctctggcacgggagccagtggtgctttctatagcatcctccaggctgccccaggagagcccacccctcccagagagccgggacagccacccgccgctgagactgaagaaatcctttgagattttggtgagaaagcctatgtcctccaagcccaagcctccacccagaaaatactttaaaagtgacagtgaccctcagaagagtctggaagagagagagaactcctcatgctcttctgggcacaccccacccacctgtggccaggaagcgagagagctgctgccactgctgctaccacaggaagacacagcagggagaagccctagtgcctctgccggctgcccaggacctggtatcggcccacagaccaagtcctccacagagggcgagccagggtggagaagagccagcccagtgacccaaacatccccgataaaacacccactgcttaagaggcaggctcggatggactatagctttgataccacagccgaagacccttgggttaggatttctgactgcatcaaaaacttatttagccccatcatgagtgagaaccatggccacatgcctctacagcccaatgccagcctgaatgaagaagaagggacacagggccacccagatgggaccccaccaaagctggacaccgccaatggcactcccaaagtttacaagtcagcagacagcagcactgtgaagaaaggtcctcctgtggctcccaagccagcctggtttcgccaaagcttgaaaggtttgaggaatcgtgcttcagacccaagagggctccctgatcctgccttgtccacccagccagcacctgcttccagggagcacctaggatcacacatccgggcctcctcctcctcctcctccatcaggcagagaatcagctcctttgaaacctttggctcctctcaactgcctgacaaaggagcccagagactgagcctccagccctcctctggggaggcagcaaaacctcttgggaagcatgaggaaggacggttttctggactcttggggcgaggggctgcacccactcttgtgccccagcagcctgagcaagtactgtcctcggggtcccctgcagcctccgaggccagagacccaggtgtgtctgagtcccctcccccagggcggcagcccaatcagaaaactctcccccctggcccggacccgctcctaaggctgctgtcaacacaggctgaggaatctcaaggcccagtgctcaagatgcctagccagcgagcacggagcttccccctgaccaggtcccagtcctgtgagacgaagctacttgacgaaaagaccagcaaactctattctatcagcagccaagtgtcatcggctgtcatgaaatccttgctgtgccttccatcttctatctcctgtgcccagactccctgcatccccaaggaaggggcatctccaacatcatcatccaacgaagactcagctgcaaatggttctgctgaaacatctgccttggacacagggttctcgctcaacctttcagagctgagagaatatacagagggtctcacggaagccaaggaagacgatgatggggaccacagttcccttcagtctggtcagtccgttatctccctgctgagctcagaagaattaaaaaaactcatcgaggaggtgaaggttctggatgaagcaacattaaagcaattagacggcatccatgtcaccatcttacacaaggaggaaggtgctggtcttgggttcagcttggcaggaggagcagatctagaaaacaaggtgattacggttcacagagtgtttccaaatgggctggcctcccaggaagggactattcagaagggcaatgaggttctttccatcaacggcaagtctctcaaggggaccacgcaccatgatgccttggccatcctccgccaagctcgagagcccaggcaagctgtgattgtcacaaggaagctgactccagaggccatgcccgacctcaactcctccactgactctgcagcctcagcctctgcagccagtgatgtttctgtagaatctacagaggccacagtctgcacggtgacactggagaagatgtcggcagggctgggcttcagcctggaaggagggaagggctccctacacggagacaagcctctcaccattaacaggattttcaaaggagcagcctcagaacaaagtgagacagtccagcctggagatgaaatcttacagctgggtggcactgccatgcagggcctcacacggtttgaagcctggaacatcatcaaggcactgcctgatggacctgtcacgattgtcatcaggagaaaaagcctccagtccaaggaaaccacagctgctggagactcctaggcaggacatgctgaagccaaagccaataacacacagctaacacacagctcccataaccgctgattctcagggtctctgctgccgccccacccagatgggggaaagcacaggtgggcttcccagtggctgctgcccaggcccagaccttctaggacgccacccagcaaaaggttgttcctaaaataagggcagagtcacacgggggcagctgatacaaattgcagactgtgtaaaaagagagcttaatgataatattgtggtgccacaaataaaatggatttattagaatttcatatgacattcatgcctggcttcgcaaaatgtttcaagtactgtaactgtgtcatgattcacccccaaacagtgacatttatttttctcatgaatctgcaatgtgggcagagattggaatgggcagctcatctctgtcccacttggcatcagctggcgtcatgcaaagtcatgcaaaggctgggaccacgtgagatcattcactcatacatctggccgttgatgttggctgggaactcacctggggctgctggcctgaatgcttataggtggcctctccttgtggcctgggcctcctcacaacatggtgtctggattcccaggatgagcatcccaggatcgcaagagccatgtagaagctgcatcttgtttatacctttgccttggaagttgcatggcatcacctccaccatactccatcagttagagctgacacaaacctgcctgggtttaaggggagaggaaatattgctggggtcatttatgaaaaatacagtttgtcacatgaaacatttgcaaaattgtttttggttggattggagaagtaatcctagggaagggtggtggagccagtaaacagaggagtacaggtgaagcaccaagctcaaagcgtggacaggtgtgccgacagaaggaaccagcgtgtatatgagggtatcaaataaaattgctactacttacctaccacatgccaagcactgtgctcagggctaaacgggcattgcctttagtgatcacagcagcttctacggtgtatggttctgtgccaatgtattgataagagggcacacactgtgtacagtaaatggcttatccagctggtgagtgatgcggcagattgagttttcttctgtgattcggtggagactatcagcccaagatgctttaagtgcacaacattacagggaatgcctgagtgcctggccaaagggatatttggtttggccatctctggatgcctgattgccaagctcaggaccaggcaatgtgactttgcatcagcaacaaccagcatcccttgaccaggcctgggccagagtattggtctcctctcagcccctgatcctgtgaagtaaggatgtgggggaagacctggcaaggacacagatgaaacacaaacaatagtaattctcaggccatcatcagtggagccatgttaatgtaatctgatggcttctccagggtccacaggaagtgaagaatctgtttcccagcagtggactcaaaacccatctgggctcctaaccttcctgtaaacccctttagtggcttcattagagcaggcgttcagctcactgttctattcatctcaaggaataatgggcttagagcagtttctgtcctgctggttaacttgtttggcctattccattctggattttgtcaagcagtagacaagcaattagacaagaacttggaggcaccatttgtatccactttttagacttaatagaaacattgaagatgaacataatctaccaacgaaagacgtgattcaattcaacactcccttcccatgacccaggctgggcaaggaggccacgtgatgtggagggcacattccttgcctgcacaaactcaccatctgtgcacgcagtggccttccctaaaatcagggaattgttttaagtcttatcaagcagccaagggatgaaagagaaggtgggttttcatcaagactggaaggtggggacagggatgagcatggagctggccgtgggcctggggtaccaagagactccttgagagaccaggcaaagcaagtgattgggacagaggttatctgtcccaggttatctgggcatagatgcaggtgagcccatggccctcccagtacctcctgtctctggcctgttttagaaggttctctcctccccaaggagacacaacaactcctagggccactgaagatataactattgcccaggtttctggtctctaggctggggaagtcctctgggtaggaatcagcaagaagatcctaaaacaaaagctcatccatttgcgttccatgatgctgggatttacacttgaggcttagctttgctctgccaacttcttcagagctgacacaggatgaaggcaatgccatcctcaaacactgcaggcatcacagctaacaattgtgaagtcgtcttaactcaccataaaaaggaatccactcccaggcagccctacttctttgctttgcccagcattttactgattcatacattatctcacttgtgccaacactcaagaagcaggctacactgacactggtattcctgcctccatattttctttaaaagacaaatcaaagcagatatattaagtgactgttcaagagcacacttggcccaagtggcagagcttggactggatgcatgttttccagctcctcatccagggctctgaccagtttaacctgatgcagtcacgtggaggagcagtgcaggcacagtatgtcccataggcccagtgagatgcattcttggttggctggccttccacttggctacacagggatgtacaaggcgatcccatcttgataagaccaccacctcagagtatggagctcagagagggcaggcatgaagtttccttggctggtgcacctagaattggctgaactcatgagaagttgatatagaacagtgcttgccacagagcggggactcggtaagcacttaatgaatgaatgaattctaagtcaatccaagagtctgatgatttcttgaaaagggtgttagctaaaggatcttaggcatgactgtagaatttgtagttgcaatagaacagagaaagaggaagctttctgtctccttaacactgagctgtcatgttttaaagcttgctcacatcttggcacatttaagagacagtcaccccaggactcaaaaatagggaagtaacagtaacgcaggggaaacgttttctgtttggaggagcaaaggctgagaacactgtgaaaacattttgcgcgcacaatagtaacctgggtaaatgcagcgtgaagggattttagtcacacgtggtctttcttacaaggaaggtggtgggggtgcagatgaggttgctagagaatgttagaggatccctctctggattggagatagggaaagaaagttgcacggctgctgaggccccttctaggtggcaaggctgtgctccctggttctgatgatgtgcctgggtggacatggcccctgtgagtttgtacagtcttgcagcaggatctagaggggggatttccagccagggctgctagacggaggcctactcttccatctttcctgatggcaggatggcctggccagggcctggaagacagagacctcctgcctccgcctcagtaagacgacaaggaaaggcaaatgcccaagggaaagaaaaggaaggctcttctccccagagttccccatgcagacatgagtgcgtgctcagttcagaatcacttctgagaactcatccctaatgctgcagatttgggctggaacagattcacactgtctggtttcaccgaggacatgaaactccaccttgcggggataaagagagaaaaacaaattcatcaaatggaagacacattgaaagtgtttttccttaatgcttatcctgtttttaaaccattatttccaagttgacaccttttttaaggaaaaataaatattttgcggcattaaagccatata

SEQ ID NO: 273184 - DNA, 2158 bp, Artificial Sequence
  derived and/or modified sequence
cacatttgtcctgagtcacctgtccagagcaggtggtgaatattgtgtcctactcacggcatctcaactatcggagcctgggatctgactcaaaggccggcctccgtctgagaactgagcgtccatttctcaatccttgccggctctgacccaggcctgggccacaggctgtccgggaataagtggtgctgcaatccctgctgggcagatggagagaggagcaagggagatggcagccccgggggactgtgcatagggaggtaggtgggcaccagggactcatgaagtggcagctaagccctgtccagtggccacccgtcagccaagggccagagaccaggaaaggaagaaaggcagcttcacttcctctttgaggatggagtcgcacagccgcgctggaaagagcagaaaatctgcaaaatttcggtccatctccaggtccctgatgctctgtaatgctaagaccagtgatgatggctctagccctgatgagaaatatcctgatccctttgagatttccttggcccagggcaaggagggaattttccactcatctgtgcagctggcagacacatcggaggctgggcccagcagtgttcctgatctagcactggcctcggaggctgctcaactccaagcagctgggaatgatcgaggcaagacctgtaggaggatattcttcatgaaggaatcttccacagcttcctctcgagaaaagcctggaaaactagaagcacaaagtagtaacttcctgtttcctaaagcctgccaccaaagggcacgcagcaactcaaccagtgttaatccctattgcacaagagaaattgattttccaatgaccaagaaatctgcagcgcccacggacaggcagccttactctctctgcagtaacaggaagtccctctctcaacaattggactgtccagcaggaaaggctgcgggaacttcgagaccaacacggtccctgagcacagctcagctcgtgcagccatctgggggcctccaggcttcagtcatctccaacatcgtgctgatgaagggccaggctaagggtctgggcttcagcatcgttgggggaaaagacagcatttatggccccattgggatttacgtcaaaaccatttttgcagggggagcagcagcagccgatggaaggctacaggaaggtgatgaaattctggagctcaatggtgaatcaatggctggactaacacatcaggatgctttgcagaagttcaagcaagccaaaaaggggctcctcaccctcaccgtgagaacccgcctgacggcgcctccttccctgtgcagccacctgtctcccccactgtgccgctccctgagctccagcacttgtatcaccaaggacagcagctccttcgccttggaaagcccctcggctcccatcagcaccgccaagcccaattacagaatcatggtggaggtttctctgcagaaagaggccggcgtgggcctgggcatcggcctgtgcagcgttccctacttccaatgcatctctggcattttcgtccacacgctgtcaccaggatccgtggcgcacctggacggacgtctccggtgtggggacgagattgtggaaatcagtgattcccctgtgcactgcctgacgctcaatgaagtctacacgatcctgagtcactgtgatcccggtccagtccccatcattgttagccgacatccagacccacaggtctctgaacagcaactcaaagaagctgtggcccaggctgtggaaaacaccaagtttggaaaggagaggcatcagtggagtctggaaggtgtcaaaaggctggaaagcagttggcacgggcggcccaccttggagaaggaacgagagaagaactcagcacccccgcatcgcagggctcagaaggtcatgatccgctccagcagtgacagcagctacatgtctgggtccccagggggaagtcctgggagtggcagtgctgagaagccgtcctctgacgtggacatcagcacacacagccccagcttgcctctggcacgggagccagtggtgctttctatagcatcctccaggctgccccaggagagcccacccctcccagagagccgggacagccacccgccgctgagactgaagaaatcctttgagattttggtgagaaagcctatgtcc

SEQ ID NO: 273185 - protein, 631 aa, Artificial Sequence
  derived and/or modified sequence
MDYSFDTTAEDPWVRISDCIKNLFSPIMSENHGHMPLQPNASLNEEEGTQGHPDGTPPKLDTANGTPKVYKSADSSTVKKGPPVAPKPAWFRQSLKGLRNRASDPRGLPDPALSTQPAPASREHLGSHIRASSSSSSIRQRISSFETFGSSQLPDKGAQRLSLQPSSGEAAKPLGKHEEGRFSGLLGRGAAPTLVPQQPEQVLSSGSPAASEARDPGVSESPPPGRQPNQKTLPPGPDPLLRLLSTQAEESQGPVLKMPSQRARSFPLTRSQSCETKLLDEKTSKLYSISSQVSSAVMKSLLCLPSSISCAQTPCIPKEGASPTSSSNEDSAANGSAETSALDTGFSLNLSELREYTEGLTEAKEDDDGDHSSLQSGQSVISLLSSEELKKLIEEVKVLDEATLKQLDGIHVTILHKEEGAGLGFSLAGGADLENKVITVHRVFPNGLASQEGTIQKGNEVLSINGKSLKGTTHHDALAILRQAREPRQAVIVTRKLTPEAMPDLNSSTDSAASASAASDVSVESTAEATVCTVTLEKMSAGLGFSLEGGKGSLHGDKPLTINRIFKGAASEQSETVQPGDEILQLGGTAMQGLTRFEAWNIIKALPDGPVTIVIRRKSLQSKETTAAGDS

SEQ ID NO: 273186 - DNA, 1896 bp, Artificial Sequence
  derived and/or modified sequence
atggactacagcttcgacaccaccgccgaggacccctgggtgagaatcagcgactgcatcaagaacctgttcagccccatcatgagcgagaaccacggccacatgcccctgcagcccaacgccagcctgaacgaggaggagggcacccagggccaccccgacggcaccccccccaagctggacaccgccaacggcacccccaaggtgtacaagagcgccgacagcagcaccgtgaagaagggcccccccgtggcccccaagcccgcctggttcagacagagcctgaagggcctgagaaacagagccagcgaccccagaggcctgcccgaccccgccctgagcacccagcccgcccccgccagcagagagcacctgggcagccacatcagagccagcagcagcagcagcagcatcagacagagaatcagcagcttcgagaccttcggcagcagccagctgcccgacaagggcgcccagagactgagcctgcagcccagcagcggcgaggccgccaagcccctgggcaagcacgaggagggcagattcagcggcctgctgggcagaggcgccgcccccaccctggtgccccagcagcccgagcaggtgctgagcagcggcagccccgccgccagcgaggccagagaccccggcgtgagcgagagccccccccccggcagacagcccaaccagaagaccctgccccccggccccgaccccctgctgagactgctgagcacccaggccgaggagagccagggccccgtgctgaagatgcccagccagagagccagaagcttccccctgaccagaagccagagctgcgagaccaagctgctggacgagaagaccagcaagctgtacagcatcagcagccaggtgagcagcgccgtgatgaagagcctgctgtgcctgcccagcagcatcagctgcgcccagaccccctgcatccccaaggagggcgccagccccaccagcagcagcaacgaggacagcgccgccaacggcagcgccgagaccagcgccctggacaccggcttcagcctgaacctgagcgagctgagagagtacaccgagggcctgaccgaggccaaggaggacgacgacggcgaccacagcagcctgcagagcggccagagcgtgatcagcctgctgagcagcgaggagctgaagaagctgatcgaggaggtgaaggtgctggacgaggccaccctgaagcagctggacggcatccacgtgaccatcctgcacaaggaggagggcgccggcctgggcttcagcctggccggcggcgccgacctggagaacaaggtgatcaccgtgcacagagtgttccccaacggcctggccagccaggagggcaccatccagaagggcaacgaggtgctgagcatcaacggcaagagcctgaagggcaccacccaccacgacgccctggccatcctgagacaggccagagagcccagacaggccgtgatcgtgaccagaaagctgacccccgaggccatgcccgacctgaacagcagcaccgacagcgccgccagcgccagcgccgccagcgacgtgagcgtggagagcaccgccgaggccaccgtgtgcaccgtgaccctggagaagatgagcgccggcctgggcttcagcctggagggcggcaagggcagcctgcacggcgacaagcccctgaccatcaacagaatcttcaagggcgccgccagcgagcagagcgagaccgtgcagcccggcgacgagatcctgcagctgggcggcaccgccatgcagggcctgaccagattcgaggcctggaacatcatcaaggccctgcccgacggccccgtgaccatcgtgatcagaagaaagagcctgcagagcaaggagaccaccgccgccggcgacagctag

SEQ ID NO: 273187 - DNA, 1683 bp, Artificial Sequence
  derived and/or modified sequence
atggactacagcttcgacaccaccgccgaggacccctgggtgagaatcagcgactgcatcaagaacctgttcagccccatcatgagcgagaaccacggccacatgcccctgcagcccaacgccagcctgaacgaggaggagggcacccagggccaccccgacggcaccccccccaagctggacaccgccaacggcacccccaaggtgtacaagagcgccgacagcagcaccgtgaagaagggcccccccgtggcccccaagcccgcctggttcagacagagcctgaagggcctgagaaacagagccagcgaccccagaggcctgcccgaccccgccctgagcacccagcccgcccccgccagcagagagcacctgggcagccacatcagagccagcagcagcagcagcagcatcagacagagaatcagcagcttcgagaccttcggcagcagccagctgcccgacaagggcgcccagagactgagcctgcagcccagcagcggcgaggccgccaagcccctgggcaagcacgaggagggcagattcagcggcctgctgggcagaggcgccgcccccaccctggtgccccagcagcccgagcaggtgctgagcagcggcagccccgccgccagcgaggccagagaccccggcgtgagcgagagccccccccccggcagacagcccaaccagaagaccctgccccccggccccgaccccctgctgagactgctgagcacccaggccgaggagagccagggccccgtgctgaagatgcccagccagagagccagaagcttccccctgaccagaagccagagctgcgagaccaagctgctggacgagaagaccagcaagctgtacagcatcagcagccaggtgagcagcgccgtgatgaagagcctgctgtgcctgcccagcagcatcagctgcgcccagaccccctgcatccccaaggagggcgccagccccaccagcagcagcaacgaggacagcgccgccaacggcagcgccgagaccagcgccctggacaccggcttcagcctgaacctgagcgagctgagagagtacaccgagggcctgaccgaggccaaggaggacgacgacggcgaccacagcagcctgcagagcggccagagcgtgatcagcctgctgagcagcgaggagctgaagaagctgatcgaggaggtgaaggtgctggacgaggccaccctgaagcagctggacggcatccacgtgaccatcctgcacaaggaggagggcgccggcctgggcttcagcctggccggcggcgccgacctggagaacaaggtgatcaccgtgcacagagtgttccccaacggcctggccagccaggagggcaccatccagaagggcaacgaggtgctgagcatcaacggcaagagcctgaagggcaccacccaccacgacgccctggccatcctgagacaggccagagagcccagacaggccgtgatcgtgaccagaaagctgacccccgaggccatgcccgacctgaacagcagcaccgacagcgccgccagcgccagcgccgccagcgacgtgagcgtggagagcaccgaggccaccgtgtgcaccgtgaccctggaggacgtgggcagagccggcctgcagcccggcagaagagagggcctgcccaccagaagacaggccagccaccactag

SEQ ID NO: 273188 - DNA, 1896 bp, Artificial Sequence
  derived and/or modified sequence
atggactattccttcgatacaaccgcagaagatccgtgggtgcgaatatcagactgtatcaagaatctgttctcacctattatgagcgaaaaccacggccacatgcctctgcagcccaacgcatctctgaacgaagaggaggggacacaaggacaccccgatggcacccctccaaaacttgataccgcaaacggtaccccaaaggtgtacaagtccgcggattctagcaccgtcaaaaagggcccacccgtcgctccaaagcccgcctggtttcggcaatcactaaagggactgaggaaccgcgcgtcagacccgagaggcttaccggacccagctctttctacccagccggctcccgcctcacgcgaacacttgggtagccatattagggcatctagctcctctagctcgatacgccagcggatatcctccttcgagacatttggcagctctcagctgccagataaaggagcccagcgactgagcctgcagccatcttccggcgaagccgccaagccattgggcaagcatgaggagggtcggttctctggcttactgggaagaggagctgccccaacacttgtccctcaacagcctgagcaagtgctgtcatctggatcccccgctgcatccgaggcccgagatcccggagtttctgagagtccccctccaggaagacagcctaatcaaaaaactcttccgcccggcccagaccctctgctgaggctgttaagcacacaagctgaggaaagccaggggccagttctgaaaatgccctctcagagagccagaagtttcccgcttaccaggagccagtcctgtgaaactaagcttctcgatgagaagacaagcaagctgtacagtattagctcccaggtatcttcagctgtcatgaaaagcctattgtgtctgccttccagcatctcctgcgcccagaccccatgtatacccaaggaaggcgcctcgcctacatcctcttccaacgaagattccgccgcgaatggaagcgctgaaacctccgccctcgatacggggttttcacttaatctctccgagttgcgggaatacacagagggactcactgaggccaaagaggacgatgacggggaccattcaagtcttcagtcagggcagtctgtgatctccctgctgtcctcagaagagctgaagaagctcatcgaggaggtgaaagttctcgacgaagcaaccctcaagcagctggatggcatccatgttactatactccataaagaagagggtgctggcctgggcttttcactggccgggggcgcggatctcgagaacaaggtcatcacagttcatcgggttttccctaatgggctcgcatcacaagaaggaacgatccagaaggggaacgaggttctgtccattaacgggaagtcactgaagggcacgacgcatcatgatgcactggctattctgaggcaggcacgagaacccagacaggccgtcatcgtgacacggaagctgacacccgaggctatgcctgacttgaattcgtcgacagacagtgccgcctccgctagcgctgcgtccgatgtgtccgtcgagtccaccgcagaagcaacagtttgcaccgtcacacttgagaagatgagcgccgggctcggattcagcctggaaggggggaagggcagtttgcacggggataagccattaacaatcaatagaatattcaaaggcgcggccagcgagcagagcgaaactgtccagcctggggacgaaatcctccagctgggtgggaccgcaatgcagggccttacccgattcgaggcctggaacatcattaaggcactacccgacgggccagtcacaatcgtgataagacgcaagtccttgcagtcaaaggaaacaaccgcagcaggggacagctag

SEQ ID NO: 273189 - DNA, 1683 bp, Artificial Sequence
  derived and/or modified sequence
atggactacagttttgacacaactgccgaagatccctgggttcggatcagcgactgtattaaaaacctcttctcacccatcatgtctgaaaatcatggtcacatgccattgcagcccaacgcttctcttaatgaagaggagggaacgcaagggcacccagacgggacgcctccaaagctggatacagccaacggcactcccaaggtgtacaaaagtgccgactcctctactgtcaagaaaggtccaccagtggccccaaagcccgcctggttcagacagtctctgaaagggctccggaacagggcttccgaccctagaggattgcctgacccagctctgtccactcagcccgctcccgcgtctagagaacatttaggcagtcacatccgggcatcctccagcagcagttccattcgacagcggatcagctcatttgaaactttcggatcctctcagcttcccgataaaggcgcccagaggctgagcctccaaccaagtagtggagaggccgccaaaccacttggaaagcacgaagagggccggttctccggcttgctgggtcggggtgccgctcctacgctcgtgccgcagcaaccagaacaggttctctcatctgggtctcctgccgcttccgaagcccgtgaccccggggtttccgagagtcccccgcccggtcgtcagccgaaccagaagaccctgccgcctggtcccgacccactgctccgactgctttctacacaggccgaagaaagccagggccccgtccttaaaatgccgagccaacgcgcgaggagtttccctctgactcggagtcagtcttgcgagacaaagctgcttgacgagaagacctctaagttgtacagcatatcatcccaagtgtccagcgcagtcatgaagtcactcctctgtctgccctcttctatcagctgtgcccaaaccccctgcataccgaaggaaggggcctccccaacatcgtctagcaacgaggactcagccgccaatgggagtgccgagacgtccgccttggatacggggttctccctgaacctctctgagctgagagagtacaccgagggactcacagaggctaaggaggatgacgatggagaccattcctcgttgcagagcggacagtcagtgatttctctgctctcatccgaggagcttaagaaactgatagaagaggtgaaggtgttggacgaggctacgctgaaacagcttgacggtatccacgtgacaattctccacaaggaagagggcgctggcttaggattttcccttgcgggcggcgctgatttagagaataaggtgatcaccgtgcaccgggtattccctaacgggcttgccagtcaggaaggtaccattcaaaaagggaacgaggttttgagcatcaatggaaagagcctgaaagggacaactcatcatgatgccctagcaattctcagacaagcccgtgagccccgacaagctgtcatcgtgactagaaagctgaccccagaggctatgccagacctcaactcatctactgatagtgccgcctctgcaagtgcagcgtcagatgtatccgtggaatccaccgaggcaactgtgtgtactgtaacgttagaagatgttggcagagctgggctgcagccaggaaggagagagggattgcctacaagaagacaagcctcacaccattag

SEQ ID NO: 273190 - DNA, 1896 bp, Artificial Sequence
  derived and/or modified sequence
atggactacagctttgacaccacagctgaggacccctgggtgcgcatcagtgactgcatcaagaacctcttcagccccatcatgtctgagaaccacggccacatgcccctgcagcccaatgccagcctgaatgaggaggagggcacccagggccacccagatggcaccccacccaagctggacacagccaacggcacccccaaggtgtacaagtctgctgacagcagcacagtgaagaagggcccccctgtggcccccaagccagcctggttccggcagagcctgaagggcctgaggaacagagccagtgacccccggggcctgcctgaccctgccctgagcacccagcctgccccagccagccgggagcacctgggcagccacatccgggccagcagcagcagcagcagcatccggcagaggatcagcagctttgagaccttcggcagcagccagctgcctgacaagggggcccagaggctgagcctgcagcccagcagtggagaggccgccaagcccctgggcaagcatgaggagggccgcttcagcggcctgctgggccgcggggccgcccccaccctggtgccccagcagcctgagcaggtgctgagcagcggcagccctgctgccagcgaggcccgggaccccggggtgtctgagagccccccacctggccggcagcccaaccagaagaccctgcccccaggccctgaccccctgctgcggctgctgagcacccaggccgaggagagccagggccctgtgctgaagatgcccagccagagggcccgctccttccccctgaccaggagccagagctgtgagaccaagctgctggatgagaagaccagcaagctgtacagcatcagcagccaggtgtcctctgctgtgatgaagagcctgctgtgcctgcccagcagcatcagctgtgcccagaccccctgcatccccaaggagggcgccagccccaccagcagcagcaatgaagattctgctgccaacggcagcgctgagaccagcgccctggacaccggcttcagcctgaacctgtctgagctgcgggagtacacagagggcctgacagaggccaaggaggatgatgatggagaccacagcagcctgcagagcggccagagcgtcatcagcctgctgagcagcgaggagctgaagaagctgattgaggaggtgaaggtgctggatgaggccaccctgaagcagctggatggcatccacgtgaccatcctgcacaaggaggagggcgccggcctgggcttcagcctggccggcggcgctgacctggagaacaaggtgatcaccgtgcacagggtcttccccaacggcctggccagccaggagggcaccatccagaagggaaatgaggtgctgagcatcaatggcaagagcctgaagggcaccacccaccatgatgccctggccatcctgcggcaggcccgggagccccggcaggccgtcatcgtgaccaggaagctgaccccagaggccatgccagacctgaacagcagcacagattctgctgccagcgccagcgctgccagtgatgtgtctgtggagagcacagctgaggccaccgtgtgcaccgtgaccctggagaagatgtctgctggcctgggcttcagcctggagggcggcaagggcagcctgcatggagacaagcccctgaccatcaaccgcatcttcaagggagctgccagcgagcagagcgagaccgtgcagcctggagatgagatcctgcagctgggcggcacagccatgcagggcctgaccaggtttgaggcctggaacatcatcaaggccctgcctgatggccctgtgaccatcgtcatccggaggaagagcctgcagagcaaggagaccacagctgctggggacagctag

SEQ ID NO: 273191 - DNA, 1683 bp, Artificial Sequence
  derived and/or modified sequence
atggactacagctttgacaccacagctgaggacccctgggtgcgcatcagtgactgcatcaagaacctcttcagccccatcatgtctgagaaccacggccacatgcccctgcagcccaatgccagcctgaatgaggaggagggcacccagggccacccagatggcaccccacccaagctggacacagccaacggcacccccaaggtgtacaagtctgctgacagcagcacagtgaagaagggcccccctgtggcccccaagccagcctggttccggcagagcctgaagggcctgaggaacagagccagtgacccccggggcctgcctgaccctgccctgagcacccagcctgccccagccagccgggagcacctgggcagccacatccgggccagcagcagcagcagcagcatccggcagaggatcagcagctttgagaccttcggcagcagccagctgcctgacaagggggcccagaggctgagcctgcagcccagcagtggagaggccgccaagcccctgggcaagcatgaggagggccgcttcagcggcctgctgggccgcggggccgcccccaccctggtgccccagcagcctgagcaggtgctgagcagcggcagccctgctgccagcgaggcccgggaccccggggtgtctgagagccccccacctggccggcagcccaaccagaagaccctgcccccaggccctgaccccctgctgcggctgctgagcacccaggccgaggagagccagggccctgtgctgaagatgcccagccagagggcccgctccttccccctgaccaggagccagagctgtgagaccaagctgctggatgagaagaccagcaagctgtacagcatcagcagccaggtgtcctctgctgtgatgaagagcctgctgtgcctgcccagcagcatcagctgtgcccagaccccctgcatccccaaggagggcgccagccccaccagcagcagcaatgaagattctgctgccaacggcagcgctgagaccagcgccctggacaccggcttcagcctgaacctgtctgagctgcgggagtacacagagggcctgacagaggccaaggaggatgatgatggagaccacagcagcctgcagagcggccagagcgtcatcagcctgctgagcagcgaggagctgaagaagctgattgaggaggtgaaggtgctggatgaggccaccctgaagcagctggatggcatccacgtgaccatcctgcacaaggaggagggcgccggcctgggcttcagcctggccggcggcgctgacctggagaacaaggtgatcaccgtgcacagggtcttccccaacggcctggccagccaggagggcaccatccagaagggaaatgaggtgctgagcatcaatggcaagagcctgaagggcaccacccaccatgatgccctggccatcctgcggcaggcccgggagccccggcaggccgtcatcgtgaccaggaagctgaccccagaggccatgccagacctgaacagcagcacagattctgctgccagcgccagcgctgccagtgatgtgtctgtggagagcacagaggccaccgtgtgcaccgtgaccctggaggatgtgggccgggccggcctgcagcctggaagaagagagggcctgcccacccggcggcaggccagccaccactag

SEQ ID NO: 273192 - DNA, 1896 bp, Artificial Sequence
  derived and/or modified sequence
atggactacagcttcgacaccaccgccgaggacccctgggtgcggatctctgactgtattaaaaaccttttcagccctatcatgtctgagaaccacggccacatgccattgcagccgaacgctagtcttaacgaggaggaagggactcagggtcatcccgacggtacacctcccaagctcgatacagccaacgggacacccaaggtgtataagtccgcagattcttcgacagttaaaaaaggcccacctgttgccccaaagcccgcgtggttccggcagtccctgaaaggtctacggaatagggcatccgaccctaggggcctgccagacccggcattgtctacgcaacccgctccagcatctcgcgagcacttgggttcgcatattcgcgcatcttcgtctagctccagcatcagacaacgcatcagcagttttgagacttttggttcgagtcagctcccagataaaggcgcccagaggctctctctccaaccctcttcaggggaggctgctaaacctctaggtaagcatgaggaggggcggtttagcggactgctgggtagaggcgcagcacctacattagtacctcagcaaccagaacaagtgctctcatcaggttccccggcagctagcgaagctcgggatccaggagtatcggagagcccgccacctggcagacaaccaaaccagaaaacactccccccaggcccagaccccctgctgcggttgctgtccacacaggctgaggagtctcagggaccagtcctgaagatgccatcacagagggctcgaagcttccccctgacccggtcccaatcttgcgagaccaagctgctcgacgagaagacatccaagctctactccatatcatcacaggtgtcctcggccgtaatgaagtctctgctgtgcctgccctcgagcattagctgcgcccagacaccttgcatcccaaaggaaggcgccagccccacctctagtagtaacgaagatagtgcggcaaacggttcagctgagacttccgccctagacaccggcttctcgcttaatctgagcgagctgcgggaatacaccgaaggattgaccgaggctaaggaggacgatgacggcgatcactcaagtctacagagcggccaaagtgtgatcagcctgctgagttccgaggagcttaaaaaactgattgaggaggtgaaagtcctcgatgaagcaacattgaagcaactggacggcattcacgtgaccatcctgcacaaggaagagggagcggggctcggcttttctctggctggaggggcagatcttgagaacaaagtcatcacggtgcaccgggtgttccctaacggacttgcctcccaagagggcactattcaaaaagggaatgaggtattgagcataaatggtaaaagcctcaaaggcacaacacatcatgatgcactcgccatactgcggcaggcacgggaaccgaggcaggcagtgatcgttacacgtaagcttacccctgaggctatgccggatctcaactctagcaccgatagcgccgcctctgccagcgctgcttctgacgtgtctgtcgaatcaaccgctgaggcaacagtctgtactgtgacgctggaaaagatgtccgccggactgggttttagtttagaaggaggcaaagggtccctccacggcgacaagcccctgaccatcaaccggattttcaagggagcggcctccgagcagagcgaaaccgtacaacctggggatgaaattcttcaactggggggcacagcaatgcagggtctgactcgcttcgaagcatggaatatcatcaaagctttacctgacggcccggtgacaattgtaattaggcgcaagtcgcttcagtccaaagaaacgactgccgcgggtgactcttag

SEQ ID NO: 273193 - DNA, 1683 bp, Artificial Sequence
  derived and/or modified sequence
atggactacagcttcgacaccaccgccgaggacccctgggtgcggattagtgattgcataaagaacctattttccccaattatgtctgagaaccatgggcacatgcccctgcagcccaatgccagcctgaacgaagaggagggaacacaggggcatcccgacggtacacctcccaagctcgataccgcgaatggaacacctaaagtgtataaaagtgcggacagctctaccgtgaaaaaggggccccctgttgcccccaagccagcgtggttcagacagtctctgaaggggctacggaacagagcatctgatcctagaggcttgcccgacccagcactgtccacgcagcctgcgcccgcatcacgggagcatttgggttcgcacattcgcgcctctagctcaagtagcagcattcgccagcggatcagttcgttcgagacctttggcagcagtcagctgcccgataagggtgctcagcggctttctttgcagccttcctccggagaagccgcgaagcccctcggtaaacacgaggaaggccgcttcagcggccttctcgggcggggggcagcccccactctggtgcctcagcagcctgaacaggtcttgtcctctggatcccctgcagccagcgaagcaagagatcctggcgtctccgagagtccacctcctgggcggcaacccaatcaaaaaaccctgccgccggggcccgacccccttctgagattgctgtccacacaagcggaggaatctcaggggccggtgctgaagatgccgagccagcgtgctaggagtttcccactgacaagatcacagtcctgtgaaactaaacttctggacgaaaaaacttccaagctgtacagcatcagctcacaggtctcatctgctgttatgaagtcactgttgtgcctcccttccagcatctcatgtgcacaaaccccctgtattccgaaagaaggcgctagtcccacctcctcgtctaacgaagacagcgccgctaacggcagcgccgagacatctgctttagacaccggtttcagtctaaacctctctgagctgcgcgaatataccgaaggccttacagaggctaaagaggatgacgacggagaccactcaagcttacagagcggacaaagcgtgatttccctactgtcttctgaagaactgaagaaactgatcgaagaggtcaaggtcctcgatgaggcgacattgaagcagctcgatgggatccacgtcaccatcctacataaggaggaaggggcaggcctcggcttctccctggctggaggagccgacctcgaaaataaggttataacagtccatcgggtgtttcctaatggcctcgcgtcccaggaggggaccatccagaagggcaatgaggtcctatcaatcaacgggaaatctctcaaaggcactactcatcatgacgctctggccattcttcggcaggccagggagcctcggcaggccgtaatcgtgaccaggaagctgactccggaagccatgcccgacctgaacagttccactgactccgctgcgagcgcctctgccgccagcgacgtgtcagtagaatcaacagaagctaccgtctgcaccgtgactctcgaggacgtcggtcgggctggcttacaaccggggcgtcgcgagggcctgcccacgaggagacaagccagccaccattag

SEQ ID NO: 273194 - DNA, 1896 bp, Artificial Sequence
  derived and/or modified sequence
atggactatagctttgatactactgctgaagacccgtgggtgcgcatcagtgactgcatcaagaatctcttcagtcccattatgagcgagaaccatggacacatgccattgcagcctaacgcgtcgctcaatgaggaagagggcacgcaagggcatcctgatggcacccccccaaaactggataccgcaaacggcactccaaaagtttataaaagtgcagattcttcaaccgtcaaaaagggacctcctgtggccccaaaaccggcatggttcagacagagtctgaaggggttgaggaatagagccagcgatcctagagggctgcctgatcccgctctcagtacacagcccgctccagccagtcgagaacacctcggcagtcatatccgggctagttcctcttcgtccagcattcgccaaagaatatcttccttcgagacctttggctcttcacagctcccggacaaaggtgctcagcgcctgagcctacagccctcctctggagaagccgcaaagcccctcggcaagcacgaagaagggcgattcagtgggctgctcggtagaggggctgctcctaccctcgtaccgcagcaaccagagcaagtgctctcctcgggaagccccgctgcaagcgaggcccgtgacccaggcgtaagcgagagtccacctccgggaagacagcctaatcaaaagacgctgccccctggccctgacccattactgagacttctgagcacccaggcggaagaatcacaaggacccgtgctgaagatgccttctcagagagctcggtccttccctctcacaagatcacaatcttgcgagactaagctgcttgatgaaaagacgtccaaattgtacagcatttccagccaggttagttccgccgtgatgaagtccctgctgtgcctgccctcatcgattagctgtgctcagaccccatgcattccaaaagagggtgcctctcctactagttccagcaatgaggacagcgccgcaaatgggtccgcggaaacctcggccctcgatacgggattcagcctaaacctatccgagctccgggaatacaccgagggactgaccgaggccaaagaagatgatgacggggaccactcgtcactgcagtctggccagtccgtgatcagcctcctcagcagcgaggagctgaagaaactgattgaagaggtgaaagtgctcgacgaggcaacactgaagcagctggatggaatacatgtgacgatactgcacaaggaagagggagccggtttgggtttcagccttgccggaggtgcagacctggaaaacaaggtgataaccgtccacagggttttccctaacgggcttgcctcccaagaaggcaccatccaaaagggaaacgaggtgttgagtatcaatgggaaaagcctgaaggggaccacgcatcacgacgcgctggctatattaaggcaagccagggagcctcgacaggcggttatcgtcaccaggaagctcacgcccgaggctatgccagacctgaatagttccaccgactccgctgcttccgcaagtgctgcgagcgacgtcagcgtggaaagtactgcagaagctaccgtgtgtacagtaactctagaaaaaatgagcgctgggctgggattctctctggaagggggaaaaggatctctccacggcgacaagccccttaccattaaccgcatttttaagggagcggcatctgaacagtctgaaacggttcagccaggagatgaaattctgcaattgggtgggacagccatgcagggcctgacaagattcgaggcttggaatatcattaaggccctaccagacggacctgtgactatcgtcatacgtaggaagtcattgcagtccaaagaaacaactgcggcaggggactcatag

SEQ ID NO: 273195 - DNA, 1683 bp, Artificial Sequence
  derived and/or modified sequence
atggattactcattcgacaccaccgcggaggacccgtgggtccgcatcagcgactgcataaaaaatctgttcagccctatcatgtccgaaaatcacggccacatgcctctgcagcctaatgcctcactgaatgaagaagagggtactcaaggccatcctgacggcacccccccaaaactggacactgctaacggcactcctaaagtatataagtccgctgattcttcaacagtgaagaaaggaccaccagttgcgcctaagcctgcctggttccggcagtccctgaagggactgcgcaatagggccagtgaccccaggggacttccagatccagccctctccactcagccggcacctgcgtcccgtgaacatcttggaagtcacattagagcctctagctcttcttcatcaatccgccagagaatctccagcttcgaaacatttggctcgagccagctgccagataagggggcacaacgtctcagcctgcaaccaagtagtggtgaggccgctaagcctttgggcaagcatgaagagggaagatttagcggactgctgggcagaggagccgctccaacccttgtgccccagcaaccagagcaggttctgagttctggaagccccgcagctagcgaagctcgggaccccggtgtgagtgagtccccccctcctggccgtcagccaaaccagaaaactttaccccctgggcctgaccctcttctgcggctattgtctacccaggccgaggaatctcaggggcctgtccttaaaatgccttctcagagggccagaagcttccccttgactcgcagtcagtcctgtgagaccaagttactggatgaaaagaccagcaaactctattcaatttcttcgcaagtgtcttccgccgttatgaagtctcttctgtgtcttccatcaagtatcagttgtgctcagacaccatgtatcccaaaagaaggagcttctccaaccagctcgtccaatgaagatagtgcagctaatggtagcgccgagaccagtgcgttagatacaggctttagtcttaacctctctgagctgcgggagtacaccgagggtctcaccgaggccaaagaggatgatgatggcgatcactcttctctgcagagcggccagagcgtcatatctctcctgagctccgaggaactcaagaagctgatagaagaagtcaaagtgctagacgaggccaccttaaagcagctggacgggattcatgtcactattctgcataaagaggaaggcgctggcctgggattttctttggccggaggagccgatctggaaaataaggtcataactgtccaccgcgttttccccaacgggctggcttcacaggagggtacaatacaaaaggggaacgaagtgttgtctataaatggtaaatccctgaaaggtacaacccaccatgatgccttggccattctgcgtcaggctcgggagccaaggcaggccgttattgttaccagaaaactgaccccggaagctatgcctgatctgaattcaagcacagacagcgcagcaagcgcctctgctgcttctgacgtgtccgttgaaagcacagaagcaactgtgtgtacagtaactctcgaagacgtcgggagagccggactgcagcccggtaggcgagagggccttcccacgcgtcggcaggcctcccatcactag

SEQ ID NO: 273196 - DNA, 2018 bp, Artificial Sequence
  derived and/or modified sequence
agaggcaggctcggatggactatagctttgataccacagccgaagacccttgggttaggatttctgactgcatcaaaaacttatttagccccatcatgagtgagaaccatggccacatgcctctacagcccaatgccagcctgaatgaagaagaagggacacagggccacccagatgggaccccaccaaagctggacaccgccaatggcactcccaaagtttacaagtcagcagacagcagcactgtgaagaaaggtcctcctgtggctcccaagccagcctggtttcgccaaagcttgaaaggtttgaggaatcgtgcttcagacccaagagggctccctgatcctgccttgtccacccagccagcacctgcttccagggagcacctaggatcacacatccgggcctcctcctcctcctcctccatcaggcagagaatcagctcctttgaaacctttggctcctctcaactgcctgacaaaggagcccagagactgagcctccagccctcctctggggaggcagcaaaacctcttgggaagcatgaggaaggacggttttctggactcttggggcgaggggctgcacccactcttgtgccccagcagcctgagcaagtactgtcctcggggtcccctgcagcctccgaggccagagacccaggtgtgtctgagtcccctcccccagggcggcagcccaatcagaaaactctcccccctggcccggacccgctcctaaggctgctgtcaacacaggctgaggaatctcaaggcccagtgctcaagatgcctagccagcgagcacggagcttccccctgaccaggtcccagtcctgtgagacgaagctacttgacgaaaagaccagcaaactctattctatcagcagccaagtgtcatcggctgtcatgaaatccttgctgtgccttccatcttctatctcctgtgcccagactccctgcatccccaaggaaggggcatctccaacatcatcatccaacgaagactcagctgcaaatggttctgctgaaacatctgccttggacacagggttctcgctcaacctttcagagctgagagaatatacagagggtctcacggaagccaaggaagacgatgatggggaccacagttcccttcagtctggtcagtccgttatctccctgctgagctcagaagaattaaaaaaactcatcgaggaggtgaaggttctggatgaagcaacattaaagcaattagacggcatccatgtcaccatcttacacaaggaggaaggtgctggtcttgggttcagcttggcaggaggagcagatctagaaaacaaggtgattacggttcacagagtgtttccaaatgggctggcctcccaggaagggactattcagaagggcaatgaggttctttccatcaacggcaagtctctcaaggggaccacgcaccatgatgccttggccatcctccgccaagctcgagagcccaggcaagctgtgattgtcacaaggaagctgactccagaggccatgcccgacctcaactcctccactgactctgcagcctcagcctctgcagccagtgatgtttctgtagaatctacagaggccacagtctgcacggtgacactggaagatgtcggcagggctgggcttcagcctggaaggagggaagggctccctacacggagacaagcctctcaccattaacaggattttcaaaggtgtggggtgtgtctggttctttgcgtgctctccagttgtgggcatgtggccaggcccccaaaaggcttctgggcactttctgggctatgttgtttcccacaactccatgtcctcttcataggcatgctggtccttttagggctcaattctgctttttctactttttctcctttgctcagacatcccctcaatcccccctctgttttgatgggtcttcaaaaatacctaagtcctgggcttggttcgggttggcagggccaggactctagagtggggcagtgaggcactggcctgtggggcagaatt

SEQ ID NO: 273197 - protein, 293 aa, Artificial Sequence
  derived and/or modified sequence
MNIRGAPDLGQPSDDPSSGGERERIRQRMKMVIGQLEGILRELKEVAKELREVVSQIDKLTSDFDFELEPDDWTTATVSSTSSSDKAGMGGPFDLGHLDFMTADILSDSWEFCSFLDVSTPSDSVDGPESTRPGAGPDYRLMNGGTPIPNGPRVETPDSSSEEAFGAGPTVKSQLPQRTPGTRERVRFSDKVLYHALCCDDEEGDGEQEVEEEEVGLPPEPAHTEAHAGPHKPSPAPYKSRRSPLTSRHSGSTLAPEQTRRVTRNSSTQTVSDKSTQTVLPYTATRQKARGKN

SEQ ID NO: 273198 - DNA, 1344 bp, Artificial Sequence
  derived and/or modified sequence
ctgtgttcaagctcaggcagagatcagctctgcacacccacaggcacttcaagacctggaggccactcctgggacccaaggtccctccccctcctctcctgtgtcctcaccttgaccccctctgctagactctgtctccctctgggtgtcccactctccacccagaggcagaggaggctgggtggcagggggcaggggctggttgagggccgcccagggccagggtgggctggggggccgttaaaatgtggagctctgcccagccgaggggggctccgtggaggcagacgcagtgtgtgcccagctggggggagtatgggcaggcctgcggccacgtggtaaacgatgaacattcggggcgccccggacctcgggcagcccagtgacgaccccagcagtggtggtgagcgggagcggattcgacagcgcatgaagatggtcatcgggcagcttgagggcatccttcgcgagctcaaggaggtggccaaggagctgagggaggtggtgagccagatcgataagctaacctcggacttcgactttgaactggagccggacgactggaccacggccactgtgagcagcacctctagcagtgacaaggcgggcatgggtggcccctttgacctgggccacctggacttcatgacagccgatatcctctcagacagctgggagttctgctccttcctggacgtctctaccccctcggactccgtggatggtcccgagtcgactcggccaggggctggccctgactaccgcctcatgaatggtggcacgcccatccccaatgggccacgagtggagaccccagactcctccagtgaggaggcctttggtgctggccccacggtgaagagccagctgccccagcggaccccagggacacgggagagggtgcggttcagtgacaaagtgctctaccatgctctgtgctgtgacgatgaggagggggacggtgagcaggaggtggaggaggaagaagtgggcttgccccctgagcctgcccatacagaggcccatgcaggcccccacaagccctccccagccccctacaagtcacggcgctctccactgaccagccgccactcaggctctaccttggcccctgaacagactcgaagggtcacgaggaacagcagcacccagacagtgtcagacaagagcacgcagacggttctgccctacacagccactagacagaaagccagggggaaaaactaggggccggggagggggccgggggcggtgggcacatagagctataaataaatatatatatatatatatatatatatatatttaaacaaatgaagtcataataaaatttaaaaatgctaa

SEQ ID NO: 273199 - DNA, 2204 bp, Artificial Sequence
  derived and/or modified sequence
gagccgtgggagcggtctcgcccagggccgaccgcggggctgggctgagcagaccctcgcggccgctccggacgccgcgggtgccggggcacggacgttctgggtccgggctgagcgcgtcccgggcgcccggcggtgccagctcactccgggcggggtagggcagggcagaccccagcggaacacggacccggccgatctggactggacagagcgaatcccggacggtgcagagcccggggaatgccgggcgtgggctgaggggatcccggcgccctcccagccctccgactttggctcacgcgctgggacctgcccggcgtctcctcggcctccccgcgccccggtcacctgtggcctcggagccccaaatctgccggaccctcgctcattcccgaccccgagcctggagaggcttgagaaagatttttcctgcccccttccctggagcgcggaggccccgccccctcccaccgcccagatgtctccggtcacggctcggaggacctccctgaggcccggggccgaagggtccagagagagaagcccgccctagggagccttgggggccccccaactccgtcttggggcttggcccccgacgctgcttggagggaaggccggtgcccccaccctcgggggctgccctcttccaatccagctccctccccagagctgcccatatccggagccccttccacatctggaagaccctggccaccatccctctgcaggtgtcagttgcatccagagacctctgcctttgcaactgcctaggagttgtgaggggatccctgctgccttcccccatcccaagggcatctcttacccttagtccctgcagagtcatccccctgcctctgtgttcaagctcaggcagagatcagctctgcacacccacaggcacttcaagacctggaggccactcctgggacccaaggtccctccccctcctctcctgtgtcctcaccttgaccccctctgctagactctgtctccctctgggtgtcccactctccacccagaggcagaggaggctgggtggcagggggcaggggctggttgagggccgcccagggccagggtgggctggggggccgttaaaatgtggagctctgcccagccgaggggggctccgtggaggcagacgcagtgtgtgcccagctggggggagtatgggcaggcctgcggccacgtggtaaacgatgaacattcggggcgccccggacctcgggcagcccagtgacgaccccagcagtggtggtgagcgggagcggattcgacagcgcatgaagatggtcatcgggcagcttgagggcatccttcgcgagctcaaggaggtggccaaggagctgagggaggtggtgagccagatcgataagctaacctcggacttcgactttgaactggagccggacgactggaccacggccactgtgagcagcacctctagcagtgacaaggcgggcatgggtggcccctttgacctgggccacctggacttcatgacagccgatatcctctcagacagctgggagttctgctccttcctggacgtctctaccccctcggactccgtggatggtcccgagtcgactcggccaggggctggccctgactaccgcctcatgaatggtggcacgcccatccccaatgggccacgagtggagaccccagactcctccagtgaggaggcctttggtgctggccccacggtgaagagccagctgccccagcggaccccagggacacgggagagggtgcggttcagtgacaaagtgctctaccatgctctgtgctgtgacgatgaggagggggacggtgagcaggaggtggaggaggaagaagtgggcttgccccctgagcctgcccatacagaggcccatgcaggcccccacaagccctccccagccccctacaagtcacggcgctctccactgaccagccgccactcaggctctaccttggcccctgaacagactcgaagggtcacgaggaacagcagcacccagacagtgtcagacaagagcacgcagacggttctgccctacacagccactagacagaaagccagggggaaaaactaggggccggggagggggccgggggcggtgggcacatagagctataaataaatatatatatatatatatatatatatatatttaaacaaatgaagtcataataaaatttaaaaatgctaa

SEQ ID NO: 273200 - DNA, 882 bp, Artificial Sequence
  derived and/or modified sequence
atgaacatcagaggcgcccccgacctgggccagcccagcgacgaccccagcagcggcggcgagagagagagaatcagacagagaatgaagatggtgatcggccagctggagggcatcctgagagagctgaaggaggtggccaaggagctgagagaggtggtgagccagatcgacaagctgaccagcgacttcgacttcgagctggagcccgacgactggaccaccgccaccgtgagcagcaccagcagcagcgacaaggccggcatgggcggccccttcgacctgggccacctggacttcatgaccgccgacatcctgagcgacagctgggagttctgcagcttcctggacgtgagcacccccagcgacagcgtggacggccccgagagcaccagacccggcgccggccccgactacagactgatgaacggcggcacccccatccccaacggccccagagtggagacccccgacagcagcagcgaggaggccttcggcgccggccccaccgtgaagagccagctgccccagagaacccccggcaccagagagagagtgagattcagcgacaaggtgctgtaccacgccctgtgctgcgacgacgaggagggcgacggcgagcaggaggtggaggaggaggaggtgggcctgccccccgagcccgcccacaccgaggcccacgccggcccccacaagcccagccccgccccctacaagagcagaagaagccccctgaccagcagacacagcggcagcaccctggcccccgagcagaccagaagagtgaccagaaacagcagcacccagaccgtgagcgacaagagcacccagaccgtgctgccctacaccgccaccagacagaaggccagaggcaagaactag

SEQ ID NO: 273201 - DNA, 882 bp, Artificial Sequence
  derived and/or modified sequence
atgaacatcaggggcgctcccgaccttggacagccctcagatgaccccagttcagggggagagcgggagaggatccggcagcggatgaagatggtgatcgggcaactggaaggcatactgcgcgagctgaaagaggtcgccaaggagctgcgcgaggtggtgtcccaaatcgataaactcacttctgatttcgatttcgagctagagcccgacgactggacaaccgccacggtctcaagtacatctagctcagacaaggcaggcatgggcggtccattcgacttaggccatctcgacttcatgacagccgacatcctttccgacagctgggaattctgctcattcctggatgtgagcacgcccagtgactccgtggacggtccagagtccacccgaccgggggcaggccctgattacaggctcatgaatgggggaacccccatccccaatgggccgagggtcgaaaccccagactcttcttccgaggaggctttcggtgctgggcccaccgtgaagagtcagctcccccagcgcaccccagggaccagagagcgtgtcaggttttcagataaagtcctgtaccacgccctctgctgcgacgacgaggagggagacggcgaacaggaggtggaggaggaagaggtagggcttccacctgagcctgcccacacagaagcccacgcgggaccacataagccctccccggccccctataagagcagaagaagcccactgaccagcagacactccggatctaccctcgcaccagagcaaacccgtcgagttacaagaaactcttctacacaaacagtctccgacaaatcgacacagacagtccttccctatacggctacgcggcagaaagcccgcggtaaaaattag

SEQ ID NO: 273202 - DNA, 882 bp, Artificial Sequence
  derived and/or modified sequence
atgaacatccgcggcgcccctgacctcggtcagccctccgatgatcccagcagcggtggtgaaagggagaggatcaggcagaggatgaaaatggttattgggcaactggaaggaatcctgcgcgagcttaaagaggtggccaaggaactacgcgaggtggtttcccagatcgataagctgacttcagattttgattttgaactcgagcctgacgactggactactgcaacggtttcaagtacaagctccagcgacaaggccggcatgggcggtccgttcgatttgggccaccttgattttatgaccgcggatatactctccgattcatgggaattctgcagtttcctcgatgtgtccacacccagtgattcagtcgacggccccgaaagcacccgccccggtgccggtccagactaccgcctcatgaatggaggcacacccatcccaaatggcccaagagtggagacacccgacagcagtagcgaggaggcctttggagctgggcccactgtgaagtctcagctgccacagaggactccagggaccagagagagggtgcgtttctcggacaaagtcctctaccacgccctttgctgtgatgacgaagagggggatggagaacaggaggtcgaagaagaggaagtggggctgcccccagaacccgcgcatacagaagcccacgctggacctcacaagccaagtcccgcgccgtataaatccagacggagtcccctgaccagccgacattctggttctacactggccccagaacagacacgcagggtgacgcggaacagcagcacgcaaaccgtgtccgataagagcacgcagactgttctcccttataccgccacgcgacagaaagcgcgcgggaaaaattag

SEQ ID NO: 273203 - DNA, 882 bp, Artificial Sequence
  derived and/or modified sequence
atgaacatccggggggccccagacctgggccagcccagtgatgaccccagcagcggcggggagcgggagcgcatccggcagaggatgaagatggtgattggccagctggagggcatcctgcgggagctgaaggaggtggccaaggagctgcgggaggtggtgtcccagattgacaagctgaccagtgactttgattttgagctggagccagatgactggaccacagccaccgtgagcagcaccagcagcagtgacaaggccggcatgggcggcccctttgacctgggccacctggacttcatgacagctgacatcctgagtgacagctgggagttctgcagcttcctggatgtgtccacccccagcgacagcgtggatggccctgagagcaccaggcctggagctggccctgactaccgcctgatgaatggaggcacccccatccccaacggcccccgggtggagaccccagacagcagcagcgaggaggcctttggagctggccccaccgtgaagagccagctgccccagaggaccccaggcacccgggagcgggtgcgcttcagtgacaaggtgctgtaccacgccctgtgctgtgatgatgaggagggagatggagagcaggaggtggaggaggaggaggtgggcctgcccccagagcccgcccacacagaggcccacgccggcccccacaagcccagccctgccccctacaagagcagaagaagccccctgaccagccgccacagcggcagcaccctggcccctgagcagacccggcgggtgaccaggaacagcagcacccagacagtgtctgacaagagcacccagacagtgctgccctacacagccacccggcagaaggcccggggcaagaactag

SEQ ID NO: 273204 - DNA, 882 bp, Artificial Sequence
  derived and/or modified sequence
atgaacatccggggcgcccccgacctgggccagcccagcgacgaccccagctctggcggtgaaagggagcggatcaggcaacgcatgaagatggtgatcggacaacttgagggcatcctgcgtgagctgaaagaggtggctaaggaattacgtgaggtggtttctcagattgataagctgacatctgactttgattttgagctggagccagacgattggactacagcaaccgtcagttcaactagctcaagtgataaggccggcatgggcgggccctttgatttagggcaccttgacttcatgacggcagacatcctgtctgactcctgggagttctgctctttcctagacgtcagcacgccaagtgactcggtggacggacccgaatccacccgcccgggggctgggccagactacaggctgatgaacggaggtaccccgataccaaacggtccacgggttgagacccccgacagcagttccgaggaggcatttggagcaggaccaaccgtgaagagccagttgccgcagagaacccctggtactcgagaaagagtacggttcagcgacaaggtgctgtaccatgcactgtgctgcgacgatgaagagggggacggagaacaggaggtcgaggaggaagaggtaggactgccaccagagcccgcgcatacggaagcgcacgcggggccccacaaaccatcccctgccccgtataagtcccgaagatcccctttgacatcccgtcattccggatctaccttagcccccgagcagactcgtcgtgtgacgcggaatagcagcacgcagacggttagcgacaaatcaacccagacagtgcttccctatacagcaacaaggcagaaagccaggggaaaaaattag

SEQ ID NO: 273205 - DNA, 882 bp, Artificial Sequence
  derived and/or modified sequence
atgaacatccggggcgcccccgacctgggccagcccagcgacgacccctctagtggaggggagcgggagaggattcggcagcgtatgaagatggtgatcggtcagctggaaggcatcctgcgcgaactgaaggaggttgccaaggagttacgggaagtagtttcccaaattgataagctgactagcgattttgatttcgagctcgaaccagacgactggaccactgctaccgtatcctcaacaagtagcagcgacaaggctggcatgggcgggccctttgacttggggcatctggacttcatgacagccgatatcttgagtgacagttgggagttctgctcatttctagatgtgagtactccctcagattctgtcgatggacctgaaagtacacggccaggggctggccctgattacagactgatgaacggcggcaccccgatacctaatggcccacgcgtggaaacacccgattcctcaagtgaagaggcatttggggctggccccactgtgaaaagtcagctcccacagcggactcccggcacgagagaacgtgtgcgtttctctgacaaggtactgtatcacgccctttgctgtgacgatgaggaaggagacggagagcaggaggttgaggaggaggaagtaggactgcctcccgagccagcccacacagaagctcacgctggaccccacaaaccttcacccgccccatataaatctcggcggtctccgctcacctctagacacagtggctctaccctggcacctgagcaaacaagaagggtgacaagaaacagctcaacccagactgtgagcgacaaaagcacgcaaacggttcttccatacacagcgaccaggcaaaaagcccgcggaaaaaattag

SEQ ID NO: 273206 - DNA, 882 bp, Artificial Sequence
  derived and/or modified sequence
atgaacatcaggggagcccctgatctcggccagcccagcgacgatccgagttctggcggagagagagaaaggatacgccagcgtatgaagatggtgatcggtcagctggagggcattttgcgtgaactcaaagaggtggctaaagagctacgcgaagtggtttcccagattgacaagctgacatcggattttgattttgagctagaaccggatgattggaccaccgcaactgtatcctccacttcctcttctgacaaagccggaatgggcggacccttcgacttgggccacctggattttatgactgctgacatcctgtcggatagttgggagttttgcagttttttggatgtgtcgacacctagtgacagcgtggacggccctgagtcgactaggcctggtgcgggacccgattacagacttatgaacggtggtaccccaatcccaaatggaccgcgagtcgaaacacccgattccagttccgaggaagctttcggcgctggccctacggtgaagtcccagctgccccaaagaacccctggaactcgagagagagttcgcttcagcgataaggtactgtaccatgctctgtgctgcgatgatgaggagggagatggtgaacaggaagtggaagaggaagaagttgggctacctcctgagccagctcacaccgaggcgcacgcgggtccccacaagcccagccctgccccatacaaaagcagacggagccctctgacttctaggcactccgggtccactcttgccccagagcagactagacgcgtaaccagaaactcttctactcagaccgtgagcgacaaatccacccaaacggtcctcccttacaccgctactcgccagaaggcaagaggaaagaattag

SEQ ID NO: 273207 - DNA, 882 bp, Artificial Sequence
  derived and/or modified sequence
atgaacatacgcggagctcccgatctggggcaaccatcggatgacccatcaagcggcggagaaagggaaaggattagacaaaggatgaagatggtcattgggcaactcgaaggaatcctgcgcgagctgaaggaggtcgccaaggagcttagagaggtggtgagccagattgataaactgacgtcagactttgacttcgagctggagcccgacgactggaccacagccacagtgtcttctacatcttccagtgacaaggccggtatgggcggaccctttgatttaggtcacctcgatttcatgacagcggatatcctatctgattcatgggagttctgtagcttcctggatgtcagtaccccttcggactccgtcgacggcccagagtccacccgaccgggagcagggcctgactacagattaatgaatggagggactcccatccccaacggccctcgcgtcgaaacacctgatagctcctctgaagaggccttcggtgccggtccgacagtgaaatcacaactgccccagcgcacacctggaacccgagagcgggtgcggttctctgacaaggtgctgtaccatgccctgtgctgcgatgacgaggaaggcgatggtgaacaggaagtggaggaagaagaagtgggattgccacccgaacccgctcacaccgaggcccatgccggaccccacaaaccctccccggcaccttacaagagccgaaggtcccccttgaccagccgccattcagggtcaactctcgctcctgaacagacgcgtagggttacgcgcaattcctcgacccagacagtgtctgacaaaagtacacaaactgtgctcccttataccgctactcgacagaaagccaggggaaagaactag

SEQ ID NO: 273208 - protein, 499 aa, Artificial Sequence
  derived and/or modified sequence
MDTSPLCFSILLVLCIFIQSSALGQSLKPEPFGRRAQAVETNKTLHEMKTRFLLFGETNQGCQIRINHPDTLQECGFNSSLPLVMIIHGWSVDGVLENWIWQMVAALKSQPAQPVNVGLVDWITLAHDHYTIAVRNTRLVGKEVAALLRWLEESVQLSRSHVHLIGYSLGAHVSGFAGSSIGGTHKIGRITGLDAAGPLFEGSAPSNRLSPDDANFVDAIHTFTREHMGLSVGIKQPIGHYDFYPNGGSFQPGCHFLELYRHIAQHGFNAITQTIKCSHERSVHLFIDSLLHAGTQSMAYPCGDMNSFSQGLCLSCKKGRCNTLGYHVRQEPRSKSKRLFLVTRAQSPFKVYHYQFKIQFINQTETPIQTTFTMSLLGTKEKMQKIPITLGKGIASNKTYSFLITLDVDIGELIMIKFKWENSAVWANVWDTVQTIIPWSTGPRHSGLVLKTIRVKAGETQQRMTFCSENTDDLLLRPTQEKIFVKCEIKSKTSKRKIR

SEQ ID NO: 273209 - DNA, 1500 bp, Artificial Sequence
  derived and/or modified sequence
atggatactagtccactgtgctttagtattctgttggtcttgtgtattttcatccagtcaagtgccctcggacagagtctgaagccagaaccttttggacgcagggcccaggctgtcgagacaaacaaaacactgcatgagatgaagacaaggttcctgctgttcggggaaacaaaccaggggtgccagatccgtatcaaccacccagatacacttcaggagtgcgggttcaatagtagccttcctctggtaatgatcattcacggctggagtgttgatggggtgcttgagaattggatttggcaaatggtggccgccctgaagtctcagcctgctcagcccgtgaatgtgggccttgtcgattggatcacccttgctcatgatcactataccatcgctgtgaggaatacccgcctggtaggtaaagaggtagccgctctgctgaggtggctggaggaaagcgtccagctgagcaggtcacatgttcatctcataggctactctttgggagcccatgtctctggcttcgcaggcagctcaatcgggggcacacacaagatcgggcgcattaccggactggacgctgccggtcccctgttcgaaggctccgcccctagtaatcgcctctcgccagacgacgcaaattttgttgatgctatccacaccttcaccagggagcatatgggactctcagtgggaataaagcagcctatcggtcactacgacttttatcccaacggaggttcattccagccaggttgccacttcctggagctttaccggcatattgcccaacacggcttcaatgctatcacacaaactatcaagtgtagtcacgagagatccgtgcacttgtttattgacagtctcctgcatgctggaacccagagcatggcatacccatgtggcgacatgaacagtttttcacagggtctatgcctgtcctgtaagaaggggcgatgcaatacactggggtaccatgtcagacaagagcccagaagcaaatcaaaacgtctcttcttggtaactcgtgctcaatcacccttcaaggtctaccactaccaatttaagatacagtttatcaaccagacagagacccctatccagacaacctttacaatgtcattgctcggaacaaaggaaaagatgcaaaagattcccattacactaggcaagggcattgcctctaacaagacctacagctttttaattacactggatgtggacatcggagagctgatcatgatcaagtttaagtgggaaaattccgctgtgtgggcgaatgtctgggatacagtgcaaacaataatcccttggagcacaggtcctcgacactcaggactcgttctgaagacaatccgtgtaaaagctggcgagacccagcagcgtatgactttctgtagcgagaataccgatgacctgcttctcaggcctacccaagagaagattttcgtgaaatgcgagataaaatccaaaaccagcaagagaaaaatccgatag

SEQ ID NO: 273210 - DNA, 1500 bp, Artificial Sequence
  derived and/or modified sequence
atggatacaagccccctatgcttctcaatcctgttagttctgtgtattttcattcagagctctgcccttggccaatctctaaaaccagagccattcggtcgtagagctcaggccgtcgaaacgaataagactctccatgaaatgaagactcgatttctgctctttggggagaccaatcaaggctgccaaatcaggattaaccacccagatacacttcaggaatgcgggttcaattctagtttgcccctggttatgatcattcatggctggagtgtggatggcgtgctggaaaactggatatggcagatggttgctgcccttaagtcccagcccgcccagcccgtcaatgtaggtctggtcgactggattacgctcgctcatgatcactatacaatagcagtgagaaatacccggctcgtaggcaaggaggtagcggcactgctccgctggctggaggaatctgtgcagttatctagaagtcatgtccatctaataggatactctttaggggcacacgtgagtggctttgccggctccagtatcggtggaacccacaagatcggcaggatcactgggctagatgctgcgggtcctcttttcgagggctccgcacccagcaatcgtctgtcccccgatgatgcaaatttcgtggacgctattcatactttcactcgcgagcacatgggactgagcgtcgggatcaagcagcccattggccactatgatttttacccgaacggaggttctttccagcctggatgtcacttcttggagctgtaccggcacattgctcaacatgggtttaatgccattactcagaccattaagtgctcacatgagcggtcagtgcatctgttcatcgactcactgctccacgctggtactcagtccatggcctacccatgcggcgacatgaactctttcagccagggtttatgcttatcttgtaagaaaggtcgatgcaatactctgggctatcacgtgaggcaggagccacgttcaaagtcaaaacgcttgttcctggtgacccgtgcacagtccccattcaaggtgtatcattatcagtttaaaattcagtttatcaatcaaacagaaacgcccatccagacaacattcacgatgtcactgctgggaaccaaagagaagatgcagaagattccgattacactgggcaaggggattgcatctaataaaacatattcctttctgattaccctggacgtggacatcggggagctcattatgataaagttcaaatgggaaaatagcgcagtgtgggcgaatgtgtgggataccgtgcaaaccattattccatggtctacaggacctcgtcactccggcctggtactgaagaccattagggtcaaggcaggagagacacagcagcgcatgaccttctgctccgagaacaccgacgacttgctgctgcgccccacccaggagaagatttttgtgaagtgtgaaattaaaagtaagacttcgaaaagaaaaatccgctag

SEQ ID NO: 273211 - DNA, 1500 bp, Artificial Sequence
  derived and/or modified sequence
atggacaccagccccctgtgcttcagcatcctgctggtgctgtgcatcttcatccagagcagcgccctgggccagagcctgaagccagagcccttcggccggcgggcccaggccgtggagaccaacaagaccctgcacgagatgaagacccgcttcctgctgtttggagagaccaaccagggctgccagatccgcatcaaccacccagacaccctgcaggagtgtggcttcaacagcagcctgcccctggtgatgatcatccacggctggagcgtggatggagtgctggagaactggatctggcagatggtggccgccctgaagagccagcctgcccagcctgtgaatgtgggcctggtggactggatcaccctggcccatgaccactacaccatcgctgtgaggaacacccggctggtgggcaaggaggtggccgccctgctgcgctggctggaggagagcgtgcagctgagccgcagccacgtgcacctgattggctacagcctgggcgcccacgtgtctggctttgctggcagcagcattggaggcacccacaagattggccgcatcaccggcctggatgctgctggccccctgtttgagggcagcgcccccagcaaccggctgagcccagatgatgccaactttgtggatgccatccacaccttcacccgggagcacatgggcctgtctgtgggcatcaagcagcccatcggccactatgacttctaccccaacggcggcagcttccagcccggctgccacttcctggagctgtaccgccacatcgcccagcacggcttcaatgccatcacccagaccatcaagtgcagccatgagaggtctgtgcacctgttcatcgacagcctgctgcatgctggcacccagagcatggcctacccctgtggggacatgaacagcttcagccagggcctgtgcctgagctgcaagaagggccgctgcaacaccctgggctaccacgtgcggcaggagcccaggagcaagagcaagaggctcttcctggtgacccgggcccagagccccttcaaggtgtaccactaccagttcaagatccagttcatcaaccagacagagacccccatccagaccaccttcaccatgagcctgctgggcaccaaggagaagatgcagaagatccccatcaccctgggcaagggcatcgccagcaacaagacctacagcttcctgatcaccctggatgtggacatcggggagctgatcatgatcaagttcaagtgggagaacagcgctgtgtgggccaacgtgtgggacacagtgcagaccatcatcccctggagcacaggccccaggcacagcggcctggtgctgaagaccatccgggtgaaggccggggagacccagcagaggatgaccttctgcagtgaaaatacagatgacctgctgctgcggcccacccaggagaagatctttgtgaagtgtgagatcaagagcaagaccagcaagaggaagatcagatag

SEQ ID NO: 273212 - DNA, 1782 bp, Artificial Sequence
  derived and/or modified sequence
ttttattctcaaaatgtgtcaggataagaagcacttctgtaaatcgacctttttaaaatagatataattagatttgcagttgggggcagtaaagaaagggtctgaacagtggataacatgttgagaggttaattattaatgggcagtcttccctaacaaagtatctaataggcattgtggtctctttggcttcagaaattaccaagaaagcctggaccccgggtgaaacggagaaatggacacaagtcccctgtgtttctccattctgttggttttatgcatctttatccaatcaagtgcccttggacaaagcctgaaaccagagccatttggaagaagagctcaagctgttgaaacaaacaaaacgctgcatgagatgaagaccagattcctgctctttggagaaaccaatcagggctgtcagattcgaatcaatcatccggacacgttacaggagtgcggcttcaactcctccctgcctctggtgatgataatccacgggtggtcggtggacggcgtgctagaaaactggatctggcagatggtggccgcgctgaagtctcagccggcccagccagtgaacgtggggctggtggactggatcaccctggcccacgaccactacaccatcgccgtccgcaacacccgccttgtgggcaaggaggtcgcggctcttctccggtggctggaggaatctgtgcaactctctcgaagccatgttcacctaattgggtacagcctgggtgcacacgtgtcaggatttgccggcagttccatcggtggaacgcacaagattgggagaatcacagggctggatgccgcgggacctttgtttgagggaagtgcccccagcaatcgtctttctccagatgatgccaattttgtggatgccattcatacctttacccgggagcacatgggcctgagcgtgggcatcaaacagcccataggacactatgacttctatcccaacgggggctccttccagcctggctgccacttcctagagctctacagacatattgcccagcacggcttcaatgccatcacccagaccataaaatgctcccacgagcgatcggtgcaccttttcatcgactccttgctgcacgccggcacgcagagcatggcctacccgtgtggtgacatgaacagcttcagccagggcctgtgcctgagctgcaagaagggccgctgcaacacgctgggctaccacgtccgccaggagccgcggagcaagagcaagaggctcttcctcgtaacgcgagcccagtcccccttcaaagtttatcattaccagttcaagatccagttcatcaaccaaactgagacaccaatacaaacaacttttaccatgtcactactcggaacaaaagagaaaatgcagaaaattcccatcactctgggcaaaggaattgctagtaataaaacgtattcctttcttatcacgctggatgtggatatcggcgagctgatcatgatcaagttcaagtgggaaaacagtgcagtgtgggccaatgtctgggacacggtccagaccatcatcccatggagcacagggccgcgccactcaggcctcgttctgaagacgatcagagtcaaagcaggagaaacccagcaaagaatgacattttgttcagaaaacacagatgacctactacttcgcccaacccaggaaaaaatcttcgtgaaatgtgaaataaagtctaaaacatcaaagcgaaagatcagatgagatttaatgaagacccagtgtaaagaataaatgaatcttactcctta

SEQ ID NO: 273213 - DNA, 2161 bp, Artificial Sequence
  derived and/or modified sequence
gatgagaattgccaaggcacagcaaagcctgcagcttccatacccgtcatgagagcaaataacttatttgtaaacctaagcacttaattaactaaatggaaagcaaggcagtgagtgattcctgacatggccgaatttaagtcaagctgtgaagctccaggtgcagccagaaatggagatggacaacttgaactgaaccctgagagcttctaaaaaggctttggaccactgcttctcagcagtttttcttacggagtctctctgtgtcgcccaggctggagtacaatggcgcgatctcagttcactgcaacctccgcctcccaggttcaagcgattctcctgcctcagcttcctgagtagctgggattacaggcactcacctccacgcccagctaacttttgtatttttagtacagatggggtttcaccatgttggtcaggctggtctcgaactcctgacctcgtgatccgccctcctcgcctcccaaagtgctgtgattacaggagtgagccaccgctcctggccagaaatctcttctttattatgtctactgtccgttatccaactccagaagaaattaccaagaaagcctggaccccgggtgaaacggagaaatggacacaagtcccctgtgtttctccattctgttggttttatgcatctttatccaatcaagtgcccttggacaaagcctgaaaccagagccatttggaagaagagctcaagctgttgaaacaaacaaaacgctgcatgagatgaagaccagattcctgctctttggagaaaccaatcagggctgtcagattcgaatcaatcatccggacacgttacaggagtgcggcttcaactcctccctgcctctggtgatgataatccacgggtggtcggtggacggcgtgctagaaaactggatctggcagatggtggccgcgctgaagtctcagccggcccagccagtgaacgtggggctggtggactggatcaccctggcccacgaccactacaccatcgccgtccgcaacacccgccttgtgggcaaggaggtcgcggctcttctccggtggctggaggaatctgtgcaactctctcgaagccatgttcacctaattgggtacagcctgggtgcacacgtgtcaggatttgccggcagttccatcggtggaacgcacaagattgggagaatcacagggctggatgccgcgggacctttgtttgagggaagtgcccccagcaatcgtctttctccagatgatgccaattttgtggatgccattcatacctttacccgggagcacatgggcctgagcgtgggcatcaaacagcccataggacactatgacttctatcccaacgggggctccttccagcctggctgccacttcctagagctctacagacatattgcccagcacggcttcaatgccatcacccagaccataaaatgctcccacgagcgatcggtgcaccttttcatcgactccttgctgcacgccggcacgcagagcatggcctacccgtgtggtgacatgaacagcttcagccagggcctgtgcctgagctgcaagaagggccgctgcaacacgctgggctaccacgtccgccaggagccgcggagcaagagcaagaggctcttcctcgtaacgcgagcccagtcccccttcaaagtttatcattaccagttcaagatccagttcatcaaccaaactgagacaccaatacaaacaacttttaccatgtcactactcggaacaaaagagaaaatgcagaaaattcccatcactctgggcaaaggaattgctagtaataaaacgtattcctttcttatcacgctggatgtggatatcggcgagctgatcatgatcaagttcaagtgggaaaacagtgcagtgtgggccaatgtctgggacacggtccagaccatcatcccatggagcacagggccgcgccactcaggcctcgttctgaagacgatcagagtcaaagcaggagaaacccagcaaagaatgacattttgttcagaaaacacagatgacctactacttcgcccaacccaggaaaaaatcttcgtgaaatgtgaaataaagtctaaaacatcaaagcgaaagatcagatgagatttaatgaagacccagtgtaaagaataaatgaatcttactcctt

SEQ ID NO: 273214 - DNA, 1500 bp, Artificial Sequence
  derived and/or modified sequence
atggacaccagccccctgtgcttcagcatcctgctggtgctgtgcatctttatccagtccagtgcactgggacagagcctcaaacccgagccattcggaagacgcgctcaagccgtggaaaccaacaaaaccctgcatgagatgaagacgcggtttcttttgttcggtgaaacaaatcagggttgccagattaggataaatcacccagacaccttgcaggaatgtggttttaattcttctctgcccctggtgatgataattcacgggtggtcagtggacggtgtgcttgagaattggatttggcagatggtggctgcacttaagagtcagccagcccaacctgtcaacgtcgggctggtggactggatcactctggcccacgaccactataccatagccgtcagaaatacacgtcttgtcgggaaggaggtggctgcgctcctcaggtggcttgaggaatccgttcaattgagcagatcccatgtgcatctgataggttactcactgggcgcccatgtgagcgggtttgccggcagcagcatcggagggactcataaaattgggaggataaccggcctggacgctgcaggacctttatttgaaggctctgccccatctaatcggctgtccccagatgatgccaacttcgtcgatgctattcacaccttcactcgagagcacatgggactcagcgtcggcatcaagcaacccatcggtcactacgacttctatcctaatggcggcagtttccaaccaggatgtcactttctggagttatatcggcacatagcccagcatgggtttaacgcaatcacccagactattaagtgtagtcatgaaagatccgtccacttatttatagactccctcttacatgccggcacgcagagcatggcatatccctgtggggatatgaattcattctcacagggactctgcttgtcatgcaaaaagggtcgatgcaacaccttgggctatcacgtgcgacaggagcctcgttccaagagtaagcgactatttttagtaactcgggctcagtctcccttcaaagtgtaccattaccagtttaagattcaatttatcaaccagactgagactcccattcagacaacattcaccatgtccttactggggactaaggagaaaatgcagaaaatccccattactctcggaaaggggatagcctccaacaagacatatagctttctgatcaccctggatgttgacatcggagagctgataatgattaagttcaagtgggagaactccgctgtctgggccaatgtatgggacaccgtgcaaacaattataccatggagcactggacctagacactccgggctggtactgaagaccattcgcgtcaaagcgggcgaaacccagcagcgaatgactttttgtagcgagaatacagatgacctcctgctgcgccccacccaagagaaaatattcgtgaagtgtgagatcaaaagcaagacaagtaagagaaagattcgctag

SEQ ID NO: 273215 - DNA, 1500 bp, Artificial Sequence
  derived and/or modified sequence
atggacaccagccccctgtgcttcagcatcctgctggtgctgtgcatattcattcagtctagtgctctcggacagtccctcaaacctgaacccttcgggaggcgggctcaggccgtcgagactaataaaactctgcacgagatgaaaacccggtttctgctctttggcgagacgaaccagggctgccaaattcgtatcaaccatcccgacacccttcaggaatgtgggtttaattcaagccttccacttgtgatgatcattcacggctggagtgtggatggggtcctagaaaactggatctggcagatggtggccgctctcaagagtcagccagctcagcctgttaacgtggggttagttgactggatcaccttggcccatgaccattataccattgcggtgagaaacactaggttggtgggaaaggaagtggccgccctcctcagatggctagaggagtcggtgcagctgtcacgcagccatgtgcacctgataggctactctctgggagctcacgtttcagggtttgccggtagctcgattggaggaacacacaaaatcgggcgcataactggcctggatgccgctggcccactcttcgaggggagcgcaccatctaaccggctgtccccagatgatgccaattttgttgacgcgatacacacgtttacccgtgaacatatgggactgagcgtcgggattaagcagcccatcggacattacgacttctatcctaatggaggctcctttcagcccgggtgccacttcttagaactgtatagacatatcgctcagcacggtttcaacgctatcacccagactattaaatgctcccacgagcggtcagtacacttattcatagattccctactgcatgctggcacgcagtcaatggcctacccctgcggtgatatgaacagttttagtcaagggttgtgtctgagctgtaagaaaggacgttgtaacactctgggataccatgtgaggcaggagccccggtctaagtccaagcgcctgtttctggttaccagagcgcagagtccattcaaggtgtaccactatcagttcaagattcagttcatcaaccagacagagactcccatccagaccactttcaccatgagccttctgggtacaaaggaaaaaatgcagaagatccctataacgttagggaagggaattgcatctaataagacctactccttccttatcaccctggacgttgatataggcgaacttataatgatcaagttcaagtgggaaaattctgctgtttgggctaacgtctgggacacagtgcaaaccatcattccttggtctactggccccaggcacagtgggttagtgttgaaaacaatccgcgtcaaggccggcgaaacacagcagcgtatgacattttgttccgagaatacagatgacctcctcctccgccccacccaggaaaaaatctttgtgaagtgcgaaataaaaagcaagacaagcaaacgaaaaatccgctag

SEQ ID NO: 273216 - DNA, 1500 bp, Artificial Sequence
  derived and/or modified sequence
atggacacatctcccctgtgtttcagcatcctgttggttctgtgtatttttatccagagttctgccttgggacaaagcttgaaacccgagccctttgggcgaagggcacaggcagtggaaacaaataaaaccctgcatgagatgaaaacccgctttctgctgtttggggaaaccaaccaggggtgtcagatcagaattaaccaccccgacactctccaagaatgcggattcaatagctccctgccattggtgatgataatacacggctggtccgtggacggtgttctcgagaattggatatggcaaatggtggctgccctgaagagccagcctgcccagcccgttaacgtgggcctggtggactggataaccttggcccacgaccattacactattgctgtacggaatacacgtctcgtggggaaggaggtggctgccttgttgcgctggctggaagagtcagtccaactgtcccgaagccacgtgcacttgataggttattccctcggggctcacgtgtctggcttcgcgggatcttccatcggcggtacccacaagataggaagaatcaccggattggacgcagctggtccacttttcgagggatctgcaccatccaataggctgagcccagacgatgccaactttgtagacgccatacatactttcaccagggagcacatggggttgagtgtgggcattaaacagcctatcggacactacgatttttacccaaatggcggatctttccagcctgggtgtcatttcctggaactgtatcggcatattgctcagcatgggttcaatgcaatcacacagactataaaatgttcacatgagcgtagcgtgcaccttttcatcgacagcctgttgcacgccggaacacagagcatggcgtacccatgcggcgacatgaacagcttcagccagggcctttgcttgagctgcaagaaggggcgatgcaacaccctgggatatcatgttcgacaggaaccacgcagcaagtcaaagcgcctcttccttgttactagggcccagtccccttttaaggtctaccactaccagtttaagatccaattcatcaaccagacagagacacctatccagaccaccttcaccatgtcactcctgggcaccaaggaaaaaatgcagaaaattcctataacattagggaaaggaattgctagcaacaagacttacagttttcttattactctggacgtggacattggcgaactgattatgatcaagtttaagtgggaaaattccgctgtatgggccaacgtgtgggacacagtgcagaccatcatcccctggagtacggggcctcgtcattctggccttgtcttaaaaactatacgggtgaaggccggtgagacccaacagcgcatgaccttttgcagcgaaaatacagatgatctactcttgcgccctacccaggaaaaaattttcgtgaaatgcgagatcaaatctaagacttctaagcgaaagatccggtag

SEQ ID NO: 273217 - DNA, 1500 bp, Artificial Sequence
  derived and/or modified sequence
atggacaccagcccactgtgcttcagtatacttctggtcttgtgtatttttattcagtcttctgccctgggccaatccctcaagcccgaaccattcggacgtagggcgcaagccgttgaaaccaacaaaacactgcacgagatgaagactcgctttctactgttcggcgagaccaaccagggatgccagatacgtattaaccaccccgacaccctccaggaatgtggattcaattcatcccttcctttagtgatgatcatccacggctggtccgtggacggggttctggagaattggatatggcagatggtggctgcactgaagagccagcccgctcagcctgttaacgtcggcctggtagactggattacactcgcgcacgaccattacacaattgctgtgaggaataccagactggtcggcaaagaggtggccgctctgctgcgatggttagaggaaagtgttcagctgtctaggagccacgtacacttgatcgggtattcactgggagcccatgtgagcggatttgctggatcttctattggcggtacacacaagatcggcaggattacaggactcgacgccgcaggtcctctcttcgaggggagtgcccctagcaaccgcctctctcccgacgatgccaattttgtggatgcgatccacacctttacgcgagaacacatggggcttagcgtgggaattaaacagccaatcggccactatgacttctacccaaatggagggagcttccaacctgggtgccattttttggaattatacaggcatatcgctcagcacggcttcaatgctattacacagactataaagtgctctcacgaacggtcagtgcacttgtttattgattccctccttcatgcaggaactcagtccatggcctacccttgcggcgatatgaattctttttcccagggcctatgcctatcctgcaagaagggccgttgtaataccctcggctaccacgtacgccaggagccaagatcaaaaagtaagaggctgttcttggttactcgggcacagagccccttcaaggtgtatcactaccagttcaagatacagtttataaatcaaaccgaaacacccatccaaactacattcaccatgtccctgcttggaaccaaagagaaaatgcagaagatccctattacattggggaagggtatcgcttctaacaagacctacagtttcctcatcaccctcgacgtcgacatcggggagctgatcatgattaagttcaagtgggaaaactctgccgtttgggcaaacgtgtgggatactgtgcagactatcataccctggtctacaggcccaaggcatagtggccttgtcctgaaaacaattcgcgtcaaagccggagagacacagcaacgcatgacattttgttccgaaaacaccgacgatctcctgctgagacccacccaggaaaaaatcttcgttaaatgcgagattaaaagtaagacttcaaagcggaagatccggtag

SEQ ID NO: 273218 - DNA, 1500 bp, Artificial Sequence
  derived and/or modified sequence
atggacaccagccccctgtgcttcagcatcctgctggtgctgtgcatcttcatccagagcagcgccctgggccagagcctgaagcccgagcccttcggcagaagagcccaggccgtggagaccaacaagaccctgcacgagatgaagaccagattcctgctgttcggcgagaccaaccagggctgccagatcagaatcaaccaccccgacaccctgcaggagtgcggcttcaacagcagcctgcccctggtgatgatcatccacggctggagcgtggacggcgtgctggagaactggatctggcagatggtggccgccctgaagagccagcccgcccagcccgtgaacgtgggcctggtggactggatcaccctggcccacgaccactacaccatcgccgtgagaaacaccagactggtgggcaaggaggtggccgccctgctgagatggctggaggagagcgtgcagctgagcagaagccacgtgcacctgatcggctacagcctgggcgcccacgtgagcggcttcgccggcagcagcatcggcggcacccacaagatcggcagaatcaccggcctggacgccgccggccccctgttcgagggcagcgcccccagcaacagactgagccccgacgacgccaacttcgtggacgccatccacaccttcaccagagagcacatgggcctgagcgtgggcatcaagcagcccatcggccactacgacttctaccccaacggcggcagcttccagcccggctgccacttcctggagctgtacagacacatcgcccagcacggcttcaacgccatcacccagaccatcaagtgcagccacgagagaagcgtgcacctgttcatcgacagcctgctgcacgccggcacccagagcatggcctacccctgcggcgacatgaacagcttcagccagggcctgtgcctgagctgcaagaagggcagatgcaacaccctgggctaccacgtgagacaggagcccagaagcaagagcaagagactgttcctggtgaccagagcccagagccccttcaaggtgtaccactaccagttcaagatccagttcatcaaccagaccgagacccccatccagaccaccttcaccatgagcctgctgggcaccaaggagaagatgcagaagatccccatcaccctgggcaagggcatcgccagcaacaagacctacagcttcctgatcaccctggacgtggacatcggcgagctgatcatgatcaagttcaagtgggagaacagcgccgtgtgggccaacgtgtgggacaccgtgcagaccatcatcccctggagcaccggccccagacacagcggcctggtgctgaagaccatcagagtgaaggccggcgagacccagcagagaatgaccttctgcagcgagaacaccgacgacctgctgctgagacccacccaggagaagatcttcgtgaagtgcgagatcaagagcaagaccagcaagagaaagatcagatag

SEQ ID NO: 273219 - protein, 1880 aa, Artificial Sequence
  derived and/or modified sequence
MKSSSLETMFARVWIPDPEEVWKSAELLKDYKPGDKVLLLHLEEGKDLEYHLDPKTKELPHLRNPDILVGENDLTALSYLHEPAVLHNLRVRFIDSKLIYTYCGIVLVAINPYEQLPIYGEDIINAYSGQNMGDMDPHIFAVAEEAYKQMARDERNQSIIVSGESGAGKTVSAKYAMRYFATVSGSASEANVEEKVLASNPIMESIGNAKTTRNDNSSRFGKYIEIGFDKRYRIIGANMRTYLLEKSRVVFQAEEERNYHIFYQLCASAKLPEFKMLRLGNADNFNYTKQGGSPVIEGVDDAKEMAHTRQACTLLGISESHQMGIFRILAGILHLGNVGFTSRDADSCTIPPKHEPLCIFCELMGVDYEEMCHWLCHRKLATATETYIKPISKLQATNARDALAKHIYAKLFNWIVDNVNQALHSAVKQHSFIGVLDIYGFETFEINSFEQFCINYANEKLQQQFNMHVFKLEQEEYMKEQIPWTLIDFYDNQPCINLIESKLGILDLLDEECKMPKGTDDTWAQKLYNTHLNKCALFEKPRLSNKAFIIQHFADKVEYQCEGFLEKNKDTVFEEQIKVLKSSKFKMLPELFQDDEKAISPTSATSSGRTPLTRTPAKPTKGRPGQMAKEHKKTVGHQFRNSLHLLMETLNATTPHYVRCIKPNDFKFPFTFDEKRAVQQLRACGVLETIRISAAGFPSRWTYQEFFSRYRVLMKQKDVLSDRKQTCKNVLEKLILDKDKYQFGKTKIFFRAGQVAYLEKLRADKLRAACIRIQKTIRGWLLRKKYLRMRKAAITMQRYVRGYQARCYAKFLRRTKAATIIQKYWRMYVVRRRYKIRRAATIVLQSYLRGFLARNRYRKILREHKAVIIQKRVRGWLARTHYKRSMHAIIYLQCCFRRMMAKRELKKLKIEARSVERYKKLHIGMENKIMQLQRKVDEQNKDYKCLVEKLTNLEGIYNSETEKLRSDLERLQLSEEEAKVATGRVLSLQEEIAKLRKDLEQTRSEKKCIEEHADRYKQETEQLVSNLKEENTLLKQEKEALNHRIVQQAKEMTETMEKKLVEETKQLELDLNDERLRYQNLLNEFSRLEERYDDLKEEMTLMVHVPKPGHKRTDSTHSSNESEYIFSSEIAEMEDIPSRTEEPSEKKVPLDMSLFLKLQKRVTELEQEKQVMQDELDRKEEQVLRSKAKEEERPQIRGAELEYESLKRQELESENKKLKNELNELRKALSEKSAPEVTAPGAPAYRVLMEQLTSVSEELDVRKEEVLILRSQLVSQKEAIQPKLHENTMTDSTILLEDVQKMKDKGEIAQAYIGLKETNRSSALDYHELNEDGELWLVYEGLKQANRLLESQLQSQKRSHENEAEALRGEIQSLKEENNRQQQLLAQNLQLPPEARIEASLQHEITRLTNENLYFEELYADDPKKYQSYRISLYKRMIDLMEQLEKQDKTVRKLKKQLKVFAKKIGELEVGQMENISPGQIIDEPIRPVNIPRKEKDFQGMLEYKKEDEQKLVKNLILELKPRGVAVNLIPGLPAYILFMCVRHADYLNDDQKVRSLLTSTINSIKKVLKKRGDDFETVSFWLSNTCRFLHCLKQYSGEEGFMKHNTSRQNEHCLTNFDLAEYRQVLSDLAIQIYQQLVRVLENILQPMIVSGMLEHETIQGVSGVKPTGLRKRTSSIADEGTYTLDSILRQLNSFHSVMCQHGMDPELIKQVVKQMFYIIGAITLNNLLLRKDMCSWSKGMQIRYNVSQLEEWLRDKNLMNSGAKETLEPLIQAAQLLQVKKKTDDDAEAICSMCNALTTAQIVKVLNLYTPVNEFEERVSVSFIRTIQMRLRDRKDSPQLLMDAKHIFPVTFPFNPSSLALETIQIPASLGLGFISRV

SEQ ID NO: 273220 - DNA, 5643 bp, Artificial Sequence
  derived and/or modified sequence
atgaagtcctccagcctcgaaaccatgttcgcaagagtgtggatcccagatcccgaagaagtttggaagagcgcagagctgctgaaggattacaaacctggggacaaagtgctcctgttgcacctcgaggaaggaaaggatctggaataccacttggaccctaaaaccaaggaattgccccacctgaggaaccccgacattctggtgggggaaaatgacctgaccgcactgtcatatctgcacgagccagccgttctccataatctgagagttcgcttcattgattcaaaactgatttatacctactgtggtatcgttctggtggcaattaacccttacgaacagttgccaatctatggcgaagacatcattaacgcttactcgggtcagaacatgggggacatggatcctcatattttcgccgtggccgaggaggcgtataagcaaatggcccgggatgaacgaaaccaaagtatcatcgtcagcggggaaagcggggctgggaagaccgtctccgcaaagtacgccatgagatattttgcaactgtgtccggctccgcctccgaggccaacgttgaggaaaaggtcctggccagtaatccaatcatggagtcaattggcaacgctaaaacaacccgcaacgacaattcgtctagattcgggaaatacatcgaaatcggtttcgataagcgatatcggatcattggagccaacatgagaacatatctactcgagaaatcacgagtcgtgtttcaggctgaggaagaaagaaactatcacatcttctatcaattatgtgcgtcagctaagttgccagaatttaagatgctgaggttagggaatgccgacaatttcaattatactaaacagggggggtcccccgtgatagaaggcgttgatgacgccaaggaaatggcccacacgcgccaagcctgtaccctcctcggcatttcagagtcgcaccagatggggatttttagaattctcgctggtatcctgcatctcggcaatgtcgggtttacgtcccgcgatgctgattcttgtactattccgccgaagcatgagcctctgtgcatcttttgtgagctgatgggcgtggactacgaggaaatgtgccactggctatgccaccgtaaactcgccacagcgaccgaaacctacatcaagccaattagtaaactgcaagccacgaatgcacgggacgctctggcaaaacatatctatgcaaagttgttcaattggattgtggacaatgttaaccaggctctgcatagcgctgtgaaacaacacagcttcattggcgtgctggacatctatggcttcgagacctttgaaattaatagcttcgagcagttttgtataaattatgctaacgaaaagcttcaacagcagttcaatatgcatgtttttaagctcgaacaggaggagtacatgaaggaacagataccctggacattgattgatttctacgataaccagccatgtataaatcttatcgagtccaagctgggaattctggatctgctcgatgaagagtgtaagatgcccaaagggactgacgatacttgggcccaaaaactctataacacccatttaaacaaatgcgctctgttcgaaaagccccggctgagcaacaaggcattcattattcaacacttcgctgataaggttgaatatcaatgtgaaggattcctggaaaaaaataaagatactgtttttgaagaacagatcaaagtgttgaaatctagtaagtttaagatgcttccagagttgttccaggatgacgagaaagccatcagtcccacctctgcaacaagcagcggccgcacgcccctgacacggacccccgccaaacctaccaagggcagaccaggtcagatggctaaggaacacaaaaagactgttggccatcagttcaggaatagcctgcatctcctgatggagacgctgaacgccacaaccccacactatgtacgatgcataaagcccaacgacttcaagttccctttcacatttgacgagaagagagcagtccaacagctcagggcctgcggagttttggagaccattcggatttccgccgcaggattccctagccgatggacctatcaggagtttttctcacggtatcgtgtgctaatgaagcagaaggatgtgttgtctgaccgcaagcagacttgcaaaaacgtcctggagaagttaatcttggataaagacaaatatcagtttgggaagaccaagatattcttccgggctgggcaggtggcctacttagagaaactgagagccgataagcttcgggccgcttgtattagaattcaaaagaccatccgaggctggctgttgcgcaagaagtacctgaggatgcgtaaggctgcaattacaatgcagcggtacgtgaggggataccaggctcgatgctatgccaaattcttacggcggaccaaggccgccacaatcatccagaagtattggcggatgtatgtcgtccgaaggcggtataagattcgccgcgctgccacaatcgtgctccagtcatatctgcgggggttcctggcccgcaacaggtaccggaaaatccttcgcgagcacaaagccgttataatccagaagagggtcagaggctggctagccagaacccactacaaacggtcaatgcatgcaattatttacctacagtgctgtttcagacgaatgatggcgaagcgcgagctgaaaaagctgaagattgaggcccgctcagtggaacgctacaagaagttgcacatcggaatggagaacaagatcatgcagcttcagcgaaaggtcgatgaacagaacaaagattacaaatgtctggtggagaaactaacaaatctggaaggcatctataattccgaaactgagaaactaaggtccgacttggaacggctccagctttcagaagaagaagcaaaggtggctacagggagggtcctgagcctccaggaggaaattgccaagctacggaaggacctggaacagacgcgctccgagaaaaagtgcattgaggaacatgcagaccgttataagcaggagaccgaacagctcgtcagtaaccttaaggaggagaatactcttctgaaacaagagaaagaggctctcaaccaccgcatagtgcagcaagcaaaagagatgaccgagactatggaaaagaagcttgtcgaggaaactaagcaattagaactggacctgaacgatgagcgtctgaggtatcagaacctgctgaacgaatttagtagactggaggagagatacgatgaccttaaagaggaaatgactttgatggtgcacgtgccgaagcccggccacaaacggaccgactcgacacatagtagcaatgaaagtgaatatattttttcctcagagatcgcagagatggaagatattccgagccgtactgaagaaccgtccgagaagaaagtacccctggacatgtccctttttctgaagctgcagaagcgcgtgacggaattagagcaggaaaagcaagtgatgcaagacgaactggaccgaaaagaagagcaggtgctgcggagcaaggcaaaggaggaagaacgaccacagatccgaggtgcagaactcgagtacgagtcacttaaaaggcaggagctggagtctgagaataagaaattaaagaatgagttaaacgagctgagaaaagctttatcagagaaaagtgcacccgaagtaacagccccaggcgcacctgcataccgggtgctaatggagcagctgacctcagtgtctgaggaattggatgttagaaaagaagaggtgctcatccttcggtctcaactggtgagccagaaagaggccattcaacccaaactccacgaaaataccatgactgactccacaattctcctggaagatgtacagaagatgaaggacaaaggcgaaattgcacaggcatacatcggccttaaggaaactaatcggtcatcggcactagattaccacgagttgaatgaagacggcgagctgtggctagtttatgaaggacttaaacaggcaaatcgcttattggagagccagctccaatcccaaaagcgcagtcacgaaaacgaagcagaggctctcagaggcgaaattcagtccttgaaggaggaaaacaaccggcagcagcagcttctcgcccaaaacctgcagctcccaccagaagcgagaatcgaagcgtctcttcagcacgaaatcactcgcttaactaatgagaatctgtattttgaggagttgtacgcagatgaccccaaaaagtaccaatcttaccgtatctccctgtataagaggatgatcgatctgatggaacagctcgaaaagcaggacaaaacagtgcgcaaattaaaaaagcagctcaaggtgtttgccaaaaagatcggcgaactcgaggtggggcagatggagaatatctcccctgggcagataattgacgagcccataagacccgttaatattccacgaaaggaaaaagacttccaaggtatgctcgagtacaaaaaggaagatgaacagaagctagtaaaaaatcttatactggagctgaagccacggggggtggcagtgaaccttattccaggcctacccgcctatattttattcatgtgtgtgcggcacgccgactacctgaatgacgatcaaaaagtacgcagtctattgacatctactattaacagcataaagaaggtgcttaagaaacggggggacgactttgaaacagtgagcttctggctgagcaatacatgccggttcctgcattgtctgaagcaatacagcggcgaggagggcttcatgaaacacaacacatcccggcagaatgagcattgtctcactaacttcgatctggcagagtaccgccaggtattgtctgatctagccatacagatttaccagcagctggtcagggtgttggagaatatccttcagccgatgatagtgtcggggatgctggaacacgaaacaatacaaggcgtgtctggcgtgaaacccaccggtctcaggaaaagaacctccagcatcgcagatgaggggacctacaccctggacagcatcttgcgccaactgaactcctttcattccgttatgtgccagcacggcatggatcctgaactgatcaagcaagtggtgaagcaaatgttctatatcatcggcgccatcactctcaataacctgttgctgagaaaggatatgtgctcatggtccaagggcatgcaaatcagatacaacgtatctcagcttgaggagtggctgagggataagaatctgatgaattcaggcgccaaagagactctagaacctctgattcaggctgcccagttgttgcaggttaaaaagaaaacagatgacgacgcagaggccatctgctcaatgtgcaacgcactcacaaccgcacaaatcgtcaaagtgttgaacttgtacacaccagtcaatgagtttgaggaaagggtctctgtaagtttcatccgcacgatccaaatgcgacttagggatcggaaggattctccccaattgctgatggacgccaaacatatcttccccgtgacattcccatttaacccatcatctctcgcccttgaaaccatccagattccggccagtcttggattagggtttatcagcagggtctag

SEQ ID NO: 273221 - DNA, 5643 bp, Artificial Sequence
  derived and/or modified sequence
atgaagagcagcagcctggagaccatgtttgcccgggtgtggatcccagaccctgaggaggtgtggaagtctgctgagctgctgaaggactacaagccaggggacaaggtgctgctgctgcacctggaggagggcaaggacctggagtaccacctggaccccaagaccaaggagctgccccacctgagaaatccagacatcctggtgggagaaaatgacctgacagccctgagctacctgcacgagcctgctgtgctgcacaacctgcgggtgcgcttcatcgacagcaagctgatctacacctactgcggcatcgtgctggtggccatcaacccctatgagcagctgcccatctatggagaggacatcatcaatgcctacagcggccagaacatgggagacatggacccccacatctttgctgtggccgaggaggcctacaagcagatggccagagatgaaagaaaccagagcatcatcgtgtctggagagagcggggccggcaagacagtgtctgccaagtatgccatgagatactttgccaccgtgtctggcagcgccagcgaggccaacgtggaggagaaggtgctggccagcaaccccatcatggagagcattggaaatgccaagaccaccagaaatgacaacagcagcagatttgggaagtacatcgagatcggctttgacaagcgctaccgcatcattggagccaacatgaggacctacctgctggagaagagccgggtggtgttccaggccgaggaggagaggaactaccacatcttctaccagctgtgtgccagcgccaagctgcctgagttcaagatgctgcggctgggcaatgctgacaacttcaactacaccaagcagggcggcagccctgtgattgagggcgtggatgatgccaaggagatggcccacacccggcaggcctgcaccctgctgggcatcagcgagagccaccagatgggcatcttccgcatcctggccggcatcctgcacctgggcaatgtgggcttcaccagcagagatgctgacagctgcaccatcccccccaagcatgagcccctgtgcatcttctgtgagctgatgggcgtggactatgaggagatgtgccactggctgtgccacaggaagctggccacagccacagagacctacatcaagcccatcagcaagctgcaggccaccaatgccagagatgccctggccaagcacatctatgccaagctgttcaactggatcgtggacaacgtgaaccaggccctgcacagcgctgtgaagcagcacagcttcatcggcgtgctggacatctacggctttgagacctttgagatcaacagctttgagcagttctgcatcaactatgccaatgagaagctgcagcagcagttcaacatgcacgtgttcaagctggagcaggaggagtacatgaaggagcagatcccctggaccctgattgacttctatgacaaccagccctgcatcaacctgattgagagcaagctgggcatcctggacctgctggatgaggagtgcaagatgcccaagggcacagatgacacctgggcccagaagctgtacaacacccacctgaacaagtgtgccctgtttgagaagccccggctgagcaacaaggccttcatcatccagcactttgctgacaaggtggagtaccagtgtgagggcttcctggagaagaacaaggacacagtgtttgaggagcagatcaaggtgctgaagagcagcaagttcaagatgctgcctgagctgttccaggatgatgagaaggccatcagccccaccagcgccaccagcagcggccgcacccccctgaccaggaccccagccaagcccaccaagggccggcccggccagatggccaaggagcacaagaagacagtgggccaccagttcaggaacagcctgcacctgctgatggagaccctgaatgccaccaccccccactacgtgcgctgcatcaagcccaatgacttcaagttccccttcacctttgatgagaagagagctgtgcagcagctgcgggcctgtggggtgctggagaccatccgcatctctgctgctggcttccccagccgctggacctaccaggagttcttcagccgctacagagtgctgatgaagcagaaggatgtgctgagtgacaggaagcagacctgcaagaatgtgctggagaagctgatcctggacaaggacaagtaccagtttgggaagaccaagatcttcttccgggccggccaggtggcctacctggagaagctgcgggctgacaagctgcgggccgcctgcatccgcatccagaagaccatccggggctggctgctgaggaagaagtacctgaggatgaggaaggccgccatcaccatgcagagatatgtgcggggctaccaggcccgctgctacgccaagttcctgcggaggaccaaggccgccaccatcatccagaagtactggaggatgtatgtggtgagaagacgctacaagatcagaagagctgccaccatcgtgctgcagagctacctgcggggcttcctggccaggaaccgctacaggaagatcctgcgggagcacaaggccgtcatcatccagaagagggtgcggggctggctggcccggacccactacaagaggtccatgcacgccatcatctacctgcagtgctgcttccggaggatgatggccaagcgggagctgaagaagctgaagattgaggcccggtctgtggagcgctacaagaagctgcacatcggcatggagaacaagatcatgcagctgcagaggaaggtggatgagcagaacaaggactacaagtgcctggtggagaagctgaccaacctggagggcatctacaacagcgagacagagaagctgcggagtgacctggagcggctgcagctgtctgaggaggaggccaaggtggccaccggccgggtgctgagcctgcaggaggagatcgccaagctgaggaaggacctggagcagaccaggtctgagaagaagtgcatcgaggagcacgccgaccgctacaagcaggagacagagcagctggtgagcaacctgaaggaggagaacaccctgctgaagcaggagaaggaggccctgaaccacagaattgtgcagcaggccaaggagatgacagagaccatggagaagaagctggtggaggagaccaagcagctggagctggacctgaatgatgagcggctgcgctaccagaacctgctgaatgagttcagccggctggaggagagatatgatgacctgaaggaggagatgaccctgatggtgcacgtgcccaagccaggccacaagaggacagacagcacccacagcagcaatgaaagtgagtacatcttcagcagcgagattgctgagatggaggacatccccagcaggacagaggagcccagcgagaagaaggtgcccctggacatgagcctcttcctgaagctgcagaagagggtgacagagctggagcaggagaagcaggtgatgcaggatgagctggacaggaaggaggagcaggtgctgcggagcaaggccaaggaggaggagcggccccagatcagaggagctgagctggagtatgagagcctgaagaggcaggagctggagagcgagaacaagaagctgaagaatgagctgaatgagctgaggaaggccctgtctgagaagagcgcccctgaggtgacagcccctggggccccagcctacagagtgctgatggagcagctgacctctgtgtctgaggagctggatgtgaggaaggaggaggtgctgatcctgcggagccagctggtgtcccagaaggaggccatccagcccaagctgcacgagaacaccatgacagacagcaccatcctgctggaggatgtgcagaagatgaaggacaagggggagatcgcccaggcctacatcggcctgaaggagaccaacagaagcagcgccctggactaccacgagctgaatgaagatggagagctgtggctggtgtatgagggcctgaagcaggccaaccggctgctggagagccagctgcagagccagaagaggagccatgaaaatgaggccgaggccctgcggggggagatccagagcctgaaggaggagaacaaccggcagcagcagctgctggcccagaacctgcagctgcccccagaggccagaattgaggccagcctgcagcacgagatcacccggctgaccaatgaaaatctctactttgaggagctgtatgcagatgaccccaagaagtaccagagctaccgcatcagcctgtacaagaggatgattgacctgatggagcagctggagaagcaggacaagacagtgaggaagctgaagaagcagctgaaggtgtttgccaagaagattggagagctggaggtgggccagatggagaacatcagccctggccagatcattgatgagcccatccggcctgtgaacatccccaggaaggagaaggacttccagggcatgctggagtacaagaaggaggatgagcagaagctggtgaagaacctgatcctggagctgaagccccggggcgtggccgtgaacctgatccctggcctgcctgcctacatcctcttcatgtgtgtgagacatgctgactacctgaatgatgaccagaaggtgcgcagcctgctgaccagcaccatcaacagcatcaagaaggtgctgaagaagagaggagatgactttgagaccgtgtccttctggctgagcaacacctgccgcttcctgcactgcctgaagcagtacagcggggaggagggcttcatgaagcacaacaccagccggcagaatgagcactgcctgaccaactttgacctggccgagtaccggcaggtgctgagtgacctggccatccagatctaccagcagctggtgcgggtgctggagaacatcctgcagcccatgattgtgtctggcatgctggagcacgagaccatccagggcgtgtctggagtgaagcccaccggcctgaggaagaggaccagcagcattgctgatgagggcacctacaccctggacagcatcctgcggcagctgaacagcttccacagcgtgatgtgccagcacggcatggaccctgagctgatcaagcaggtggtgaagcagatgttctacatcattggagccatcaccctgaacaacctgctgctgaggaaggacatgtgctcctggagcaagggcatgcagatccgctacaacgtgtcccagctggaggagtggctgcgggacaagaacctgatgaacagcggggccaaggagaccctggagcccctcatccaggccgcccagctgctgcaggtgaagaagaagacagatgatgatgctgaggccatctgcagcatgtgcaatgccctgaccacagcccagatcgtgaaggtgctgaacctgtacacccctgtgaatgaatttgaggagcgggtgtctgtgtccttcatccgcaccatccagatgaggctgcgggacaggaaggacagcccccagctgctgatggatgccaagcacatcttccctgtgaccttccccttcaaccccagcagcctggccctggagaccatccagatcccagccagcctgggcctgggcttcatcagccgggtgtag

SEQ ID NO: 273222 - DNA, 12051 bp, Artificial Sequence
  derived and/or modified sequence
atgaaatctagtagtttggaaactatgtttgccagggtttggatacctgatccagaggaagtctggaagtcagcagagctgctcaaagattataagccaggagataaagtcctcctgcttcacctcgaggaaggaaaggatttggaataccatctagatccaaagaccaaggagctgcctcacttacgaaatcctgacatacttgttggtgaaaatgacctcacagccctcagctatcttcatgagcctgctgtgctccataatctcagagtccgctttattgattccaaacttatttatacgtattgtggtatagtcctagtagctataaatccctatgaacagctgcctatttatggagaagatattattaatgcatacagtggtcagaacatgggtgatatggatccacatatctttgcagtagctgaagaagcttacaagcaaatggccagagatgaacgaaatcagtccatcatcgtaagtggagagtctggggcaggaaaaacagtctcagctaagtatgccatgcgatactttgcaactgtgagtggttctgccagtgaggccaatgtggaggaaaaggtcttggcctccaaccccatcatggagtccattggaaatgctaaaacaaccaggaatgataatagcagccgttttgggaagtatattgagattggttttgataagagatatcgaatcattggtgccaatatgagaacttatcttttagagaaatccagagtggtattccaggcagaagaggagagaaactatcatatcttctatcagctttgtgcctcagcaaagttacctgaatttaaaatgctacgattaggaaatgcagataactttaattacacaaaacaaggaggcagtcctgtgattgaaggagtggatgatgcaaaggagatggcacatactaggcaggcctgcactttgctaggaattagtgaatctcatcaaatgggaattttccgaatacttgctggcatccttcacttaggcaatgttggatttacatcccgagatgcagacagctgcacaatacctcccaagcatgaacctctctgcatcttctgtgaactcatgggtgtggactatgaggagatgtgtcactggctctgccatcggaaactggctactgccacagagacatacatcaagcccatctccaagctgcaggccacaaatgcccgcgatgctttggccaagcacatctatgccaagctctttaactggattgtagataatgtcaatcaggctctccattctgctgtcaaacagcactcttttattggtgtgctagacatttacggatttgaaacatttgagataaatagttttgaacagttttgcataaattatgcaaatgaaaaactacagcaacaattcaatatgcatgtcttcaaattggagcaagaagaatatatgaaggaacaaattccatggacactcatagatttttatgataatcagccttgtattaatcttatagaatcaaaactaggcattctagatttactggatgaggaatgcaagatgcctaaaggcacagatgacacctgggcccaaaaattgtacaacacacatttgaacaaatgtgcactctttgaaaagcctcgtctatcaaacaaagctttcatcatccaacattttgctgacaaagtggaataccagtgtgaaggatttctcgaaaagaataaagacaccgtttttgaagaacaaattaaagttcttaaatcaagcaagtttaagatgctaccagaactatttcaagatgatgagaaggccatcagtccaacttcagccacctcctcagggcgcacacccctcacacgaactcctgcaaagcccaccaaaggcagaccaggccaaatggccaaagagcacaagaaaacagtggggcatcagttcagaaactccctgcacctgcttatggagacactcaatgccactacccctcactatgtgcgctgtatcaagcctaatgacttcaagttcccattcacgtttgatgagaagagggcagtgcagcagctgagagcatgtggtgtcctggaaaccatccgaatcagtgcggccggtttcccctcacggtggacttaccaagaatttttcagccgctaccgtgtcctaatgaagcagaaagatgtgctgagtgacagaaagcaaacatgcaagaatgtgttagagaaactgatactggacaaggacaaataccagtttggtaagacaaagatctttttccgtgccggtcaagtggcctatctagaaaaattgagagctgacaaactgagagctgcctgcatccggatccagaagaccatccgagggtggctgctgagaaagaagtacctacgcatgcggaaggcagccatcaccatgcagagatacgtgcggggctaccaggcccgatgctatgctaagtttctgcgcagaaccaaggcagcaaccatcattcaaaagtactggcgcatgtatgtggtccgcaggaggtacaagattagacgagctgccactatcgttcttcagtcttacttgcgaggcttcttggccagaaataggtatcgcaagatactccgtgagcacaaagcagtcatcattcagaagcgagtccggggctggctggcccgcacacactacaagaggagcatgcatgccatcatctaccttcagtgctgcttcaggcggatgatggccaagcgtgagctaaagaagctcaaaatcgaggctcgctcagtggagcgctataagaagctgcacatcggcatggagaacaagatcatgcagctgcagcgcaaagttgatgagcagaacaaagactacaaatgccttgtggagaaactaaccaatctggaaggaatatacaactctgagactgagaaactacgaagtgacttagaacgtcttcaactaagtgaagaggaagcgaaagttgccactgggcgggtccttagtctgcaggaagaaattgccaagctccggaaagacctggagcaaactcgttcagagaaaaaatgcattgaggaacatgcagatcgatacaaacaagaaacagagcagctggtatcaaatctgaaggaagaaaatactttgctgaagcaagaaaaagaagccctcaatcaccgcatcgtgcagcaggctaaggagatgacagaaactatggagaagaagttagtagaagaaacgaaacaactggaactcgaccttaatgatgaaaggctgagatatcagaaccttctgaatgagttcagtcgcctggaagaaagatatgatgacctcaaggaagagatgacccttatggtgcatgtgcctaagcctggacacaagagaacagactccacccacagcagcaacgagtctgaatatatctttagctctgaaattgcagaaatggaagacattccatcaaggacagaggaaccaagtgagaagaaggtacctctggacatgtcattgttccttaagctccagaagcgggtcacagagctggagcaggagaagcaggtgatgcaggatgagctggaccgcaaggaggagcaggtgctccgcagcaaggccaaggaagaagaaagaccacaaattagaggtgcagaactggaatatgagtcactcaagcgtcaagaactagaatcagaaaacaaaaaactgaagaatgagctaaatgagttgcgcaaggccctcagtgagaaaagtgccccagaggtgaccgccccaggtgcacctgcctaccgtgtcctcatggagcagctgacctctgtgagcgaggagcttgatgtccgcaaggaggaagtcctcatcttaaggtctcaactggtgagccagaaagaggccatccaacccaagttacatgagaatacaatgacagattccacaatacttttggaagatgtacaaaaaatgaaagataaaggtgaaatagcacaagcatacattggtttgaaagaaacaaatagatcatctgctctggattaccatgagttgaatgaggatggagagctgtggctggtttatgaagggttaaaacaagccaacaggctcctggaatcccagctgcagtcacagaagaggagccatgagaatgaggccgaggccctccgtggggagatccagagcctgaaggaggagaacaaccgacagcagcagctgctggcccagaacctgcagctgcccccagaggcccgcattgaggccagcctgcagcacgagatcacccggctgaccaacgaaaacttgtattttgaggaattatatgcagatgaccctaagaagtatcaatcatatcggatttccctttacaaacggatgattgatttgatggaacaacttgaaaaacaggataagacggtccgtaaactgaaaaaacaactgaaagtatttgccaaaaaaattggcgaactagaagtgggccagatggagaacatatccccaggacagatcattgatgaacccatccgaccagtcaacattcccaggaaagaaaaggatttccaagggatgctggaatacaagaaggaggatgagcaaaaacttgttaagaacctgattctggaactgaagccacgtggtgtagcagtcaatttgattccaggattaccggcatatatcctgttcatgtgtgttcgacatgctgactacctgaatgatgatcagaaagtaaggtcgttgctaacatcaacaattaacagcatcaaaaaagtattgaagaaaagaggtgatgattttgaaaccgtctccttctggctctctaacacatgccgatttttgcactgcttgaaacagtacagtggagaagagggctttatgaagcacaacacatctcgccagaatgaacactgcctcaccaattttgacctggctgagtatcggcaggtgctgagtgacttggccattcagatctaccagcagctcgtgcgggtgttagagaacatccttcagccaatgattgtctcaggcatgctggaacatgaaacgattcagggcgtgtctggggtgaagcccacagggttgagaaagcgaacctccagtatcgccgatgagggcacctacacactggactccatcctccggcagctcaactccttccactcggtcatgtgtcagcatggcatggaccctgaactgatcaagcaggtggtcaagcagatgttctacatcataggggccatcaccctgaacaaccttctcctgcggaaggacatgtgctcctggagtaaaggcatgcagatcaggtacaatgtcagtcaactggaagaatggctgcgtgacaagaatctgatgaatagtggggctaaagaaaccctggaacctctcattcaggctgctcaacttttgcaagtgaaaaagaaaacagatgatgatgcagaagccatttgttctatgtgcaatgctttaactactgcccagattgtgaaagtgttgaatttgtatactccagttaatgagtttgaagaaagagtctctgtgtcgttcattcgtactatacagatgcgtttacgagacaggaaagactctccccagctgctcatggatgctaaacacatctttcctgtcacctttcctttcaacccatcttccctcgcactagaaaccatccagattccagccagcctcggcctgggcttcatttcacgggtctgaaagtgatgtccaggcaaaaattgacaatacatttcttgcccgaaataagaacccattatttccagtgagttactgaaaatacatttttaaagagaaagtactgattatctcccaaatgagaagtcattaactggaaatctccctagaatactttcatcactttggaaacaaagataggctctttcgtgctgtgttatctttatagcaacactcatccttaaccaactaggtaccgtgagtttacatacaggagaatgatggaaggaagggaggaaggaaaggaggagaaaaatgtgtcttcagctggcagcatttattttaaatccttagcactgagtttgaatggtataaaaagtataacttccatagatgagctgttgttaggaaggcaccaaagaacctcctctgcactaaacaggagaatggaaagaaaagtctccattgagtacatatcatgtcagtttagtaatcaattatgttgatattgttaaactggttcaaagaaataaactggcaatatgtaaagtaattcctcatttgtgtcactatgatatagagatattaaaggaatgttggtttgctaaatagtatagatgtccatttgtactatagtttactgagcattttaaattgctgctacatactgtcttcttaaaatgtaagtgatattaggcactacaataagtttctcttgtcaattctgtttacaattcaatcagatcacagttttaactggattatatgcaaatacctacagattcacctgcacaagtagcagacactggaaagtcatgtagtaatatgacaaaatgcttgacatttaggggtaggattagacaaagtggctattgttgatgtcattatttattcaggatgtattacattgatgtgctcattaattttccctgggtggatattgcgtcagggtacagtgttctgtgaagtgacttatttttaactaccagatctgattccttcagtgcatattttcaaccttgacaggttttctctcttcttaatttattaagaattaatctcggctgggcgcggtggctcacgcctgtaatcccagcactttgggaagccaaggtgggcggatcacttcaggttaggagttggagaccagcctggccaacatggcgaaaccctgtctctactaaaaatacaaaaattagccgggcgtggtggcacttgcctgtaatcccagctactcgggaggctgaggcacgagaatcgattaaacctgggaggcggagattgcaatgagatcgaaccactgcactccagcctgggtgacagagagagacactgccttggaaaaaaaaagaatctcactcactatctagagaggattgtcagaatattcacgattcaggtcttgaaactttgattatgcaaaagaaggtatataataaatatttcattatgattcagtttttaaggctttgcagcttctataagtgttctcagatgccactagataattttaaaagcatcatattagaaatactttaagaagacttatataagaaatagaagattgttgaattttacagaggatttggttcattaagacccagattctgtaagttttcattctgaaattctagttaaacatattcaccatttttcttaggaatcttatacaataaatccttcaggttgcacaaaagcaaattattagttttcattagaaactctggttctgaattacaatcataggttatataaatttaactgttagatggtctataaatcttattaaaatatgtgcaatatttatggaagtcaaacagcttcatatcagtgataaagattgttattaaaagataaatactgtctgttaatttacatgggcctcaagttcctcgtttataaaataagagagttggacactgattcttaacatctcctccacatttaaaattctctcttctcagcccttagattctagagagaaaaagctgcagttactcagtaagtccattctctgatggaaagaccagtgtgtagtgcctgtcaattccttaggattaatcaaatgtaaaatcacaagtttgtgtagctgtaacctttcttaaatgtacatgatttatgtacatgcttttagaaggtcctactatatttgtattataattagtttaagtaatttttattacatcatgtattgctttattcagtttgaatacatttatttatttatttgcagtatcaaccagaaacactaccaattgcatcaaattctcccagtttttcctggttgtcaatgcggttttcaatgcacaattaagtcatagccatttggttcgtaccaaatgtgtcagaatctaacagcatccgataggctgtaagttggggagttgctaagaaaatgcaacgtggtacaggctgtccgcctcagccctggaaatctcccagacctcccccagcttcatcctgtgtagcacgactcaacgtgcaccctgaatcttctcaggtcttccaggtcatgctgtagctgtcactgccatgcagcccttttttttactccggacagctcatgtactgaagcgtcatgaaagaaaggctgtggtctgagcccttctctcccatctcctgtctttgtcctgtcaagtgctggagccagagctcctacagctgcccttggtggtttctcctgttcagcgatggtggcacaaaggttctgctattccagggctccagcttcctcccaggtctacccagagctccagatgggggtctgaattaacctctcttggtggcctggagatttttagtcattgacaagaataccttgtaaccagggaaccccaaggcccagtaaatgattctgtataccattttcttgaaggtacaagaagattctgccgactatggggatctttgggccagtttgaggattgctttccctctgaggttctttctctctgtcagccacactttctcacccaacttcagacacaccctgccagcctttcccctactcattcactcttccccttccctcaacttaatcgtctatcccgttgcctgctgtttgactgtgcactgaaggcaggtggatggagtcagtcctcagttgcccctgctggccttcctggtgcttaccatcagcccaatctttgcacagtccttgttgttcttacttctctgcatgcattccttcagaagatcagtcatcaactttttcttaattcctctgtgacacacaatgggaattcaaaggaagagatcttaaaagtcacaacagttctttatcttaataatcccctccccattcaccttactacatgcagactcacctcacacccttacaacttgaagctgaaaatttaaaagtaatttccctttttgcagcttttcctcaggttaaggctttgatctgcctgagagtaactctaaaaggagggaagataaatatgggataaaatccacaaagtgtagcttctaattcctttggaagtttaaaaaatttccacatatctgatgcttcttttgtcaggtgcagaagcacaaaaacatattccgaagccaactgatagggaatttggggattattgtcagtttggagaatttgctgtgttatttcttcatttccatggatagctcatagttggctctttctgggtgagtaattatgtgtaatatagatcaaatcttttactaaggttacagctacatgttaggggaggctatgaaaatactatattattataatttcagtgcagtgattgttgtgagaaataactttcatggtaaccctaggaaaatgggcacctgccaccatcctgagaagtcctcacacaatgccctttctctcttacacacacacacacacacatacacacacacacacccccgtcactaattcatagagttccttagcaggcatagtcaaggatcctctgggtaatgtcagctgcttagtgataaaacagagccaaaactagtgcatcctgttgaaagtaatgcagaaacagtacctgggtccagatatgctttcctgcggcgctttcctctgttacctcgtttcatcctcacagcagcatggacggtaggtggggtcgcttctacaatcatttctgatgatagcttgggaatagagataggggcagtgacttgcctgatgtcgcacagccctctggctgtcctgctttcccatatggagcagtggtggtgtgggcacctgtgatgcaggagactttaaaaatgtcgtgaggtcacgtgctgcccctcctggtacgtgtggaatgcccctggccagcaaggggtgcttttttatcagagttggcagctggcatgtgggaaccgagcaagtgctgcgtaccaagttacttgttttaaggagaccaagtgctcagcgccaggtggttttcttttttgtcatagttacttgctataactcagcttgacttctgtcatgaatcagtgctctctgggaggatgcaatactctgtttgggcattaattggtagcaggttgtctcaaccaaaaagacaggaaacagcaaaagcctctctgaaattaagaggaaagttactctccccacacccatcagagtctttattggagccaccaggtgagctgtgcagcctggacaggcctgcagctataggccaccttcccagtttaggtcctcagcacaggggagcccaagtcactgggtgccttccgagggctgtcactgggcaggccatatacaagtcagtgtgtgcgtgggcactgcagtgtgtgcatgccgtaggtgttgatgggtgctaggaggggtgtcgtgtgcatgcgcgttgaagaggatctgtattgccgtgacctctgttcatggatgagtgcattgtaatttgttctcaggctgtgctgtgagggccgccttaacccttgctcccttcccttctagagctgccttaagttctccagaacttttcttctgtaaaggatatcttgcctggaagggatatcttgccctgtttctcaaggttttgtgagagttttgactggatgtggccctgcatgaccctccttctcctgtacttcctctttcctttccaaatgggaattagaactgtggggcagcaacagtctcagagccagtgagaggccagcttagagaatgcttctgagttagtgggactctgtgtcacaagtaagcaaatgaatatatgaaagaaattatggagataagttagattcttggtaatacttaaatgtcttgctttctactaaccttttgttactaaaggtaaagggtataactcaaactttttgtggacattcttttcaaaattttttaagaaccctgtactataaaaggttgagtaaaaacaggaaagcgtgctataagttcaaatctgttgtattaccctaaattagataaaccaacctgaattatagtagatttctcaatagatgaggaactgaaaaatactatgtaaaatatcttccaaaatgctttttatactttttttatttgtaatttggtctatctaaaatgttcgttagcttaacttaatgggcgttattggattcatatgactaacgtttcctcagtattgtaatgcttgaaatatttgaaagaaaaaatgttgttttttagttgaaactggtatatataattcagtgcttggcaggttagtatatttttatgcatttttcagagtcagcagtttcaaatcttattgttatcatgttataaaattttagcccacatttcaggctccgtaaatcatttgagccattattttttcccaacaaatggtgaattttttctttaaatgtggatatatatgttgtaatttatgattcctggttatgtatttttgtgggatcctgcagtaaaattgacttttttgtgtctttgggagatttaaattgcgctaacagtgttgcgcaaaaatgagttcatgccatttaacatattgtattttaattattaactgtattaatttactatgaaatggacatccttttaactaaaatggaattgaacattgcagttttcaaatatttttccttgttgggtctggaaaaggaattctactttgatctgcatagaaaattttgatacaattttttgaaagttcttaggtgaaacatttacccattaaaaaggaagcagaaatactgagacatgaaaggcattatcaactaactctagactctagaacccattctagcatatctcacgtgcaatttttaaaaataagttaataattcatctcatatcaacaaaagcctttgaaacatgggttttcactagatatcacctagtgctaagataaaaaccaaaacaatatcagaattacatttatgctctaaatttgtagttgtccattgttgtgcttagtaaatgtgtgtcattaatgctgtattctcctagctattatggaaacttgtttaaataaagatatggat

SEQ ID NO: 273223 - DNA, 5643 bp, Artificial Sequence
  derived and/or modified sequence
atgaagagcagcagcctggagaccatgttcgcccgggtgtggatccctgatcctgaggaagtgtggaaatctgcagaactccttaaggactacaagcctggtgataaggtgcttctcctccacttggaggagggcaaagatcttgaataccatttggatccaaaaactaaggagctaccgcacctacggaatcctgacatacttgtgggagaaaatgacctgactgccctgtcatatctgcatgaaccagctgttctgcacaacctgcgggttcgcttcatcgactcaaagctgatatatacgtactgcggtatcgtcttggtggctatcaatccatacgaacaattgccaatttatggagaggacatcataaatgcatactctgggcaaaatatgggggacatggatcctcacatttttgcggtagcagaggaggcctataagcagatggctcgggacgaacgtaaccagagtatcatcgtgtctggtgagtctggggcggggaagaccgtgtctgccaagtacgccatgcgctatttcgctacagtcagtggctccgccagtgaagcaaatgtggaggagaaggtcctggcttccaaccctatcatggaaagcataggcaacgcgaaaactactcgcaatgataactcctcccggtttggcaaatacattgagattggctttgataagaggtatcgaatcattggcgccaatatgcgcacctaccttctcgaaaagagcagggtggttttccaggcagaagaggaacggaattatcacatattctaccagctgtgcgcgagcgcaaaactccccgagtttaaaatgctgcgcctgggaaacgcagacaacttcaactacactaagcaggggggatctccagttattgagggagttgatgatgcaaaagagatggcacacacaagacaggcgtgtactctcctggggatcagcgaatcccaccagatggggatcttcagaatcctggcaggcattctacacttgggtaatgttggttttaccagtcgggatgccgacagctgtacgatccctccaaaacatgaacctttatgtatcttctgcgagctcatgggtgtggattacgaggagatgtgccactggctttgtcatcgcaagcttgcgacagccacagaaacatacattaaacctatatccaagctccaggccactaatgcaagagatgccctcgcgaaacatatttacgccaaactgttcaactggattgttgataacgtgaaccaggctctgcactcagccgttaagcagcattcttttatcggcgtgctggacatctatggctttgaaacatttgaaataaacagtttcgaacagttttgcattaattacgcaaacgagaagctacaacagcagttcaacatgcatgtcttcaagttggagcaggaggaatatatgaaggagcaaattccctggacgctcatagacttctacgataaccagccatgcataaaccttatagaatccaaattaggtatcttggacctgctagatgaagagtgtaagatgcccaagggtaccgacgatacctgggcccagaaactgtataacacccacctgaataagtgtgcattgtttgagaaacctaggctgagtaacaaggcttttatcatccagcatttcgctgacaaagtggaatatcaatgtgaaggcttcctggagaaaaacaaagatacagtgttcgaggaacaaattaaagtgctcaaatcaagcaagtttaagatgctgccagaattatttcaggatgacgagaaagctatcagcccaactagtgcaaccagttcagggcggaccccactaacccgaactccagccaagcccaccaagggacgacctggtcaaatggctaaggagcacaaaaagaccgtgggtcaccagttccggaactctttgcacctactgatggaaacactgaacgctactactcctcactacgtccgatgtataaagccaaacgactttaaattcccgttcacctttgacgaaaaacgggcggtccagcagttaagagcttgcggagtcctcgagacaatccggatctctgctgccggattccctagccgctggacttatcaggaatttttctctcgatatcgcgtactgatgaagcagaaggacgtcctgagtgaccgaaagcagacatgcaaaaatgtactggagaagttgattcttgataaagataaataccagtttggtaaaacaaaaattttctttagggctggtcaggtagcctacctggaaaaactccgggcagacaaattgagggcagcttgcatcagaattcagaaaacaatacgcggctggctgctgcgcaaaaaatatcttaggatgcgcaaagccgcaattactatgcagcggtacgtgaggggctaccaggctcggtgctacgccaagttcctccggcgcactaaggctgccacaatcatccagaaatactggcggatgtatgttgttcggcgcagatataaaattcgcagggcagccacaatagttttacagagctatttaaggggatttttagcccgcaaccggtacagaaagatactgcgcgaacacaaggccgtgatcattcaaaaaagagtccggggatggttggcgcgaacacactacaaacgaagcatgcacgctatcatctatttgcagtgctgtttcaggagaatgatggccaaacgcgagttgaaaaagctgaaaatcgaagcgcgtagcgtggaacggtataagaaactccacattggaatggaaaataagattatgcagctgcagaggaaggttgacgaacagaacaaggattacaagtgtcttgtggaaaaactcacaaacttagaaggtatatacaactcagaaactgaaaagctgcgatctgatctggaaagacttcaactctctgaggaggaggccaaagtcgctacagggagagtgttgtccctccaagaggagatcgccaagctgcggaaggatctggaacagacccgatctgagaagaaatgtattgaagagcatgccgatcggtataagcaggaaacagaacagctcgtgtcaaatcttaaggaagaaaacaccctcctgaaacaagagaaggaggccctcaatcacaggatagtccagcaggctaaagagatgaccgagaccatggagaagaaattggtcgaggaaacaaaacagttagagctggacctgaatgatgagcgcctacgttaccaaaacctgctgaatgagtttagcagacttgaggagcggtacgacgacttgaaggaggaaatgaccctgatggtccacgtccccaagccaggccacaagcgcacggacagcacccattcgtcgaacgagtcagaatatattttctcaagtgagattgcagaaatggaagacatccccagccgcacagaggagccaagtgagaagaaagtgcccctggacatgtcactgttccttaagctacagaagcgggtgactgaactggagcaggagaaacaggtgatgcaggatgaactggatcggaaggaggaacaggtgctgagatccaaagctaaggaagaagagagaccccagattcgtggtgccgagcttgagtacgagtcgctgaaacgacaggaactggaaagtgagaataaaaaactgaagaatgaactgaacgagttgcgtaaagccctttcagagaaatcagcccccgaagtcacggcccccggggcccctgcatacagggtcttgatggagcagctcacatccgtgtctgaagagcttgacgtccggaaggaagaagtcttgatactgcggtctcagctggtgagccagaaggaggcaatccagccgaaactgcacgagaacaccatgactgattccacaatcctccttgaggatgttcagaagatgaaagacaagggtgagattgcccaggcctacattgggctgaaagaaactaataggtctagcgcgctggactaccacgagctgaacgaagacggtgaactttggctagtctatgagggcctgaagcaagcaaacaggttgcttgagtctcagctgcagtcacagaaacgcagccacgagaatgaagcagaagctctcaggggagaaattcagtcactgaaggaggaaaacaacagacaacagcaacttctggcgcagaatctgcagctccctccggaagcgaggatcgaagcctctctgcagcatgaaataaccaggttgactaacgaaaatctatatttcgaagagctttacgcagatgacccgaaaaagtaccagtcctatcgaatttctctttataagcgcatgatcgatcttatggagcaattagaaaagcaggacaagacagtgcgcaagcttaaaaagcagttaaaggtgttcgccaaaaagatcggggagctggaggtagggcaaatggagaacattagccccggccagatcattgatgagcccattcggcccgttaatattccgcgaaaggagaaggatttccaggggatgctggagtacaaaaaagaggatgagcaaaagctggtcaagaacctaatcctcgaactgaaacctagaggtgtcgcagtgaacctgatcccgggtctaccagcatatattctgttcatgtgcgtgcggcacgcagattacctcaacgatgatcagaaggtaagatccctgctcacgtctactatcaactctatcaaaaaagtactcaagaagcggggagatgacttcgagacagtaagcttctggttgtctaacacatgcagattcctccattgcctcaagcaatatagtggcgaggagggattcatgaaacataacacatcaaggcagaacgaacactgcttaactaacttcgaccttgccgagtacaggcaggtgctgagtgacttggcgatccaaatatatcagcaactggttagagtactagagaacatcctccagcccatgatcgttagcggaatgctagaacacgagacgatccagggagtttccggagttaagcctacaggcctgcgaaagagaaccagcagcattgccgacgaaggcacctataccctggactcgatcttgcggcagctgaactcctttcactcagtgatgtgccagcacgggatggatcctgaactgataaaacaggttgtgaagcagatgttttacattattggggccattactctgaacaacctgcttcttaggaaggatatgtgtagttggtccaaggggatgcagatccgctataatgtgagccaacttgaggagtggctacgcgataagaatctaatgaattccggggctaaggaaactttggagcccctaatccaggcggcacagctcctccaggtgaagaagaaaaccgatgacgatgccgaggccatatgttcaatgtgtaatgctctgacaactgctcagatagttaaggtgctgaacctgtatacacctgtaaacgaattcgaggagagagttagcgtgtcatttatcaggaccatccagatgcggctgagagacaggaaggactctccacagctgctcatggatgcgaaacatatttttccagtcacctttccttttaacccctcaagccttgctttagagaccattcagatccctgcatctctggggctggggttcatatccagagtgtag

SEQ ID NO: 273224 - DNA, 5642 bp, Artificial Sequence
  derived and/or modified sequence
atgaagagcagcagtctggagactatgtttgccagggtctggatccccgaccccgaggaggtctggaagagcgcggagctgctgaaggattataagcctggggacaaggtgctcttactgcacttagaggaaggtaaagacctagagtatcatctagatcccaagacgaaggaactaccgcatctcagaaatcctgacattctggtaggcgagaacgatttaacagccctgtcttatttgcatgagcccgctgtgctgcataacttacgcgtgcgatttattgatagtaagctgatatacacatactgtgggatcgtgctggttgccattaatccctatgaacagctgcctatttacggcgaagacattatcaacgcatacagtggccaaaacatgggagatatggacccacatatcttcgcagtggctgaggaagcctacaagcagatggctcgggacgaacgcaatcaatccattattgtctcaggcgagagcggagctggcaaaactgtctcagctaagtacgccatgcgatacttcgctaccgtttctgggtcggcctctgaagctaatgtcgaagaaaaagtgttagcttcaaaccccatcatggagagtattggtaatgccaagaccacccgaaatgacaattccagccgcttcggcaaatacatcgagatcgggttcgacaagcgatacaggatcatcggtgccaacatgagaacttatctcctggagaagagtagagttgtgtttcaggccgaggaggaaagaaactatcacatattttatcagctttgcgcttccgcaaagcttcccgaatttaagatgctgcgcctgggcaatgccgacaacttcaactacaccaagcaagggggttctcctgtgatcgagggtgtggacgacgcaaaggagatggcccacacaaggcaggcttgcaccctcctgggcataagcgaatcacatcagatggggatatttcgaattttggctggcatccttcatttgggcaacgttggattcacaagccgagacgccgacagctgtaccattccccctaaacatgagcccctatgtatcttttgcgaactcatgggggtcgattacgaggaaatgtgtcactggctttgccacaggaagcttgccacagccacagagacctacattaaaccaatatctaaattacaggccacaaacgctagagatgctctcgctaagcatatctacgccaagctattcaactggatcgtcgataacgtcaaccaggctctgcacagcgctgtaaagcagcacagctttataggagtgctggatatctatggtttcgaaacatttgagattaattccttcgaacagttctgcatcaattacgcaaacgagaagctgcagcagcaatttaacatgcacgtctttaagctggaacaggaagagtacatgaaggaacagatcccatggactctaatcgatttctacgacaaccagccttgcataaatctgatcgagagtaagttgggcatactggacttgcttgatgaggagtgtaagatgccgaaaggaaccgacgatacttgggcccaaaaactgtataatacccatctcaataagtgcgccttgtttgagaaacctcgtctctctaataaagccttcatcattcagcacttcgcagataaggtagaataccaatgtgagggatttctcgagaagaataaggatacagtctttgaagaacaaatcaaggtgctgaagtcctctaagtttaagatgctacctgagctgtttcaagacgacgaaaaggcaatctcaccaactagtgcaacgtccagcggacggactccattgacacgaacaccagctaaacccacaaaaggacgtccgggacaaatggccaaggaacataaaaagactgttggccaccagttccgaaattccctacacctgctgatggaaactctaaacgctactacaccacattacgtgaggtgcataaaaccaaacgacttcaagttcccctttacatttgatgagaagcgggcagtgcagcaactacgtgcttgtggcgtgctagagactatcaggatctccgccgctggtttcccatcacggtggacttatcaggaatttttcagccgctatcgggtgcttatgaagcagaaagacgttctaagcgatcgtaagcagacttgcaaaaatgttcttgagaagctgattctggataaggataagtaccaattcgggaagacaaagatcttttttagggccggacaggtggcttatctggagaaactgcgggcagacaagctgagggcagcatgcattagaatccagaaaaccattagggggtggcttctaagaaagaaatacctacggatgcgcaaggcagcaattactatgcagcggtatgtgaggggttatcaggcacgctgctacgctaaattcctcagacggaccaaagccgctactatcattcagaagtactggcgtatgtacgttgtgagacgcagatacaaaattcgtagggcggcaacgatcgtgctacagtcgtatttgcggggtttcctggccaggaacaggtaccgaaagatcctccgcgagcataaggcggtgattatacagaagcgcgtcagaggatggttggctaggactcattataaacgaagcatgcacgccatcatatacctgcagtgttgctttagaagaatgatggcgaaaagagagttgaagaaactgaagattgaagctcgatccgtggaacggtacaagaagctccatattggcatggagaataaaataatgcaactgcagaggaaggtagacgaacagaataaagactacaagtgcctggttgagaagctgaccaacttggaaggcatatacaatagcgagacagaaaagctgcgtagcgatttagaacggctgcagctaagtgaggaagaggccaaagtagccaccgggagagtgctgtccctgcaggaagagatcgcgaagcttcgcaaggatctggagcagactaggtctgaaaaaaagtgcatcgaagagcatgccgatagatataaacaggaaacagaacaactagtcagcaacctgaaggaggagaataccctgttaaagcaagagaaggaagcacttaaccacagaattgtgcagcaggctaaggagatgacggaaacgatggagaagaagttggtggaagaaacaaagcagttggaactcgatctgaatgatgagcgtttgcggtaccagaatctattgaatgagttctcgcgcctagaagagaggtacgacgacctgaaggaagagatgacgctgatggtgcacgtccccaagcctggccacaagagaacagacagcacccacagctcgaacgaatcggagtatatcttctccagtgaaattgccgagatggaggacattcctagtagaaccgaggagccctctgagaaaaaagtccccttggacatgagtctgttccttaaattacagaagcgagtgacggagctcgagcaggaaaaacaagtgatgcaggatgagcttgatcggaaggaggaacaagtgttgcgctctaaggctaaagaagaagagagaccccagattagaggggctgagctggagtacgagtctctaaagcgccaggagctcgaatctgagaataagaagctgaagaatgaactcaacgaattgaggaaggccttaagtgagaaaagcgcccctgaggttacagcccctggagcacccgcatatagggtgctcatggagcaactcacttccgtgtccgaagaactggatgttcgcaaagaagaagtgctgatactgaggtctcagttagtatctcaaaaggaggcaatacagcccaaactccacgaaaacactatgacggactcgactatactgctggaagatgttcagaagatgaaggacaaaggtgagatcgcacaggcttacatcggcttaaaggagaccaaccggtctagcgctctggactaccatgagctaaatgaagatggggagctgtggcttgtgtatgaaggactcaagcaggccaacagactcttggagtcacagttgcagtcacagaaaagatcccacgagaatgaagctgaggccttacgcggagaaattcagtcactcaaggaagaaaataacagacaacaacagctcttggcccaaaatcttcagctgcctccagaagccaggattgaagctagtcttcagcacgaaattacaagacttactaacgagaacctgtatttcgaggaactctatgcggacgatcccaaaaagtaccaatcatatcgaatttctctgtacaaacgcatgatcgacttgatggagcaactggaaaaacaggacaagactgtgaggaaacttaagaagcaacttaaggtttttgccaagaagattggcgagctggaggtgggacagatggaaaacatttcgcccggacagatcatcgatgaacctattcggcctgtcaatatcccccgaaaggaaaaggactttcagggcatgctggaatacaaaaaggaagacgaacagaagctggtcaaaaacctgatcctcgaactgaagccacgcggagttgctgtgaatctgatcccagggcttcccgcttacattctgttcatgtgtgtgagacacgctgactacctcaatgatgatcaaaaggtccggtcactgttgaccagtaccataaactccattaaaaaggtactgaagaagcgcggtgacgattttgaaacggtgtctttctggttgagcaatacttgccgtttcctgcactgtctcaagcagtactctggagaggaagggttcatgaaacataacacatcccgccagaatgagcactgtctaacgaactttgacctagcggaatataggcaggtcctctcggacttggcaattcagatctaccaacagctggtgagagtcctggagaatattctacagccgatgatcgtctctgggatgttggagcacgaaaccattcagggagtgtccggcgtgaagcctacaggtctcagaaaaagaacgtctagtatagccgatgaaggtacatatacattggactccattttgcgtcagctgaattccttccacagtgtgatgtgccagcatgggatggatccagaactcattaagcaagttgtgaaacagatgttctatattataggtgctataaccctaaacaacctgctgctccgcaaggatatgtgtagttggtcaaagggaatgcaaatcagatacaacgttagccaactggaggagtggctgagggataagaacttgatgaattcaggcgcaaaggaaaccttggagccattgatccaagctgcacagttactgcaggtcaagaaaaaaaccgacgacgatgctgaagcaatctgctcgatgtgcaacgccctaaccaccgcacagatcgtgaaggtcttgaacttgtacactccagtgaatgagttcgaggaacgggtgtcagtcagcttcattagaactatccagatgcgactccgtgaccggaaagactccccacagctgttgatggatgccaaacacatcttcccagtcacgtttccatttaacccttcgtcccttgccttagagactatccaaatacccgcttccctgggcctcgggtttattagccgtgtgta

SEQ ID NO: 273225 - DNA, 5643 bp, Artificial Sequence
  derived and/or modified sequence
atgaagagcagcagcctggagaccatgttcgccagagtgtggatccccgaccccgaggaggtgtggaagagcgccgagctgctgaaggactacaagcccggcgacaaggtgctgctgctgcacctggaggagggcaaggacctggagtaccacctggaccccaagaccaaggagctgccccacctgagaaaccccgacatcctggtgggcgagaacgacctgaccgccctgagctacctgcacgagcccgccgtgctgcacaacctgagagtgagattcatcgacagcaagctgatctacacctactgcggcatcgtgctggtggccatcaacccctacgagcagctgcccatctacggcgaggacatcatcaacgcctacagcggccagaacatgggcgacatggacccccacatcttcgccgtggccgaggaggcctacaagcagatggccagagacgagagaaaccagagcatcatcgtgagcggcgagagcggcgccggcaagaccgtgagcgccaagtacgccatgagatacttcgccaccgtgagcggcagcgccagcgaggccaacgtggaggagaaggtgctggccagcaaccccatcatggagagcatcggcaacgccaagaccaccagaaacgacaacagcagcagattcggcaagtacatcgagatcggcttcgacaagagatacagaatcatcggcgccaacatgagaacctacctgctggagaagagcagagtggtgttccaggccgaggaggagagaaactaccacatcttctaccagctgtgcgccagcgccaagctgcccgagttcaagatgctgagactgggcaacgccgacaacttcaactacaccaagcagggcggcagccccgtgatcgagggcgtggacgacgccaaggagatggcccacaccagacaggcctgcaccctgctgggcatcagcgagagccaccagatgggcatcttcagaatcctggccggcatcctgcacctgggcaacgtgggcttcaccagcagagacgccgacagctgcaccatcccccccaagcacgagcccctgtgcatcttctgcgagctgatgggcgtggactacgaggagatgtgccactggctgtgccacagaaagctggccaccgccaccgagacctacatcaagcccatcagcaagctgcaggccaccaacgccagagacgccctggccaagcacatctacgccaagctgttcaactggatcgtggacaacgtgaaccaggccctgcacagcgccgtgaagcagcacagcttcatcggcgtgctggacatctacggcttcgagaccttcgagatcaacagcttcgagcagttctgcatcaactacgccaacgagaagctgcagcagcagttcaacatgcacgtgttcaagctggagcaggaggagtacatgaaggagcagatcccctggaccctgatcgacttctacgacaaccagccctgcatcaacctgatcgagagcaagctgggcatcctggacctgctggacgaggagtgcaagatgcccaagggcaccgacgacacctgggcccagaagctgtacaacacccacctgaacaagtgcgccctgttcgagaagcccagactgagcaacaaggccttcatcatccagcacttcgccgacaaggtggagtaccagtgcgagggcttcctggagaagaacaaggacaccgtgttcgaggagcagatcaaggtgctgaagagcagcaagttcaagatgctgcccgagctgttccaggacgacgagaaggccatcagccccaccagcgccaccagcagcggcagaacccccctgaccagaacccccgccaagcccaccaagggcagacccggccagatggccaaggagcacaagaagaccgtgggccaccagttcagaaacagcctgcacctgctgatggagaccctgaacgccaccaccccccactacgtgagatgcatcaagcccaacgacttcaagttccccttcaccttcgacgagaagagagccgtgcagcagctgagagcctgcggcgtgctggagaccatcagaatcagcgccgccggcttccccagcagatggacctaccaggagttcttcagcagatacagagtgctgatgaagcagaaggacgtgctgagcgacagaaagcagacctgcaagaacgtgctggagaagctgatcctggacaaggacaagtaccagttcggcaagaccaagatcttcttcagagccggccaggtggcctacctggagaagctgagagccgacaagctgagagccgcctgcatcagaatccagaagaccatcagaggctggctgctgagaaagaagtacctgagaatgagaaaggccgccatcaccatgcagagatacgtgagaggctaccaggccagatgctacgccaagttcctgagaagaaccaaggccgccaccatcatccagaagtactggagaatgtacgtggtgagaagaagatacaagatcagaagagccgccaccatcgtgctgcagagctacctgagaggcttcctggccagaaacagatacagaaagatcctgagagagcacaaggccgtgatcatccagaagagagtgagaggctggctggccagaacccactacaagagaagcatgcacgccatcatctacctgcagtgctgcttcagaagaatgatggccaagagagagctgaagaagctgaagatcgaggccagaagcgtggagagatacaagaagctgcacatcggcatggagaacaagatcatgcagctgcagagaaaggtggacgagcagaacaaggactacaagtgcctggtggagaagctgaccaacctggagggcatctacaacagcgagaccgagaagctgagaagcgacctggagagactgcagctgagcgaggaggaggccaaggtggccaccggcagagtgctgagcctgcaggaggagatcgccaagctgagaaaggacctggagcagaccagaagcgagaagaagtgcatcgaggagcacgccgacagatacaagcaggagaccgagcagctggtgagcaacctgaaggaggagaacaccctgctgaagcaggagaaggaggccctgaaccacagaatcgtgcagcaggccaaggagatgaccgagaccatggagaagaagctggtggaggagaccaagcagctggagctggacctgaacgacgagagactgagataccagaacctgctgaacgagttcagcagactggaggagagatacgacgacctgaaggaggagatgaccctgatggtgcacgtgcccaagcccggccacaagagaaccgacagcacccacagcagcaacgagagcgagtacatcttcagcagcgagatcgccgagatggaggacatccccagcagaaccgaggagcccagcgagaagaaggtgcccctggacatgagcctgttcctgaagctgcagaagagagtgaccgagctggagcaggagaagcaggtgatgcaggacgagctggacagaaaggaggagcaggtgctgagaagcaaggccaaggaggaggagagaccccagatcagaggcgccgagctggagtacgagagcctgaagagacaggagctggagagcgagaacaagaagctgaagaacgagctgaacgagctgagaaaggccctgagcgagaagagcgcccccgaggtgaccgcccccggcgcccccgcctacagagtgctgatggagcagctgaccagcgtgagcgaggagctggacgtgagaaaggaggaggtgctgatcctgagaagccagctggtgagccagaaggaggccatccagcccaagctgcacgagaacaccatgaccgacagcaccatcctgctggaggacgtgcagaagatgaaggacaagggcgagatcgcccaggcctacatcggcctgaaggagaccaacagaagcagcgccctggactaccacgagctgaacgaggacggcgagctgtggctggtgtacgagggcctgaagcaggccaacagactgctggagagccagctgcagagccagaagagaagccacgagaacgaggccgaggccctgagaggcgagatccagagcctgaaggaggagaacaacagacagcagcagctgctggcccagaacctgcagctgccccccgaggccagaatcgaggccagcctgcagcacgagatcaccagactgaccaacgagaacctgtacttcgaggagctgtacgccgacgaccccaagaagtaccagagctacagaatcagcctgtacaagagaatgatcgacctgatggagcagctggagaagcaggacaagaccgtgagaaagctgaagaagcagctgaaggtgttcgccaagaagatcggcgagctggaggtgggccagatggagaacatcagccccggccagatcatcgacgagcccatcagacccgtgaacatccccagaaaggagaaggacttccagggcatgctggagtacaagaaggaggacgagcagaagctggtgaagaacctgatcctggagctgaagcccagaggcgtggccgtgaacctgatccccggcctgcccgcctacatcctgttcatgtgcgtgagacacgccgactacctgaacgacgaccagaaggtgagaagcctgctgaccagcaccatcaacagcatcaagaaggtgctgaagaagagaggcgacgacttcgagaccgtgagcttctggctgagcaacacctgcagattcctgcactgcctgaagcagtacagcggcgaggagggcttcatgaagcacaacaccagcagacagaacgagcactgcctgaccaacttcgacctggccgagtacagacaggtgctgagcgacctggccatccagatctaccagcagctggtgagagtgctggagaacatcctgcagcccatgatcgtgagcggcatgctggagcacgagaccatccagggcgtgagcggcgtgaagcccaccggcctgagaaagagaaccagcagcatcgccgacgagggcacctacaccctggacagcatcctgagacagctgaacagcttccacagcgtgatgtgccagcacggcatggaccccgagctgatcaagcaggtggtgaagcagatgttctacatcatcggcgccatcaccctgaacaacctgctgctgagaaaggacatgtgcagctggagcaagggcatgcagatcagatacaacgtgagccagctggaggagtggctgagagacaagaacctgatgaacagcggcgccaaggagaccctggagcccctgatccaggccgcccagctgctgcaggtgaagaagaagaccgacgacgacgccgaggccatctgcagcatgtgcaacgccctgaccaccgcccagatcgtgaaggtgctgaacctgtacacccccgtgaacgagttcgaggagagagtgagcgtgagcttcatcagaaccatccagatgagactgagagacagaaaggacagcccccagctgctgatggacgccaagcacatcttccccgtgaccttccccttcaaccccagcagcctggccctggagaccatccagatccccgccagcctgggcctgggcttcatcagcagagtgtag

SEQ ID NO: 273226 - DNA, 567 bp, Artificial Sequence
  derived and/or modified sequence
atgaacagcatgggcggcttcggcggcgtgggcagaatgggcgagctgtacagaggcgccatgaccagcagcatggagagagacttcggcagaggcgacatcggcatcaaccagggcttcggcgacagcttcggcagactgggcggcggcatgggcagcatgaacagcgtgaccggcggcatgggcatgggcctggacagaatgagcagcagcttcgacagaatgggccccggcatcggcgccatcctggagagaagcatcgacatggacagaggcttcctgagcggccccatgggcagcggcatgagagagagaatcggcagcaagggcaaccagatcttcgtgagaaacctgcccttcgacctgacctggcagaagctgaaggagaagttcagccagtgcggccacgtgatgttcgccgagatcaagatggagaacggcaagagcaagggctgcggcaccgtgagattcgacagccccgagagcgccgagaaggcctgcagaatcatgaacggcatcaagatcagcggcagagagatcgacgtgagactggacagaaacgcctag

SEQ ID NO: 273227 - DNA, 567 bp, Artificial Sequence
  derived and/or modified sequence
atgaattccatggggggctttggaggcgtaggaagaatgggtgaattgtataggggtgcaatgacctcaagcatggaaagagactttggacgtggggacattggtatcaatcaaggattcggcgatagttttggcagattgggaggtggtatgggcagtatgaactctgtcactgggggtatgggaatgggtctggaccggatgtcctcatcgttcgatagaatggggcctggtatcggcgccattttggagcggtcaattgacatggatcgcggttttctgtctgggcccatggggtcagggatgagggaacggatagggtcaaaaggaaaccagatcttcgtgagaaatctgccattcgacttgacctggcaaaaacttaaagagaaattttctcagtgcgggcatgtgatgtttgccgagatcaagatggagaatgggaaaagcaaaggatgtgggacggtgcgattcgatagcccggaatcagccgagaaagcatgtagaattatgaacggcatcaaaatcagtggaagggaaatcgacgtgcggctggacaggaacgcgtag

SEQ ID NO: 273228 - DNA, 567 bp, Artificial Sequence
  derived and/or modified sequence
atgaacagcatgggcggctttggaggagtgggccgcatgggagagctgtacagaggagccatgaccagctccatggagcgggactttggccgcggggacatcggcatcaaccagggctttggagacagctttggccgcctgggcggcggcatgggctccatgaacagcgtgactggaggcatgggcatgggcctggacaggatgagcagcagctttgacaggatgggccctggcattggagccatcctggagaggagcattgacatggaccggggcttcctgagcggccccatgggcagcggcatgagggagcgcatcggcagcaaaggaaaccagatctttgtgaggaacctgccctttgacctgacctggcagaagctgaaggagaagttcagccagtgtggccacgtgatgtttgctgagatcaagatggagaatggcaagagcaagggctgcggcaccgtgcgctttgacagccctgagagcgctgagaaggcctgccgcatcatgaatggcatcaagatcagcggccgggagattgatgtgcggctggacagaaatgcctag

SEQ ID NO: 273229 - DNA, 567 bp, Artificial Sequence
  derived and/or modified sequence
atgaacagcatgggcggcttcggcggcgtgggccggatgggcgagctgtaccggggggcaatgacctccagcatggagcgggattttggaagaggggacataggaatcaatcagggctttggggactcatttggacgcctgggaggtggtatgggcagtatgaacagcgtgacagggggcatgggcatgggactggacaggatgagtagctcctttgacaggatggggcccggtattggcgcaatcctggagcggagtattgatatggatcggggtttcctgagtggccccatgggcagcggtatgagggagagaataggaagtaaaggcaaccagatctttgtccgcaacctgccatttgatcttacgtggcagaaactgaaagagaaattctcacaatgcggtcacgtcatgttcgccgaaattaagatggagaacgggaaatctaaaggctgcggcactgtccggtttgactcccccgaatctgccgaaaaagcttgtcgtatcatgaatggcattaaaatttccggaagggagatcgacgtccggctagataggaacgcctag

SEQ ID NO: 273230 - DNA, 567 bp, Artificial Sequence
  derived and/or modified sequence
atgaactcaatgggcggtttcggcggagtggggcgaatgggagagctctacaggggagctatgaccagctccatggagagagattttggcagaggtgacatcggtatcaatcaaggctttggtgacagtttcggaagacttgggggtgggatggggtccatgaactccgtgacaggtgggatggggatgggtcttgacaggatgagcagcagctttgatagaatgggcccaggcatcggagccatcctagaacggtcaatcgacatggatcgcggtttcctttctggtcctatgggctccggaatgagggagagaatcggatcgaagggaaaccagattttcgtgagaaacttaccattcgatctaacctggcagaagttgaaagagaagttttctcaatgcggccatgtgatgttcgccgagataaagatggagaatggcaagtcaaaaggttgcggcaccgttcgtttcgacagccccgagagcgctgaaaaagcctgtcggatcatgaatggtatcaagatcagtggcagggaaatcgatgtgcgcttagacagaaatgcatag

SEQ ID NO: 273231 - DNA, 2458 bp, Artificial Sequence
  derived and/or modified sequence
cgccgcgcttcctcctgaaggtgactgcgcccgcggggacgcagggggcggggcccgggtcgcccggagccgggattgggcagagggcggggcggcggagggattgcggcggcccgcagcgggataaccttgaggctgaggcagtggctccttgcacagcagctgcacgcgccgtggctccggatctcttcgtctttgcagcgtagcccgagtcggtcagcgccggaggacctcagcagccatgtcgaagccccatagtgaagccgggactgccttcattcagacccagcagctgcacgcagccatggctgacacattcctggagcacatgtgccgcctggacattgattcaccacccatcacagcccggaacactggcatcatctgtaccattggcccagcttcccgatcagtggagacgttgaaggagatgattaagtctggaatgaatgtggctcgtctgaacttctctcatggaactcatgagtaccatgcggagaccatcaagaatgtgcgcacagccacggaaagctttgcttctgaccccatcctctaccggcccgttgctgtggctctagacactaaaggacctgagatccgaactgggctcatcaagggcagcggcactgcagaggtggagctgaagaagggagccactctcaaaatcacgctggataacgcctacatggaaaagtgtgacgagaacatcctgtggctggactacaagaacatctgcaaggtggtggaagtgggcagcaagatctacgtggatgatgggcttatttctctccaggtgaagcagaaaggtgccgacttcctggtgacggaggtggaaaatggtggctccttgggcagcaagaagggtgtgaaccttcctggggctgctgtggacttgcctgctgtgtcggagaaggacatccaggatctgaagtttggggtcgagcaggatgttgatatggtgtttgcgtcattcatccgcaaggcatctgatgtccatgaagttaggaaggtcctgggagagaagggaaagaacatcaagattatcagcaaaatcgagaatcatgagggggttcggaggtttgatgaaatcctggaggccagtgatgggatcatggtggctcgtggtgatctaggcattgagattcctgcagagaaggtcttccttgctcagaagatgatgattggacggtgcaaccgagctgggaagcctgtcatctgtgctactcagatgctggagagcatgatcaagaagccccgccccactcgggctgaaggcagtgatgtggccaatgcagtcctggatggagccgactgcatcatgctgtctggagaaacagccaaaggggactatcctctggaggctgtgcgcatgcagcacctgattgcccgtgaggcagaggctgccatctaccacttgcaattatttgaggaactccgccgcctggcgcccattaccagcgaccccacagaagccaccgccgtgggtgccgtggaggcctccttcaagtgctgcagtggggccataatcgtcctcaccaagtctggcaggtctgctcaccaggtggccagataccgcccacgtgcccccatcattgctgtgacccggaatccccagacagctcgtcaggcccacctgtaccgtggcatcttccctgtgctgtgcaaggacccagtccaggaggcctgggctgaggacgtggacctccgggtgaactttgccatgaatgttggcaaggcccgaggcttcttcaagaagggagatgtggtcattgtgctgaccggatggcgccctggctccggcttcaccaacaccatgcgtgttgttcctgtgccgtgatggaccccagagcccctcctccagcccctgtcccacccccttcccccagcccatccattaggccagcaacgcttgtagaactcactctgggctgtaacgtggcactggtaggttgggacaccagggaagaagatcaacgcctcactgaaacatggctgtgtttgcagcctgctctagtgggacagcccagagcctggctgcccatcatgtggccccacccaatcaagggaagaaggaggaatgctggactggaggcccctggagccagatggcaagagggtgacagcttcctttcctgtgtgtactctgtccagttcctttagaaaaaatggatgcccagaggactcccaaccctggcttggggtcaagaaacagccagcaagagttaggggccttagggcactgggctgttgttccattgaagccgactctggccctggcccttacttgcttctctagctctctaggcctctccagtttgcacctgtccccaccctccactcagctgtcctgcagcaaacactccaccctccaccttccattttcccccactactgcagcacctccaggcctgttgctatagagcctacctgtatgtcaataaacaacagctgaagcacc

SEQ ID NO: 273232 - protein, 747 aa, Artificial Sequence
  derived and/or modified sequence
MAELFMECEEEELEPWQKKVKEVEDDDDDEPIFVGEISSSKPAISNILNRVNPSSYSRGLKNGALSRGITAAFKPTSQHYTNPTSNPVPASPINFHPESRSSDSSVIVQPFSKPGYITNSSRVVSNKSSELLFDLTQDTGLSHYQGGPTLSMAGMSESSFLSKRPSTSEVNNVNPKKPKPSESVSGANSSAVLPSVKSPSVTSSQAMLAKGTNTSSNQSKNGTPFPRACPKCNIHFNLLDPLKNHMKYCCPDMINNFLGLAKTEFSSTVNKNTTIDSEKGKLIMLVNDFYYGKHEGDVQEEQKTHTTFKCFSCLKILKNNIRFMNHMKHHLELEKQSSESWENHTTCQHCYRQFPTPFQLQCHIESTHTPHEFSTICKICELSFETEHVLLQHMKDNHKPGEMPYVCQVCNYRSSSFSDVETHFRTSHENTKNLLCPFCLKVIKIATPYMHHYMKHQKKGIHRCTKCRLQFLTCKEKMDHKTQHHRTFIKPKQLEGLPPGTKVTIRASVGPLQSGASPTPSISASASTLQLSPPRTKNITAKNPAKSNTSKPNTVKSNASKPNTSKPNGSKSKYKPKISNMQKKQSTLASSNKKSKVNTALRNLRYRRGIHKCIECCSEIKDFANHFPTYVHCSFCRYNTSCSKAYVNHMMSFHSNRPSKRFCIFKKHSENLRGITLVCLNCDFLSDVSGLDNMATHLSQHKTHTCQVVMQKDAEAAQRFQKISRVYLDSVPLRWTQLMPVLSFQGM

SEQ ID NO: 273233 - DNA, 2244 bp, Artificial Sequence
  derived and/or modified sequence
atggccgagctgttcatggagtgcgaggaggaggagctggagccctggcagaagaaggtgaaggaggtggaggacgacgacgacgacgagcccatcttcgtgggcgagatcagcagcagcaagcccgccatcagcaacatcctgaacagagtgaaccccagcagctacagcagaggcctgaagaacggcgccctgagcagaggcatcaccgccgccttcaagcccaccagccagcactacaccaaccccaccagcaaccccgtgcccgccagccccatcaacttccaccccgagagcagaagcagcgacagcagcgtgatcgtgcagcccttcagcaagcccggctacatcaccaacagcagcagagtggtgagcaacaagagcagcgagctgctgttcgacctgacccaggacaccggcctgagccactaccagggcggccccaccctgagcatggccggcatgagcgagagcagcttcctgagcaagagacccagcaccagcgaggtgaacaacgtgaaccccaagaagcccaagcccagcgagagcgtgagcggcgccaacagcagcgccgtgctgcccagcgtgaagagccccagcgtgaccagcagccaggccatgctggccaagggcaccaacaccagcagcaaccagagcaagaacggcacccccttccccagagcctgccccaagtgcaacatccacttcaacctgctggaccccctgaagaaccacatgaagtactgctgccccgacatgatcaacaacttcctgggcctggccaagaccgagttcagcagcaccgtgaacaagaacaccaccatcgacagcgagaagggcaagctgatcatgctggtgaacgacttctactacggcaagcacgagggcgacgtgcaggaggagcagaagacccacaccaccttcaagtgcttcagctgcctgaagatcctgaagaacaacatcagattcatgaaccacatgaagcaccacctggagctggagaagcagagcagcgagagctgggagaaccacaccacctgccagcactgctacagacagttccccacccccttccagctgcagtgccacatcgagagcacccacaccccccacgagttcagcaccatctgcaagatctgcgagctgagcttcgagaccgagcacgtgctgctgcagcacatgaaggacaaccacaagcccggcgagatgccctacgtgtgccaggtgtgcaactacagaagcagcagcttcagcgacgtggagacccacttcagaaccagccacgagaacaccaagaacctgctgtgccccttctgcctgaaggtgatcaagatcgccaccccctacatgcaccactacatgaagcaccagaagaagggcatccacagatgcaccaagtgcagactgcagttcctgacctgcaaggagaagatggaccacaagacccagcaccacagaaccttcatcaagcccaagcagctggagggcctgccccccggcaccaaggtgaccatcagagccagcgtgggccccctgcagagcggcgccagccccacccccagcatcagcgccagcgccagcaccctgcagctgagcccccccagaaccaagaacatcaccgccaagaaccccgccaagagcaacaccagcaagcccaacaccgtgaagagcaacgccagcaagcccaacaccagcaagcccaacggcagcaagagcaagtacaagcccaagatcagcaacatgcagaagaagcagagcaccctggccagcagcaacaagaagagcaaggtgaacaccgccctgagaaacctgagatacagaagaggcatccacaagtgcatcgagtgctgcagcgagatcaaggacttcgccaaccacttccccacctacgtgcactgcagcttctgcagatacaacaccagctgcagcaaggcctacgtgaaccacatgatgagcttccacagcaacagacccagcaagagattctgcatcttcaagaagcacagcgagaacctgagaggcatcaccctggtgtgcctgaactgcgacttcctgagcgacgtgagcggcctggacaacatggccacccacctgagccagcacaagacccacacctgccaggtggtgatgcagaaggacgccgaggccgcccagagattccagaagatcagcagagtgtacctggacagcgtgcccctgagatggacccagctgatgcccgtgctgagcttccagggcatgtag

SEQ ID NO: 273234 - DNA, 2244 bp, Artificial Sequence
  derived and/or modified sequence
atggctgagctgttcatggagtgcgaggaggaggaactggaaccatggcagaaaaaggtaaaagaggttgaggacgatgacgatgatgagcccatctttgtcggcgaaatctccagtagcaagcctgccatatcaaacatcctgaaccgggtgaaccccagctcctactcccgcggcctgaagaatggagccctctcccgcggcatcaccgcagcttttaagccaactagtcagcactatacaaatccaaccagcaacccagtacccgcttccccaatcaactttcaccccgaaagccgatcatctgacagctccgtaatagttcagccatttagcaagcccggttatattacaaattccagccgcgtagtgagtaataagtcaagcgaattgttgtttgacctcacgcaggatacaggcctgagccactaccaaggcggaccaaccttgtctatggctgggatgtctgaatccagtttcctgagtaagcgtccttccaccagcgaagtcaataatgtcaatcctaaaaaaccaaaaccctcagaaagcgtgagcggggctaattcatccgccgtactaccctccgtaaaatctccatctgtgaccagctcgcaggctatgctggctaagggtactaatacctcaagtaatcagagcaagaacggtacaccttttccacgggcgtgcccaaagtgcaacatccactttaacctcttggatcccctgaaaaaccatatgaagtactgttgtccagatatgatcaataatttcctcggattggcaaagacagaattctcctcgacagtcaacaagaatacaaccatcgatagcgaaaaaggcaaactcatcatgcttgtaaacgatttctactatggaaaacatgaaggcgatgtgcaggaagagcaaaagactcataccaccttcaagtgcttctcatgtctgaagattttaaaaaataatatcagatttatgaatcatatgaaacaccacctggagctcgaaaaacagtcttccgaatcatgggaaaatcacaccacgtgccagcattgctacaggcaattccctactccattccaactgcaatgccatatcgagagcacacacacacctcatgaattttccaccatttgcaagatttgtgaactttcattcgagactgaacacgttcttctgcagcatatgaaggataaccacaaacccggagagatgccatacgtttgtcaggtatgcaactataggtccagctctttttcagatgtagagactcacttcaggacctctcatgagaacacgaaaaatctgctatgcccattttgtttgaaagtaattaaaattgcgaccccctacatgcatcattatatgaagcatcagaaaaagggaatccatagatgcacgaagtgtcggcttcagttccttacttgcaaagaaaaaatggaccacaagacccagcaccaccgcacatttattaaacccaagcagctggaggggctcccaccaggtacaaaggttaccatcagggccagtgttggaccactgcagagcggagcttctccaacccctagtatcagcgcctctgccagtactctgcagctctcaccccctcgaaccaaaaatattacggctaaaaatccggccaagtcaaatacatctaagcctaacacggtgaaatccaatgcctcgaagccaaacaccagcaagcccaacggcagtaaaagcaaatataaaccgaaaatttcaaacatgcagaaaaagcagagcacacttgcatctagtaataaaaagagtaaagtgaacacggccctgcgtaacctgcgataccggaggggaatccataaatgcatcgagtgctgctctgagataaaggactttgccaaccacttccctacttacgtacactgcagtttttgtaggtacaacacctcctgttccaaagcatacgtgaatcacatgatgtctttccactctaaccggccaagtaagcggttctgcatctttaaaaaacactctgagaatctgagaggcattacactggtgtgcctgaattgcgatttcctttcagatgtgtcaggcctggacaatatggctactcacttgtcccagcacaagacccatacttgtcaggtcgtcatgcaaaaagacgcggaagccgcgcagaggttccagaaaatcagccgagtatatctggatagcgtcccactaagatggacccagcttatgccagtgctttcatttcagggcatgtag

SEQ ID NO: 273235 - DNA, 2244 bp, Artificial Sequence
  derived and/or modified sequence
atggccgagctgttcatggagtgtgaggaggaggagctggagccctggcagaagaaggtgaaggaggtggaggatgatgatgatgatgagcccatctttgtgggggagatcagcagcagcaagccagccatcagcaacatcctgaacagagtgaaccccagcagctacagccggggcctgaagaatggagccctgagccggggcatcacagctgccttcaagcccaccagccagcactacaccaaccccaccagcaaccctgtgcctgccagccccatcaacttccaccctgagagccgcagcagtgacagctctgtgattgtgcagcccttcagcaagccaggctacatcaccaacagcagccgggtggtgagcaacaagagcagcgagctgctgtttgacctgacccaggacaccggcctgagccactaccagggcggccccaccctgtccatggccggcatgtctgagagcagcttcctgagcaagaggcccagcaccagcgaggtgaacaacgtgaaccccaagaagcccaagcccagcgagagcgtgtctggggccaacagcagcgctgtgctgcccagcgtgaagagccccagcgtgaccagcagccaggccatgctggccaagggcaccaacaccagcagcaaccagagcaagaatggcacccccttcccccgggcctgccccaagtgcaacatccacttcaacctgctggaccccctgaagaaccacatgaagtactgctgcccagacatgatcaacaacttcctgggcctggccaagacagagttcagcagcacagtgaacaagaacaccaccattgattctgagaagggcaagctgatcatgctggtgaatgacttctactacggcaagcatgaaggagatgtgcaggaggagcagaagacccacaccaccttcaagtgcttcagctgcctgaagatcctgaagaacaacatccgcttcatgaaccacatgaagcaccacctggagctggagaagcagagcagcgagagctgggagaaccacaccacctgccagcactgctaccggcagttccccacccccttccagctgcagtgccacatcgagagcacccacacccctcatgagttcagcaccatctgcaagatctgtgagctgagctttgaaacagagcacgtgctgctgcagcacatgaaggacaaccacaagccaggagagatgccctacgtgtgccaggtgtgcaactaccgcagcagcagcttcagtgatgtggagacccacttccgcaccagccatgagaacaccaagaacctgctgtgccccttctgcctgaaggtgatcaagatcgccaccccctacatgcaccactacatgaagcaccagaagaagggcatccaccgctgcaccaagtgccgcctgcagttcctgacctgcaaggagaagatggaccacaagacccagcaccacaggaccttcatcaagcccaagcagctggagggcctgcccccaggcaccaaggtgaccatccgggcctctgtgggccccctgcagagcggggccagccccacccccagcatcagcgccagcgccagcaccctgcagctgagcccccccaggaccaagaacatcacagccaagaacccagccaagagcaacaccagcaagcccaacacagtgaagagcaatgccagcaagcccaacaccagcaagcccaacggcagcaagagcaagtacaagcccaagatcagcaacatgcagaagaagcagagcaccctggccagcagcaacaagaagagcaaggtgaacacagccctgaggaacctgcgctacagaagaggcatccacaagtgcatcgagtgctgcagcgagatcaaggactttgccaaccacttccccacctacgtgcactgcagcttctgccgctacaacaccagctgcagcaaggcctacgtgaaccacatgatgtccttccacagcaaccggcccagcaagcgcttctgcatcttcaagaagcacagcgagaacctgcggggcatcaccctggtgtgcctgaactgtgacttcctgagtgatgtgtctggcctggacaacatggccacccacctgagccagcacaagacccacacctgccaggtggtgatgcagaaggatgctgaggccgcccagcgcttccagaagatcagccgggtgtacctggacagcgtgcccctgcgctggacccagctgatgcctgtgctgtccttccagggcatgtag

SEQ ID NO: 273236 - DNA, 2244 bp, Artificial Sequence
  derived and/or modified sequence
atggccgagctgttcatggagtgcgaggaggaggagctggagccctggcagaaaaaggtgaaggaggtggaggatgacgatgatgacgagcctatttttgttggagaaatctctagtagcaagccagcaatatctaacatcctaaacagagtgaatccatcatcatatagtcgtgggctgaagaacggggctctctctaggggcatcacggccgccttcaaaccaacaagccagcactacactaaccccaccagcaatcccgtacccgctagtcctatcaacttccaccccgagagccgcagtagcgacagcagcgtaattgttcagcctttctccaagcctggctatattaccaatagcagtagagtcgtcagtaacaagtcttccgaactgctgttcgacctgactcaagataccgggttaagccattatcaaggaggtccaaccctgagcatggccggcatgtcagagagcagcttcctcagtaaacgccctagcaccagcgaggtgaataatgtgaatccaaagaagccaaaaccttctgaaagtgtttcaggggcaaattccagcgctgtactcccatccgtgaaatccccttccgtgacttcctcccaggccatgctggccaaaggcaccaacacttccagcaatcagagcaaaaatggcacaccattcccaagagcgtgccccaaatgtaacatccatttcaacctccttgatcccctcaaaaatcatatgaagtactgctgccctgacatgattaacaattttctgggactggctaaaactgaattctcctccacagtgaataaaaacaccactattgattcagagaagggtaagttgattatgctcgtcaatgacttctattacggtaagcatgaaggcgacgtacaggaggaacagaagactcatactacattcaaatgtttttcctgtctgaagattttgaaaaataacatacggttcatgaaccacatgaagcatcacctggagttagaaaaacagagcagcgagagctgggagaaccataccacgtgccaacattgctatcgccaatttccaaccccattccaactgcagtgccatattgaaagcacacacactccccacgaatttagtacaatttgcaagatctgcgagctgtcctttgaaactgaacatgttctactgcaacatatgaaggacaaccacaaacctggcgaaatgccctacgtgtgtcaagtgtgcaactaccgcagttcttctttctccgacgttgagacacattttcgcacaagccacgaaaacacaaagaaccttttgtgccccttctgcctcaaggttattaagatcgccacaccctacatgcaccattatatgaaacaccagaagaaaggtatccaccggtgcactaagtgccggttgcagttcctgacctgcaaagaaaaaatggaccacaaaacacagcaccataggacttttattaagccaaagcagctggaaggattgcctccgggcaccaaagtgaccatccgcgcaagcgttggccctttgcagtctggcgcgtccccaaccccttctattagtgcttccgcctctactctgcagctttcccccccgaggaccaaaaacataactgctaagaaccccgccaaatctaacacctcgaagcctaacaccgtgaagtctaatgcctcaaagcctaacaccagtaaaccaaatggatccaaatcaaagtataagcccaagatttccaacatgcagaaaaaacagtctactctggcctccagcaacaagaaaagcaaggtgaataccgctttaagaaacttgaggtaccgccgtggcatacacaagtgcattgaatgctgctccgagattaaggatttcgccaaccatttccctacctatgtccactgtagcttctgtaggtacaatacttcttgttctaaggcatatgtaaaccacatgatgagcttccactccaaccggcccagcaaacggttctgcattttcaagaagcactcagaaaaccttagggggattacactagtatgcttgaattgtgacttcctttctgacgtaagcggtctcgacaatatggcgacacacctcagtcagcacaagacccacacctgccaggtggttatgcagaaagacgccgaggctgcccagaggttccagaaaatttcaagggtttatcttgattctgtaccgctgaggtggacacagctaatgcccgttctgtccttccaaggtatgtag

SEQ ID NO: 273237 - DNA, 2244 bp, Artificial Sequence
  derived and/or modified sequence
atggctgaattgttcatggagtgcgaggaggaagaactcgagccgtggcagaaaaaggtaaaggaggtagaggatgacgatgacgatgagccaatcttcgtgggcgagatcagctctagcaagccagctatctcaaacatcctgaatcgggtgaacccatcctcatatagtaggggcctgaagaacggggctctgtcccggggaattacagccgctttcaaacctacttcccagcactataccaaccccacaagcaaccccgtccctgcttcaccaattaacttccatccagagagtcggagttcagatagttccgtaattgtgcagccgttcagcaagcctggatacatcacaaacagttctcgcgtggtgtccaacaaaagcagcgagttgctcttcgaccttacccaagacacaggcctgtcacactaccagggtggcccaacactctctatggccggaatgagtgaatcctctttcctgtctaagcgtccttcaacatcagaagtaaacaatgttaacccaaagaaacctaagccatctgagtctgtttcgggcgctaattcctcagctgttctgcccagtgtaaaatcaccctcggttacttccagccaggccatgctcgctaaaggaactaatacatcatcaaaccagtcaaagaacgggaccccttttccccgtgcatgtcccaagtgcaatattcatttcaatttgttagatcccctgaagaaccatatgaagtattgttgtcctgacatgataaataatttccttgggttggcaaagacggagttctcctcaaccgtgaataagaacactacaatcgactcagaaaaggggaaactgatcatgctcgtgaacgatttttattatggtaagcatgagggcgacgtccaggaggagcaaaagacgcataccacctttaagtgtttttcctgtctaaagattcttaaaaataacattagattcatgaaccacatgaaacaccaccttgagctggaaaagcagtcaagcgagagctgggagaaccataccacgtgccagcattgctacagacagttccccacaccattccaactacagtgccacatcgaaagtacccacacaccccatgagttcagcacaatttgcaaaatctgtgaactctcttttgagaccgaacacgtcctcttacagcacatgaaggacaaccataaacccggagaaatgccctatgtctgccaggtatgcaactacaggagttcctcattcagtgacgtcgagactcacttcagaacaagccacgagaacacaaaaaacctactgtgtcctttttgtttgaaagtaataaagattgcaactccgtacatgcaccattacatgaagcaccaaaaaaaaggaatacatcgatgtacgaagtgcaggctgcagttcctgacctgcaaagagaaaatggaccacaaaacacagcaccaccggactttcattaagcctaagcagttggaggggttgcccccagggactaaagttacgatccgtgcttccgttggaccgttacaatcaggtgcctccccgactccgagcattagcgccagcgctagcacgctccagctcagtccacctaggactaagaacatcacggcaaagaacccagcgaagtcaaacacgtccaagccgaacacagtaaagtcaaatgcctccaagcccaatacaagtaagccgaacgggagcaagagcaagtataagcccaaaatttctaatatgcaaaaaaagcagtctacgctcgcctcgagtaacaagaaaagtaaagtaaacaccgctctgaggaatctacgatatagacgcggtatccacaagtgtatcgagtgttgctccgagatcaaggacttcgctaaccacttcccaacttacgtgcactgctcattttgccgatataatacatcatgttccaaggcctacgtgaatcatatgatgagctttcattctaaccgcccaagcaaacgcttctgtatttttaaaaagcatagtgagaacctgcgaggaatcacccttgtctgtctgaattgtgatttcttatctgatgtgtcggggctcgacaatatggccacccatctatcgcagcataagacacacacctgccaggttgtcatgcagaaggacgcagaagccgctcagaggtttcagaagatcagccgggtatacttggactccgtgcccctcagatggactcagcttatgccggtattgtcattccagggaatgtag

SEQ ID NO: 273238 - DNA, 4726 bp, Artificial Sequence
  derived and/or modified sequence
gaagtggggccggcagagggggcggggaggagctgtcggggactgggaggagccgcaccgcggcgggtggacaaagcccgcggtcgggtgaggcgggacggagttggggccggtggggaggggcatgaggcgctcgcaggcacctcgagaagcaggccccgaccgctcgccgacgaagcctcgtccgggcctcctgggagcggggtggcaggtaccgtggcgcctcctcgcgttggtcttgctggttctcggcccccgaagcggagcgacggagacacagctgtggaagcatctggatccgctgcccaggtccccgagcttcccggaacccgaggccgcaggacactgaaggctgccattcccgagtaggtcacgctggacgccaccctaagctgggcccagaggctcccgtccaggagggctgcagtcggcgcagacaccgcgcgtgtggagacgggagacccatcctcctcggccgttccgagagtaggcgcggccggtcagattcgatgcagagccgaatgcgggagaaagggcaaaacgtacctcaaaccagacaaagccttgtgagcttcaggttctcaaataccccactcacccagaccccacatctccagtcagcccctcgcacccaaatcccattcggagcaaccgaactgcacgtgggactagttcttgggaatggatcaagccagtctcttcatctaacggagacagccctgggtggctctgtcacacagccactgtcttgtgcacaagttctgaacttggcctcagagaagccccagagtagaaagaagacaaaataagccccagttcttcgattctgggctgaagtgagattttcttgaatggcagccattgttttgcctcttaggtaagtgagtgcagtaaagaccggtaaggcccacgcagaagaaacactgaggaaagaagacacttccaaagtaacaaatgggaggaagcagccaacgcccgaggacaacatggcaagaaggagcctttggattccggactgggatggaaagagagttgattgaatcccggaatttggaaaccccagatacggagggcggacggtacaaccggagctgtcagaatcttgctctgtcacccaggctggagtgcaatggtgcaatctcaagctcactgcaacctctgtgcaggttcaagtggagaatctgaatcttgatgatataattggaactcttcagccaagccatatctaacagaactatcttcaacttttcaggtgttggtgaggatgcagagaaaagggaaactcatacactgctgatgggaatgcaaaccagtacaacttctatggaaaacgatatggagactctcaaagaactaaaagcagaaccatcattccgtccagcaatcccaccactggtcatctacccaaagtttgggtatcaaaaatatacttacaaaagaagtaaagagagctcacctatttttgtcttcactgaatgaaaaagtctgttcaatacaggaaataaactttgaagatttggtaaaactcacctctttgggtgatttggagtacagatagtatagtccttgagttgtcaattggaagtcactgataccacacggtttaagattatctgactctcagctatacaggattgctgactgctgctagaaaggccttcataaccaaaatgcaacatggaaatagctttcttacattccatgagaaaaaaaatagatctgacaacgttattgaatagaaaaaggaaggaaaacagaaataacttgctggcttgtctggagtcacatggtaattcaaaaatggcagaactgtttatggaatgtgaagaagaggagctggaaccatggcagaagaaagtaaaagaagttgaggatgacgatgatgatgagccaatctttgttggcgagatatcaagttcaaaaccagcaatttcaaatattttgaacagagttaaccccagctcatattcaaggggactaaagaatggtgcactcagtcgaggtattactgctgcattcaagcctacaagtcaacactacacgaatccaacatcaaatccagtgcctgcctcaccaataaattttcatcctgagtctagatcttcagatagttctgttattgttcagcctttttctaaacctggttatataacaaactcatcacgagttgtgtctaataagtcatcagagttactgtttgacttgacccaggatacaggattatcacattaccaagggggaccaacactttctatggcaggtatgagtgaaagttcatttttatcaaaacgtccttctacttctgaagtaaataatgttaatccaaagaagcctaaacccagcgaaagtgtttctggagcaaattcctcagctgtattaccttcagttaaatctccttcagtgacttcttcccaggctatgctagcaaaaggtacaaatacctcatcaaatcagtctaaaaatggaacaccttttccaagagcttgtccaaagtgcaacattcatttcaatcttttggatcctttgaaaaatcacatgaagtattgttgtccagacatgataaataactttttgggactggctaaaacagaattttcaagtacagtaaataaaaacacaactattgattcagagaaaggaaaattgatcatgttagttaatgacttttattatggaaaacatgaaggagatgtccaggaggaacagaagactcacacaacctttaaatgcttcagttgcttgaaaattctaaaaaataacattaggtttatgaaccacatgaaacaccatttggaacttgagaagcagagcagtgagagctgggaaaaccataccacctgccagcactgctaccgtcagtttcccacaccatttcagttgcagtgtcacatcgaaagtacacatacgccccatgaattttctactatttgtaaaatctgtgaattgtcatttgaaacagaacatgttcttttacaacatatgaaggacaatcataaacctggtgaaatgccatatgtctgccaggtttgtaattatagatcatcatcattttctgatgtagaaactcattttagaacatcccatgaaaacactaagaacttgctatgcccgttttgcctcaaagttattaaaattgcaacaccatatatgcatcattatatgaagcatcagaaaaaaggaatacatcgttgtacaaaatgcaggctgcagtttttgacatgcaaggagaaaatggatcataagactcaacaccatcgaacatttataaaacctaaacaactagaaggattgcctcctggaacaaaagttactattcgagcttcagttggacctctgcaatcaggagcttcacctacaccttccattagtgcaagtgcttctacccttcagctctcacctccaaggactaaaaatataactgctaaaaatcctgcaaaatctaatacaagtaaacctaatacagtcaaatccaacgcaagtaaacctaatacaagtaagcctaatggaagtaaatctaaatacaaaccaaaaatctctaatatgcaaaagaaacaaagcacattggctagtagcaataaaaaaagtaaagtcaatacagcattgaggaatttaaggtatcgtcggggcattcacaaatgcattgagtgttgttccgaaataaaagattttgcaaaccactttcctacgtacgtccactgtagtttttgcagatacaacactagctgtagcaaagcctatgtaaatcatatgatgagctttcatagtaaccgtccaagcaaaaggttttgtatttttaagaagcattcagaaaatctccggggcattactctagtgtgccttaattgtgatttcctaagtgatgtttctggcttagataatatggctacacacttaagtcaacataaaactcatacttgccaagttgtaatgcagaaagatgcagaagcagcccagagatttcaaaaaatatccagggtatacctggacagtgtcccccttcgatggacacaactgatgcctgttctctctttccaaggaatgtgaataatttgactgtgggacctgctcttaggttgtggcctcaagaaatcagatcttggggagactccctttctacatggctggcctcccataaggctgatgttgtttggccagagatggctttaaggcccaccaaattgagcatacttcccactgggggctttggcttatgatcttaagcttatgagtcagttatgaccaagaaaagcccatcaaaccactgcttcagcatccaagttgaagtttagtcattttggctgctgcctttaaatctttctctagcatgaatgcagtccaaggaatataaaaactctagttgttaggaaaccatggctactttcatatccttggaacaacaggtctccacaattaagttccaaaattgcagttatttttactgacatataaaatctattaaccagtattaattctgtaattttttaacaataccgattcttgcattttgattttttaaaaattaatttaatagcttggttttatgttctcaaaatttattaatgtctattttatgatgtctatttttatattatattatttaaaatttgtttagtgtttgttttaagaactccaagagatttcttagaattctctacagattttgtgtagctgcctatttgtagattttaaatttggctgttactaagcccattaaacattattagat

SEQ ID NO: 273239 - DNA, 909 bp, Artificial Sequence
  derived and/or modified sequence
atggccggcatgagcgagagcagcttcctgagcaagagacccagcaccagcgaggtgaacaacgtgaaccccaagaagcccaagcccagcgagagcgtgagcggcgccaacagcagcgccgtgctgcccagcgtgaagagccccagcgtgaccagcagccaggccatgctggccaagggcaccaacaccagcagcaaccagagcaagaacggcacccccttccccagagcctgccccaagtgcaacatccacttcaacctgctggaccccctgaagaaccacatgaagtactgctgccccgacatgatcaacaacttcctgggcctggccaagaccgagttcagcagcaccgtgaacaagaacaccaccatcgacagcgagaagggcaagctgatcatgctggtgaacgacttctactacggcaagcacgagggcgacgtgcaggaggagcagaagacccacaccaccttcaagtgcttcagctgcctgaagatcctgaagaacaacatcagattcatgaaccacatgaagcaccacctggagctggagaagcagagcagcgagagctgggagaaccacaccacctgccagcactgctacagacagttccccacccccttccagctgcagtgccacatcgagagcacccacaccccccacgagttcagcaccatctgcaagatctgcgagctgagcttcgagaccgagcacgtgctgctgcagcacatgaaggacaaccacaagcccggcgagatgccctacgtgtgccaggtgtgcaactacagaagcagcagcttcagcgacgtggagacccacttcagaaccagccacgagaacaccaagacctgctacgccagattcgccagcaagctgctgaagctgcagcaccacatctgcatcatcatctag

SEQ ID NO: 273240 - DNA, 909 bp, Artificial Sequence
  derived and/or modified sequence
atggccggcatgtctgaatcctcatttctttcaaagcgtccttctacttccgaggtcaataacgtgaatccgaaaaagcccaaaccgagtgaatccgtgagcggtgctaacagctcagctgtgctcccctccgtgaagagcccctcagttacttctagccaggctatgctggctaaaggaaccaacactagctcaaaccaaagcaagaacggcacccccttcccccgcgcctgtcccaagtgcaatattcatttcaacctgctggaccctctaaagaatcacatgaagtattgttgtccggacatgattaacaactttctgggcctcgctaaaacagagttttccagcactgttaataagaatactaccatcgacagcgaaaaggggaaactcatcatgctcgtgaatgacttctactacggcaagcacgagggcgatgtgcaagaagaacagaagactcacacgacgttcaaatgtttcagttgtcttaagatccttaagaataacatcaggttcatgaatcacatgaaacatcatctggagctggaaaaacaatcgtccgaaagttgggaaaatcacactacctgccagcactgctatagacagtttcccacgccgttccagctgcagtgtcacattgagtctacacacaccccacacgagttctccactatctgcaaaatctgcgagctgtcttttgagacagaacatgtcctgctccagcacatgaaggataatcacaagccaggtgaaatgccttacgtttgtcaggtttgcaactacagaagttccagtttctccgacgtggagacgcatttccgtacaagtcacgagaatactaaaacttgctatgcacgctttgctagcaaactcttgaagctgcagcaccacatctgcatcattatttag

SEQ ID NO: 273241 - DNA, 909 bp, Artificial Sequence
  derived and/or modified sequence
atggccggcatgtctgagagcagcttcctgagcaagaggcccagcaccagcgaggtgaacaacgtgaaccccaagaagcccaagcccagcgagagcgtgtctggggccaacagcagcgctgtgctgcccagcgtgaagagccccagcgtgaccagcagccaggccatgctggccaagggcaccaacaccagcagcaaccagagcaagaatggcacccccttcccccgggcctgccccaagtgcaacatccacttcaacctgctggaccccctgaagaaccacatgaagtactgctgcccagacatgatcaacaacttcctgggcctggccaagacagagttcagcagcacagtgaacaagaacaccaccatcgacagcgagaagggcaagctgatcatgctggtgaatgacttctactacggcaagcatgaaggagatgtgcaggaggagcagaagacccacaccaccttcaagtgcttcagctgcctgaagatcctgaagaacaacatccgcttcatgaaccacatgaagcaccacctggagctggagaagcagagcagcgagagctgggagaaccacaccacctgccagcactgctaccggcagttccccacccccttccagctgcagtgccacatcgagagcacccacacccctcatgagttcagcaccatctgcaagatctgtgagctgagctttgaaacagaacatgtgctgctgcagcacatgaaggacaaccacaagccaggagagatgccctacgtgtgccaggtgtgcaactaccgcagcagcagcttcagtgatgtggagacccacttccgcaccagccatgagaacaccaagacctgctacgccaggtttgccagcaagctgctgaagctgcagcaccacatctgcatcatcatctag

SEQ ID NO: 273242 - DNA, 909 bp, Artificial Sequence
  derived and/or modified sequence
atggccggcatgagcgagagcagcttcctgagcaagcggcccagcacgagtgaggtgaataatgttaaccctaaaaaacctaagcctagcgagagcgtgtccggcgccaactcatctgcagtgctgccctcagtaaagagtccaagtgtgacatcgtcacaggcgatgctggccaagggcaccaacacttcatctaaccagagcaagaatggcaccccatttccccgggcttgccctaagtgtaatattcattttaatcttttagatccactgaagaaccacatgaagtattgctgtccagacatgattaataactttctcggtctggctaaaaccgagttctccagcacagtgaataaaaatactacgatcgactctgagaagggtaagctgatcatgctcgtcaatgatttctattatggaaagcacgagggagacgtgcaggaagaacaaaagacccacaccacttttaaatgctttagctgtctgaaaatcctgaaaaataacattaggttcatgaaccacatgaagcaccacctcgagctggaaaagcagagcagtgaaagttgggaaaaccatacaacatgtcagcactgctacagacagttcccaacaccattccagctccaatgccacattgaatcaactcatacaccccacgagttcagcaccatctgtaaaatatgcgagctcagtttcgagaccgagcacgtgctcctgcaacacatgaaggataaccacaagcccggggaaatgccctacgtgtgccaggtgtgcaactaccgttctagctctttctccgacgtggagacacattttaggaccagtcacgagaacaccaagacttgctatgcgagattcgcgtcaaagctgcttaagttgcaacatcacatatgcattataatctag

SEQ ID NO: 273243 - DNA, 909 bp, Artificial Sequence
  derived and/or modified sequence
atggccggtatgtcagagagtagctttttaagcaagcggccatcaacctcggaagtgaataatgtcaacccaaaaaaacctaaaccttccgaaagcgtgtctggcgctaattctagcgctgttctcccgtctgtcaaaagccccagtgttactagttcccaggctatgctggcaaaggggacaaacacttcgagcaaccagagcaaaaacgggaccccattccccagggcctgcccgaagtgtaacatccactttaacttgctggacccactcaagaaccatatgaaatattgctgtcctgacatgataaataattttcttgggttagcgaagacggagttcagctccacagtgaacaaaaatactactatcgattccgagaagggcaagctgattatgttagtcaacgatttctactacgggaagcacgagggcgatgtgcaggaggagcagaagacccacaccacattcaagtgctttagctgcctaaagattctgaagaataacatccggttcatgaaccatatgaagcatcatctcgagttggaaaagcaatctagcgaaagttgggaaaaccacacgacgtgtcagcactgttacagacaattccccacgcctttccagctgcagtgtcacattgagagcacccacactccccatgagttttcaacgatctgtaagatctgcgaactgagctttgaaacggaacacgtcctgctccagcacatgaaagacaatcataaacctggcgagatgccatacgtgtgtcaggtctgcaattaccgtagtagctcttttagcgatgtggagactcacttcaggacctcccacgagaatactaaaacctgctatgcccgttttgctagcaaactgctgaagctgcagcaccacatctgcatcataatctag

SEQ ID NO: 273244 - DNA, 2068 bp, Artificial Sequence
  derived and/or modified sequence
taaattttcatcctgagtctagatcttcagatagttctgttattgttcagcctttttctaaacctggttatataacaaactcatcacgagttgtgtctaataagtcatcagagttactgtttgacttgacccaggatacaggattatcacattaccaagggggaccaacactttctatggcaggtatgagtgaaagttcatttttatcaaaacgtccttctacttctgaagtaaataatgttaatccaaagaagcctaaacccagcgaaagtgtttctggagcaaattcctcagctgtattaccttcagttaaatctccttcagtgacttcttcccaggctatgctagcaaaaggtacaaatacctcatcaaatcagtctaaaaatggaacaccttttccaagagcttgtccaaagtgcaacattcatttcaatcttttggatcctttgaaaaatcacatgaagtattgttgtccagacatgataaataactttttgggactggctaaaacagaattttcaagtacagtaaataaaaacacaactattgattcagagaaaggaaaattgatcatgttagttaatgacttttattatggaaaacatgaaggagatgtccaggaggaacagaagactcacacaacctttaaatgcttcagttgcttgaaaattctaaaaaataacattaggtttatgaaccacatgaaacaccatttggaacttgagaagcagagcagtgagagctgggaaaaccataccacctgccagcactgctaccgtcagtttcccacaccatttcagttgcagtgtcacatcgaaagtacacatacgccccatgaattttctactatttgtaaaatctgtgaattgtcatttgaaacagaacatgttcttttacaacatatgaaggacaatcataaacctggtgaaatgccatatgtctgccaggtttgtaattatagatcatcatcattttctgatgtagaaactcattttagaacatcccatgaaaacactaagacttgctatgcccgttttgcctcaaagttattaaaattgcaacaccatatatgcatcattatatgaagcatcagaaaaaaggaatacatcgttgtacaaaatgcaggctgcagtttttgacatgcaaggagaaaatggatcataagactcaacaccatcgaacatttataaaacctaaacaactagaaggattgcctcctggaacaaaagttactattcgagcttcagttggacctctgcaatcaggagcttcacctacaccttccattagtgcaagtgcttctacccttcagctctcacctccaaggactaaaaatataactgctaaaaatcctgcaaaatctaatacaagtaaacctaatacagtcaaatccaacgcaagtaaacctaatacaagtaagcctaatggaagtaaatctaaatacaaaccaaaaatctctaatatgcaaaagaaacaaagcacattggctagtagcaataaaaaaagtaaagtcaatacagcattgaggaatttaaggtatcgtcggggcattcacaaatgcattgagtgttgttccgaaataaaagattttgcaaaccactttcctacgtacgtccactgtagtttttgcagatacaacactagctgtagcaaagcctatgtaaatcatatgatgagctttcatagtaaccgtccaagcaaaaggttttgtatttttaagaagcattcagaaaatctccgggggcattactctagtgtgccttaattgtgatttcctaagtgatgtttctggcttagataatatggctacacacttaagtcaacataaaactcatacttgccaagttgtaatgcagaaagtttctgtttgtatcccaacttctgagcacctttctgaattaaaaaaagaagctcccgcaaaggaacaagaacctgtgtctaaggaaattgcaagacctaacatggctgaaagagaaacagaaacatcaaattctgaaagtaaacaagataaagctgcttcttcaaaagaaaaaaatggatgtaatgcaaattcatttgaaggctcatc

SEQ ID NO: 273245 - protein, 146 aa, Artificial Sequence
  derived and/or modified sequence
MPVKVRTGRSIRGLSLPPACTRAERREVERVVVDALSGLKGDLAGRYYRLSEMTEAEQQQLIDDHFLFDKPVSPLLTAAGMARDWPDARGIWHNNEKSFLIWVNEEDHTRVISMEKGGNMKRVFERFCRGLKEVREDCVGELGGRT

SEQ ID NO: 273246 - DNA, 441 bp, Artificial Sequence
  derived and/or modified sequence
atgccagtcaaggtgaggacaggcagatcaataagggggctttcactccctccagcttgtacccgggccgagcgccgggaagtggagcgggtggtggttgatgctctttctggactgaagggagatctcgccgggcgatattataggcttagtgagatgaccgaagcagagcagcagcagctcattgacgatcattttctgtttgataaaccggtgtcacccctgttaactgccgccggaatggctagagactggcctgacgctcgggggatctggcataacaatgagaaatcctttttgatatgggtcaacgaagaggatcatactcgggtgataagtatggagaaaggaggaaacatgaaaagggtcttcgaaagattttgcaggggactgaaggaggtaagagaggattgcgtcggggagctcggtggcagaacctag

SEQ ID NO: 273247 - DNA, 441 bp, Artificial Sequence
  derived and/or modified sequence
atgcctgtgaaggtgaggacaggccgcagcatccggggcctgagcctgcccccagcctgcaccagggctgagcggcgggaggtggagcgggtggtggtggatgccctgagcggcctgaagggggacctggccggccgctactaccgcctgtctgagatgacagaggccgagcagcagcagctgattgatgaccacttcctgtttgacaagcctgtgagccccctgctgacagctgctggcatggcccgggactggccagatgcccggggcatctggcacaacaatgagaagagcttcctgatctgggtgaatgaggaggaccacaccagggtcatctccatggagaagggcggcaacatgaagagggtgtttgagcgcttctgccggggcctgaaggaggtgcgggaggactgtgtgggggagctgggcggccgcacctag

SEQ ID NO: 273248 - DNA, 441 bp, Artificial Sequence
  derived and/or modified sequence
atgcccgtgaaggtgcggaccggccggagcatccggggcctgagccttcccccagcgtgcactcgggccgagcgccgggaggtagagcgagttgtggtggacgctttatcaggcttgaaaggagatctagccgggcggtactataggttgtcggagatgactgaggcagagcaacagcagctcattgatgatcactttctgttcgataaaccggtgtctcccttgctgacggcggccggaatggctcgcgactggcccgacgcaagaggaatttggcataataacgaaaagtcgttcctcatctgggtgaatgaagaagatcatacacgggtcatctctatggaaaagggcggcaacatgaaacgcgtgttcgaacggttttgccggggactgaaggaagttagagaggattgcgtgggcgaactgggagggcgtacttag

SEQ ID NO: 273249 - DNA, 441 bp, Artificial Sequence
  derived and/or modified sequence
atgcccgtaaaggtacgcacggggaggagcatccgaggactctccctgcccccagcttgtacgagagcagagcggagagaggtggaacgcgtggtagtagatgctctgtccggtcttaaaggggaccttgccggtagatactatcgattatctgagatgactgaagccgagcagcagcagctgatagatgaccattttctttttgataaaccggtgtcgcctctgttgactgcagccggaatggcacgagactggcctgacgcccgagggatctggcacaacaacgagaagtctttcctgatatgggtgaacgaggaggaccatacacgggtcatatccatggaaaaaggtggaaatatgaagagggtgtttgagaggttctgcagggggctaaaggaagttcgggaggactgtgtgggagagctgggtgggaggacttag

SEQ ID NO: 273250 - DNA, 441 bp, Artificial Sequence
  derived and/or modified sequence
atgcccgtgaaggtgagaaccggcagaagcatcagaggcctgagcctgccccccgcctgcaccagagccgagagaagagaggtggagagagtggtggtggacgccctgagcggcctgaagggcgacctggccggcagatactacagactgagcgagatgaccgaggccgagcagcagcagctgatcgacgaccacttcctgttcgacaagcccgtgagccccctgctgaccgccgccggcatggccagagactggcccgacgccagaggcatctggcacaacaacgagaagagcttcctgatctgggtgaacgaggaggaccacaccagagtgatcagcatggagaagggcggcaacatgaagagagtgttcgagagattctgcagaggcctgaaggaggtgagagaggactgcgtgggcgagctgggcggcagaacctag

SEQ ID NO: 273251 - DNA, 2178 bp, Artificial Sequence
  derived and/or modified sequence
atgtggaagcgatctgagcagatgaaaatcaaatctggcaagtgcaacatggccgccgcaatggaaaccgagcagctgggcgttgagatatttgagactgcagattgtgaggagaacattgaaagccaggacagaccaaagctcgaaccattctatgtcgagcgatatagctggtcccaattgaaaaaacttctggctgatacaaggaaataccacggatacatgatggcgaaagcaccccatgattttatgttcgtgaagcggaacgacccggatggccctcactccgaccgcatctactatctagccatgtccggggagaacagggaaaacactctcttttactcggagattccaaaaacaattaatcgtgctgccgtacttatgctctcctggaaaccacttcttgatctgtttcaggcaaccttggactacgggatgtattccagggaagaggagctgctgcgcgaaagaaagcgcattgggaccgtcggcatagcctcttatgattaccaccagggaagcggaaccttcctgttccaggcaggtagcggtatctaccacgtcaaggatggcggccctcagggtttcactcagcagcccctgagacctaacctggtcgaaaccagctgtccaaatatccggatggacccgaagctctgccccgctgacccagactggattgccttcatccactccaacgatatctggatcagcaatattgtaacgcgcgaggaacgaagattgacctatgtacataatgagctcgcaaacatggaggaagatgcgcgcagcgccggtgtcgctacattcgtcctacaggaagagttcgacagatacagcggctattggtggtgcccgaaggccgagactacaccttctggggggaagatccttagaatattgtacgaagagaacgacgagtccgaagtagagatcatacacgttacatcaccaatgctcgagactagaagggccgactcattcagatatcccaagactggtaccgcaaacccaaaagttacgtttaagatgtcagagattatgattgatgcagaaggaagaatccaggttgacgaggtcaggagattggtctactttgagggcactaaagattctccacttgagcaccatctgtatgtggttagttacgtcaacccaggagaggtgacaagattgaccgatcgagggtactcccattcctgctgtatctcccagcattgcgactttttcatcagcaaatacagtaatcaaaagaacccccattgtgtgtcgctgtataagctgtcctctcccgaggatgaccccacctgcaaaactaaagaattctgggctaccatcttggactccgctggcccccttcccgactacacgccccccgagattttctcattcgagtcaacaaccggcttcactttgtatgggatgctgtataagccacatgatcttcagcccggcaaaaagtatcctaccgtcctgttcatctacggagggcctcaggttcagttagtaaacaatcgcttcaagggagttaagtactttagacttaacacattggcaagcctcggatatgtggtggtggttatagataacaggggctcttgccatagggggctgaaattcgagggagccttcaagtacaagatgggccagattgagatagatgatcaggtagagggactgcaatatcttgcaagccggtatgatttcattgacctcgaccgggtcggaatccatggctggagctacggaggctacttatccctgatggccctcatgcagcggtccgacatctttcgtgtggcaatcgccggggcacccgttactttgtggatcttttatgacacgggctataccgaacgctacatggggcaccccgaccagaatgagcagggttactatctcggatccgtcgcaatgcaggccgagaaatttccatccgagccgaatcgtctgctcttgctacacggcttcttagacgagaatgtccactttgcacatactagcatcctgctttcctttctggtaagagccggcaaaccttatgacctgcagatttacccccaagaacgtcacagcattagggtcccggaatctggtgagcattatgagctacatctgctccactatttgcaagaaaacctcggctcacgcattgcagcactgaaggtgatttag

SEQ ID NO: 273252 - DNA, 2178 bp, Artificial Sequence
  derived and/or modified sequence
atgtggaagaggtctgagcagatgaagatcaagagcggcaagtgcaacatggctgctgccatggagacagagcagctgggcgtggagatctttgaaacagctgactgtgaggagaacatcgagagccaggaccggcccaagctggagcccttctacgtggagcgctacagctggagccagctgaagaagctgctggccgacaccaggaagtaccacggctacatgatggccaaggcccctcatgacttcatgtttgtgaagagaaatgaccctgatggcccccacagcgaccgcatctactacctggccatgtctggagaaaatcgggagaacaccctcttctacagcgagatccccaagaccatcaacagagctgctgtgctgatgctgtcctggaagcccctgctggacctcttccaggccaccctggactatggcatgtacagccgggaggaggagctgctgcgggagaggaagagaattggaacagtgggcatcgccagctatgactaccaccagggcagcggcaccttcctgttccaggccggcagcggcatctaccacgtgaaggatggcggcccccagggcttcacccagcagcccctgcggcccaacctggtggagaccagctgccccaacatccgcatggaccccaagctgtgcccagctgaccctgactggatcgccttcatccacagcaatgacatctggatcagcaacatcgtgacccgggaggagcggcggctgacctacgtgcacaatgagctggccaacatggaggaggatgcccggtctgctggggtggccacctttgtgctgcaggaggagtttgaccgctacagcggctactggtggtgccccaaggccgagaccacccccagcggcggcaagatcctgcgcatcctgtatgaagaaaatgatgaaagtgaggtggagatcatccacgtgaccagccccatgctggagacccggcgggctgacagcttccgctaccccaagacaggaacagccaaccccaaggtgaccttcaagatgtctgagatcatgattgatgctgagggccgcatccaggtggatgaggtgcggcggctggtgtactttgagggcaccaaggacagccccctggagcaccacctgtatgtggtgtcctatgtgaaccctggagaggtgacccggctgacagaccggggctacagccacagctgctgcatcagccagcactgtgacttcttcatcagcaagtacagcaaccagaagaacccccactgtgtgtccctgtacaagctgagcagcccagaagatgaccccacctgcaagaccaaggagttctgggccaccatcctggacagcgctggccccctgcctgactacaccccacctgagatcttctcctttgagagcaccaccggcttcaccctgtatggcatgctgtacaagccccatgacctgcagcccgggaagaagtaccccaccgtgctcttcatctacggcggcccccaggtgcagctggtgaacaaccgcttcaagggcgtgaagtacttccggctgaacaccctggccagcctgggctacgtggtggtggtgattgacaacagaggcagctgccaccggggcctgaagtttgaaggagccttcaagtacaagatgggccagatcgagattgatgaccaggtggagggcctgcagtacctggccagccgctatgacttcatcgacctggacagagtgggcatccacggctggagctatggaggctacctgagcctgatggccctgatgcagaggagtgacatcttccgggtggccatcgccggggcccctgtgaccctgtggatcttctatgacaccggctacacagagcgctacatgggccacccagaccagaatgagcagggctactacctgggctctgtggccatgcaggccgagaagttccccagcgagcccaaccggctgctgctgctgcacggcttcctggatgaaaatgtgcactttgcccacaccagcatcctgctgtccttcctggtgcgggccggcaagccctatgacctgcagatctacccccaggagcggcacagcatccgggtgcctgagagcggggagcactatgagctgcacctgctgcactacctgcaggagaacctgggcagcagaattgctgccctgaaggtgatctag

SEQ ID NO: 273253 - DNA, 2178 bp, Artificial Sequence
  derived and/or modified sequence
atgtggaagcggagcgagcagatgaagatcaagagcggcaagtgcaatatggcggcagccatggaaacagagcagctgggagtggagatcttcgaaaccgccgactgtgaagaaaatatcgaaagtcaggaccgacccaagctggagccattctatgtggaaagatacagctggtctcagttgaagaaactgctcgctgatacgcggaagtaccacggatacatgatggctaaggccccgcacgattttatgttcgttaagaggaatgatcctgatggcccgcactccgatagaatctattacctggccatgtcaggtgaaaatagagagaacactctgttctacagcgagattcctaaaaccattaatcgggccgctgtcctaatgctgtcatggaagcccctgctggatttgtttcaggctaccctggactatggtatgtatagccgagaggaggagcttttgagagaacggaagcgcataggcaccgtgggcattgctagctacgactaccatcaggggtccggcacgtttctgtttcaagccggcagcggcatctatcatgtgaaagacggtggcccccagggattcactcagcagccattgagacctaatttagtggaaacgagttgtccaaatatccgcatggaccccaagctttgtcctgcggatccggattggattgcatttatacacagcaacgacatctggatttctaacattgtaacacgggaggagcggcggctgacgtatgttcataatgagctggccaacatggaagaagacgcgcgaagtgccggagtcgccaccttcgttctccaggaggaattcgaccgctactccgggtactggtggtgtccaaaggccgagaccactccatctggagggaaaatactccgtatcctctacgaggagaacgacgaatccgaggtcgagattatccatgtgacctcacctatgctggaaactcgtagggctgattctttcagatacccaaaaacaggaaccgcaaacccaaaggtgacctttaagatgtcagagataatgatcgatgccgaaggacgaatccaggtggacgaagtgaggaggctggtgtacttcgaaggaaccaaagactctcctctggagcaccacctgtatgtggtgtcttacgtcaatcccggtgaggtgacccggctcaccgatagaggctacagccacagttgctgtatcagccagcattgcgattttttcatctcaaagtactctaaccagaagaacccccactgcgtcagcttgtataagctgagttcaccagaggatgatcccacatgcaagacaaaggaattttgggcaacaatattggattctgcaggtccattgccagattacactccacctgagatttttagcttcgaatccacaacaggcttcaccctgtatggaatgctctataagccacacgatctacaaccaggaaaaaaatatccaactgttctatttatttatggaggcccccaggtgcaactcgttaataaccgctttaaaggggtgaagtattttcgactcaataccctggcttctctaggctacgtcgtcgtcgtgatcgataacagggggagctgccatcgtgggctaaagttcgagggagcattcaagtacaagatgggtcagattgagatcgatgatcaggtggaaggattacagtatctcgcatccaggtacgattttattgacctcgatcgcgtagggatccacggatggagctacggcggctacttatcccttatggccctgatgcagaggtcagacatattccgtgtcgcaatagctggtgcccctgttacactctggattttttacgataccgggtataccgaaaggtacatgggtcatcctgaccaaaatgagcagggttactatttgggcagcgtggcaatgcaggccgaaaagtttccttcggagccaaaccgactactcctgctgcatggattcttggacgagaacgttcacttcgcccatacaagtatcctgctgtcctttctggttcgggcgggaaaaccatacgatcttcaaatctaccctcaagaacgccattccattcgcgtccccgaaagtggagagcactacgaactgcatctactgcattacctgcaggaaaacctgggctcccgcattgccgctctgaaggtcatttag

SEQ ID NO: 273254 - DNA, 2178 bp, Artificial Sequence
  derived and/or modified sequence
atgtggaagaggtctgagcaaatgaaaataaagagcggtaagtgtaatatggccgcagccatggaaactgagcagctgggcgttgagattttcgagactgctgactgtgaagaaaatatcgaatcgcaagacagaccaaagctcgagccattttatgtagagcgatacagctggtcccagcttaaaaagctcctcgcggatactagaaagtatcacggttacatgatggcaaaagcccctcatgactttatgttcgtgaagcgcaacgatcccgacgggcctcactcagatcgcatctattacctggccatgagcggagagaacagggagaacaccctattttatagcgaaatccctaaaactattaacagggcagccgtgctgatgctctcctggaagccgcttctcgacctgtttcaagcgacgctggattacggaatgtactctagggaggaagagttattgagggagaggaagcgaataggtacggtgggcattgctagttacgactaccaccagggttcaggtacatttctgtttcaggccggatctggaatatatcacgtgaaggacggagggccacaaggattcacccagcaaccactaagacccaacctggttgagacatcctgtccaaatatccggatggaccccaagctttgtcccgcagaccccgattggatagcctttattcactccaatgacatatggataagtaacatcgtgactcgagaagagcgtcgcctgacgtacgtgcacaacgagctcgcgaacatggaagaggatgcgagaagcgctggcgtcgccacctttgtgttacaggaagagtttgatcgctactccggatattggtggtgccccaaggctgagacaacaccatcagggggtaagattctgaggatcctttacgaggaaaacgacgagagcgaggtagaaataatccacgtgactagcccgatgttggagacccggcgagctgattcgtttagatatcctaagacaggaacggctaatccaaaggtgacattcaaaatgagcgagatcatgattgacgccgaggggagaatccaagtggatgaagtgcgcagactggtctattttgaagggacaaaggactctcctcttgagcaccacctgtatgtcgtgtcctacgttaacccaggggaagtgactcgattaacagacagggggtattcacactcctgctgtatatcccagcattgtgacttctttattagtaaatattccaaccaaaaaaatcctcattgtgtaagtttatacaagctatcaagcccggaagatgacccgacttgcaagactaaagaattttgggcgacaatcttagactccgcagggcctctgcccgattatacacctccagaaattttcagcttcgaatccacaacaggatttacgctgtacgggatgctctacaagccacatgacttacagcccggaaaaaagtatcccactgtcttgttcatctatgggggaccacaggttcagttagtaaacaaccgatttaaaggcgtgaagtactttcgtctgaatacgttggcctctctgggctacgtcgtcgtggtaattgacaatagaggcagttgccaccgtggactgaaatttgagggggcattcaagtacaaaatggggcaaattgagattgacgaccaggtagagggattgcagtacctcgcaagccgctacgattttattgacctggaccgggtgggaatccatgggtggagctatggaggctatttatctctgatggccttaatgcagcggtctgacatattccgcgtggccatcgcaggtgcccctgttactctttggatcttttacgacactgggtatactgagcgatatatgggacatcccgaccagaatgaacagggatattatctggggtccgtggcaatgcaggcagagaaatttccgagcgaaccaaacagactgctgctcctccatggctttttggacgaaaacgtccattttgcacacacatcaattcttctctctttcttagtgagggccggaaagccttacgacctgcagatttacccacaggagaggcacagcataagagtgcctgaaagcggtgaacactacgagctgcacctcctgcactacctgcaggagaacctgggctcccggattgccgctttaaaggtcatttag

SEQ ID NO: 273255 - DNA, 2178 bp, Artificial Sequence
  derived and/or modified sequence
atgtggaagagaagcgagcagatgaagatcaagagcggcaagtgcaacatggccgccgccatggagaccgagcagctgggcgtggagatcttcgagaccgccgactgcgaggagaacatcgagagccaggacagacccaagctggagcccttctacgtggagagatacagctggagccagctgaagaagctgctggccgacaccagaaagtaccacggctacatgatggccaaggccccccacgacttcatgttcgtgaagagaaacgaccccgacggcccccacagcgacagaatctactacctggccatgagcggcgagaacagagagaacaccctgttctacagcgagatccccaagaccatcaacagagccgccgtgctgatgctgagctggaagcccctgctggacctgttccaggccaccctggactacggcatgtacagcagagaggaggagctgctgagagagagaaagagaatcggcaccgtgggcatcgccagctacgactaccaccagggcagcggcaccttcctgttccaggccggcagcggcatctaccacgtgaaggacggcggcccccagggcttcacccagcagcccctgagacccaacctggtggagaccagctgccccaacatcagaatggaccccaagctgtgccccgccgaccccgactggatcgccttcatccacagcaacgacatctggatcagcaacatcgtgaccagagaggagagaagactgacctacgtgcacaacgagctggccaacatggaggaggacgccagaagcgccggcgtggccaccttcgtgctgcaggaggagttcgacagatacagcggctactggtggtgccccaaggccgagaccacccccagcggcggcaagatcctgagaatcctgtacgaggagaacgacgagagcgaggtggagatcatccacgtgaccagccccatgctggagaccagaagagccgacagcttcagataccccaagaccggcaccgccaaccccaaggtgaccttcaagatgagcgagatcatgatcgacgccgagggcagaatccaggtggacgaggtgagaagactggtgtacttcgagggcaccaaggacagccccctggagcaccacctgtacgtggtgagctacgtgaaccccggcgaggtgaccagactgaccgacagaggctacagccacagctgctgcatcagccagcactgcgacttcttcatcagcaagtacagcaaccagaagaacccccactgcgtgagcctgtacaagctgagcagccccgaggacgaccccacctgcaagaccaaggagttctgggccaccatcctggacagcgccggccccctgcccgactacaccccccccgagatcttcagcttcgagagcaccaccggcttcaccctgtacggcatgctgtacaagccccacgacctgcagcccggcaagaagtaccccaccgtgctgttcatctacggcggcccccaggtgcagctggtgaacaacagattcaagggcgtgaagtacttcagactgaacaccctggccagcctgggctacgtggtggtggtgatcgacaacagaggcagctgccacagaggcctgaagttcgagggcgccttcaagtacaagatgggccagatcgagatcgacgaccaggtggagggcctgcagtacctggccagcagatacgacttcatcgacctggacagagtgggcatccacggctggagctacggcggctacctgagcctgatggccctgatgcagagaagcgacatcttcagagtggccatcgccggcgcccccgtgaccctgtggatcttctacgacaccggctacaccgagagatacatgggccaccccgaccagaacgagcagggctactacctgggcagcgtggccatgcaggccgagaagttccccagcgagcccaacagactgctgctgctgcacggcttcctggacgagaacgtgcacttcgcccacaccagcatcctgctgagcttcctggtgagagccggcaagccctacgacctgcagatctacccccaggagagacacagcatcagagtgcccgagagcggcgagcactacgagctgcacctgctgcactacctgcaggagaacctgggcagcagaatcgccgccctgaaggtgatctag

SEQ ID NO: 273256 - DNA, 2727 bp, Artificial Sequence
  derived and/or modified sequence
gaagtgctaaagcctccgaggccaaggccgctgctactgccgccgctgcttcttagtgccgcgttcgccgcctgggttgtcaccggcgccgccgccgaggaagccactgcaaccaggaccggagtggaggcggcgcagcatgaagcggcgcaggcccgctccatagcgcacgtcgggacggtccgggcggggccggggggaaggctttgatggtgaggaaaggaaagattcctgtgagaagagcaggatgagcagagggattctatgcttgaagtcgagtcacttgaaaaagatctctttgaatgtggaagagatctgagcagatgaaaataaaatcaggaaaatgcaacatggcagcagcaatggaaacagaacagctgggtgttgagatatttgaaactgcggactgtgaggagaatattgaatcacaggatcggcctaaattggagcctttttatgttgagcggtattcctggagtcagcttaaaaagctgcttgccgataccagaaaatatcatggctacatgatggctaaggcaccacatgatttcatgtttgtgaagaggaatgatccagatggacctcattcagacagaatctattaccttgccatgtctggtgagaacagagaaaatacactgttttattctgaaattcccaaaactatcaatagagcagcagtcttaatgctctcttggaagcctcttttggatctttttcaggcaacactggactatggaatgtattctcgagaagaagaactattaagagaaagaaaacgcattggaacagtcggaattgcttcttacgattatcaccaaggaagtggaacatttctgtttcaagccggtagtggaatttatcacgtaaaagatggagggccacaaggatttacgcaacaacctttaaggcccaatctagtggaaactagttgtcccaacatacggatggatccaaaattatgccctgctgatccagactggattgcttttatacatagcaacgatatttggatatctaacatcgtaaccagagaagaaaggagactcacttatgtgcacaatgagctagccaacatggaagaagatgccagatcagctggagtcgctacctttgttctccaagaagaatttgatagatattctggctattggtggtgtccaaaagctgaaacaactcccagtggtggtaaaattcttagaattctatatgaagaaaatgatgaatctgaggtggaaattattcatgttacatcccctatgttggaaacaaggagggcagattcattccgttatcctaaaacaggtacagcaaatcctaaagtcacttttaagatgtcagaaataatgattgatgctgaaggaaggatccaagttgatgaagtcagaaggctggtatattttgaaggcaccaaagactcccctttagagcatcacctgtacgtagtcagttacgtaaatcctggagaggtgacaaggctgactgaccgtggctactcacattcttgctgcatcagtcagcactgtgacttctttataagtaagtatagtaaccagaagaatccacactgtgtgtccctttacaagctatcaagtcctgaagatgacccaacttgcaaaacaaaggaattttgggccaccattttggattcagcaggtcctcttcctgactatactcctccagaaattttctcttttgaaagtactactggatttacattgtatgggatgctctacaagcctcatgatctacagcctggaaagaaatatcctactgtgctgttcatatatggtggtcctcaggtgcagttggtgaataatcggtttaaaggagtcaagtatttccgcttgaataccctagcctctctaggttatgtggttgtagtgatagacaacaggggatcctgtcaccgagggcttaaatttgaaggcgcctttaaatataaaatgggtcaaatagaaattgacgatcaggtggaaggactccaatatctagcttctcgatatgatttcattgacttagatcgtgtgggcatccacggctggtcctatggaggatacctctccctgatggcattaatgcagaggtcagatatcttcagggttgctattgctggggccccagtcactctgtggatcttctatgatacaggatacacggaacgttatatgggtcaccctgaccagaatgaacagggctattacttaggatctgtggccatgcaagcagaaaagttcccctctgaaccaaatcgtttactgctcttacatggtttcctggatgagaatgtccattttgcacataccagtatattactgagttttttagtgagggctggaaagccatatgatttacagatctatcctcaggagagacacagcataagagttcctgaatcgggagaacattatgaactgcatcttttgcactaccttcaagaaaaccttggatcacgtattgctgctctaaaagtgatataattttgacctgtgtagaactctctggtatacactggctatttaaccaaatgaggaggtttaatcaacagaaaacacagaattgatcatcacattttgatacctgccatgtaacatctactcctgaaaataaatgtggtgccatgcaggggtctacggtttgtggtagtaatctaataccttaaccccacatgctcaaaatcaaatgatacatattcctgagagacccagcaataccataagaattact

SEQ ID NO: 273257 - protein, 301 aa, Artificial Sequence
  derived and/or modified sequence
MLEPQENGVIDLPDYEHVEDETFPPFPPPASPERQDGEGTEPDEESGNGAPVRVPPKRTVKRNIPKLDAQRLISERGLPALRHVFDKAKFKGKGHEAEDLKMLIRHMEHWAHRLFPKLQFEDFIDRVEYLGSKKEVQTCLKRIRLDLPILHEDFVSNNDEVAENNEHDVTSTELDPFLTNLSESEMFASELSRSLTEEQQQRIERNKQLALERRQAKLLSNSQTLGNDMLMNTPRAHTVEEVNTDEDQKEESNGLNEDILDNPCNDAIANTLNEEETLLDQSFKNVQQQLDATSRNITEAR

SEQ ID NO: 273258 - DNA, 906 bp, Artificial Sequence
  derived and/or modified sequence
atgctggagccccaggagaacggcgtgatcgacctgcccgactacgagcacgtggaggacgagaccttcccccccttccccccccccgccagccccgagagacaggacggcgagggcaccgagcccgacgaggagagcggcaacggcgcccccgtgagagtgccccccaagagaaccgtgaagagaaacatccccaagctggacgcccagagactgatcagcgagagaggcctgcccgccctgagacacgtgttcgacaaggccaagttcaagggcaagggccacgaggccgaggacctgaagatgctgatcagacacatggagcactgggcccacagactgttccccaagctgcagttcgaggacttcatcgacagagtggagtacctgggcagcaagaaggaggtgcagacctgcctgaagagaatcagactggacctgcccatcctgcacgaggacttcgtgagcaacaacgacgaggtggccgagaacaacgagcacgacgtgaccagcaccgagctggaccccttcctgaccaacctgagcgagagcgagatgttcgccagcgagctgagcagaagcctgaccgaggagcagcagcagagaatcgagagaaacaagcagctggccctggagagaagacaggccaagctgctgagcaacagccagaccctgggcaacgacatgctgatgaacacccccagagcccacaccgtggaggaggtgaacaccgacgaggaccagaaggaggagagcaacggcctgaacgaggacatcctggacaacccctgcaacgacgccatcgccaacaccctgaacgaggaggagaccctgctggaccagagcttcaagaacgtgcagcagcagctggacgccaccagcagaaacatcaccgaggccagatag

SEQ ID NO: 273259 - DNA, 906 bp, Artificial Sequence
  derived and/or modified sequence
atgctggagccacaggagaacggtgtgatcgatttgcctgattatgaacacgttgaagatgagactttccccccctttccaccaccagcctcgcccgaaaggcaggacggagaagggaccgagcctgatgaagagtcaggaaatggggctcctgtgcgggtacctcctaagcgaactgtgaagagaaacatacccaagctggacgctcagagacttatcagcgagagagggctcccggcgctgaggcacgttttcgataaagcaaagttcaaaggaaagggtcacgaggccgaggatctgaaaatgttgatacggcacatggagcactgggcccaccgcctgtttcctaaactacaatttgaagactttatcgatcgcgtggagtatcttggctctaagaaagaggtccagacttgtctgaagcgcatacgtttggatctacccatcctccatgaggattttgtttccaataacgatgaagtggctgagaataacgagcatgacgttacgtctactgaactggatcccttcctgaccaatttgtctgagagcgagatgttcgcctcagaacttagtagatccctcaccgaagagcaacagcagaggattgaacgaaacaagcagctcgccctcgagcggcgccaggctaagctcctgtccaacagtcagaccctgggcaacgacatgctcatgaatacccctcgtgcccacactgtggaggaggtaaacacagatgaagatcagaaagaggagagcaacggcttaaatgaggacattctagataacccttgcaacgacgccatcgctaacactctgaatgaggaagaaactctgctggatcagtccttcaagaatgttcagcagcagctggatgctactagtcggaacataaccgaagctagatag

SEQ ID NO: 273260 - DNA, 906 bp, Artificial Sequence
  derived and/or modified sequence
atgctggagccccaggagaatggagtcatcgacctgcctgactatgaacatgtggaggatgagaccttcccccccttccccccaccagccagccctgagcggcaggatggagagggcacagagccagatgaggagagcggaaatggagcccctgtgcgggtgccccccaagaggacagtgaagaggaacatccccaagctggatgcccagaggctcatcagcgagcggggcctgcctgccctgcggcacgtgtttgacaaggccaagttcaagggcaaaggacatgaagctgaggacctgaagatgctgatccgccacatggagcactgggcccacaggctcttccccaagctgcagtttgaggacttcatcgacagagtggagtacctgggcagcaagaaggaggtgcagacctgcctgaagaggatccggctggacctgcccatcctgcacgaggactttgtgagcaacaatgatgaggtggctgaaaataatgaacatgatgtgaccagcacagagctggaccccttcctgaccaacctgtctgagagcgagatgtttgccagcgagctgagccgcagcctgacagaggagcagcagcagagaattgaaagaaacaagcagctggccctggagcggcggcaggccaagctgctgagcaacagccagaccctgggcaatgacatgctgatgaacaccccccgggcccacacagtggaggaggtgaacacagatgaggaccagaaggaggagagcaatggcctgaatgaagacatcctggacaacccctgcaatgatgccatcgccaacaccctgaatgaggaggagaccctgctggaccagagcttcaagaatgtgcagcagcagctggatgccaccagcaggaacatcacagaggccaggtag

SEQ ID NO: 273261 - DNA, 906 bp, Artificial Sequence
  derived and/or modified sequence
atgctggagccccaggagaacggcgtgatcgacctgcccgactacgaacatgtagaggacgaaacgttcccacctttccctcctccggcttccccagaaagacaggacggcgagggaacagagcccgacgaggaatctggaaacggcgctcctgtccgtgtcccacctaaacgcacggtgaagcggaacatacccaaactggatgcccagaggctcatctctgaacgtggcctgcctgctctgcggcacgtgttcgacaaagccaaattcaaggggaaaggacatgaagctgaagatcttaagatgctgatacgacacatggagcactgggctcatagattgttcccgaaattacagttcgaagacttcattgacagagtggaatacttggggagtaaaaaagaggttcagacgtgtctgaaacggataaggctggatttgcctattctgcatgaggactttgtcagtaataatgacgaggttgccgagaataacgaacatgacgtgacttctaccgaacttgacccattcctcacaaaccttagcgaaagtgagatgttcgcgtcagaactctcccgcagcctcacagaggagcagcagcagcgaatcgaacgtaacaagcagctcgcattggaaagaagacaggcaaaactcctctctaactcccaaacccttgggaatgatatgttaatgaatactccccgtgctcacaccgtggaggaagtcaatactgatgaggatcagaaggaggagtctaatggcctcaatgaggatatccttgacaatccatgcaacgatgccatcgcaaacactctgaatgaggaggagaccctcctcgatcagtccttcaagaacgtgcagcagcagctggatgccaccagtaggaatatcactgaagcccgttag

SEQ ID NO: 273262 - DNA, 906 bp, Artificial Sequence
  derived and/or modified sequence
atgctggaaccccaggagaatggcgttattgacctgcccgactatgagcatgttgaggacgagacatttcctccctttccccctcccgctagtccagagcgtcaagacggggaggggaccgaaccagatgaggaaagcgggaatggcgctcccgtgcgggtgccgcctaaacgcaccgtcaagcgaaatattcccaaactggatgctcaaagactgatctccgaaagaggactgcccgctctgagacatgtgtttgataaggcaaagttcaagggtaaagggcacgaggccgaggatctcaagatgttgatccggcacatggaacattgggcccacaggctcttccctaaacttcagttcgaggattttatcgaccgagtcgagtacctgggatccaaaaaggaggtccaaacgtgcttgaaaagaattagactagacctgcccatcttgcacgaagactttgtgtcgaataatgatgaggtagccgaaaataatgagcacgacgtgactagcaccgagttagacccattcctcactaatctcagcgagtccgagatgttcgcttcagaattgagccgttcccttaccgaggaacaacagcagaggattgagaggaataagcagctggccctggaacgacgccaagcaaagttgctgagcaattcacaaacacttggaaatgatatgctgatgaatactcctcgtgctcacaccgtggaggaggtcaacactgatgaagatcagaaggaagagagtaacgggctcaacgaagatatactggacaatccttgcaacgacgcaatcgctaatacgctgaatgaggaggaaactttgctggaccaatcattcaaaaatgtgcagcagcagctggatgctacatcccgaaacatcactgaggccagatag

SEQ ID NO: 273263 - DNA, 1236 bp, Artificial Sequence
  derived and/or modified sequence
ggagttcccgagtatcgcgagaagcgcgcttagtctgcacgccgaggtccgcgctgtgtcccgtgttttctgcgtgagaggaaaagatgctagaaccacaggagaatggcgtgattgacctaccagattatgagcatgtagaagatgaaacttttcctcctttcccacctccagcctctccagagagacaagatggtgaaggaactgagcctgatgaagagtcaggaaatggagcacctgttcgtgtacctccaaagagaacagttaaaagaaatatacccaagctggatgctcagagattaatttcagagagaggacttccagccttaaggcatgtatttgataaggcaaaattcaaaggtaaaggtcatgaggctgaagacttgaagatgctaatcagacacatggagcactgggcacataggctattccctaaactgcagtttgaggattttattgacagagttgaatacctgggaagtaaaaaggaagttcagacctgtttaaaacgaattcgacttgatctccctattttacatgaagattttgttagcaataatgatgaagttgcggagaataatgaacatgatgtcacttctactgaattagatccctttctgacaaacttatctgaaagtgagatgtttgcttctgagttaagtagaagcctaacagaagagcaacaacaaagaattgagagaaataaacaactggccttggaaagaaggcaggcaaagctgctgagtaatagtcagaccctaggaaatgatatgttaatgaatacacccagggcacacacggttgaagaggttaatactgatgaggatcaaaaggaggagtcaaatggattaaacgaagacattctggacaatccatgtaatgatgctattgccaatactttaaatgaagaggaaacactgctggaccagtcttttaaaaatgtgcaacagcaacttgatgctacatccagaaatattactgaagctagataagtttccattaagagaaaatgtatctgttaagtcatcgtcctgcaagcttggcgttactatgtattttttcttcttggagtgaaaatccttagatagtaaaactgttatagattattgtttaaaatctgataatctggtatttatttataattatgcttgtcactttagttaaatctatttgttctctttagtgtttgtttttatataggtatttcttcataaaatgattaggaggtaataagca

SEQ ID NO: 273264 - DNA, 1459 bp, Artificial Sequence
  derived and/or modified sequence
agtctgcacgccgaggtccgcgctgtgtcccgtgttttctgcgtgagaggaaaagatgctagaaccacaggagaatggcgtgattgacctaccagattatgagcatgtagaagatgaaacttttcctcctttcccacctccagcctctccagagagacaagatggtgaaggaactgagcctgatgaagagtcaggaaatggagcacctgttcgtgtacctccaaagagaacagttaaaagaaatatacccaagctggatgctcagaggctgaagacttgaagatgctaatcagacacatggagcactgggcacataggctattccctaaactgcagtttgaggattttattgacagagttgaatacctgggaagtaaaaaggaagttcagacctgtttaaaacgaattcgacttgatctccctattttacatgaagattttgttagcaataatgatgaagttgcggagaataatgaacatgatgtcacttctactgaattagatccctttctgacaaacttatctgaaagtgagatgtttgcttctgagttaagtagaagcctaacagaagagcaacaacaaagaattgagagaaataaacaactggccttggaaagaaggcaggcaaagctgctgagtaatagtcagaccctaggaaatgatatgttaatgaatacacccagggcacacacggttgaagaggttaatactgatgaggatcaaaaggaggagtcaaatggattaaacgaagacattctggacaatccatgtaatgatgctattgccaatactttaaatgaagaggaaacactgctggaccagtcttttaaaaatgtgcaacagcaacttgatgctacatccagaaatattactgaagctagataagtttccattaagagaaaatgtatctgttaagtcatcgtcctgcaagcttggcgttactatgtattttttcttcttggagtgaaaatccttagatagtaaaactgttatagattattgtttaaaatctgataatctggtatttatttataattatgcttgtcactttagttaaatctatttgttctctttagtgtttgtttttatataggtatttcttcataaaatgattaggaggtaataagcagtttctgctgctggtctgtcattgaatgccttgttttcactaagttgggaggttttgtttctgttttttactgctccttgcaaagcagggctaatccatggacagtgtgcccagagtagtctagttgaagttttttgttttgttttgttttgttttttttgacacagagtctcactctgttggccaggctggagtgcagtggcacagtcttggctcactgcaacctctgcctcctgggctcaagcaattctcctgccttagcctcccgagtagctgggactacaggcgtgtgccaccacgcttggctaatttttgtacttttagtagaga

SEQ ID NO: 273265 - protein, 561 aa, Artificial Sequence
  derived and/or modified sequence
MMNCWFSCTPKNRHAADWNKYDDRLMKAAERGDVEKVTSILAKKGVNPGKLDVEGRSVFHVVTSKGNLECLNAILIHGVDITTSDTAGRNALHLAAKYGHALCLQKLLQYNCPTEHADLQGRTALHDAAMADCPSSIQLLCDHGASVNAKDVDGRTPLVLATQMSRPTICQLLIDRGADVNSRDKQNRTALMLGCEYGCRDAVEVLIKNGADISLLDALGHDSSYYARIGDNLDILTLLKTASENTNKGRELWKKGPSLQQRNLTHMQDEVNVKSHQREHQNIQDLEIENEDLKERLRKIQQEQRILLDKVNGLQLQLNEREKLKSLLAAKEKQHEESLRTIEALKNRFKYFESDHLGSGSHFSNRKEDMLLKQGQMYMADSQCTSPGIPAHMQSRSMLRPLELSLPSQTSYSENEILKKELEAMRTFCESAKQDRLKLQNELAHKVAECKALALECERVKEDSDEQIKQLEDALKDVQKRMYESEGKVKQMQTHFLALKEHLTSEAASGNHRLTEELKDQLKDLKVKYEGASAEVGKLRNQIKQNEMIVEEFKRDEGKLI

SEQ ID NO: 273266 - DNA, 1686 bp, Artificial Sequence
  derived and/or modified sequence
atgatgaactgctggttcagctgcacccccaagaacagacacgccgccgactggaacaagtacgacgacagactgatgaaggccgccgagagaggcgacgtggagaaggtgaccagcatcctggccaagaagggcgtgaaccccggcaagctggacgtggagggcagaagcgtgttccacgtggtgaccagcaagggcaacctggagtgcctgaacgccatcctgatccacggcgtggacatcaccaccagcgacaccgccggcagaaacgccctgcacctggccgccaagtacggccacgccctgtgcctgcagaagctgctgcagtacaactgccccaccgagcacgccgacctgcagggcagaaccgccctgcacgacgccgccatggccgactgccccagcagcatccagctgctgtgcgaccacggcgccagcgtgaacgccaaggacgtggacggcagaacccccctggtgctggccacccagatgagcagacccaccatctgccagctgctgatcgacagaggcgccgacgtgaacagcagagacaagcagaacagaaccgccctgatgctgggctgcgagtacggctgcagagacgccgtggaggtgctgatcaagaacggcgccgacatcagcctgctggacgccctgggccacgacagcagctactacgccagaatcggcgacaacctggacatcctgaccctgctgaagaccgccagcgagaacaccaacaagggcagagagctgtggaagaagggccccagcctgcagcagagaaacctgacccacatgcaggacgaggtgaacgtgaagagccaccagagagagcaccagaacatccaggacctggagatcgagaacgaggacctgaaggagagactgagaaagatccagcaggagcagagaatcctgctggacaaggtgaacggcctgcagctgcagctgaacgagagagagaagctgaagagcctgctggccgccaaggagaagcagcacgaggagagcctgagaaccatcgaggccctgaagaacagattcaagtacttcgagagcgaccacctgggcagcggcagccacttcagcaacagaaaggaggacatgctgctgaagcagggccagatgtacatggccgacagccagtgcaccagccccggcatccccgcccacatgcagagcagaagcatgctgagacccctggagctgagcctgcccagccagaccagctacagcgagaacgagatcctgaagaaggagctggaggccatgagaaccttctgcgagagcgccaagcaggacagactgaagctgcagaacgagctggcccacaaggtggccgagtgcaaggccctggccctggagtgcgagagagtgaaggaggacagcgacgagcagatcaagcagctggaggacgccctgaaggacgtgcagaagagaatgtacgagagcgagggcaaggtgaagcagatgcagacccacttcctggccctgaaggagcacctgaccagcgaggccgccagcggcaaccacagactgaccgaggagctgaaggaccagctgaaggacctgaaggtgaagtacgagggcgccagcgccgaggtgggcaagctgagaaaccagatcaagcagaacgagatgatcgtggaggagttcaagagagacgagggcaagctgatctag

SEQ ID NO: 273267 - DNA, 1686 bp, Artificial Sequence
  derived and/or modified sequence
atgatgaactgctggttcagctgtaccccgaaaaacagacatgccgcggactggaataagtacgacgacagactaatgaaagcagccgagcggggggatgtcgagaaggtgacaagcattctggctaaaaaaggagtgaaccccgggaagctggatgtggaggggcgtagcgtttttcacgtcgtgacttcaaagggtaacctcgaatgcctgaacgcaatcttgatccacggtgttgatataacgacctccgatactgcaggcagaaacgccctgcatttggcagcgaaatatgggcatgcactttgtctgcagaaactgctccagtataattgccctaccgagcacgccgacctccagggtcgaactgccctccatgatgcagccatggcagactgcccttcaagcattcagttgctctgcgaccatggggcctccgtgaacgcgaaggacgtagatggccgaacacctctggtcctcgcgacacagatgtcccggcccacaatatgtcagctgctaatcgatagaggagccgacgtaaattccagggacaaacagaatcggacggctctgatgttgggatgcgaatacggctgtcgagatgctgtcgaggtgctcataaaaaacggagccgacatcagtctgctagatgccttgggccacgacagcagttattacgcccgaataggagacaacctggacatcctcactctgcttaagactgcgtccgaaaacacaaacaagggtagggaactctggaaaaaagggccttctctgcagcagaggaatctgacccacatgcaggatgaagtgaacgtgaagtcccatcaacgcgagcaccaaaacatacaggacctggagatagagaatgaagatcttaaagagcgattgcgcaaaattcagcaggaacagcgcatcctgctggacaaggtcaacgggctgcagcttcagctgaatgagcgggaaaagctgaagagcctgctagcagccaaagagaaacaacacgaggaaagcctgcgaactattgaggccctcaagaaccgattcaaatactttgaatcagaccacttagggtccggatcacacttcagtaatcgcaaagaggatatgcttttaaagcagggccaaatgtatatggcggactcccaatgcacgagcccgggcattccagcacatatgcagagcagatctatgttaaggcctcttgagctcagcttgccaagccagacctcttacagcgaaaacgagatcctaaagaaagagctggaggcaatgcgcaccttctgcgagtccgccaaacaagataggctcaaactccagaatgaactggcccacaaggttgccgagtgcaaggcgctggccctggaatgtgagagagtgaaggaagacagtgatgagcagattaagcagctcgaagacgctctgaaggatgtgcagaagagaatgtacgaaagcgaagggaaggtcaagcagatgcagacccattttctggcactgaaggagcacctgacaagcgaagccgctagcggcaatcaccgccttactgaggagttgaaagatcaactgaaagacctaaaagtaaagtacgagggcgcatcggcggaagtcgggaagttgaggaaccagattaaacagaatgagatgattgtggaagagtttaagcgagacgagggcaagttgatctag

SEQ ID NO: 273268 - DNA, 1686 bp, Artificial Sequence
  derived and/or modified sequence
atgatgaactgctggttcagctgcacccccaagaacagacatgctgctgactggaacaagtatgatgaccggctgatgaaggctgctgagagaggagatgtggagaaggtgaccagcatcctggccaagaagggcgtgaaccctgggaagctggatgtggagggccgctctgtgttccacgtggtgaccagcaaaggaaacctggagtgcctgaatgccatcctgattcatggagtggacatcaccaccagtgacacagctggaagaaatgccctgcacctggccgccaagtatggccacgccctgtgcctgcagaagctgctgcagtacaactgccccacagagcacgccgacctgcagggccgcacagccctgcatgatgctgccatggctgactgccccagcagcatccagctgctgtgtgaccatggagcctctgtgaatgccaaggatgtggatggccgcacccccctggtgctggccacccagatgagccggcccaccatctgccagctgctgattgacagaggagcagatgtgaacagccgggacaagcagaacagaacagccctgatgctgggctgtgaatatggctgcagagatgctgtggaggtgctgatcaagaatggagctgacatcagcctgctggatgccctgggccatgacagcagctactatgccagaattggagacaacctggacatcctgaccctgctgaagacagccagcgagaacaccaacaagggccgggagctgtggaagaagggccccagcctgcagcagaggaacctgacccacatgcaggatgaggtgaatgtgaagagccaccagcgggagcaccagaacatccaggacctggagattgaaaatgaagacctgaaggagcggctgaggaagatccagcaggagcagaggatcctgctggacaaggtgaatggcctgcagctgcagctgaatgaaagagagaagctgaagagcctgctggccgccaaggagaagcagcacgaggagagcctgcggaccatcgaggccctgaagaaccgcttcaagtactttgaaagtgaccacctgggcagcggcagccacttcagcaacaggaaggaggacatgctgctgaagcagggccagatgtacatggctgacagccagtgcaccagccctggcatcccagcccacatgcagagccgctccatgctgcggcccctggagctgagcctgcccagccagaccagctacagtgaaaatgagatcctgaagaaggagctggaggccatgaggaccttctgtgagagcgccaagcaggaccggctgaagctgcagaatgagctggcccacaaggtggccgagtgcaaggccctggccctggagtgtgagcgggtgaaggaggacagtgatgagcagatcaagcagctggaggatgccctgaaggatgtgcagaagaggatgtatgaaagtgagggcaaggtgaagcagatgcagacccacttcctggccctgaaggagcacctgaccagcgaggccgccagcggcaaccaccggctgacagaggagctgaaggaccagctgaaggacctgaaggtgaagtatgaaggagccagcgctgaggtgggcaagctgaggaaccagatcaagcagaatgagatgattgtggaggagttcaagagagatgagggcaagctgatctag

SEQ ID NO: 273269 - DNA, 1686 bp, Artificial Sequence
  derived and/or modified sequence
atgatgaactgctggttcagctgcacccccaagaaccggcacgccgccgactggaacaaatatgacgataggctaatgaaagccgctgagaggggcgacgtggagaaagtgacaagtatcttggcaaagaagggcgtgaaccctggtaaattagatgtcgaaggacgatcggtctttcacgtggtaacttccaaaggcaatttggaatgcctaaacgcaatcctgatccacggtgttgacattacgacctccgacacagccggcaggaacgcccttcatctcgcagccaagtatggacatgccctgtgcctgcaaaaactactgcagtacaactgccccaccgagcatgcagacctgcagggacgcactgccctgcacgatgcggccatggcagactgtccgagcagcattcaacttctgtgtgaccatggcgctagtgtgaacgccaaggatgtggatggacggacacctctggtactggccacccagatgagtcgtcctaccatatgtcagcttctcattgaccgcggagcggacgtcaatagtagggacaagcagaatcggaccgccctcatgcttggatgcgagtatggttgcagggacgccgtagaggtcctgatcaagaatggcgctgatattagtctgctggacgccctcgggcatgactcatcatactacgcgcggatcggggataatctcgatatcctaaccctcctgaagacagcctctgagaatacaaataaaggccgcgaactgtggaagaaaggcccgagcctgcaacaacgtaacctgactcacatgcaggatgaagtgaatgttaaaagtcaccagcgcgagcaccagaacattcaagacctggagatcgagaatgaggatttgaaggagaggctgcggaaaattcagcaggaacagaggatcctgctagataaggtcaacgggttgcaacttcagctaaatgagagagagaagctgaaaagtttgctggccgcgaaagagaaacaacacgaagaatctctgagaaccatcgaggctctgaaaaacaggttcaagtacttcgagtcagaccatcttggaagcggatcccattttagcaatagaaaggaagatatgctcctaaaacagggccaaatgtatatggccgatagccaatgtacgtctccaggaattcccgcacatatgcagagcaggtctatgctgaggcccctcgagctgagcctgccctcacagacttcctatagcgaaaacgagatcctcaagaaggagctggaagccatgcggacgttctgcgaatccgcaaagcaggatagactgaaactccaaaacgaattagctcacaaagtggcggagtgcaaagcactggccctggagtgcgaacgagtgaaggaggactccgacgagcagatcaagcaattggaagatgcactcaaggatgtgcagaaacgcatgtacgaaagcgaaggcaaagttaaacagatgcagacccattttttggcgctgaaagagcatctaaccagcgaagccgcctccggcaatcatagactgacagaggaactgaaagaccagttgaaagacctcaaggtgaagtacgagggtgcctcagctgaggtaggaaaattgcgcaatcagatcaaacaaaatgagatgattgttgaggagttcaagagggatgagggtaaactaatctag

SEQ ID NO: 273270 - DNA, 1686 bp, Artificial Sequence
  derived and/or modified sequence
atgatgaattgttggttctcttgtactcctaagaaccgccatgcagccgactggaacaagtatgatgatagacttatgaaggcagccgagcggggtgacgtggaaaaagtaacgtcaatcttagctaagaaaggggttaatccaggcaaactggacgtggaaggacgcagcgtttttcacgtagtgaccagtaagggcaaccttgagtgtttaaatgcaatactcattcacggggtagatatcaccacctcagatacagcgggacgaaatgctttacatttggcagccaagtatggacatgctctttgtctgcagaagcttctgcagtataactgtcctactgagcacgcggatctccaggggagaaccgcccttcacgacgccgctatggccgattgtccttccagtatccaactgctgtgcgatcatggcgcatccgtcaatgcaaaagatgtagacgggaggactccactcgttctggccactcagatgagtcgaccgacgatctgtcagcttctgattgaccgtggagccgacgtcaacagtagggacaagcagaaccggactgctctgatgctaggatgcgagtatggttgtcgagatgctgttgaggtcttaattaaaaacggcgctgatattagtctcctggacgccctgggacatgactcaagttactatgccagaataggagacaaccttgacatattgaccctgctgaaaacagcttccgagaacaccaacaaggggagagagttgtggaaaaaaggcccaagtttgcagcagagaaatcttactcacatgcaggacgaagtaaatgtaaaaagccatcaaagggagcaccaaaacattcaggacttagaaattgaaaatgaggatctgaaggaaagattgcggaaaattcagcaagaacagaggatcctgcttgataaagtgaacggtttacagctgcagttaaacgaacgtgagaagctcaaatccttgctggccgcaaaggagaagcagcacgaagaatccctcagaacaattgaggctctgaaaaatcggtttaaatatttcgagtccgaccacctggggagtggaagccactttagcaatagaaaggaggacatgctgttaaagcagggtcagatgtacatggctgactcgcaatgcactagcccaggtatcccggctcacatgcagtccaggagcatgctgcggcctcttgagttgtccttgcccagtcagacttcatattcagagaacgaaatcctgaagaaggagctggaagccatgcgcactttctgcgagtctgcgaaacaggacaggttgaagttacagaacgaacttgcccacaaggtggccgaatgcaaggcccttgccttggaatgcgaacgggtgaaagaggattctgatgaacagatcaagcagttagaggacgcccttaaagacgtgcagaagagaatgtacgaatccgaaggaaaagtgaaacagatgcagactcacttcctggcactgaaagaacatttgacaagtgaagccgcatctggcaaccacagactcaccgaggaactcaaggaccaactgaaggatctgaaggtgaagtatgaaggcgcatccgccgaggtgggaaagctgaggaatcaaataaagcagaacgagatgatcgtggaggaattcaaaagggacgaaggcaaactcatctag

SEQ ID NO: 273271 - DNA, 6679 bp, Artificial Sequence
  derived and/or modified sequence
atgatgaactgttggttttcttgtactcctaagaacagacatgcagcagattggaataaatatgatgaccgattgatgaaagcagcagaaaggggggatgtagaaaaagtgacctcaatccttgctaaaaagggggtcaatccaggcaaactagatgtggaaggcagatctgtcttccatgttgtgacctcaaaggggaatcttgagtgtttgaatgccatccttatacatggagttgatattacaaccagtgacactgcagggagaaatgctcttcacctggctgctaagtatggacatgcattgtgcctacaaaaacttctacagtacaattgtcccactgagcatgcagacctgcagggaagaactgcacttcacgatgccgcaatggcagattgtccttctagcatacagctgctttgtgaccatggggcctctgtgaatgccaaagatgtagacgggcggacaccacttgttctggctactcagatgagtaggccaacaatatgtcaactgctgatagatagaggagcggatgttaattccagagacaaacaaaacagaactgccctcatgctaggttgcgaatatggttgcagagatgcagtagaagtcttaattaaaaatggtgctgatataagcttgctggatgcgcttggccatgatagttcttactatgcaagaattggtgacaatctggacattctaaccttgttgaagactgcatcggaaaataccaacaaagggagagaactttggaagaaagggccatctttgcaacagcgaaatttgacacacatgcaagatgaagtaaatgtgaagtcacatcagagggagcatcaaaatattcaggatttggagattgaaaatgaagatttgaaagagaggttgagaaaaattcagcaagaacaaagaatacttttggataaagtcaatggtttacagttacagctgaatgagagagaaaagctgaagtcccttttggcagctaaagaaaagcaacatgaagaaagcttaaggactattgaggctctgaaaaatagatttaaatattttgagagtgatcatttaggatcaggaagtcatttcagtaaccgaaaagaagatatgcttcttaaacaaggtcagatgtatatggcagactcacagtgtacttccccaggtataccagcccatatgcaaagcagatctatgttaagacctctggaactatctttacccagtcaaacgtcatactctgaaaatgaaattttaaagaaagagttagaagcaatgcgaactttctgtgagtcagcaaaacaagaccgactgaagctccaaaatgaactggcacacaaagtggcagaatgcaaagctttagcattagaatgtgaaagggtcaaggaggattcagatgaacagataaagcaattagaagatgcattaaaagatgtgcagaagaggatgtatgagtcagaaggtaaagttaaacaaatgcagacccattttcttgcccttaaagaacacttaacaagtgaagcagcctcagggaatcacagactaaccgaggaactgaaggatcagttgaaagacttgaaagtaaaatatgaaggtgcttcagcagaagtggggaaattaagaaaccaaatcaaacaaaatgagatgatagtagaagagtttaagagggatgaaggcaagctgatagaagaaaataagcgattacagaaggaacttagtatgtgtgaaatggagcgagagaagaaaggaagaaaggtcacagagatggaaggccaggcaaaagaattgtcagcgaagttggccctttccattccagctgaaaaatttgaaaacatgaagagctcattatcaaatgaagtgaatgagaaagcaaaaaaattagtagaaatggaaagagaacatgaaaaatcacttagtgaaattagacagttaaagagagaacttgagaatgttaaggccaagcttgctcagcacgtcaaaccagaggaacatgaacaggttaagagcagattagaacagaaatcaggagaacttgggaagaagatcactgagttaacattgaaaaatcagacactacaaaaggaaattgaaaaagtttatttggataataagctcctcaaggagcaagcacataacttaacaattgaaatgaaaaatcattatgttcctttaaaagtaagtgaagacatgaaaaagtcacatgatgcaattattgatgatcttaatagaaagcttttagatgtaacacaaaaatatacagaaaagaagttggaaatggagaaattgctactggaaaatgacagcttaagtaaggatgtaagccgcctagaaactgtgtttgtacctcctgagaaacatgaaaaagagataatagctctgaaatccaatattgttgaacttaagaaacagctgtctgaacttaagaaaaaatgtggtgaagaccaggagaaaatacacgctctcacatctgaaaacactaacttgaagaagatgatgagtaatcagtatgtgccagttaaaacccatgaagaggttaaaatgacactgaatgacacgttagccaaaactaacagagaattattagatgtgaagaaaaaatttgaagatataaatcaggaatttgtaaaaataaaagataagaatgaaatattaaaaagaaacctggaaaacactcagaaccaaataaaagctgagtacatcagcctggcagagcacgaggcaaagatgagctcgctaagtcagagcatgagaaaggtgcaggatagtaatgctgaaatcttggccaactacagaaaaggccaagaagagattgtgacactgcatgccgaaattaaagcccagaagaaggagctcgacacaatacaagaatgcattaaggtaaaatacgccccaattgtcagctttgaggagtgcgagagaaaatttaaagcaacagagaaagaactaaaagaccagttatcagagcagacacaaaagtatagtgtcagtgaagaagaagtcaagaaaaacaagcaagagaatgacaagttaaagaaggagatttttacccttcagaaagatttgagagataagacagttctcattgagaagtctcatgaaatggaaagagcattaagcagaaaaacagacgagctaaacaaacagttaaaagacttgtcacagaaatacacggaagtaaagaatgtgaaagagaagctagtagaagaaaatgccaaacagacttctgagatacttgcagtgcaaaatcttttgcaaaaacaacatgttccattggaacaggttgaggctctgaaaaaatctcttaatggcacaattgaaaatctaaaggaagaactgaagagtatgcaaaggtgttacgagaaagagcagcagacagtgaccaaactgcatcaattgttggagaatcaaaagaactcttctgtacccctggcagagcatttgcagattaaagaagcatttgagaaagaagttggaatcataaaagccagcttgagagaaaaggaagaagaaagccaaaacaaaatggaagaagtctccaaacttcagtcggaggttcagaatactaaacaagcattaaaaaaattagagactagagaggtagttgacttgtctaaatataaagcaacaaaaagtgatttggagacacagatttctagcttaaatgaaaaattggccaatctgaatagaaagtatgaggaagtatgtgaggaagttttgcatgccaaaaagaaggaaatatctgcaaaagatgagaaggaattactgcatttcagcattgagcaagaaattaaggatcagaaggaacgatgtgataagtccttaacaacaatcacagagttacaaagaagaatacaagaatctgctaaacaaatagaagcaaaagataataagataactgaactgcttaatgatgtggaaagattaaaacaggcactcaatggcctttcccaactcacctacacaagtgggaaccccaccaagaggcagagccagctgattgacactctgcagcaccaagtgaaatctctggagcaacagctggccgatgctgacagacagcaccaagaagtaattgcaatttatcggacacaccttcttagtgctgcacagggtcacatggatgaagatgttcaggaggctctgctccagatcatacaaatgcggcaggggcttgtgtgctagccgttagcactgactgccagtatctgttttatcttgctggtgctgaacattctttgtgcaactccatggtctttctgggccttactgtgctggtataattaaaataaaatatattttgttctattggtaggtttttttttaaaattagatgaatatgttagtctttttcaatatcagtttgaatcttattttctgtatgtgttaattttacaaataggcaaacaacataactttgccctggattgactacatatttttaaaccttcaagtccctaataaaacatgagccatctgagtgagtccatatgaagcgaggttaggctgaaataattgcttaaagatgtctttcagagaaattaatttggttggtggccacttttaggtggatcaaaagacctttcagatcctcagaaccttgagacataatacagttgtgaggaatgtgttgtaacttggctggccaagttacatgttacagtatctttactgaggtaacttcattagtgtctttggccttttttgtaggtatagatattttttctttttacactaataacttttatgccttttaaaataaatttattttcataaatggtttgcagtgctaaattacatttagattaagaacaggcaggggtggaatatatcaggaatttataataaaattgccttaatctctacaacagtatcttaatttttacttgcggtgactattcttgccacaatattggagaataatgatagatgatatactagatttttcaaagtgtgaaaacctttagactttttttagcaattagtttgacattcgctactatagtaaccaagcactcattatatatgcatcctccaaatgtttcatgcttatttataggaaagttatattaatgagattaataatgtgaaatacagttttcctgcaaaattagcattagagaattgattttagataacagatttttaaagttttagagaaaagtacagtaatacagtaaactgaaagagtatatagatagcaataaaataacataagtggacatgtttatagtaaatactctgaagtaaacaaccgtttttattaactgcatctcattagggaaagtttatatgtcttgttattttttattaacattttatttaccattcagagtgaaaattactaatttgagtattaacaaataactgaataaatggatcattacagttaggttttctcaaattgcaaaatttgccttagcaattatctttgaacatcccgaaccagatttttaaatcccatttttgtttaatagggtaaaaataccatcaaaatgacttctcataccaaagaataagccatcatattttttcggtgttgaaacaacattgaaagtcagaattggatttgtttttaattctttatacggtttacataagcaatatctgtctctttaattattatgattaatgtcgtccttcagcatgagttctgtttcacaagttttgggccacctatttcaataaaaaataaaatataaattaaaaaagttgccgggggtggtggctcatgcctgtaatcccagcactttgggaggctgagggaggtagatcacctgaggtcagaagttcgagaccagccttaccaatatggtgaagccccatctctactaaaaatacaaaaattagccctgcatggtggcaggtgcctgtagtcccaggtactcgggaggctgagacaggagaatcgcttgaacctgggaggcggaggttgcagtgagccaagatctcgccactgcactccagcttgggcaatagcaagactccatctcaaaataaaataaaataaaacttagagcaaagtttaaaactgagtattcatattaagtgttttattttccatattagagatgggaagggaaccttatgtgtattttattttgttttcaaccatcaataaagttttctctagaatattgttttgaacatccttgtaaaagatttgcgagttaaactattttatttactgtctgtgagagcattgggagtaggaaacgatggactccaaagtacaagggagaatacccattttcattcagctatctggagtaaaatatcaagtacttccttcaactaatcttgtctcattcactcaccttttgatatcgaaggcagaaattgcgtttacaacactgaagaccaaagctttttaattagtaaacaagcggaacatagataatggacaatgctggccactgccattctgtgttcagaaagactatgagacctgaacatatggccaagaggaaagaagagtgacgttgtctaagatgtaatgagtgctctctgagagaatcactcaattcctattggagtgcaatccttacttgagaactttattactcttgttctgtgtagttttttttttttgtcacttccccatcagaaaagcatattctttttgatagagggtcagtgttataaataattgtcttttgaaataaaatcaaatattcatgcattg

SEQ ID NO: 273272 - protein, 721 aa, Artificial Sequence
  derived and/or modified sequence
MAEKFESLMNIHGFDLGSRYMDLKPLGCGGNGLVFSAVDNDCDKRVAIKKIVLTDPQSVKHALREIKIIRRLDHDNIVKVFEILGPSGSQLTDDVGSLTELNSVYIVQEYMETDLANVLEQGPLLEEHARLFMYQLLRGLKYIHSANVLHRDLKPANLFINTEDLVLKIGDFGLARIMDPHYSHKGHLSEGLVTKWYRSPRLLLSPNNYTKAIDMWAAGCIFAEMLTGKTLFAGAHELEQMQLILESIPVVHEEDRQELLSVIPVYIRNDMTEPHKPLTQLLPGISREALDFLEQILTFSPMDRLTAEEALSHPYMSIYSFPMDEPISSHPFHIEDEVDDILLMDETHSHIYNWERYHDCQFSEHDWPVHNNFDIDEVQLDPRALSDVTDEEEVQVDPRKYLDGDREKYLEDPAFDTNYSTEPCWQYSDHHENKYCDLECSHTCNYKTRSSSYLDNLVWRESEVNHYYEPKLIIDLSNWKEQSKEKSDKKGKSKCERNGLVKAQIALEEASQQLAGKEREKNQGFDFDSFIAGTIQLSSQHEPTDVVDKLNDLNSSVSQLELKSLISKSVSQEKQEKGMANLAQLEALYQSSWDSQFVSGGEDCFFINQFCEVRKDEQVEKENTYTSYLDKFFSRKEDTEMLETEPVEDGKLGERGHEEGFLNNSGEFLFNKQLESIGIPQFHSPVGSPLKSIQATLTPSAMKSSPQIPHQTYSSILKHLN

SEQ ID NO: 273273 - DNA, 2166 bp, Artificial Sequence
  derived and/or modified sequence
atggctgagaagttcgaaagcttgatgaatattcatgggtttgatctcggcagcaggtacatggatctaaagccactcgggtgtggaggtaacggacttgtgttctcagcagttgacaatgattgtgacaaacgggtggcaataaagaaaattgtcctgactgatccgcagtctgttaaacacgccctaagggagatcaagatcatccgccgcctagaccatgataacatcgtgaaagtgttcgagatcctcggtccctctgggagccagctgacagacgatgtgggtagcctaaccgagttgaattctgtttacattgtccaggaatatatggaaacagacctggccaatgtgttggagcaagggcccctgctagaggaacacgctcgacttttcatgtaccagctgcttagaggtctgaagtacattcactcagctaatgtgctccaccgtgacctgaagccagcaaatcttttcatcaataccgaagacttggtcctcaagattggggatttcggcctggcaaggataatggacccccattactctcacaagggtcatcttagtgagggattagtaaccaaatggtatagatctcccaggctgttgctctcccctaacaactacactaaggctatcgatatgtgggccgcagggtgcatttttgctgagatgctcacgggaaaaaccctcttcgccggggcacacgagctggagcagatgcagctgattctggaatctataccagtagtgcacgaggaggataggcaagagctgctgagcgtgatccctgtctacatcaggaatgatatgaccgagccacataagcccttgacacagctgctgcccgggattagcagggaggccctagacttcctcgaacagattctaacattcagcccgatggataggctcactgcagaggaggctctttcgcacccctacatgtccatctattcttttcctatggacgagcccatctcctcccacccgttccatatcgaggatgaggtggatgatatcctgctgatggacgagacacactcacacatttataactgggagcggtaccacgattgccaattcagtgagcacgactggcctgttcacaataacttcgatattgacgaggtgcagctcgacccgcgggccctgtccgatgtaactgacgaagaagaggtgcaggtggatccaaggaagtatctagacggggatcgcgaaaagtatcttgaagatcctgcgtttgacactaattatagcaccgaaccatgttggcagtacagcgaccaccatgagaacaaatactgcgatctggagtgcagtcatacatgcaactataagacaaggagttcctcctatctggacaacctcgtctggcgcgagagtgaggtcaatcactactacgaaccaaagcttatcatagatctcagcaattggaaggagcaatcaaaggagaagagcgacaagaagggaaagagcaagtgtgagagaaacggactggtgaaggcccagatagccctcgaggaggcttcgcaacagttggccggcaaggaacgcgagaaaaaccaaggatttgactttgattcctttatcgcaggcacgatccagctgagttcacagcatgaaccaaccgacgtcgtggacaagctaaatgacctgaatagtagcgtctctcagttggaactcaagtcacttatcagcaaaagcgtgtctcaggagaaacaggagaagggcatggcaaacctggctcagctggaagcactgtatcagtcctcttgggatagccagttcgtgagtgggggggaggactgcttctttattaatcagttttgtgaggtgcgcaaagatgagcaggtcgagaaggaaaacacatataccagctacctggacaaatttttctcacgtaaagaagatacagaaatgttagaaacagagccagttgaggacggaaagcttggggaacggggtcacgaggaggggttcctgaacaactctggggaattcctcttcaacaagcagttggaatccatcggtatcccacagtttcattcacccgttggatcgcccttaaaatccattcaggctaccttgacccctagcgcaatgaagtcctctccacaaattccacatcagacctacagctcaattctcaaacatttaaattag

SEQ ID NO: 273274 - DNA, 2166 bp, Artificial Sequence
  derived and/or modified sequence
atggccgagaagtttgagagcctgatgaacatccacggctttgacctgggcagccgctacatggacctgaagcccctgggctgcggcggcaatggcctggtgttttctgctgtggacaatgactgtgacaagagggtggccatcaagaagatcgtgctgacagacccccagagcgtgaagcacgccctgcgggagatcaagatcatccggcggctggaccatgacaacatcgtgaaggtgtttgagatcctgggccccagcggcagccagctgacagatgatgtgggcagcctgacagagctgaacagcgtgtacatcgtgcaggagtacatggagacagacctggccaacgtgctggagcagggccccctgctggaggagcacgcccggctcttcatgtaccagctgctgcggggcctgaagtacatccacagcgccaacgtgctgcaccgggacctgaagccagccaacctcttcatcaacacagaggacctggtgctgaagattggagactttggcctggcccgcatcatggacccccactacagccacaagggccacctgtctgagggcctggtgaccaagtggtaccgcagcccccggctgctgctgagccccaacaactacaccaaggccatcgacatgtgggccgccggctgcatctttgctgagatgctgaccgggaagaccctgtttgctggggcccacgagctggagcagatgcagctgatcctggagagcatccctgtggtgcatgaggaggaccggcaggagctgctgagcgtcatccctgtgtacatcagaaatgacatgacagagccccacaagcccctgacccagctgctgcccggcatcagccgggaggccctggacttcctggagcagatcctgaccttcagccccatggaccggctgacagctgaggaggccctgagccacccctacatgagcatctacagcttccccatggatgagcccatcagcagccaccccttccacattgaagatgaggtggatgacatcctgctgatggatgagacccacagccacatctacaactgggagcgctaccatgactgccagttcagcgagcatgactggcctgtgcacaacaactttgatattgatgaggtgcagctggacccccgggccctgagtgatgtgacagatgaggaggaggtgcaggtggaccccaggaagtacctggatggagaccgggagaagtacctggaggaccctgcctttgacaccaactacagcacagagccctgctggcagtacagcgaccaccacgagaacaagtactgtgacctggagtgcagccacacctgcaactacaagaccaggagcagcagctacctggacaacctggtgtggagggagagcgaggtgaaccactactatgagcccaagctgatcatcgacctgagcaactggaaggagcagagcaaggagaagagtgacaagaagggcaagagcaaatgtgaaagaaatggcctggtgaaggcccagatcgccctggaggaggccagccagcagctggccggcaaggagcgggagaagaaccagggctttgattttgacagcttcatcgccggcaccatccagctgagcagccagcacgagcccacagatgtggtggacaagctgaatgacctgaacagctctgtgtcccagctggagctgaagagcctcatcagcaagtctgtgtcccaggagaagcaggagaagggcatggccaacctggcccagctggaggccctgtaccagagctcctgggacagccagtttgtgtctggaggagaggactgcttcttcatcaaccagttctgtgaggtgaggaaggatgagcaggtggagaaggagaacacctacaccagctacctggacaagttcttcagcaggaaagaagacacagagatgctggagacagagcctgtggaggatggcaagctgggggagcggggccacgaggagggcttcctgaacaacagcggggagttcctgttcaacaagcagctggagagcatcggcatcccccagttccacagccctgtgggcagccccctgaagagcatccaggccaccctgacccccagcgccatgaagagcagcccccagatcccccaccagacctacagcagcatcctgaagcacctgaactag

SEQ ID NO: 273275 - DNA, 2166 bp, Artificial Sequence
  derived and/or modified sequence
atggccgagaagttcgagagcctgatgaacatccacggcttcgacctggggtctcgatacatggacctgaaacccctgggctgcggcgggaatgggcttgtgttctcggccgtagataatgattgcgataaacgagtcgccattaaaaagattgtcttgacagatccgcagtcagtgaaacatgctctgagggagattaaaattatcaggcgcctcgaccacgataacatcgtcaaggtcttcgaaattctggggccctccggtagccagctcaccgacgacgtgggatccctgacagagctcaatagtgtctatatcgtgcaggagtacatggagactgaccttgctaacgtgctggagcagggccccctcctggaggaacacgcccgactgttcatgtatcagctgcttcgcggtctgaaatatattcactccgccaatgtgctgcatcgcgacttgaaaccagcaaacctattcataaatacggaagacctggtgctcaagattggagacttcggcctggctcgtataatggaccctcactacagtcataaaggccatcttagcgagggactggttacaaagtggtataggagtccaaggcttctgctgagtcccaacaattataccaaggcgatcgatatgtgggccgcaggctgtatcttcgctgagatgttgacgggtaaaaccctgttcgccggagcacatgagctggagcaaatgcagctgatccttgagtcgattcctgtggttcatgaggaagaccgacaggagctgttgagtgtgatccctgtgtatattcgcaacgacatgacggaaccacataagcccctgacgcagctcctgcctggcattagcagagaggccctggatttcctggagcaaattctaaccttctcacctatggaccgcctcactgctgaagaagccttaagccatccttacatgagcatatacagcttcccaatggacgagcccataagttctcatccgtttcacattgaagatgaggtcgacgatattctgttaatggatgagacacactctcacatttataactgggagaggtaccacgactgtcagttttcagagcacgactggcctgtccacaataacttcgatattgacgaggttcagcttgatcctcgtgccctctccgacgtcaccgatgaagaagaggtccaggtggatcctcgcaaatacctagacggggaccgggaaaagtatcttgaagacccagcttttgacacaaactattctacagagccttgctggcagtatagtgaccaccacgagaacaaatactgtgacctagaatgctcccacacatgcaactacaaaacccgctcaagctcttatctagacaacctggtctggcgggaatccgaagtaaatcactattacgaacctaagcttatcattgacttgtcaaattggaaggagcagagcaaagaaaaatccgacaagaaaggcaagtcaaagtgcgaacggaatggtctggtgaaagctcaaatcgcgttagaagaagcatctcagcagctcgccggcaaggagcgcgagaaaaaccagggatttgatttcgactcgttcatcgctgggactatccaactgagcagccagcatgaaccaactgacgtcgtcgataagctcaatgatctcaattcttccgtgtcccagcttgagctgaagagcctcatctcgaaaagcgtttctcaagaaaagcaggagaaggggatggccaaccttgcccagttggaggctctttaccagtcctcctgggattctcaatttgtgtccggaggtgaggactgtttttttattaaccagttttgtgaggtgcggaaggatgagcaggtggagaaagaaaatacatacaccagttaccttgacaaattcttctcacgtaaagaagacaccgaaatgctggagacagaaccagtagaggatggaaagttgggcgaacggggccacgaggagggcttcttgaataactctggcgaatttttgttcaacaaacagcttgagtcgatcgggatcccacagtttcactcccccgtggggagcccattgaagagcattcaggctaccctaactccatccgctatgaagtcatccccacagataccacatcagacatacagctctatcttaaaacatctgaactag

SEQ ID NO: 273276 - DNA, 2166 bp, Artificial Sequence
  derived and/or modified sequence
atggcagaaaaattcgagagtctgatgaacattcatggtttcgacctgggcagccgctatatggacctgaaaccgctgggctgcgggggaaatggccttgttttttccgctgtggacaacgactgtgataaaagagtggctattaagaagatcgtcctgaccgaccctcagtcggtgaaacacgccttgcgcgaaataaaaattatcaggcggctggaccacgataatatcgtcaaggtgtttgaaattctgggtccttccgggagccaattgacagacgacgtgggctctttaaccgagctaaattccgtgtacatcgtgcaggaatacatggagaccgacctcgcgaatgttctggagcagggtcccttgctcgaggaacatgccaggttatttatgtatcagttgttgaggggcctcaaatacatccatagcgcaaacgtcctccacagagaccttaagccagctaacctttttatcaacacagaggatctggttctgaagatcggtgactttggtctggccagaattatggaccctcactatagccataagggccatttatccgaaggcctggttaccaagtggtaccggagccccagactgctgctgtctcctaataactatacgaaggctatagacatgtgggcagccggttgtattttcgccgaaatgctgacaggtaaaactctgtttgcgggagcccatgagctcgagcagatgcagttaatcttggaatcaataccagtagtccacgaagaagaccgacaggagctcctgtccgtgatccccgtctatattaggaacgacatgacggagccacataaaccgctgacccagctgctgcctggaatctctcgcgaagctttagatttcctggagcagattttgacatttagtcctatggaccgcctgactgcagaggaggccttgagtcacccatacatgagcatatacagctttccgatggacgagcccatatcgtcccatcccttccacattgaagacgaggtcgacgacatccttcttatggatgagacgcacagccatatatataattgggaacgctaccacgactgtcagttttctgagcacgattggcccgtgcataataattttgacatcgatgaagtgcagctggatcctcgcgcactatcagatgtgacggacgaagaagaagtgcaggttgaccctcgcaaatacctggacggagatcgggagaaatatctggaggacccagctttcgataccaattactccactgagccctgttggcagtactctgaccaccacgagaataaatactgtgacctagagtgtagccatacctgcaattacaagacaagaagttccagttatctggacaacctcgtttggcgcgagagtgaggtgaaccactactatgagcctaaactcataattgacctgagtaactggaaggagcaaagcaaggagaagagcgacaaaaaagggaagtcgaaatgtgagaggaatggacttgtaaaagcccagatcgccctagaagaggcgagtcagcagctggcagggaaggagcgggaaaagaatcaggggttcgatttcgatagctttattgcgggtaccatccagctgtcctcacagcacgaacccaccgatgtggtagacaaactgaacgatttaaattccagtgttagccagttggaactcaaaagccttatctcaaagtcagtttcacaggagaagcaggaaaaaggaatggccaatctagcccagttggaggccttgtaccagtcatcctgggactcacagtttgttagtggaggcgaggattgctttttcatcaatcaattctgtgaggtaaggaaggacgagcaggttgaaaaagagaacacctatacgagttacctagacaagttcttctcacgaaaagaggacacggaaatgctggaaacggaacctgtggaagatggaaagctaggagagcgcggtcatgaggagggatttctcaataactccggcgaattcctgttcaataagcaactcgagtccatcgggattccacaattccactcgcccgtggggagtcccctaaagagtattcaggcaacccttaccccttccgccatgaagagctcaccacagatacctcatcagacctactcaagtattctgaaacacttgaactag

SEQ ID NO: 273277 - DNA, 4238 bp, Artificial Sequence
  derived and/or modified sequence
cgcgaagccccgccccctcttcctcgccctctctcgcgggtcggggttacatggcggcgactgcggcaaagcgagagcctcggagacgccgctgccgccagcacagccggagacctgagccgacactgggggcagtccgcgagccccgcactctctcgatgagtcggagaagtcccgttgtatcagagtaagatggacggtagctttgattgtgattgtggtgagctggagccacctgatcactaacaaaagacatcttctgttaaccaacagccgccagggcttcctgttgaaataaatatatagcaacaaaggaaaaaaagaagcaaaacggaaatagtgcttaccagcaccttagaatgatgctgctcaggaccagtccaacactgaatgtatctgcactgtgaggagaatgttcatagaagcctgttgtgtgcatatttattcacatttttgttaaatgttaaatcgtttagcacggtaatctgagtgcacagtatgtcatttcattccgtttgagtttcttgttttcgttaaatgtctgcagagttgctgcccctttcttgaactatgagtactgcaatctttttaattctcaatatgaatagagctttttgagctttaaatctaaggggaactcgacaggcctgtttggcatatgcaatgaacatcaagaaaccatcttgctgtggaagcataattatttttcttctccctttttgaaagatctttccttttgatgccagttttcttccttgtttacacaagttcaatttgaaaggaaaaggcaatagtaagggtttcaaaatggcagagaaatttgaaagtctcatgaacattcatggttttgatctgggttctaggtatatggacttaaaaccattgggttgtggaggcaatggcttggttttttctgctgtagacaatgactgtgacaaaagagtagccatcaagaaaattgtccttactgatccccagagtgtcaaacatgctctacgtgaaatcaaaattattagaagacttgaccatgataacattgtgaaagtgtttgagattcttggtcccagtggaagccaattaacagacgatgtgggctctcttacggaactgaacagtgtttacattgttcaggagtacatggagacagacttggctaatgtgctggagcagggccctttactggaagagcatgccaggcttttcatgtatcagctgctacgggggctcaagtatattcactctgcaaatgtactgcacagagatctcaaaccagctaatcttttcattaatacggaagacttggtgctgaagataggtgactttggtcttgcacggatcatggatcctcattattcccataagggtcatctttctgaaggattggttactaaatggtacagatctccacgtcttttactttctcctaataattatactaaagccattgacatgtgggctgcaggctgcatctttgctgaaatgctgactggtaaaaccctttttgcaggtgcacatgaacttgaacagatgcagctgattttagaatctattcctgttgtacatgaggaagatcgtcaggagcttctcagcgtaattccagtttacattagaaatgacatgactgagccacacaaacctttaactcagctgcttccaggaattagtcgagaagcactggatttcctggaacaaattttgacatttagccccatggatcggttaacagcagaagaagcactctcccatccttacatgagcatatattcttttccaatggatgagccaatttcaagccatccttttcatattgaagatgaagttgatgatattttgcttatggatgaaactcacagtcacatttataactgggaaaggtatcatgattgtcagttttcagagcatgattggcctgtacataacaactttgatattgatgaagttcagcttgatccaagagctctgtccgatgtcactgatgaagaagaagtacaagttgatccccgaaaatatttggatggagatcgggaaaagtatctggaggatcctgcttttgataccaattactctactgagccttgttggcaatactcagatcatcatgaaaacaaatattgtgatctggagtgtagccatacttgtaactacaaaacgaggtcatcatcatatttagataacttagtttggagagagagtgaagttaaccattactatgaacccaagcttattatagatctttccaattggaaagaacaaagcaaagaaaaatctgataagaaaggcaaatcaaaatgtgaaaggaatggattggttaaagcccagatagcgctagaggaagcatcacagcaactggctggaaaagaaagggaaaagaatcagggatttgattttgattcctttattgcaggaactattcagcttagttcccagcatgagcctactgatgttgttgataaattaaatgacttgaatagctcagtgtcccaactagaattgaaaagtttgatatcaaagtcagtaagccaagaaaaacaggaaaaaggaatggcaaatctggctcaattagaagccttgtaccagtcttcttgggacagccagtttgtgagtggtggggaggactgttttttcataaatcagttttgtgaggtaaggaaggatgaacaagttgagaaggaaaacacttacactagttacttggacaagttctttagcaggaaagaagatactgaaatgctagaaactgagccagtagaggatgggaagcttggggagagaggacatgaggaaggatttctgaacaacagtggggagttcctctttaacaagcagctcgagtccataggcatcccacagtttcacagtccagttgggtcaccacttaagtcaatacaggccacattaacaccttctgctatgaaatcttcccctcaaattcctcatcaaacatacagcagcattctgaaacatctgaactaaaacactcagcagacatttatctttgtattcttcatgaaatgtgttttgtctttttttattactagtgtttaagtcattttttacttgaatcagatggtgtcatttagtaaggattttatgagttcttgttttttaaaatccagactttctttttctacatgtgagatagttttcattttaactggcatgtcatttgcacacaaaaataaagactagagcaaaataatgcaacgcaggaggagaaaagaaatgcactaagacaagaacattctctcatagaacattgatctgttttacaggaaacaaaccttgccttgaaatttacacagtgagactgtacataattgcatgaaaatagctatttttttcctaagacatttttcattcatgaatattttcaagtttttcatactgtacacatttcttaaaacacatgataccagcagcaactgaaaatgaatgccgaatttggtacacatgtgttatctacctcaaggtaacaagagtatgtggcaaaacatataccacccatagtgcttcacaaaatgcacttctatttagccagcgtttattgtagtaaactattcttaataaaactcactcactgtttataaatgttctggtatgcattctttatagtgaagtgttaatacatcacatcttatttattttagcaaatcagtatattttctgtatttaattataaaaaattaacttagtttttaaaatttatttgcaaatatactttactttttccatttggcactatggtttgttgcctacctagctgcatctataatgtcagcttatcctaaggctgtccacgtacttaatttacttaagtgttcattttaagtaacgtgctcactgtgtataggaatttgtattttggaggtgcttgatctatctacaaagaaaaattaattaggaattactttattataaaatgctcctagaagtcttaattgtgtttattttttaaaaaaacaaatgttagacttgtgtgcatggaagtaattaaggtacatcattattgtagtttgaaagttgtacatgataagacattttgtttttactgtatgtttttactgaatgatctattccccatcccaaggcaagcatgaataaaattaggttaaacgtagcatgtggcatcgcagtctcttagaatttgtttcatctattttattttattgaatactgtctgtatctttggttatcctgtttgaagaaaaaggacaaataaaacatggccagcaaataca

SEQ ID NO: 273278 - DNA, 2166 bp, Artificial Sequence
  derived and/or modified sequence
atggccgagaagttcgagagcctgatgaacatccacggcttcgacctgggcagcagatacatggacctgaagcccctgggctgcggcggcaacggcctggtgttcagcgccgtggacaacgactgcgacaagagagtggccatcaagaagatcgtgctgaccgacccccagagcgtgaagcacgccctgagagagatcaagatcatcagaagactggaccacgacaacatcgtgaaggtgttcgagatcctgggccccagcggcagccagctgaccgacgacgtgggcagcctgaccgagctgaacagcgtgtacatcgtgcaggagtacatggagaccgacctggccaacgtgctggagcagggccccctgctggaggagcacgccagactgttcatgtaccagctgctgagaggcctgaagtacatccacagcgccaacgtgctgcacagagacctgaagcccgccaacctgttcatcaacaccgaggacctggtgctgaagatcggcgacttcggcctggccagaatcatggacccccactacagccacaagggccacctgagcgagggcctggtgaccaagtggtacagaagccccagactgctgctgagccccaacaactacaccaaggccatcgacatgtgggccgccggctgcatcttcgccgagatgctgaccggcaagaccctgttcgccggcgcccacgagctggagcagatgcagctgatcctggagagcatccccgtggtgcacgaggaggacagacaggagctgctgagcgtgatccccgtgtacatcagaaacgacatgaccgagccccacaagcccctgacccagctgctgcccggcatcagcagagaggccctggacttcctggagcagatcctgaccttcagccccatggacagactgaccgccgaggaggccctgagccacccctacatgagcatctacagcttccccatggacgagcccatcagcagccaccccttccacatcgaggacgaggtggacgacatcctgctgatggacgagacccacagccacatctacaactgggagagataccacgactgccagttcagcgagcacgactggcccgtgcacaacaacttcgacatcgacgaggtgcagctggaccccagagccctgagcgacgtgaccgacgaggaggaggtgcaggtggaccccagaaagtacctggacggcgacagagagaagtacctggaggaccccgccttcgacaccaactacagcaccgagccctgctggcagtacagcgaccaccacgagaacaagtactgcgacctggagtgcagccacacctgcaactacaagaccagaagcagcagctacctggacaacctggtgtggagagagagcgaggtgaaccactactacgagcccaagctgatcatcgacctgagcaactggaaggagcagagcaaggagaagagcgacaagaagggcaagagcaagtgcgagagaaacggcctggtgaaggcccagatcgccctggaggaggccagccagcagctggccggcaaggagagagagaagaaccagggcttcgacttcgacagcttcatcgccggcaccatccagctgagcagccagcacgagcccaccgacgtggtggacaagctgaacgacctgaacagcagcgtgagccagctggagctgaagagcctgatcagcaagagcgtgagccaggagaagcaggagaagggcatggccaacctggcccagctggaggccctgtaccagagcagctgggacagccagttcgtgagcggcggcgaggactgcttcttcatcaaccagttctgcgaggtgagaaaggacgagcaggtggagaaggagaacacctacaccagctacctggacaagttcttcagcagaaaggaggacaccgagatgctggagaccgagcccgtggaggacggcaagctgggcgagagaggccacgaggagggcttcctgaacaacagcggcgagttcctgttcaacaagcagctggagagcatcggcatcccccagttccacagccccgtgggcagccccctgaagagcatccaggccaccctgacccccagcgccatgaagagcagcccccagatcccccaccagacctacagcagcatcctgaagcacctgaactag

SEQ ID NO: 273279 - protein, 554 aa, Artificial Sequence
  derived and/or modified sequence
MDIKGQFWNDDDSEGDNESEEFLYGVQGSCAADLYRHPQLDADIEAVKEIYSENSVSIREYGTIDDVDIDLHINISFLDEEVSTAWKVLRTEPIVLRLRFSLSQYLDGPEPSIEVFQPSNKEGFGLGLQLKKILGMFTSQQWKHLSNDFLKTQQEKRHSWFKASGTIKKFRAGLSIFSPIPKSPSFPIIQDSMLKGKLGVPELRVGRLMNRSISCTMKNPKVEVFGYPPSPQAGLLCPQHVGLPPPARTSPLVSGHCKNIPTLEYGFLVQIMKYAEQRIPTLNEYCVVCDEQHVFQNGSMLKPAVCTRELCVFSFYTLGVMSGAAEEVATGAEVVDLLVAMCRAALESPRKSIIFEPYPSVVDPTDPKTLAFNPKKKNYERLQKALDSVMSIREMTQGSYLEIKKQMDKLDPLAHPLLQWIISSNRSHIVKLPLSRQLKFMHTSHQFLLLSSPPAKEARFRTAKKLYGSTFAFHGSHIENWHSILRNGLVNASYTKLQLHGAAYGKGIYLSPISSISFGYSGMGKGQHRMPSKDELVQRYNRMNTIPQRRSFQI

SEQ ID NO: 273280 - DNA, 1665 bp, Artificial Sequence
  derived and/or modified sequence
atggacatcaagggccagttctggaacgacgacgacagcgagggcgacaacgagagcgaggagttcctgtacggcgtgcagggcagctgcgccgccgacctgtacagacacccccagctggacgccgacatcgaggccgtgaaggagatctacagcgagaacagcgtgagcatcagagagtacggcaccatcgacgacgtggacatcgacctgcacatcaacatcagcttcctggacgaggaggtgagcaccgcctggaaggtgctgagaaccgagcccatcgtgctgagactgagattcagcctgagccagtacctggacggccccgagcccagcatcgaggtgttccagcccagcaacaaggagggcttcggcctgggcctgcagctgaagaagatcctgggcatgttcaccagccagcagtggaagcacctgagcaacgacttcctgaagacccagcaggagaagagacacagctggttcaaggccagcggcaccatcaagaagttcagagccggcctgagcatcttcagccccatccccaagagccccagcttccccatcatccaggacagcatgctgaagggcaagctgggcgtgcccgagctgagagtgggcagactgatgaacagaagcatcagctgcaccatgaagaaccccaaggtggaggtgttcggctacccccccagcccccaggccggcctgctgtgcccccagcacgtgggcctgcccccccccgccagaaccagccccctggtgagcggccactgcaagaacatccccaccctggagtacggcttcctggtgcagatcatgaagtacgccgagcagagaatccccaccctgaacgagtactgcgtggtgtgcgacgagcagcacgtgttccagaacggcagcatgctgaagcccgccgtgtgcaccagagagctgtgcgtgttcagcttctacaccctgggcgtgatgagcggcgccgccgaggaggtggccaccggcgccgaggtggtggacctgctggtggccatgtgcagagccgccctggagagccccagaaagagcatcatcttcgagccctaccccagcgtggtggaccccaccgaccccaagaccctggccttcaaccccaagaagaagaactacgagagactgcagaaggccctggacagcgtgatgagcatcagagagatgacccagggcagctacctggagatcaagaagcagatggacaagctggaccccctggcccaccccctgctgcagtggatcatcagcagcaacagaagccacatcgtgaagctgcccctgagcagacagctgaagttcatgcacaccagccaccagttcctgctgctgagcagcccccccgccaaggaggccagattcagaaccgccaagaagctgtacggcagcaccttcgccttccacggcagccacatcgagaactggcacagcatcctgagaaacggcctggtgaacgccagctacaccaagctgcagctgcacggcgccgcctacggcaagggcatctacctgagccccatcagcagcatcagcttcggctacagcggcatgggcaagggccagcacagaatgcccagcaaggacgagctggtgcagagatacaacagaatgaacaccatcccccagagaagaagcttccagatctag

SEQ ID NO: 273281 - DNA, 1665 bp, Artificial Sequence
  derived and/or modified sequence
atggacatcaaaggacagttttggaacgatgatgattctgagggtgacaatgagagcgaagagttcctttatggagtgcaaggctcttgtgccgcagatctttatcgccacccacagctcgacgcagatatcgaggccgtcaaggagatttactctgagaatagtgtctcaattagggaatacggaaccattgacgacgttgacattgacctccatatcaatatcagcttcttagacgaggaggtgtcgaccgcctggaaagtactcagaaccgaaccaatagtgctcagattgcgcttcagtctgtcacaatatttggatggacctgaaccctctatcgaagtatttcagccctcaaataaagaagggtttggccttggcctgcagttgaagaagattttaggcatgttcacctcccaacagtggaaacatctatcaaacgatttcctcaagacacagcaggaaaagcgacacagttggttcaaagcctctgggacaattaagaagtttagagccggtctcagcattttcagccccatacccaagtcgccttcctttccaataatacaggatagtatgcttaaagggaagctcggcgtgcctgaactgcgagttggcagactgatgaatcgatcaatctcctgtacaatgaagaacccaaaagtcgaggtgttcggctatccgccaagcccccaggcaggcctcctgtgcccccaacatgtcggactgcccccacctgcccggacttctccattagtaagtggtcactgtaagaatattcctacacttgagtacggttttcttgtgcaaatcatgaaatacgccgagcagagaattccaacactgaacgaatattgcgtggtctgcgacgagcagcatgttttccagaacggctccatgctgaagcctgctgtgtgcacccgcgaattgtgcgtcttcagtttctatacactcggggtgatgtccggcgccgcggaggaagttgccactggcgctgaggttgtcgacttgttagtcgctatgtgtagagctgcactcgaatcacctagaaagtccataattttcgagccatatccctcagtggtcgacccaactgatcctaaaactttggcatttaatcctaaaaagaaaaactatgaacgactccagaaagctttggactctgtcatgtctattagagaaatgactcagggttcatacctagagattaagaagcagatggacaagttagaccccctggcccacccattactgcagtggattatttcatccaaccgcagccacatagtgaagctgccgttatccagacagctgaagtttatgcacacaagtcatcaatttctgcttctttcaagtccccctgccaaggaggcaaggttcaggactgccaaaaaactctatggaagcacgtttgcttttcatgggtcccacattgagaattggcattccatcttacgaaatggtctggtgaatgcgtcgtatacaaaactgcaactccacggcgcagcttatggcaaaggtatctacctgagccccatctcctccattagcttcggatattcgggcatgggcaaggggcagcatagaatgccaagtaaagacgaactggtgcagcggtacaaccggatgaacacaattccccagcgacgctcatttcagatttag

SEQ ID NO: 273282 - DNA, 1665 bp, Artificial Sequence
  derived and/or modified sequence
atggacatcaagggccagttctggaatgatgatgattctgagggggacaatgaaagtgaggagttcctgtatggagtgcagggcagctgtgccgctgacctgtaccgccacccccagctggatgctgacatcgaggccgtgaaggagatctacagtgaaaattctgtgtccatccgggagtatggcaccattgatgatgtggacatcgacctgcacatcaacatctccttcctggatgaggaggtgtccacagcctggaaggtgctgaggacagagcccatcgtgctgcggctgcgcttcagcctgagccagtacctggatggccctgagcccagcattgaggtgttccagcccagcaacaaggagggcttcggcctgggcctgcagctgaagaagatcctgggcatgttcaccagccagcagtggaagcacctgagcaatgacttcctgaagacccagcaggagaagaggcacagctggttcaaggccagcggcaccatcaagaagttccgggccggcctgagcatcttcagccccatccccaagagccccagcttccccatcatccaggacagcatgctgaagggcaagctgggcgtgcctgagctgcgggtgggccgcctgatgaacagaagcatcagctgcaccatgaagaaccccaaggtggaggtgtttggctacccacccagcccccaggccggcctgctgtgcccccagcacgtgggcctgcccccaccagcccggaccagccccctggtgtctggccactgcaagaacatccccaccctggagtatggcttcctggtgcagatcatgaagtatgcagagcagaggatccccaccctgaatgagtactgtgtggtgtgtgatgagcagcacgtgttccagaatggctccatgctgaagccagctgtgtgcacccgggagctgtgtgtgttctccttctacaccctgggcgtgatgtctggagctgctgaggaggtggccaccggggctgaggtggtggacctgctggtggccatgtgccgggccgccctggagagccccaggaagagcatcatctttgagccctaccccagcgtggtggaccccacagaccccaagaccctggccttcaaccccaagaagaagaactatgagcggctgcagaaggccctggacagcgtgatgagcatccgggagatgacccagggcagctacctggagatcaagaagcagatggacaagctggaccccctggcccaccccctgctgcagtggatcatcagcagcaacagaagccacatcgtgaagctgcccctgagccggcagctgaagttcatgcacaccagccaccagttcctgctgctgagcagccccccagccaaggaggcccgcttcagaacagccaagaagctgtatggcagcacctttgccttccacggcagccacatcgagaactggcacagcatcctgagaaatggcctggtgaatgccagctacaccaagctgcagctgcacggggccgcctacggcaagggcatctacctgagccccatcagcagcatcagctttggctacagcggcatgggcaagggccagcacaggatgcccagcaaggatgagctggtgcagcgctacaacaggatgaacaccatcccccagaggaggagcttccagatctag

SEQ ID NO: 273283 - DNA, 1665 bp, Artificial Sequence
  derived and/or modified sequence
atggacatcaagggccagttctggaacgacgacgacagcgagggcgacaacgaatcagaggaattcctgtatggcgtacaggggtcttgtgcggctgacctatacagacacccacagctggatgcagatattgaggctgtaaaggaaatctactctgagaactccgtgagtattcgggaatacgggactattgacgatgtagatattgatttacacataaacatttccttcctggatgaggaagtgtccaccgcatggaaagtgctgagaactgaaccaattgtacttaggctccgcttcagcttgagtcagtatcttgatggtcccgaaccttcaattgaggtgttccagccatcgaacaaagaagggtttgggttgggacttcagctaaagaagatcttggggatgttcacttctcagcagtggaaacatctctccaatgactttctgaaaacacaacaagaaaagagacacagctggttcaaggcctcgggtacaattaagaagttccgcgcgggtctgtcaatcttctcaccaatcccaaagagcccttcctttccaattattcaagacagcatgttaaagggcaagctgggtgttcccgagcttcgtgttggccgattgatgaacagatctattagctgtacaatgaagaaccccaaagtggaagtgttcggctaccctccatccccacaggctggactgttatgtccgcagcacgtcggcctacctccccccgcgagaacatctcctttggtgagtgggcattgcaagaatatcccaaccctggagtacggttttctcgtgcagatcatgaagtacgctgaacagcggattcccacactaaacgagtattgtgtcgtctgtgacgagcaacacgtgtttcagaacggctcaatgttaaagccggcggtctgcactagagaactttgcgtgttctctttttataccttgggcgtcatgagcggggcagccgaagaagttgccacaggcgctgaagtggtcgacctcctggtggcgatgtgccgggcagccttggagtcgccgcgaaaaagtattatcttcgagccataccccagcgtcgtggacccaaccgaccccaagactttagcatttaatcctaagaagaagaactatgagagattgcagaaagcactggactctgtaatgtcgattcgagagatgactcagggctcttatcttgagatcaagaagcagatggacaaacttgaccccctcgcacatcctttactacaatggatcatttcaagcaacaggtcccatatagtgaaattacctctgtctaggcaattgaagttcatgcatacaagccatcagtttcttcttctgtcaagccccccagccaaagaggcaaggtttcgcacagcaaagaaactctacggctccacttttgcctttcacggaagccatatcgaaaactggcacagtatcttacgaaacggactggtaaatgccagctacaccaagctgcagctccatggcgctgcttacggtaaaggcatctacctttctcctatctcctcaatttcctttgggtattccggcatgggcaaaggtcaacaccgaatgccgagcaaagatgaacttgtgcagcggtataatcgcatgaacactatcccccagcgccgaagttttcagatttag

SEQ ID NO: 273284 - DNA, 2121 bp, Artificial Sequence
  derived and/or modified sequence
caacagaaaccaagcagcaacagcccttggaaagaggctaaatttttcttgacttctgcagcaacaaagaccgtgaaaagttggcacttctggcctaacgctgccgtcatcctacccctcaccccagggcaacccaggctggacatttagtgcctccctctttattcctctgtgatcatccagatcagcacttgactgtttattttcaaatctcacgaacctcaccccaagatcttcacattctggatctcagctgctcttgaaggacagtgacttgttaccaccgcaacagcagagcctgccatccccaacagatcaccagttgtccctgacatcgtgccctaccttgtctccctttgtggtctcctaaatgcccatctcgttggccttggttcggctagtggtatggaggggtgctgcctagcactgacctgagagtgtgtgtgacccactgacccaatggacatcaaaggccagttctggaatgatgacgactcggagggagataatgaatcagaggaatttctctatggcgttcaggggagctgtgcagctgacctgtatcgacacccacagcttgatgcagacattgaagccgtgaaggagatctacagtgagaactctgtatccatcagagaatatggaactatcgatgacgtggacattgacctccacatcaacatcagcttcctcgatgaggaagtctctacagcctggaaggtcctccggacagaacctattgtgttgaggctgcgattttctctctcccagtacctagatggaccagaaccatccattgaggttttccagccatcaaataaggaaggatttgggctgggtcttcagttgaaaaagatcctgggtatgtttacatcccaacaatggaaacatctgagcaatgatttcttgaagacccagcaggagaagaggcacagttggttcaaggcaagtggtaccatcaagaagttccgagctggcctcagcatcttttcacccatccccaagtctcccagtttccctatcatacaggactccatgctgaaaggcaaactaggtgtaccagagcttcgggttgggcgcctcatgaaccgttccatctcctgtaccatgaagaaccccaaagtggaagtgtttggctaccctcccagcccccaggcaggtctcctgtgccctcagcacgtgggcctccctcccccagcacggacctctcctttggtcagtggtcactgcaagaacattcccactctggagtatggattcctcgttcagatcatgaagtatgcagaacagaggattccaacattgaatgagtactgtgtggtgtgtgatgagcagcatgtcttccaaaatggatctatgctgaagccagctgtctgtactcgtgaactatgcgttttctccttctacacactgggcgtcatgtctggagctgcagaggaggtggccactggagcagaggtggtggatctgctggtggccatgtgtagggcagctttagagtcccctagaaagagcatcatctttgagccttatccctctgtggtggaccccactgatcccaagactctggcctttaaccctaagaagaagaattatgagcggcttcagaaagctctggatagtgtgatgtctattcgggagatgacccagggctcatatttggaaatcaagaaacagatggacaagttggatcccctggcccatcctctcctgcagtggatcatctctagcaacaggtcacacattgtcaaactacctctcagcaggcagctgaagttcatgcacacctcacaccagttcctcctgctgagcagccctcctgccaaggaggctcggttccggaccgccaagaagctctatggcagcacctttgccttccatgggtcccacattgagaactggcattcgatcctgcgcaatgggctggtcaatgcatcctacaccaaactgcagctgcatggagcagcctatggcaaaggcatctacctgagccccatctccagtatttcctttggatactcaggaatgggaaaaggacagcacaggatgccctccaaggatgagctggtccagagatacaacaggatgaataccatcccccagcgccgttccttccagatc

SEQ ID NO: 273285 - DNA, 1665 bp, Artificial Sequence
  derived and/or modified sequence
atggacatcaagggacagttttggaacgacgacgattcagaaggagacaacgagtctgaggaattcctgtacggcgtccaaggttcatgtgcagcggacctctatcgacacccacagctcgacgctgacatagaggccgtaaaagaaatttattccgagaatagcgtgtctatcagggagtacggaaccattgacgacgtggacatagatcttcacattaatataagcttcctggatgaggaggtaagtactgcctggaaggtgttgaggacagagcctattgtactgcgactcaggttcagcctgtctcagtatctggacggacccgaaccctctattgaagtttttcagccttctaacaaagaggggttcggtctgggtttacagttaaagaagatcttaggcatgtttacttctcagcagtggaaacatctgagcaacgactttctgaaaacccagcaggagaagcgacactcctggtttaaagcgagcggcacaattaagaaatttcgagcaggcctgtccatcttctctcccatacctaagagcccatctttccccattattcaggatagtatgctgaaagggaaactgggcgttccagagctgcgcgtcggtcgcctgatgaacaggtcaatctcctgcacaatgaaaaacccaaaggtggaagtgtttggatatccaccaagtccgcaggctgggctcctgtgcccccagcacgtgggactccctcccccagccaggaccagccccctggtgtccgggcactgtaaaaacatccctacattagaatatggcttcctagtccagattatgaagtatgccgagcagcgtattccaacattgaacgagtattgtgtggtttgcgacgagcaacatgtttttcaaaacggaagcatgctgaagccagctgtgtgtactagggagttgtgcgttttcagcttttatacactgggggttatgagtggcgctgctgaggaggtcgccactggggctgaagtggttgatctgttggtggctatgtgcagggctgcgcttgagagccccagaaagtctatcatatttgaaccttacccatcagtggtggaccctacagacccaaaaaccctggccttcaaccccaaaaaaaagaattacgaaagactccagaaggccctggactcagtgatgtccattagagagatgacacaggggtcctacctcgaaattaaaaagcagatggacaaactggacccgttagctcacccactcttgcaatggattatctcctctaaccggtcccacattgttaaacttcctctgtctagacaattgaagttcatgcatacctcccaccagttccttctacttagcagcccaccagccaaggaagcccgtttcaggactgcgaagaaactgtacgggtccaccttcgccttccacgggagtcacatcgaaaactggcattccatcctccggaacggccttgtcaatgcctcctacaccaaacttcagttgcatggtgcagcttacgggaagggcatctacctgtcacctatttcctccatttccttcggatattccggcatgggcaagggccagcatcggatgccgtctaaggacgagctcgtgcagcggtataaccgcatgaacaccatccctcagaggcggagcttccagatttag

SEQ ID NO: 273286 - DNA, 2750 bp, Artificial Sequence
  derived and/or modified sequence
aacagcagagcctgccatccccaacagatcaccagttgtccctgacatcgtgccctaccttgtctccctttgtggtctcctaaatgcccatctcgttggccttggttcggctagtggtatggaggggtgctgcctagcactgacctgagagtgtgtgtgacccactgacccaatggtgagaactgactgcccacctctccaactgattgttcaaagggtagaggagacaaagtgcagatctcaccctttcttggtattttcccttctacccttttggaagatagagtggctatttgaagttaaaggaaagggaaggggcacagaaacagtattacttggtgtgtttgtgtagtgggttttcttggggagggagaggagagttaagtactttaaaggatagaaagaaaataatgagacaagagagtttaggtgtgcttgggaactgtcttaggtaatgatcctggaagaggccagcttgtactggaacccagatatgcttaggagtcaaccttgacattgaagtcatttgcatttctttcctactggctaccagagcctctcagtcatcatactgagacttcagaaggccaaaattccctagatgttttcctctgtcccactaagagctagtttatggatatgatcatatcaggaagagactgagactctcacaaagggtgacatgaaaggtgtaaagggatcagggcttcagttattctatatttcccaatctttgtgggaatctgttcctcaccatatcatcccacgcctttccatgggataatagggacctaacaaagcatgatatccttatttctcaccactaggacatcaaaggccagttctggaatgatgacgactcggagggagataatgaatcagaggaatttctctatggcgttcaggggagctgtgcagctgacctgtatcgacacccacagcttgatgcagacattgaagccgtgaaggagatctacagtgagaactctgtatccatcagagaatatggaactatcgatgacgtggacattgacctccacatcaacatcagcttcctcgatgaggaagtctctacagcctggaaggtcctccggacagaacctattgtgttgaggctgcgattttctctctcccagtacctagatggaccagaaccatccattgaggttttccagccatcaaataaggaaggatttgggctgggtcttcagttgaaaaagatcctgggtatgtttacatcccaacaatggaaacatctgagcaatgatttcttgaagacccagcaggagaagaggcacagttggttcaaggcaagtggtaccatcaagaagttccgagctggcctcagcatcttttcacccatccccaagtctcccagtttccctatcatacaggactccatgctgaaaggcaaactaggtgtaccagagcttcgggttgggcgcctcatgaaccgttccatctcctgtaccatgaagaaccccaaagtggaagtgtttggctaccctcccagcccccaggtcagtggtcactgcaagaacattcccactctggagtatggattcctcgttcagatcatgaagtatgcagaacagaggattccaacattgaatgagtactgtgtggtgtgtgatgagcagcatgtcttccaaaatggatctatgctgaagccagctgtctgtactcgtgaactatgcgttttctccttctacacactgggcgtcatgtctggagctgcagaggaggtggccactggagcagaggtggtggatctgctggtggccatgtgtagggcagctttagagtcccctagaaagagcatcatctttgagccttatccctctgtggtggaccccactgatcccaagactctggcctttaaccctaagaagaagaattatgagcggcttcagaaagctctggatagtgtgatgtctattcgggagatgacccagggctcatatttggaaatcaagaaacagatggacaagttggatcccctggcccatcctctcctgcagtggatcatctctagcaacaggtcacacattgtcaaactacctctcagcaggtgggtcccacattgagaactggcattcgatcctgcgcaatgggctggtcaatgcatcctacaccaaactgcaggaatgggaaaaggacagcacaggatgccctccaaggatgagctggtccagagatacaacaggatgaataccatcccccagacccgatccattcagtcacggttcctgcagagtcggaatctaaactgtatagcactttgtgaagtgattacatctaaggacctccagaagcatgggaacatctgggtgtgccctgtgtccgaccatgtctgcacaagattcttctttgtatatgaggatggtcaggtgggcgatgccaacattaatactcaggaccccaagatacagaaggaaatcatgcgtgtgatcggaactcaggtttacacaaactgagggggccccagccctcgtaccacccctgttaccccaggatccatctgccctcataaaagtgttcaggtacagcagctgaggctgccctgaggaatcaaggggccattaccaaggggcaggaaaaggatatgtaagaggtggccttcatggtagagcttgacccaagaactactccacattcggatggcccagactgactccatcccctgactttccctttgacttcaccctgtttgtaaataaaacaataaaatggaaggtgctgtggactgg

SEQ ID NO: 273287 - protein, 285 aa, Artificial Sequence
  derived and/or modified sequence
MFTSQQWKHLSNDFLKTQQEKRHSWFKASGTIKKFRAGLSIFSPIPKSPSFPIIQDSMLKGKLGVPELRVGRLMNRSISCTMKNPKVEVFGYPPSPQVSGHCKNIPTLEYGFLVQIMKYAEQRIPTLNEYCVVCDEQHVFQNGSMLKPAVCTRELCVFSFYTLGVMSGAAEEVATGAEVVDLLVAMCRAALESPRKSIIFEPYPSVVDPTDPKTLAFNPKKKNYERLQKALDSVMSIREMTQGSYLEIKKQMDKLDPLAHPLLQWIISSNRSHIVKLPLSRWVPH

SEQ ID NO: 273288 - DNA, 858 bp, Artificial Sequence
  derived and/or modified sequence
atgttcaccagccagcagtggaagcacctgagcaacgacttcctgaagacccagcaggagaagagacacagctggttcaaggccagcggcaccatcaagaagttcagagccggcctgagcatcttcagccccatccccaagagccccagcttccccatcatccaggacagcatgctgaagggcaagctgggcgtgcccgagctgagagtgggcagactgatgaacagaagcatcagctgcaccatgaagaaccccaaggtggaggtgttcggctacccccccagcccccaggtgagcggccactgcaagaacatccccaccctggagtacggcttcctggtgcagatcatgaagtacgccgagcagagaatccccaccctgaacgagtactgcgtggtgtgcgacgagcagcacgtgttccagaacggcagcatgctgaagcccgccgtgtgcaccagagagctgtgcgtgttcagcttctacaccctgggcgtgatgagcggcgccgccgaggaggtggccaccggcgccgaggtggtggacctgctggtggccatgtgcagagccgccctggagagccccagaaagagcatcatcttcgagccctaccccagcgtggtggaccccaccgaccccaagaccctggccttcaaccccaagaagaagaactacgagagactgcagaaggccctggacagcgtgatgagcatcagagagatgacccagggcagctacctggagatcaagaagcagatggacaagctggaccccctggcccaccccctgctgcagtggatcatcagcagcaacagaagccacatcgtgaagctgcccctgagcagatgggtgccccactag

SEQ ID NO: 273289 - DNA, 858 bp, Artificial Sequence
  derived and/or modified sequence
atgtttacgtctcagcaatggaagcatctaagtaacgatttcctaaagacacaacaagagaaacggcacagctggtttaaggcatcagggactattaagaagtttagagccggactctcaatcttctccccaattccaaaaagcccttcgttcccaatcatccaagacagcatgttgaagggaaaactgggggtgcccgagctccgagtaggcaggttgatgaataggtcaatctcatgtacaatgaaaaatccgaaggtagaagttttcggctaccctccctcaccccaggtgagtggccactgtaagaatatcccgacattggaatacggctttctagttcaaattatgaagtacgcagagcaacgcatccctaccctgaatgagtattgtgttgtttgcgacgagcagcatgtattccagaacgggagtatgttaaagcctgcagtatgcacacgggagctgtgtgtctttagtttctacacactcggggtaatgtcaggagcagccgaggaggtcgcaactggcgccgaagtcgtggacctgctagttgcaatgtgcagagccgcactcgaatcccccaggaagtcgatcatattcgagccctatcccagcgttgtggatccgactgatccaaagactttagcttttaaccccaagaagaagaactatgagaggttacaaaaggccctggatagcgttatgagtatcagagaaatgacccaaggctcttatcttgaaatcaaaaaacaaatggataagctcgatccactggctcatcctctgctgcagtggatcatatcctccaacagaagccatattgtgaaactgcccttaagcagatgggttccgcactag

SEQ ID NO: 273290 - DNA, 858 bp, Artificial Sequence
  derived and/or modified sequence
atgttcaccagccagcagtggaagcacctgagcaatgacttcctgaagacccagcaggagaagaggcacagctggttcaaggccagcggcaccatcaagaagttccgggccggcctgagcatcttcagccccatccccaagagccccagcttccccatcatccaggacagcatgctgaagggcaagctgggcgtgcctgagctgcgggtgggccgcctgatgaacagaagcatcagctgcaccatgaagaaccccaaggtggaggtgtttggctacccacccagcccccaggtgtctggccactgcaagaacatccccaccctggagtatggcttcctggtgcagatcatgaagtatgcagagcagaggatccccaccctgaatgagtactgtgtggtgtgtgatgagcagcacgtgttccagaatggctccatgctgaagccagctgtgtgcacccgggagctgtgtgtgttctccttctacaccctgggcgtgatgtctggagctgctgaggaggtggccactggagctgaggtggtggacctgctggtggccatgtgcagagctgccctggagagccccaggaagagcatcatctttgagccctaccccagcgtggtggaccccacagaccccaagaccctggccttcaaccccaagaagaagaactatgaaaggctgcagaaggccctggacagcgtgatgagcatccgggagatgacccagggcagctacctggagatcaagaagcagatggacaagctggaccccctggcccaccccctgctgcagtggatcatcagcagcaacagaagccacatcgtgaagctgcccctgagccgctgggtgccccactag

SEQ ID NO: 273291 - DNA, 858 bp, Artificial Sequence
  derived and/or modified sequence
atgttcaccagccagcagtggaagcacctgagcaacgacttcctgaagactcagcaagaaaagaggcattcttggtttaaagcctccggcactataaagaaattcagagcgggactcagtatctttagcccaatacccaagtcaccctccttccctatcattcaggattcaatgctaaaaggcaaactcggagttccagaattacgagttggccgccttatgaaccgaagtatctcatgtactatgaagaatcccaaagtagaggtgtttgggtacccccccagtccccaagtttccggccactgcaagaacataccaacgctggaatacggatttctggtgcaaatcatgaagtatgccgagcaaagaattcccactctgaacgaatactgcgtggtctgcgatgaacaacacgtgttccaaaatggaagcatgctgaaaccagctgtctgtacgcgagaactctgtgtattttccttttatacactcggtgtgatgagcggcgctgccgaagaggtggccaccggagcagaggtggtcgatttactggtcgccatgtgcagagctgcactggagtcccctcggaaatctatcatttttgaaccctacccaagtgtggtggacccgactgatccgaagaccctggcatttaacccaaagaaaaagaactacgaaagactacaaaaagctctcgacagtgtgatgagcatcagagagatgacccagggcagctatctggaaatcaagaaacagatggacaaacttgacccactggcacaccctctgctgcagtggatcatctcaagcaaccgcagccacatcgttaagctgcccctctctagatgggtccctcattag

SEQ ID NO: 273292 - DNA, 2341 bp, Artificial Sequence
  derived and/or modified sequence
aagagctagtttatggatatgatcatatcaggaagagactgagactctcacaaagggtgacatgaaaggtgtaaagggatcagggcttcagttattctatatttcccaatctttgtgggaatctgttcctcaccatatcatcccacgcctttccatgggataatagggacctaacaaagcatgatatccttatttctcaccactaggacatcaaaggccagttctggaatgatgacgactcggagggagataatgaatcagaggaatttctctatggcgttcaggggagctgtgcagctgacctgtatcgacacccacagcttgatgcagacattgaagccgtgaaggagatctacagtgagaactctgtatccatcagagaatatggaactatcgatgacgtggacattgacctccacatcaacatcagcttcctcgatgaggaagtctctacagcctggaaggtcctccggacagaacctattgtgttgaggctgcgattttctctctcccagtacctagatggaccagaaccatccattgaggttttccagccatcaaataaggaaggatttgggctgggtcttcagttgaaaaagatcctgggtatgtttacatcccaacaatggaaacatctgagcaatgatttcttgaagacccagcaggagaagaggcacagttggttcaaggcaagtggtaccatcaagaagttccgagctggcctcagcatcttttcacccatccccaagtctcccagtttccctatcatacaggactccatgctgaaaggcaaactaggtgtaccagagcttcgggttgggcgcctcatgaaccgttccatctcctgtaccatgaagaaccccaaagtggaagtgtttggctaccctcccagcccccaggtcagtggtcactgcaagaacattcccactctggagtatggattcctcgttcagatcatgaagtatgcagaacagaggattccaacattgaatgagtactgtgtggtgtgtgatgagcagcatgtcttccaaaatggatctatgctgaagccagctgtctgtactcgtgaactatgcgttttctccttctacacactgggcgtcatgtctggagctgcagaggaggtggccactggagcagaggtggtggatctgctggtggccatgtgtagggcagctttagagtcccctagaaagagcatcatctttgagccttatccctctgtggtggaccccactgatcccaagactctggcctttaaccctaagaagaagaattatgagcggcttcagaaagctctggatagtgtgatgtctattcgggagatgacccagggctgtaggaattgcataaaatgagggagacccacctgcatgttgttttggctcatatttggaaatcaagaaacagatggacaagttggatcccctggcccatcctctcctgcagtggatcatctctagcaacaggtcacacattgtcaaactacctctcagcaggctgaagttcatgcacacctcacaccagttcctcctgctgagcagccctcctgccaaggaggctcggttccggaccgccaagaagctctatggcagcacctttgccttccatgggtcccacattgagaactggcattcgatcctgcgcaatgggctggtcaatgcatcctacaccaaactgcagctgcatggagcagcctatggcaaaggcatctacctgagccccatctccagtatttcctttggatactcaggaatgggaaaaggacagcacaggatgccctccaaggatgagctggtccagagatacaacaggatgaataccatcccccagacccgatccattcagtcacggttcctgcagagtcggaatctaaactgtatagcactttgtgaagtgattacatctaaggacctccagaagcatgggaacatctgggtgtgccctgtgtccgaccatgtctgcacaagattcttctttgtatatgaggatggtcaggtgggcgatgccaacattaatactcaggaccccaagatacagaaggaaatcatgcgtgtgatcggaactcaggtttacacaaactgagggggccccagccctcgtaccacccctgttaccccaggatccatctgccctcataaaagtgttcaggtacagcagctgaggctgccctgaggaatcaaggggccattaccaaggggcaggaaaaggatatgtaagaggtggccttcatggtagagcttgacccaagaactactccacattcggatggcccagactgactccatcccctgactttccctttgacttcaccctgtttgtaaataaaacaataaaatgg

SEQ ID NO: 273293 - DNA, 858 bp, Artificial Sequence
  derived and/or modified sequence
atgttcacctctcagcagtggaagcacctgtccaatgatttcttgaagacacagcaggagaaaaggcattcatggtttaaagctagcggaaccatcaaaaaatttcgagcaggactgtctatcttctcaccgatcccaaagtcaccatcattcccaataatccaagatagcatgcttaagggtaagcttggtgtaccggagcttagggtggggcgtctgatgaataggtctattagttgcaccatgaagaacccaaaggttgaagtgttcggatatcccccaagtccgcaagtctctggccattgcaagaacatccccaccctggagtacggtttccttgttcagattatgaagtatgcggagcagagaattccaacgctcaacgagtactgtgtagtgtgcgatgaacagcacgtcttccagaacggatccatgctgaaaccagccgtctgcaccagggagctgtgtgtcttcagtttttatactctgggtgttatgagcggtgcagcggaagaagtggccacaggggctgaggtggttgatttgctggtagcaatgtgcagagctgccctggagagtccccgaaaatctataatatttgaaccctatccctccgtggtcgaccctaccgatcccaagaccttggcattcaacccgaagaagaaaaattacgagaggctgcagaaggctctggactctgtaatgtctatcagagagatgactcaaggatcttacctggagattaagaagcagatggataaattggacccactcgcgcacccacttctgcagtggatcatttcgtcaaatcggtcacatatagtgaaacttcctctttctcggtgggttccccactag

SEQ ID NO: 273294 - protein, 179 aa, Artificial Sequence
  derived and/or modified sequence
MRTMRAVQLQMTILTHHIMKKPLLGMKLRKDSESALGLGIRSAMTISSKQALSYVSALDNALELTTVEDHVKNFRPQCIVLTGGPMTRPALLDITHAFTKNSGLCICCEVFVGPRKLCVKEMNSGMAKKQAWLIKNKIKAFYAAVAADCFRDGVRSLLQASGLGRMKPNTLVIGYKKNW

SEQ ID NO: 273295 - DNA, 2673 bp, Artificial Sequence
  derived and/or modified sequence
atgagaaccatgagagcagtgcagctgcagatgacaatactgacccaccacattatgaagaaacctcttttggggatgaagctcagaaaagactcagaatcagctttaggcctgggaatcaggagtgctatgacaatttcctccaaacaagctctttcctacgtgagtgctttagacaatgctctggaattaaccacagtggaagaccacgtaaaaaacttcaggccccagtgcattgtcttaacagggggacccatgacaagacctgctctcctggacataactcacgcctttaccaagaacagtggcctttgcatctgctgtgaagtctttgtgggaccgcgcaaactgtgtgttaaggagatgaacagtggcatggcgaaaaaacaggcctggcttataaagaacaaaatcaaggctttttatgctgcagtggcggcagactgtttcagggatggtgtccgaagtcttcttcaggcctcaggcttaggaagaatgaaaccaaacactctggtgattggatataagaaaaactggaggaaagctcccttgacagagattgagaactacgtgggaatcatacatgatgcatttgattttgagattggcgtggttatagtcagaatcagccaaggatttgacatctctcaggttcttcaggtgcaagaggaattagagagattagaacaggagagactagcattggaagcgactatcaaagataatgagtgtgaagaggaaagtggaggcatccgaggcttgtttaaaaaagctggcaagttgaacattactaagacaacgcctaaaaaagatggcagcattaacacaagccagtcgatgcatgtgggagagttcaaccagaaactggtggaagccagcactcaatttaaaaagaaacaagaaaaaggcacaattgatgtttggtggttgtttgatgatggagggttaacacttcttatcccctatatcttaactctcagaaaaaaatggaaagactgtaaattaagaatctatgtgggagggaagatcaaccgcattgaagaagaaaaaattgtaatggcttcccttctgagcaaatttaggataaaatttgcagacatccatatcatcggtgacatcaacattaggccaaacaaagagagctggaaagtctttgaagagatgattgaaccatatcgtctccatgaaagctgcaaagatttaacaactgctgagaaattaaaaagagaaactccgtggaaaattacagatgcagaactggaagcagtcaaggaaaagagttaccgccaagttcgactgaatgaactcttacaggagcactccagagctgctaatctcattgtcctgagccttcccgtggcaagaaagggatccatatcggatttgttgtatatggcttggttggaaatcctcacaaagaacctcccacctgtcttactagttagaggaaatcacaaaaatgtcttgacattttactcttaaaacatgaaagattggaatacattttaacttaatgtaatgcataattaagaaacatgttccagtactttatgttgtaaatctgatctatggatatgcaaacctctggagaggatcctaccagattctacatacattgcataatttttatcagttaatgcgagcttttttttctcttctcagcttaaggggttgtcaaagccaatgttatccctagaaaaacatttttgtcactgctgttgataaacaagaaaatcaaggaaactcatgttggcttatgctcatgaaaaccaccaatgtgattgtaaacttctccagacaaacttaaccttttgtttcttaattttttgttttgagtgtttgcttctcagccctggtataggtctcagccccacagcaggatctcaataaatgcttattgacaggctggcatagtaaccacaggtggttatcaaaggaaaagaccaataggctggggaacataattatgcttggccccctcagaggcttatacctccaaagcagatttaaaaatcagtaactcaaaactttaagaagtagttgagtctacaaaatattcaaagcagttacctaaataaggttatttaatgtaacagattatatacttaaagtgatctgagcaatcattgataacatatggcttaaatttgctgctgcctgaaaagtatattaactagattagaagacaccatatactccaataaaatgaaatatattctattctcaatatataaactttaattgtactccctatcaaatattttgaaatttccatcacggcattactttgcatatttttttctaattaaatggttagtacagatgaaatctttatagatgactacttgaaaactaagtgctacaaattttcaaaccattattaagaaatatatcctgaatcatatatttagttactttctatagtgattgtatggatttaaaagaataattaaaatgtgaagttgaaaaacttgtaaaatttggaatatacagatactgatttttttcatttttgttagtatacctataatacataatcacattgacaaaccaatgaaaatattgattttctgatgaatggcttgatttttctccttgacatgttttgactgttcattctaactgaaaacatatatgggaaaatatgaacctgaaataaaagcactcaaattc

SEQ ID NO: 273296 - protein, 702 aa, Artificial Sequence
  derived and/or modified sequence
MNPQQQRMAAIGTDKELSDLLDFSAMFSPPVNSGKTRPTTLGSSQFSGSGTIHEMKQLNSKARQKGQRIKGFTDSPHYSDHLNDSRLGAHEGLSPTPFMNSNLMGKTSERGSFSLYSRDTGLPGCQSSLLRQDLGLGSPAQLSSSGKPGTAYYSFSATSSRRRPLHDSAALDPLQAKKVRKVPPGLPSSVYAPSPNSDDFNRESPSYPSPKPPTSMFASTFFMQDGTHNSSDLWSSSNGMSQPGFGGILGTSTSHMSQSSSYGNLHSHDRLSYPPHSVSPTDINTSLPPMSSFHRGSTSSSPYVAASHTPPINGSDSILGTRGNAAGSSQTGDALGKALASIYSPDHTSSSFPSNPSTPVGSPSPLTGTSQWPRPGGQAPSSPSYENSLHSLKNRVEQQLHEHLQDAMSFLKDVCEQSRMEDRLDRLDDAIHVLRNHAVGPSTSLPAGHSDIHSLLGPSHNAPIGSLNSNYGGSSLVASSRSASMVGTHREDSVSLNGNHSVLSSTVTTSSTDLNHKTQENYRGGLQSQSGTVVTTEIKTENKEKDENLHEPPSSDDMKSDDESSQKDIKVSSRGRTSSTNEDEDLNPEQKIEREKERRMANNARERLRVRDINEAFKELGRMCQLHLKSEKPQTKLLILHQAVAVILSLEQQVRERNLNPKAACLKRREEEKVSAVSAEPPTTLPGTHPGLSETTNPMGHM

SEQ ID NO: 273297 - protein, 326 aa, Artificial Sequence
  derived and/or modified sequence
MDAIKKKMQMLKLDKENALDRAEQAEADKKAAEDRSKQLEEDIAAKEKLLRVSEDERDRVLEELHKAEDSLLAAEEAAAKLEDELVSLQKKLKGTEDELDKYSEALKDAQEKLELAEKKATDAEADVASLNRRIQLVEEELDRAQERLATALQKLEEAEKAADESERGMKVIESRAQKDEEKMEIQEIQLKEAKHIAEDADRKYEEVARKLVIIESDLERAEERAELSEGKCAELEEELKTVTNNLKSLEAQAEKYSQKEDRYEEEIKVLSDKLKEAETRAEFAERSVTKLEKSIDDLEEKVAHAKEENLSMHQMLDQTLLELNNM

SEQ ID NO: 273298 - DNA, 981 bp, Artificial Sequence
  derived and/or modified sequence
atggacgccatcaagaagaagatgcagatgctgaagctggacaaggagaacgccctggacagagccgagcaggccgaggccgacaagaaggccgccgaggacagaagcaagcagctggaggaggacatcgccgccaaggagaagctgctgagagtgagcgaggacgagagagacagagtgctggaggagctgcacaaggccgaggacagcctgctggccgccgaggaggccgccgccaagctggaggacgagctggtgagcctgcagaagaagctgaagggcaccgaggacgagctggacaagtacagcgaggccctgaaggacgcccaggagaagctggagctggccgagaagaaggccaccgacgccgaggccgacgtggccagcctgaacagaagaatccagctggtggaggaggagctggacagagcccaggagagactggccaccgccctgcagaagctggaggaggccgagaaggccgccgacgagagcgagagaggcatgaaggtgatcgagagcagagcccagaaggacgaggagaagatggagatccaggagatccagctgaaggaggccaagcacatcgccgaggacgccgacagaaagtacgaggaggtggccagaaagctggtgatcatcgagagcgacctggagagagccgaggagagagccgagctgagcgagggcaagtgcgccgagctggaggaggagctgaagaccgtgaccaacaacctgaagagcctggaggcccaggccgagaagtacagccagaaggaggacagatacgaggaggagatcaaggtgctgagcgacaagctgaaggaggccgagaccagagccgagttcgccgagagaagcgtgaccaagctggagaagagcatcgacgacctggaggagaaggtggcccacgccaaggaggagaacctgagcatgcaccagatgctggaccagaccctgctggagctgaacaacatgtag

SEQ ID NO: 273299 - DNA, 981 bp, Artificial Sequence
  derived and/or modified sequence
atggatgccataaagaaaaagatgcagatgctaaagcttgataaggagaatgccttggatcgcgcagagcaggctgaggcagacaaaaaggcagcggaggaccgatcaaaacagttggaggaggatattgccgctaaagagaagcttctgagggtgagcgaggatgaaagggatcgagtattagaggagttacataaagcagaagatagcctgctggctgctgaggaggccgccgccaagctggaagacgaactcgtgtcactgcagaaaaagctgaaggggacagaggatgaacttgacaagtacagcgaggccctcaaagatgcgcaggagaagctcgagttagcggagaaaaaagcgacagacgccgaagccgacgtggcctccttgaatcgcaggatacagctcgtggaggaagagcttgatagggcacaggaaaggctggctaccgccctgcagaagcttgaagaagccgagaaggcagccgacgagagcgagcgggggatgaaagtgatcgagagccgcgctcagaaagacgaagaaaagatggaaatccaggaaatacagttgaaggaagccaaacacatagctgaagacgccgatcgcaaatacgaggaggtcgcacggaagctggtgattatcgaatccgacctcgaacgcgcagaagagagagctgagctctcggagggcaagtgtgcagaactggaagaagagctgaaaacagttaccaacaaccttaagtcgttggaagcccaggctgaaaagtactcccagaaagaagatcgatacgaggaagaaattaaagtgctatctgacaaattaaaggaggccgagacccgcgcagaattcgcagagcggagtgttaccaagctggagaagtctatcgacgacttagaagaaaaagtagcacatgccaaggaggagaatctcagcatgcatcagatgctggatcagactttacttgagctgaacaacatgtag

SEQ ID NO: 273300 - DNA, 981 bp, Artificial Sequence
  derived and/or modified sequence
atggatgccatcaagaagaagatgcagatgctgaagctggacaaggaaaatgccctggacagagctgagcaggccgaggccgacaagaaggccgcagaagatagaagcaagcagctggaggaggacattgctgccaaggagaagctgctgcgggtgtctgaagatgagcgggacagagtgctggaggagctgcacaaggccgaggacagcctgctggccgctgaggaggccgccgccaagctggaggatgagctggtgtccctgcagaagaagctgaagggcacagaagatgagctggacaagtacagcgaggccctgaaggatgcccaggagaagctggagctggccgagaagaaggccacagatgctgaggctgatgtggccagcctgaacagacgcatccagctggtggaggaggagctggaccgggcccaggagcggctggccacagccctgcagaagctggaggaggccgagaaggccgcagatgaaagtgagcggggcatgaaggtgattgagagccgggcccagaaggatgaggagaagatggagatccaggagatccagctgaaggaggccaagcacatcgccgaggatgctgacagaaaatatgaggaggtggccaggaagctggtgatcatcgagagtgacctggagagagctgaggagagagctgagctgtctgagggcaaatgtgccgagctggaggaggagctgaagacagtgaccaacaacctgaagagcctggaggcccaggccgagaagtacagccagaaggaggacagatatgaggaggagatcaaggtgctgagtgacaagctgaaggaggccgagaccagggctgagtttgctgagaggtctgtgaccaagctggagaagagcattgatgacctggaggagaaggtggcccacgccaaggaggagaacctgtccatgcaccagatgctggaccagaccctgctggagctgaacaacatgtag

SEQ ID NO: 273301 - DNA, 981 bp, Artificial Sequence
  derived and/or modified sequence
atggacgccatcaagaagaagatgcagatgctgaagctggacaaggaaaacgctctcgatagggcggaacaggcagaggcggacaaaaaggccgccgaggaccggtcaaagcagctagaagaggacatcgccgcaaaggagaaacttctgagggtatccgaagatgaaagggatcgtgtcctggaggaactccataaagcggaagacagtcttctcgcggcagaggaagccgccgcaaagctcgaagatgaacttgtgtctcttcagaagaagctgaaaggaactgaagatgaacttgataaatacagtgaagctctcaaggatgctcaagagaaattggagctggcggaaaagaaggctaccgatgccgaggccgacgtggcatccctgaacaggcggattcagctggtggaggaggagctggacagagcgcaagagagactcgccactgcccttcagaagctcgaggaagcagagaaagctgcagatgaatcagagagagggatgaaggtgattgaatcaagagcccaaaaagacgaagagaaaatggagattcaggagatacagctaaaggaagccaaacacatcgctgaggacgctgatagaaagtatgaggaagtggcacggaaactggtgattattgagtcagacctggagagggccgaggaacgagccgaactcagcgagggcaagtgcgccgagctggaagaggaattgaagacggtgaccaacaatcttaagtccctggaagctcaggcagaaaagtacagccagaaagaggataggtacgaagaggaaattaaggttctgtctgataagctcaaggaggccgagaccagggcagagttcgccgagagaagcgtcaccaaattagagaagtccatagatgatctggaggagaaagtggctcacgctaaggaggaaaatctgagtatgcaccagatgctggaccagacccttctggagcttaataacatgtag

SEQ ID NO: 273302 - DNA, 981 bp, Artificial Sequence
  derived and/or modified sequence
atggacgccattaaaaaaaaaatgcagatgctcaaactggacaaagagaacgccctggacagagctgagcaggctgaagctgacaagaaggcagcggaggaccgaagcaagcagctcgaagaggacattgctgctaaggaaaaacttctgcgtgtaagtgaagacgaaagggaccgggtcttggaggagcttcataaagcagaagacagtctgctggccgcagaggaagcggctgcgaaattggaagatgagttggtgtcccttcagaagaagctgaagggaaccgaagatgagctggataagtacagcgaggccctcaaggacgcccaggagaagcttgaactggcggaaaagaaagccaccgacgcagaggccgatgttgcaagcttgaacaggagaatccagctagtagaggaggagctcgatcgggcacaggagcggttggctacggccctgcaaaagttggaagaagccgagaaggcagcggatgaatccgaacgtggtatgaaagtgatagagtctagggcacagaaggacgaggaaaagatggaaattcaagagatccagctcaaggaggctaagcatattgctgaagacgccgacagaaagtacgaagaagtggcaagaaaattagtaatcattgaatccgacctagagcgcgcagaagagagagccgaactctcagaaggcaagtgcgcagagttagaagaagaactgaagaccgtcactaataatctcaagtccctggaagcccaggcagaaaagtacagccagaaggaggaccgttacgaggaagagattaaggttctgagtgataaactcaaggaagctgaaaccagggcggagtttgcagagcggtctgtgacaaaattggaaaagtcaattgacgacctggaggagaaagtcgcccatgccaaggaagaaaatctttctatgcatcagatgctggaccagaccctcttggaactgaacaatatgtag

SEQ ID NO: 273303 - DNA, 1800 bp, Artificial Sequence
  derived and/or modified sequence
gcactcccgctcctccgcccgaccgcgcgctcgccccgccgctcctgctgcagccccagggcccctcgccgccgccaccatggacgccatcaagaagaagatgcagatgctgaagctcgacaaggagaacgccttggatcgagctgagcaggcggaggccgacaagaaggcggcggaagacaggagcaagcagctcgaggaggacatcgcggccaaggagaagttgctgcgggtgtcggaggacgagcgggaccgggtgctggaggagctgcacaaggcggaggacagcctcctggccgccgaagaggccgccgccaagctggaagatgagctggtgtcactgcaaaagaaactcaagggcaccgaagatgaactggacaaatactctgaggctctcaaagatgcccaggagaagctggagctggcagagaaaaaggccaccgatgctgaagccgacgtagcttctctgaacagacgcatccagctggttgaggaagagttggatcgtgcccaggagcgtctggcaacagctttgcagaagctggaggaagctgagaaggcagcagatgagagtgagagaggcatgaaagtcattgagagtcgagcccaaaaagatgaagaaaaaatggaaattcaggagatccaactgaaagaggccaagcacattgctgaagatgccgaccgcaaatatgaagaggtggcccgtaagctggtcatcattgagagcgacctggaacgtgcagaggagcgggctgagctctcagaaggcaaatgtgccgagcttgaagaagaattgaaaactgtgacgaacaacttgaagtcactggaggctcaggctgagaagtactcgcagaaggaagacagatatgaggaagagatcaaggtcctttccgacaagctgaaggaggctgagactcgggctgagtttgcggagaggtcagtaactaaattggagaaaagcattgatgacttagaagagaaagtggctcatgccaaagaagaaaaccttagtatgcatcagatgctggatcagactttactggagttaaacaacatgtgaaaacctccttagctgcgaccacattctttcgttttgttttgttttgtttttaaacacctgcttaccccttaaatgcaatttatttacttttaccactgtcacagaaacatccacaagataccagctaggtcagggggtggggaaaacacatacaaaaaggcaagcccatgtcagggcgatcctggttcaaatgtgccatttcccgggttgatgctgccacactttgtagagagtttagcaacacagtgtgcttagtcagcgtaggaatcctcactaaagcagaagaagttccattcaaagtgccaatgatagagtcaacaggaaggttaatgttggaaacacaatcaggtgtggattggtgctactttgaacaaaaggtccccctgtggtcttttgttcaacattgtacaatgtagaactctgtccaacactaatttattttgtcttgagttttactacaagatgagactatggatcccgcatgcctgaattcactaaagccaagggtctgtaagccacgctgctcttccgagacttccattcctttctgattggcacacgtgcagctcatgacaatctgtaggataacaatcagtgtggatttccactcttttcagtccttcatgttaaagatttagacaccacatacaactggtaaaggacgttttcttgagagttttaactatatgtaaacattgtataatgatatggaataaaatgcacattgtaggacattttct

SEQ ID NO: 273304 - DNA, 1689 bp, Artificial Sequence
  derived and/or modified sequence
atgtgccccaagagcctgagcgagaagaacagcaacaacgaggtggcctgcaagaagaccaagatcaagaagacctgcagaagaatcatcccccccaagatgaagaacaccagcagcaaggccgagagcaccctgcagaacagcagcagcgccgtgcacaccgagagcaacaagctgcagcccaagagaaccgccgacgccatgaacctgagcgtggacgtggagagcagccaggacggcgacagcgacgaggacaccacccccagcctggacttcagcggcctgagcccctacgagagaaagagactgaagaacatcagcgagaacgccgacttcttcgccagcctgcagctgagcgagagcgccgccagactgagagagatgatcgagaagagacagccccccaagagcaagagaaagaagcccaagagagagaacggcatcggctgcagaagaagcatgagactgctgaaggtggaccccagcggcgtgagcctgcccgccgcccccaccccccccaccctggtggccgacgagacccccctgctgccccccggccccctggagatgaccagcgagaaccaggaggacaacaacgagagattcaagggcttcctgcacacctgggccggcatgagcaagcccagcagcaagaacaccgagaagggcctgagcagcatcaagagctacaaggccaacctgaacggcatggtgatcagcgaggacaccgtgtacaaggtgaccaccggccccatcttcagcatggccctgcaccccagcgagaccagaaccctggtggccgtgggcgccaagttcggccaggtgggcctgtgcgacctgacccagcagcccaaggaggacggcgtgtacgtgttccacccccacagccagcccgtgagctgcctgtacttcagccccgccaaccccgcccacatcctgagcctgagctacgacggcaccctgagatgcggcgacttcagcagagccatcttcgaggaggtgtacagaaacgagagaagcagcttcagcagcttcgacttcctggccgaggacgccagcaccctgatcgtgggccactgggacggcaacatgagcctggtggacagaagaacccccggcaccagctacgagaagctgaccagcagcagcatgggcaagatcagaaccgtgcacgtgcaccccgtgcacagacagtacttcatcaccgccggcctgagagacacccacatctacgacgccagaagactgaacagcagaagaagccagcccctgatcagcctgaccgagcacaccaagagcatcgccagcgcctacttcagccccctgaccggcaacagagtggtgaccacctgcgccgactgcaacctgagaatcttcgacagcagctgcatcagcagcaagatccccctgctgaccaccatcagacacaacaccttcaccggcagatggctgaccagattccaggccatgtgggaccccaagcaggaggactgcgtgatcgtgggcagcatggcccaccccagaagagtggagatcttccacgagaccggcaagagagtgcacagcttcggcggcgagtacctggtgagcgtgtgcagcatcaacgccatgcaccccaccagatacatcctggccggcggcaacagcagcggcaagatccacgtgttcatgaacgagaagagctgctag

SEQ ID NO: 273305 - DNA, 1689 bp, Artificial Sequence
  derived and/or modified sequence
atgtgcccaaaatcattgagcgaaaaaaacagcaataatgaagtggcctgcaaaaaaaccaaaatcaagaaaacttgccgccgtattataccccccaagatgaagaatacttcttctaaggctgaatccaccttgcaaaacagcagctccgccgtgcacactgagtctaacaaactgcaacccaagcgcacggcagacgcaatgaatctgagtgttgacgttgagtcctcgcaggacggcgattcagatgaagatacaacccctagtctggactttagtggtctctcgccttatgagcgcaaaagactcaaaaatatatccgagaacgccgacttctttgcaagcctccagctatctgagtctgcagccaggctcagggagatgattgagaaaaggcagcctccaaagtcaaaacggaaaaagcccaaacgcgaaaatggcatcggctgtagacgctccatgcggctgctgaaagtcgatccctcaggagtctccttgcctgctgcccccaccccccccaccctcgttgctgacgagacccccctgctgcccccgggtcctctggagatgacctccgagaaccaggaggataacaatgaaagattcaagggtttcctccacacttgggctggaatgtcaaaaccttcttccaaaaataccgagaagggtctctcaagtataaaaagttacaaagccaaccttaatggaatggtaattagcgaggacaccgtgtataaggtcacaacgggaccaatattctcgatggctctgcacccgtcagaaacacgaaccctggtagccgttggcgcaaaatttgggcaggtcgggctttgcgacctgacacagcagccaaaggaggatggagtgtatgtgtttcatccacactcccagcccgtgtcttgcttatacttttcccctgctaatccagcccatatactgtcgctgtcatatgacggtacgctgcggtgcggagacttttctagagctatctttgaagaagtttacagaaatgaacgctcttccttctcatccttcgactttttggccgaggatgccagcactctcattgtggggcactgggacggaaacatgtctctggttgaccggcggaccccggggacttcttatgaaaaactgacttccagctccatggggaaaatcagaaccgtgcacgtgcacccggttcataggcaatacttcataaccgccggacttagagatacccacatatacgacgctcgccgcttgaacagtcgcagatcccagcctctgatctctttgactgaacatactaaatctatcgcttcagcgtacttcagccctttaacaggtaacagggttgtgactacttgcgctgactgtaatctgcgcattttcgatagtagctgtatcagttcgaaaattccactccttacaacaattaggcacaacacttttacgggccgttggctcactcggttccaggccatgtgggaccctaagcaggaagactgcgtaattgtggggagcatggcacatcctcggcgggtggaaatcttccacgagacaggcaaacgcgtgcactcctttggtggcgagtatctggtgtcagtgtgcagtatcaacgccatgcacccaacacgatatatactggcggggggcaattcctcgggtaagatacacgttttcatgaacgaaaaaagttgttag

SEQ ID NO: 273306 - DNA, 1689 bp, Artificial Sequence
  derived and/or modified sequence
atgtgccccaagagcctgtctgagaagaacagcaacaatgaggtggcctgcaagaagaccaagatcaagaagacctgccgccgcatcatcccccccaagatgaagaacaccagcagcaaggccgagagcaccctgcagaacagcagcagcgctgtgcacacagagagcaacaagctgcagcccaagaggacagcagatgccatgaacctgtctgtggatgtggagagcagccaggatggagacagtgatgaggacaccacccccagcctggacttcagcggcctgagcccctatgaaaggaagaggctgaagaacatcagtgaaaatgctgacttctttgccagcctgcagctgtctgagagcgctgcccggctgcgggagatgattgagaagaggcagccccccaagagcaagaggaagaagcccaagagagaaaatggcatcggctgcagaagatccatgaggctgctgaaggtggaccccagcggcgtgtccctgcctgctgcccccaccccacccaccctggtggctgatgagacccccctgctgcccccaggccccctggagatgaccagcgagaaccaggaggacaacaatgaacgcttcaagggcttcctgcacacctgggccggcatgagcaagcccagcagcaagaacacagagaagggcctgagcagcatcaagagctacaaggccaacctgaatggcatggtgatcagtgaagatactgtgtacaaggtgaccaccggccccatcttctccatggccctgcaccccagcgagaccaggaccctggtggccgtgggcgccaagtttggccaggtgggcctgtgtgacctgacccagcagcccaaggaggatggagtgtatgtgttccacccccacagccagcctgtgtcctgcctgtacttcagccctgccaacccagcccacatcctgagcctgtcctatgatggcaccctgcgctgtggggacttcagccgggccatctttgaggaggtgtacagaaatgaaagaagcagcttcagcagctttgacttcctggccgaggatgccagcaccctcatcgtgggccactgggatggcaacatgagcctggtggacaggaggaccccaggcaccagctatgagaagctgaccagcagctccatgggcaagatcagaacagtgcacgtgcaccctgtgcaccggcagtacttcatcacagctggcctgcgggacacccacatctatgatgcccggcggctgaacagcagaagaagccagcccctcatcagcctgacagagcacaccaagagcatcgccagcgcctacttcagccccctgactggaaacagagtggtgaccacctgtgccgactgcaacctgcgcatctttgacagcagctgcatcagcagcaagatccccctgctgaccaccatccgccacaacaccttcaccggccgctggctgacccgcttccaggccatgtgggaccccaagcaggaggactgtgtgattgtgggctccatggcccacccccggcgggtggagatcttccacgagaccgggaagagggtgcacagctttggaggagagtacctggtgtctgtgtgcagcatcaatgccatgcaccccacccgctacatcctggccggcggcaacagcagcggcaagatccacgtgttcatgaatgagaagagctgctag

SEQ ID NO: 273307 - DNA, 1689 bp, Artificial Sequence
  derived and/or modified sequence
atgtgccccaagagcctgagcgagaagaacagcaacaacgaggtggcatgcaagaagactaagattaagaagacatgcaggcgaattatcccgcccaaaatgaagaacacgagcagcaaagcagaatcaaccctccagaatagttccagcgccgttcacaccgagagcaacaaactccagccaaagcggaccgctgacgctatgaacctctctgtagacgtggaaagctcacaggacggagatagtgacgaggatacaacgccctctctggatttttcgggcttgagtccttacgagcggaagcggctcaagaatatctcagagaacgctgactttttcgcctctttacagctctctgaaagcgccgctagactccgagagatgattgaaaaacgacagcccccaaagtccaagaggaagaagccaaaaagggaaaacgggataggttgccggcgcagtatgaggctactcaaagtggatccctctggcgttagtctgcccgctgctcctaccccacctactctagtagctgacgagacccctctacttcctcctgggccactggagatgacctctgagaaccaggaagataataatgaaagattcaagggatttctacacacctgggccggcatgtctaagccatcatctaaaaacacagagaagggattgtcttcaattaagtcttacaaagcaaatctcaatggtatggttatctctgaggacaccgtctataaggtgacaaccggaccaatttttagcatggctttacatccctcagagacacgtacgttagtggcagtcggggccaagttcgggcaggtcggcctttgtgacctcactcagcagccaaaggaggacggggtatatgtcttccacccacattcgcagcctgtgtcctgtctctatttcagtccagctaatccagctcacatcctttctctttcctacgatggtacactccggtgtggggatttctcccgggctatcttcgaagaagtatatcggaatgagcgctccagcttttcgtcctttgattttttggctgaagatgcctctaccctgattgtgggacattgggacggtaatatgtcactggtagacaggcgcacgcccgggacctcatacgagaagctcacctctagctctatgggaaaaatccgtacagtgcacgtacacccagtgcacaggcagtattttataactgccggtctgcgggatacacacatttacgacgcacggcggctgaactctcggcgatcccaacccctgatttccttgaccgaacacacgaagtctatagccagcgcctactttagtccacttacaggaaaccgcgtcgtgacaacctgcgctgactgcaacttaagaatctttgactcttcctgcattagctcgaagatccctctgctgaccaccatccggcacaatacgttcaccgggagatggctgactaggttccaggcgatgtgggaccctaagcaagaggattgcgtgatcgtgggtagcatggcccacccccgccgcgtagagatttttcatgagacaggaaaaagggtgcattcttttgggggcgaatatctggtatccgtctgtagtataaacgctatgcatccaacaagatacattctggccggtgggaactcaagcggcaagattcacgtatttatgaacgagaagagctgttag

SEQ ID NO: 273308 - DNA, 1689 bp, Artificial Sequence
  derived and/or modified sequence
atgtgcccaaagagtctgtctgagaaaaattctaacaatgaagtggcatgcaagaagactaagatcaagaaaacttgtcggagaatcataccgccaaaaatgaagaacaccagcagcaaggcagagtctaccctgcagaacagtagtagtgcggtgcacaccgagtctaataaattgcagccaaagagaacagctgacgcaatgaacttgagtgtagacgtagaaagctcacaggatggtgactcagatgaagacaccaccccctcgctggatttctccggactgtcaccgtatgaacgcaagcgcttaaaaaatatctcggagaatgctgatttctttgcctcactccagctgtccgagtcagcagccagactccgagaaatgatcgagaagagacaaccacccaagagtaagcgcaagaaaccaaagcgtgaaaatggaatcggctgccgtcgttccatgcgcttgcttaaggtggatccaagcggtgtttctctgccggctgcacctacaccccctacgctggtggcagatgagactcctctgctcccaccaggcccacttgagatgacaagcgaaaatcaggaggataacaacgagagattcaaggggttcctgcatacatgggctggaatgtcaaagcctagctccaagaacactgagaagggcttatctagtattaagtcctataaggccaatcttaacggcatggttattagcgaggatacagtctacaaggttactaccggaccaatttttagcatggcgctgcacccatccgaaacccggaccttggtggcggttggggcaaagtttgggcaagttggcttgtgtgacctgacccagcagcccaaagaggacggagtttacgtgtttcatccccacagccagcccgtgagctgcctatattttagtcccgctaaccccgctcatatcctctcattgagctatgatgggaccctccgatgcggtgattttagccgggcaatttttgaagaagtgtaccggaatgaaagaagcagcttcagttccttcgacttcctggccgaggatgcctccacactcattgtagggcactgggatggaaacatgtctcttgtggaccgccgtactcctggcacatcatacgagaagctaacctccagctccatgggcaagatccgcaccgtacacgtgcatcctgttcatcgccagtatttcatcacggccggtctgagagacacccatatatacgatgccaggcgacttaattcaagaaggagtcagccgctgatctcattgactgaacataccaaaagcatcgcaagtgcttactttagccctcttaccggcaaccgcgtggttacaacctgtgcggattgtaatttgagaattttcgacagtagctgcatctcctctaaaatccctctactgaccaccatacgacacaatacttttactggaagatggttaacgcgcttccaggctatgtgggatccaaagcaagaagactgcgtgatcgtcgggtccatggcccatcctagacgggttgagatattccacgagaccgggaagagggtgcacagtttcggaggggagtatctggtgtccgtgtgtagcattaacgccatgcatcctactagatacattctggctgggggaaactcttcgggaaagattcacgtcttcatgaatgagaagtcttgttag

SEQ ID NO: 273309 - protein, 1073 aa, Artificial Sequence
  derived and/or modified sequence
MRVFLLCAYILLLMVSQLRAVSFPEDDEPLNTVDYHYSRQYPVFRGRPSGNESQHRLDFQLMLKIRDTLYIAGRDQVYTVNLNEMPKTEVIPNKKLTWRSRQQDRENCAMKGKHKDECHNFIKVFVPRNDEMVFVCGTNAFNPMCRYYRLSTLEYDGEEISGLARCPFDARQTNVALFADGKLYSATVADFLASDAVIYRSMGDGSALRTIKYDSKWIKEPHFLHAIEYGNYVYFFFREIAVEHNNLGKAVYSRVARICKNDMGGSQRVLEKHWTSFLKARLNCSVPGDSFFYFDVLQSITDIIQINGIPTVVGVFTTQLNSIPGSAVCAFSMDDIEKVFKGRFKEQKTPDSVWTAVPEDKVPKPRPGCCAKHGLAEAYKTSIDFPDETLSFIKSHPLMDSAVPPIADEPWFTKTRVRYRLTAISVDHSAGPYQNYTVIFVGSEAGMVLKVLAKTSPFSLNDSVLLEEIEAYNHAKCSAENEEDKKVISLQLDKDHHALYVAFSSCIIRIPLSRCERYGSCKKSCIASRDPYCGWLSQGSCGRVTPGMLAEGYEQDTEFGNTAHLGDCHEILPTSTTPDYKIFGGPTSDMEVSSSSVTTMASIPEITPKVIDTWRPKLTSSRKFVVQDDPNTSDFTDPLSGIPKGVRWEVQSGESNQMVHMNVLITCVFAAFVLGAFIAGVAVYCYRDMFVRKNRKIHKDAESAQSCTDSSGSFAKLNGLFDSPVKEYQQNIDSPKLYSNLLTSRKELPPNGDTKSMVMDHRGQPPELAALPTPESTPVLHQKTLQAMKSHSEKAHGHGASRKETPQFFPSSPPPHSPLSHGHIPSAIVLPNATHDYNTSFSNSNAHKAEKKLQNIDHPLTKSSSKRDHRRSVDSRNTLNDLLKHLNDPNSNPKAIMGDIQMAHQNLMLDPMGSMSEVPPKVPNREASLYSPPSTLPRNSPTKRVDVPTTPGVPMTSLERQRGYHKNSSQRHSISAMPKNLNSPNGVLLSRQPSMNRGGYMPTPTGAKVDYIQGTPVSVHLQPSLSRQSSYTSNGTLPRTGLKRTPSLKPDVPPKPSFVPQTPSVRPLNKYTY

SEQ ID NO: 273310 - protein, 476 aa, Artificial Sequence
  derived and/or modified sequence
MRVFLLCAYILLLMVSQLRAVSFPEDDEPLNTVDYHYSRQYPVFRGRPSGNESQHRLDFQLMLKIRDTLYIAGRDQVYTVNLNEMPKTEVIPNKKLTWRSRQQDRENCAMKGKHKDECHNFIKVFVPRNDEMVFVCGTNAFNPMCRYYRLSTLEYDGEEISGLARCPFDARQTNVALFADGKLYSATVADFLASDAVIYRSMGDGSALRTIKYDSKWIKEPHFLHAIEYGNYVYFFFREIAVEHNNLGKAVYSRVARICKNDMGGSQRVLEKHWTSFLKARLNCSVPGDSFFYFDVLQSITDIIQINGIPTVVGVFTTQLNSIPGSAVCAFSMDDIEKVFKGRFKEQKTPDSVWTAVPEDKVPKPRPGCCAKHGLAEAYKTSIDFPDETLSFIKSHPLMDSAVPPIADEPWFTKTRVRYRLTAISVDHSAGPYQNYTVIFVGSEAGMVLKVLAKTSPFSLNDSVLLEEIEAYNHAK

SEQ ID NO: 273311 - protein, 148 aa, Artificial Sequence
  derived and/or modified sequence
MRVFLLCAYILLLMVSQLRAVSFPEDDEPLNTVDYHYSRQYPVFRGRPSGNESQHRLDFQLMLKIRDTLYIAGRDQVYTVNLNEMPKTEVIPNKKLTWRSRQQDRENCAMKGKHKDECHNFIKVFVPRNDEMVFVCGTNAFNPMCRYY

SEQ ID NO: 273312 - DNA, 3222 bp, Artificial Sequence
  derived and/or modified sequence
atgagagtgttcctgctgtgcgcctacatcctgctgctgatggtgagccagctgagagccgtgagcttccccgaggacgacgagcccctgaacaccgtggactaccactacagcagacagtaccccgtgttcagaggcagacccagcggcaacgagagccagcacagactggacttccagctgatgctgaagatcagagacaccctgtacatcgccggcagagaccaggtgtacaccgtgaacctgaacgagatgcccaagaccgaggtgatccccaacaagaagctgacctggagaagcagacagcaggacagagagaactgcgccatgaagggcaagcacaaggacgagtgccacaacttcatcaaggtgttcgtgcccagaaacgacgagatggtgttcgtgtgcggcaccaacgccttcaaccccatgtgcagatactacagactgagcaccctggagtacgacggcgaggagatcagcggcctggccagatgccccttcgacgccagacagaccaacgtggccctgttcgccgacggcaagctgtacagcgccaccgtggccgacttcctggccagcgacgccgtgatctacagaagcatgggcgacggcagcgccctgagaaccatcaagtacgacagcaagtggatcaaggagccccacttcctgcacgccatcgagtacggcaactacgtgtacttcttcttcagagagatcgccgtggagcacaacaacctgggcaaggccgtgtacagcagagtggccagaatctgcaagaacgacatgggcggcagccagagagtgctggagaagcactggaccagcttcctgaaggccagactgaactgcagcgtgcccggcgacagcttcttctacttcgacgtgctgcagagcatcaccgacatcatccagatcaacggcatccccaccgtggtgggcgtgttcaccacccagctgaacagcatccccggcagcgccgtgtgcgccttcagcatggacgacatcgagaaggtgttcaagggcagattcaaggagcagaagacccccgacagcgtgtggaccgccgtgcccgaggacaaggtgcccaagcccagacccggctgctgcgccaagcacggcctggccgaggcctacaagaccagcatcgacttccccgacgagaccctgagcttcatcaagagccaccccctgatggacagcgccgtgccccccatcgccgacgagccctggttcaccaagaccagagtgagatacagactgaccgccatcagcgtggaccacagcgccggcccctaccagaactacaccgtgatcttcgtgggcagcgaggccggcatggtgctgaaggtgctggccaagaccagccccttcagcctgaacgacagcgtgctgctggaggagatcgaggcctacaaccacgccaagtgcagcgccgagaacgaggaggacaagaaggtgatcagcctgcagctggacaaggaccaccacgccctgtacgtggccttcagcagctgcatcatcagaatccccctgagcagatgcgagagatacggcagctgcaagaagagctgcatcgccagcagagacccctactgcggctggctgagccagggcagctgcggcagagtgacccccggcatgctggccgagggctacgagcaggacaccgagttcggcaacaccgcccacctgggcgactgccacgagatcctgcccaccagcaccacccccgactacaagatcttcggcggccccaccagcgacatggaggtgagcagcagcagcgtgaccaccatggccagcatccccgagatcacccccaaggtgatcgacacctggagacccaagctgaccagcagcagaaagttcgtggtgcaggacgaccccaacaccagcgacttcaccgaccccctgagcggcatccccaagggcgtgagatgggaggtgcagagcggcgagagcaaccagatggtgcacatgaacgtgctgatcacctgcgtgttcgccgccttcgtgctgggcgccttcatcgccggcgtggccgtgtactgctacagagacatgttcgtgagaaagaacagaaagatccacaaggacgccgagagcgcccagagctgcaccgacagcagcggcagcttcgccaagctgaacggcctgttcgacagccccgtgaaggagtaccagcagaacatcgacagccccaagctgtacagcaacctgctgaccagcagaaaggagctgccccccaacggcgacaccaagagcatggtgatggaccacagaggccagccccccgagctggccgccctgcccacccccgagagcacccccgtgctgcaccagaagaccctgcaggccatgaagagccacagcgagaaggcccacggccacggcgccagcagaaaggagaccccccagttcttccccagcagcccccccccccacagccccctgagccacggccacatccccagcgccatcgtgctgcccaacgccacccacgactacaacaccagcttcagcaacagcaacgcccacaaggccgagaagaagctgcagaacatcgaccaccccctgaccaagagcagcagcaagagagaccacagaagaagcgtggacagcagaaacaccctgaacgacctgctgaagcacctgaacgaccccaacagcaaccccaaggccatcatgggcgacatccagatggcccaccagaacctgatgctggaccccatgggcagcatgagcgaggtgccccccaaggtgcccaacagagaggccagcctgtacagcccccccagcaccctgcccagaaacagccccaccaagagagtggacgtgcccaccacccccggcgtgcccatgaccagcctggagagacagagaggctaccacaagaacagcagccagagacacagcatcagcgccatgcccaagaacctgaacagccccaacggcgtgctgctgagcagacagcccagcatgaacagaggcggctacatgcccacccccaccggcgccaaggtggactacatccagggcacccccgtgagcgtgcacctgcagcccagcctgagcagacagagcagctacaccagcaacggcaccctgcccagaaccggcctgaagagaacccccagcctgaagcccgacgtgccccccaagcccagcttcgtgccccagacccccagcgtgagacccctgaacaagtacacctactag

SEQ ID NO: 273313 - DNA, 3222 bp, Artificial Sequence
  derived and/or modified sequence
atgagggtcttcctgctttgcgcctacattctcctgctcatggtgtcccaactccgtgctgtgagcttcccagaggacgatgagcctttaaacactgttgactatcactattcgcggcagtaccccgtgttcagaggacgaccttctggcaacgagtcacagcaccggcttgactttcaactgatgctgaaaatcagagatacattgtacatcgcaggccgagatcaggtttacacggtgaatctgaatgaaatgcccaagaccgaagtcattcccaataaaaaattgacctggcgctccaggcagcaggaccgcgagaactgcgctatgaaaggcaaacacaaagacgagtgccataactttatcaaagtcttcgtgcccagaaatgacgagatggtttttgtctgtgggacaaatgcttttaaccctatgtgccgctactacaggctaagcacccttgagtacgatggggaggagatttcaggtcttgctcggtgtccttttgacgctaggcagacaaatgttgctttattcgcagatggaaagctgtattctgcaaccgtcgcggacttcctggcctctgacgccgtgatctaccggtccatgggagacggttctgcactcaggacaatcaagtatgattctaagtggattaaggagccacacttcctgcatgcaatcgaatacggtaactacgtatacttcttctttagggaaattgccgtggagcacaataatctaggcaaggccgtttattcccgcgtggccaggatatgcaaaaatgatatgggagggagtcagcgcgtcttggagaaacactggacttcgtttcttaaggctcggctgaactgctccgtgccaggggactcattcttttacttcgacgtattgcagagcatcactgatattatacaaattaatggaatcccgacagttgtgggagtgtttacaacccagctcaactctatacctggctctgccgtctgtgcctttagtatggacgacatcgaaaaggttttcaaaggtaggttcaaggagcaaaagactccagacagcgtatggaccgcagttcccgaagacaaagtgccaaagcctcgacctggctgttgcgcgaaacatggcctagctgaagcatacaagacctccatcgattttcccgacgagacactgtcttttattaagtcccatcccctcatggatagcgctgtgccccctattgccgatgaaccctggttcacaaagactcgtgtgcgctacagactgacggccataagtgtggatcattcagcaggaccctaccagaactacaccgtgatattcgtgggcagtgaggcaggaatggtgcttaaggtccttgctaagacatctcccttcagtctaaatgatagcgttctgcttgaggaaatcgaggcctacaatcacgccaagtgtagtgcagagaatgaagaggataaaaaggtaattagcttacaactggataaagaccatcacgcattgtatgtggcttttagctcttgtattattcgcattcctctcagtcgttgcgaacggtacggcagctgcaaaaaaagttgcatcgcatcacgcgatccctactgtgggtggttgtcgcaaggaagttgcggcagagtcacccccggcatgctcgctgagggctacgaacaggacacggagttcgggaacacggcccatttaggagattgtcacgagatcttgcctactagcacaacacccgattacaagatctttggtggacccacgagtgacatggaggtgtccagcagtagcgtcactactatggcttccatcccagagattacccccaaagtcattgacacatggaggccaaagctgacgtcatctagaaagttcgtcgtccaggatgaccccaatacctccgatttcaccgaccctctttccggaatcccaaagggggtcagatgggaggtgcagtccggtgaatctaatcagatggttcatatgaatgtgttgattacctgtgtgttcgctgcattcgtcctgggagcctttattgccggggtggcggtgtactgctaccgggacatgttcgttcgcaaaaatagaaagattcataaggatgccgagtctgcgcaaagctgtacagattcatcgggttcattcgcaaaactcaacggtctgtttgactcgccagtgaaagagtaccaacaaaacatcgactccccaaaactgtactccaacttgctgacctcccgcaaagaacttcctccgaatggggataccaagtccatggtgatggaccaccgcggacagcctccagaattagctgcattgccgaccccggagagtacacccgtcctgcatcaaaaaacactacaagccatgaaatctcacagcgagaaagcccatggccatggcgcatcgcggaaggagaccccgcagttctttccgtccagccccccaccacactctcctctgtctcacggtcatatcccatcagctattgtcctccctaacgcgacacacgattacaacacgagcttcagtaatagtaacgctcataaggcagagaaaaagcttcagaatatcgaccatcctttgaccaaaagcagcagtaaaagggaccatcgccggtctgttgacagccgcaacacgcttaatgatctgctgaagcatctgaatgatccaaactccaaccctaaagctatcatgggggatatccagatggcccaccagaacctcatgttagatccaatggggagcatgagcgaagtaccccctaaagtccctaatcgcgaggccagtctctactcccctccttcaaccctgccccgcaatagccccacaaagcgcgttgacgtgcccaccaccccaggagtcccaatgacctctctggaacgccaacgagggtaccataaaaacagtagccagaggcacagcatcagcgctatgccaaaaaaccttaacagtccgaacggggtgctcctgagccgacagccttccatgaataggggagggtatatgcccacccctaccggggccaaagtggactacattcagggaacacccgtttccgttcacctccagccatctctctctcgacagagttcctatacctctaacggcacattgcccagaacaggcctcaagaggacaccgagcctgaagccagacgttccaccaaagcccagcttcgtaccccagactcctagcgtcagacccctcaataagtatacttattag

SEQ ID NO: 273314 - DNA, 3222 bp, Artificial Sequence
  derived and/or modified sequence
atgagggtcttcctcctttgcgcctacattttgctccttatggtttcgcaactgagagcagtgtcgtttcctgaggacgacgagccgctgaatacagtggactatcactacagccgccagtaccctgtcttcaggggtagaccaagcggcaacgagagccagcaccgactggactttcagctcatgcttaaaatacgggacacgctttacatcgcagggagagatcaggtctacaccgtgaatctgaacgaaatgcccaagactgaggtaatccccaacaagaaattgacctggagatctcgacaacaggatagggaaaactgtgccatgaagggcaagcacaaggacgagtgtcacaatttcatcaaagtgtttgttcctcgaaacgacgaaatggtattcgtgtgcgggacaaacgcctttaatccaatgtgtcggtattataggttgtctactcttgagtatgatggggaggaaataagtggcttagctaggtgtccgtttgatgcccggcagacaaatgttgccttatttgcggacggcaagttgtactctgctaccgtggctgacttcctcgctagtgatgccgtgatttacaggagcatgggagacggcagcgctctcagaactataaagtacgacagtaagtggattaaggaaccccatttcttgcatgcaatcgagtatggcaactacgtgtattttttcttccgggagattgcggtagagcacaacaatctcgggaaggcggtctacagccgcgttgcacgcatttgtaagaacgatatgggaggttcacagcgggttttggagaaacattggacaagcttcctgaaagcgcggctcaactgcagcgtgcccggcgactctttcttctattttgacgtactccagagcattaccgatattatccaaataaatggcattcctacggtagtaggggttttcacaacccagctaaactccattccaggatctgccgtatgtgccttctctatggacgatattgaaaaggtattcaaaggacggttcaaggagcaaaaaactccggattcggtgtggacagcagtcccagaggataaggtgcccaaaccacgacctggctgttgcgctaaacacggactcgcggaggcctataagacctcaatcgacttccccgacgaaaccctgtcattcatcaaaagtcacccactgatggacagcgctgttcctcccattgctgatgaaccgtggtttaccaagacaagggtccggtaccgattgactgcaatttccgttgaccactccgctggcccttaccagaattacactgttattttcgtcggctccgaggccgggatggtgctgaaggtcctggcaaaaacctcccctttcagcttgaacgattcagtcctgctcgaggaaatagaagcttataaccacgctaagtgtagcgctgaaaatgaggaggataagaaagtgatctcattgcagctggacaaggatcaccacgccctttatgtggcctttagcagttgtattatccggatccccctgtctcgatgcgagcgctacgggtcctgcaagaagagctgcatcgcatctcgcgacccgtactgcggttggctcagccagggctcttgcggacgcgtaactcccgggatgctcgccgagggttacgaacaagatacggagttcggtaatacggcccatcttggggactgtcacgagatcctgcccacctccactactcccgactacaaaatctttggaggcccaacttctgacatggaagtttccagcagcagcgtgaccacaatggcatccattccggagataacaccgaaggttatagatacgtggcgcccaaaactcacctccagccgtaagtttgtcgtccaagacgatccaaacactagcgacttcactgatccacttagtggaatccctaagggcgtgcgctgggaagtacagtctggcgagagtaatcagatggttcacatgaacgttctcatcacatgcgtgttcgcggctttcgtgttgggtgcgtttatcgcgggtgtagccgtgtactgttaccgcgatatgtttgtgcgtaaaaacagaaagattcataaggacgcagagagtgctcaaagttgtactgactcctcagggagctttgcaaagttaaatggtctgtttgacagcccagtgaaggagtatcaacagaacattgattccccaaagctgtactcgaacttgctgactagccgtaaggagctgccccccaatggagacaccaaatcaatggtgatggatcaccgggggcaaccacctgaactcgccgctcttccaactcccgagtctacccccgtgctacatcaaaaaacattacaggctatgaagtcccactcagagaaggcacacggtcatggagcctcaaggaaagaaacacctcagttctttccatccagtcctcctccgcacagtccgctgtcgcatggccatattccaagtgccatcgtgctgcccaacgccactcacgattataacaccagtttttccaattcgaatgcccacaaagctgagaagaaattgcagaacatagaccaccccctcacgaagtccagctccaagagagaccataggcgtagcgtggactcacgcaatacccttaacgaccttttaaagcacctcaatgaccccaattcaaaccccaaggccatcatgggcgacatccaaatggcccaccaaaacctgatgttggatcctatgggaagcatgagtgaagtcccccctaaagtcccaaaccgagaggcatccctatattcaccaccatccacactccccagaaattcccctaccaagagagtggatgtgcccactacccccggcgttccaatgacaagtctggagcggcaacgcgggtaccacaagaactcttcgcagaggcactctataagtgccatgccaaagaacctgaactcccctaatggcgtgctcctcagtcgccagccgtcaatgaatcggggaggctatatgcctacacccacaggagctaaggtggattacatccaaggcacgccggtcagtgttcacctgcagcccagcctgagccgacaaagttcttacacttccaacggtactctacctaggacaggactgaaacggactccgtcgctgaagccagacgtgccaccaaagccaagttttgtcccccagaccccttcagtgcggcccctcaataaatacacctattag

SEQ ID NO: 273315 - DNA, 3222 bp, Artificial Sequence
  derived and/or modified sequence
atgagggtcttcctgctgtgtgcctacatcctgctgctgatggtgtcccagctgcgggctgtgtccttcccagaagatgatgagcccctgaacacagtggactaccactacagccggcagtaccctgtgttccggggccggcccagcggaaatgaaagccagcaccggctggacttccagctgatgctgaagatccgggacaccctgtacatcgccggccgggaccaggtgtacacagtgaacctgaatgagatgcccaagacagaggtgatccccaacaagaagctgacctggaggagccggcagcaggaccgggagaactgtgccatgaagggcaagcacaaggatgagtgccacaacttcatcaaggtgtttgtgcccagaaatgatgagatggtgtttgtgtgtggcaccaatgccttcaaccccatgtgccgctactaccgcctgagcaccctggagtatgatggagaggagatcagcggcctggcccgctgcccctttgatgcccggcagaccaacgtggccctgtttgctgatggcaagctgtacagcgccaccgtggccgacttcctggccagtgatgctgtgatctaccgctccatgggagatggcagcgccctgcggaccatcaagtatgacagcaagtggatcaaggagccccacttcctgcacgccattgaatatggcaactacgtgtacttcttcttccgggagattgctgtggagcacaacaacctgggcaaggctgtgtacagccgggtggcccgcatctgcaagaatgacatgggcggcagccagagggtgctggagaagcactggaccagcttcctgaaggcccggctgaactgcagcgtgcctggggacagcttcttctactttgatgtgctgcagagcatcacagacatcatccagatcaatggcatccccaccgtggtgggcgtcttcaccacccagctgaacagcatccctggcagcgctgtgtgtgccttctccatggatgacatcgagaaggtgttcaagggccgcttcaaggagcagaagaccccagacagcgtgtggacagctgtgcctgaggacaaggtgcccaagcccaggcctggctgctgtgccaagcacggcctggccgaggcctacaagaccagcattgacttcccagatgagaccctgtccttcatcaagagccaccccctgatggattctgctgtgccccccatcgcagatgagccctggttcaccaagaccagggtgcgctaccgcctgacagccatctctgtggaccacagcgctggcccctaccagaactacaccgtcatctttgtgggcagcgaggccggcatggtgctgaaggtgctggccaagaccagccccttcagcctgaatgattctgtgctgctggaggagattgaggcctacaaccacgccaagtgcagcgcagaaaatgaggaggacaagaaggtgatcagcctgcagctggacaaggaccaccacgccctgtatgtggccttcagcagctgcatcatccgcatccccctgagccgctgtgaaagatatggcagctgcaagaagagctgcatcgccagccgggacccctactgcggctggctgagccagggcagctgtggccgggtgaccccaggcatgctggccgagggctatgagcaggacacagaatttggaaacacagcccacctgggggactgccacgagatcctgcccaccagcaccaccccagactacaagatctttggaggccccaccagtgacatggaggtgagcagcagctctgtgaccaccatggccagcatccctgagatcacccccaaggtgattgacacctggaggcccaagctgaccagcagcaggaagtttgtggtgcaggatgaccccaacaccagtgacttcacagaccccctgagcggcatccccaagggcgtgcgctgggaggtgcagagcggggagagcaaccagatggtgcacatgaatgtgctgatcacctgtgtgtttgctgcctttgtgctgggcgccttcatcgccggcgtggccgtgtactgctacagagacatgtttgtgaggaagaacaggaagatccacaaggatgctgagagcgcccagagctgcacagacagcagcggcagctttgccaagctgaatggcctgtttgacagccctgtgaaggagtaccagcagaacatcgacagccccaagctgtacagcaacctgctgaccagcaggaaggagctgcccccaaatggagacaccaagtccatggtgatggaccaccggggccagcccccagagctggccgccctgcccaccccagagagcacccctgtgctgcaccagaagaccctgcaggccatgaagagccacagcgagaaggcccacggccacggggccagcaggaaggagaccccccagttcttccccagcagccccccaccccacagccccctgagccacggccacatccccagcgccatcgtgctgcccaatgccacccatgactacaacaccagcttcagcaacagcaatgcccacaaggccgagaagaagctgcagaacatcgaccaccccctgaccaagagcagcagcaagagggaccaccggcgctctgtggacagcaggaacaccctgaatgacctgctgaagcacctgaatgaccccaacagcaaccccaaggccatcatgggagacatccagatggcccaccagaacctgatgctggaccccatgggctccatgtctgaggtgccccccaaggtgcccaaccgggaggccagcctgtacagcccccccagcaccctgcccaggaacagccccaccaagagggtggatgtgcccaccaccccaggagtgcccatgaccagcctggagcggcagaggggctaccacaagaacagcagccagaggcacagcatcagcgccatgcccaagaacctgaacagccccaatggagtgctgctgagccggcagcccagcatgaacagaggaggctacatgcccacccccactggagccaaggtggactacatccagggcacccctgtgtctgtgcacctgcagcccagcctgagccggcagagcagctacaccagcaatggcaccctgcccaggacaggcctgaagaggacccccagcctgaagccagatgtgccccccaagcccagctttgtgccccagacccccagcgtgcggcccctgaacaagtacacctactag

SEQ ID NO: 273316 - DNA, 3222 bp, Artificial Sequence
  derived and/or modified sequence
atgcgggtgttcctgctgtgcgcctacatcctgctgctgatggtgtcccagttaagggccgtgtcttttcctgaagatgatgagcctctcaacaccgtcgactaccactacagtcgccagtaccctgtcttccgcggacgaccctctgggaacgagagccagcatcggcttgatttccagttgatgctgaaaattcgcgatacactctatatcgctggaagggatcaggtgtatacagttaacctgaacgaaatgccaaaaaccgaggtcatacctaacaaaaagctcacctggcgctcgaggcagcaagaccgggaaaattgcgccatgaagggcaaacacaaagacgaatgtcataattttatcaaagtcttcgttcccagaaatgacgagatggtgttcgtgtgcggcactaacgcctttaaccccatgtgccggtattatcgtctgtccactctggaatatgatggtgaagaaatcagcggacttgcccgatgcccttttgatgcaaggcagacaaatgtagcgcttttcgctgacgggaagttgtacagcgctacagtggctgacttcttagcttccgatgcagtgatttaccggtccatgggcgatggctccgccctgaggacaatcaaatacgactctaagtggattaaggagccccatttcctccacgccatagagtatggcaactatgtctactttttttttcgcgagatcgccgtcgagcacaacaatttaggcaaagctgtctacagtcgggttgcccggatttgtaagaatgatatgggaggctctcagcgggtgctcgaaaagcactggacctcatttctcaaggctaggttgaactgctccgtaccaggcgactctttcttctactttgatgtgttacaaagcatcaccgacatcatccagatcaacggtattccaaccgtcgtgggtgtgtttacaacgcaattgaacagtatccctggctcagccgtatgtgccttcagcatggatgacatcgaaaaagtgtttaagggtcgtttcaaagagcagaagactcctgactccgtatggacagcagtgcctgaggataaggtgccaaagcccaggccaggctgttgcgctaaacacgggctggctgaggcctataagacctccatcgactttccagatgagactctatcctttattaagtctcatccgctgatggattctgctgtgccccctatcgctgacgagccatggttcaccaaaacccgtgttaggtaccgccttaccgccataagcgttgaccactccgcagggccgtatcaaaactacacagtgatctttgtgggttctgaggctggaatggtgctgaaggttctggcaaagacttcccctttttccctgaacgattcggtcctgctggaggaaatcgaggcttataaccacgctaaatgtagcgccgagaacgaggaagataaaaaggttatttcactccagctggacaaggaccaccacgcattgtatgttgcattttcctcttgcattatcagaatcccgttgtcccggtgcgaaagatacggctcgtgcaaaaaaagctgtatcgcttctagagacccatattgtggctggctgagtcagggatcctgtggacgtgtaactccaggtatgctcgctgaggggtacgaacaggacactgaattcgggaacacggcgcatctcggggattgtcacgaaatcttgcctacaagtactacacctgattacaagatatttggaggccccacgagcgacatggaggtgtcttcctcatcagtcaccacaatggctagcattcccgagatcaccccgaaagtcattgatacatggcgccccaaacttacttcctcccgcaaatttgtagtacaggatgatccaaatacatctgatttcactgatcctctctcagggatccccaaaggggttcgctgggaggtgcagtcaggtgaaagtaaccaaatggtacatatgaacgtgctgataacatgcgtatttgccgcgtttgtcttgggtgccttcattgctggagttgccgtctattgttacagagacatgtttgtgaggaaaaatagaaagattcacaaggacgccgagagcgctcagtcatgtacggattcctctggatcattcgcaaagcttaacggcctcttcgactctccagtgaaggaataccagcagaacattgattcacccaaattgtacagtaatttactgactagccgtaaggagcttccgccaaatggagacacaaagagtatggttatggaccatcgcggccagcccccagaacttgcggccctgcccacgccagaaagcaccccggttcttcaccagaagacactacaagctatgaaatcccattctgagaaagctcacggtcacggggcttctcgcaaggagacccctcagttctttccctcaagccccccaccccattcacctctatcacatggtcacatccctagtgccattgtgctccccaatgccacccatgactacaatacgtccttcagcaatagtaatgcacataaagctgagaagaaactccaaaacatcgatcacccactaaccaagtcatcctccaagcgggaccacagacggtctgtagactccaggaatactttgaatgacctcctcaagcatctgaatgacccaaatagtaacccaaaagcaatcatgggtgacatccagatggcacatcagaatttgatgctggatcctatgggcagtatgagcgaggtcccaccgaaggtacccaatcgcgaagcatccttgtattctcccccttcgaccctacctcggaatagccccacgaaacgggttgacgtcccaaccactcctggcgtacccatgacctcgctggagagacaacgtggataccacaagaatagttcgcaacgacactcaataagcgccatgccaaaaaatctgaacagtccgaacggggtgcttctctcacgtcagcccagtatgaatcgagggggctacatgcctacccccactggtgccaaggtcgattatatccaagggacccccgtatccgtgcaccttcaaccaagcctatcacgccagtcgagctacaccagcaatgggactctgcctagaaccggactgaagagaacccccagtcttaagcctgacgtgccacccaagccttcttttgtacctcagaccccttcagtgcgtccattgaacaagtatacctactag

SEQ ID NO: 273317 - DNA, 3222 bp, Artificial Sequence
  derived and/or modified sequence
atgcgggtgttcctgctgtgcgcctacatcctgctgctgatggtgtcccaactgagagctgtcagctttccagaagatgacgagccactgaacaccgtggactatcactatagccggcagtatcccgtgttcagaggacgacccagtggtaacgaatctcagcatcgcctggatttccagttaatgcttaaaatccgcgatacattatatatcgcgggacgagaccaggtgtataccgttaacctaaacgagatgcccaagacagaggtgattccaaataaaaagcttacgtggcggagcagacagcaggatcgagagaattgcgccatgaaggggaagcacaaggacgagtgccacaacttcattaaggttttcgttccaaggaatgatgagatggtctttgtttgtggcactaacgcatttaaccctatgtgtcgctactatcggctaagcacactggagtacgatggggaggaaattagtggccttgcgagatgcccctttgacgcacgacagaccaacgtcgcattgtttgccgacggcaagctgtatagcgcaaccgtggctgactttctcgcatctgatgctgtaatctaccgtagtatgggggacggctctgccttacgcacaatcaaatacgattccaagtggatcaaagagcctcattttctacacgctatcgagtacgggaattatgtgtatttcttctttcgggaaattgcggtcgaacacaacaatctcggcaaagcggtttattctcgtgttgctagaatctgtaaaaacgatatgggaggtagccaacgcgtgctcgagaaacactggacctcctttctcaaggctcggctaaattgcagtgtgccaggcgactcatttttctactttgatgtgttgcagtccatcacggatataatccagattaatggaattcctacagtggtgggcgtgtttaccacccagcttaactctatacccggtagtgccgtttgcgccttttcaatggatgacatagagaaggttttcaagggccgattcaaggagcagaagactcctgactccgtctggacagcagtgccagaggataaagtacccaagcctagacctggctgctgcgcaaaacatggccttgctgaggcctacaagacttccatcgatttccccgatgagacactatcttttatcaagagccaccccctgatggattccgccgtgcctccaattgcagacgagccctggtttaccaaaactcgggttcgatacaggttgacggcaataagtgttgatcacagtgccggaccctatcaaaactacaccgtgatatttgtgggatccgaagcaggcatggtcctgaaggtcctggctaagaccagcccattctcccttaacgactcagtcttattggaggaaattgaagcatacaaccatgcaaagtgcagcgccgaaaatgaggaagataagaaggtgatttctctccagctagacaaggatcatcatgcattatatgtggccttctcctcgtgtatcatcaggattcccctctcccgttgcgaaaggtatggctcatgtaagaagtcctgcatagctagcagagacccttactgcggctggctgagtcaaggctcgtgcggtagggtcacccctggcatgctcgccgaagggtacgagcaggataccgagttcggaaacaccgcccacctgggagactgtcacgaaatcttgcccacatccaccacccctgattacaagattttcggcgggcctacaagtgatatggaggtgtctagttcttcggtgactacgatggcttccatcccggaaatcacacccaaagttatcgatacctggagaccgaaattaacctcctctaggaaatttgtagtgcaggatgaccctaacacctctgactttactgaccccctttctgggatccccaagggggtccgatgggaggtacagagtggagagtctaaccagatggtacatatgaatgtcctgataacctgcgtctttgccgcatttgtgcttggcgccttcatcgcaggtgtggcagtttattgctacagggatatgtttgtgcgtaagaaccgaaaaatccacaaagatgccgaatccgcccagtcctgcacggacagttccgggtcctttgcaaaactcaacggtctgttcgatagccctgttaaggagtaccagcaaaatatcgatagtccaaagctgtacagtaacctgctcaccagccgcaaggagttgcctccaaacggcgatacgaaaagtatggtgatggaccatcgtggacaaccgcctgaacttgcggccctgcccactcccgagtcgacccccgtcctgcaccaaaagactttgcaggccatgaaatcacattctgagaaagctcatggccacggcgccagccggaaagagacaccacagttctttccatccagcccgcctccccactccccactgtcacacggccacattcctagcgcaatcgtgcttccgaatgccacccacgattacaacaccagcttcagtaattcaaatgcgcacaaggccgaaaagaaactgcagaatattgatcaccctttgacaaaatcgtcatccaagagggaccaccgacggtcagtggactcccggaacactctgaatgatctgctaaaacatcttaacgacccgaactcaaacccaaaggccattatgggagacatacaaatggcacaccagaacctgatgcttgatcccatgggcagcatgtcagaggtgccccctaaggtccccaatcgggaggcaagcctgtacagccccccttccactctgccaagaaacagccctactaagagagttgatgttcctacaaccccaggagtcccaatgacctctctagagcggcagcgcgggtatcacaagaactcctcccaacgccatagcatatccgcgatgcccaagaatctgaactcccctaatggcgtgctgctgtctagacagcctagtatgaatcgtggtggctatatgcccacacccaccggcgccaaggtcgactacatacaagggaccccagttagtgttcatctgcagccttccctctctcgacagagtagctacaccagcaatggtaccctaccccgcaccggactgaaacgaacaccatcactgaagcctgacgtgcccccgaagccatccttcgtgccacaaacccccagcgtcagacccctgaataaatacacctactag

SEQ ID NO: 273318 - DNA, 3222 bp, Artificial Sequence
  derived and/or modified sequence
atgcgggtgtttctcctgtgtgcctatatacttcttctaatggtgagtcagctccgcgctgtgagttttcccgaagacgacgaaccgctcaataccgtagactaccattactctagacagtaccctgtctttaggggtcggccttccggtaatgagtctcagcatcgcctcgacttccaactgatgctaaaaatccgcgataccttatacatcgcaggtagagaccaggtctatactgtgaacctgaacgagatgcccaaaaccgaagtcatccctaacaaaaagctcacttggagaagccgccagcaagacagggaaaactgcgccatgaagggtaagcacaaagatgagtgtcacaactttatcaaagtgttcgtgccaaggaacgatgagatggtattcgtttgcggaaccaatgcctttaaccccatgtgtcgctactatagactttccactctcgaatatgatggcgaagaaataagcggacttgcacggtgtccttttgatgccaggcagacaaacgtggcattgtttgctgatgggaaactctattctgccaccgtggcagattttttagcatctgacgccgtcatatatcgcagcatgggcgacggtagcgccctgcgcaccatcaaatatgactcaaagtggataaaggagccacatttcctgcacgccattgagtacgggaactacgtatacttcttctttagggaaatcgccgtcgaacacaataacctgggcaaggccgtgtactccagggtggccaggatatgcaagaacgatatggggggttcccaacgcgttttggaaaagcactggacatccttcttgaaagctagactaaattgttccgtgccaggcgactcattcttttacttcgatgtgctgcagtccatcactgacatcattcaaatcaacggcattcctaccgtcgtaggggtgttcactacacagctgaattccatccctggtagtgccgtttgtgctttctccatggatgacatcgagaaggtgtttaaggggcgattcaaagagcagaaaactccagactctgtctggacagcagtgccagaggataaagtgcccaaacccagaccgggatgctgtgccaaacatggcctagcagaggcgtataagaccagcattgatttcccagacgagaccctgtcgtttattaagtctcaccctctgatggactcagcggtgcccccaattgctgacgagccctggtttacaaaaacaagggtgaggtatcgcctcaccgccatatccgtcgaccactctgctggaccttaccagaattacaccgtcatctttgttggtagcgaagctggaatggtcctgaaggtcctagcaaagacctctcctttttcattaaacgactcagtgctgctcgaggagattgaagcctacaaccacgccaagtgctctgccgagaacgaggaagataagaaggttatcagtctgcagctagacaaagatcaccacgcactctatgtcgccttcagctcctgcattatcagaatcccactcagcaggtgcgaaagatacggttcatgtaaaaagagctgtatagcgtctcgagacccgtactgcggctggttaagccagggaagctgcggcagagtgacgcctgggatgcttgcagaggggtacgagcaggacacagaatttggtaacaccgcccacctgggtgactgccatgaaatactgccaaccagcaccacccccgactataaaattttcggagggccaactagcgatatggaagtatcctcaagcagtgtcactacaatggcaagtattcctgagatcactcctaaagttatcgacacttggaggccaaaactgacttcctctaggaagttcgtggtacaggacgaccccaacacaagcgacttcacagaccccctttccggaataccaaagggcgtccggtgggaagtacaaagtggtgagagtaaccagatggtgcatatgaatgtacttatcacatgtgtgttcgctgcctttgtcctaggtgcatttatagctggagtcgctgtctattgttatagagatatgtttgttcggaaaaaccgaaaaattcacaaggatgctgaatccgcccagtcttgtacagattcctcaggaagcttcgccaaactcaatgggttgttcgattctcccgttaaagaatatcagcagaacatcgatagccccaagctgtactccaacctgctgacgagcaggaaagagctccctcctaatggcgacactaaaagtatggtcatggaccaccggggacaaccccctgaacttgccgctttgcctacccctgaatccacccctgtcctccaccagaagacactccaggctatgaaatctcacagtgaaaaggcccacggacatggtgcttcacgcaaagagactccgcagttctttccctcctctcctccccctcattccccactttctcacggccatattccttcagccatcgttctccctaacgcgacgcatgattacaatacatcgttttcaaactctaacgcacacaaagccgagaaaaagctgcagaacattgaccaccccctgacaaaaagctcgtcaaagagggatcaccgcaggtccgtggacagccggaatacactgaacgatttgctgaagcaccttaatgatcctaattccaaccccaaagcaatcatgggggatattcaaatggcacatcagaatctgatgctggaccctatgggcagcatgtccgaggtcccaccaaaagttcccaacagagaggctagcctctattcacctcctagcactttaccgaggaattctccaacgaagcgggttgacgttcccacgacacccggtgtgccgatgacctccctagaacggcaacgagggtatcacaaaaacagcagccagcggcatagtatatcagctatgcccaaaaacctgaatagcccaaacggggtgctgttgtcccggcagccttctatgaacaggggcggatatatgcctactccgaccggggcaaaggtcgactatatccagggaaccccagtctctgtgcacctgcagcccagccttagtagacagagttcttatactagcaatggcactttgccaagaacgggcttgaaacgtaccccgagtctgaagcctgatgtgccccctaagccttcgtttgtgcctcagactcccagcgtgcggcctctcaacaaatacacgtactag

SEQ ID NO: 273319 - DNA, 3222 bp, Artificial Sequence
  derived and/or modified sequence
atgcgggtgttcctgctgtgcgcgtatattctgctcctcatggtttcccagttgagagctgtttccttcccagaagatgacgagccactgaacacagtcgactatcactactcccgacagtatcctgtatttcgtggcagacctagtggcaatgagagccaacatagactggattttcagctgatgttgaagatcagggacaccctctacatagctgggagagatcaggtttataccgtgaatctgaatgagatgcccaaaaccgaagtgatccctaacaaaaagctgacttggcgaagccgccaacaggatcgagagaactgcgctatgaagggaaaacataaggatgagtgccataacttcatcaaagtgtttgttcctaggaatgatgaaatggtgtttgtgtgcggaaccaacgccttcaacccgatgtgtagatactacagactttccaccttggagtacgacggtgaggaaatatctggactcgctagatgtccattcgacgccaggcagacgaatgtggctctgtttgctgacgggaagctctactccgctaccgtggctgatttcctggcctctgatgctgtgatatatcggtctatgggtgacgggtcagcccttcgcaccataaagtacgacagcaaatggatcaaggaaccgcactttctgcacgccatcgagtatggcaactatgtgtacttctttttcagggaaattgccgttgagcacaacaacttgggcaaagccgtctactcccgggtcgcacgcatctgtaaaaacgatatgggcggttctcagagagtattagagaaacactggacatcctttctcaaggcccgtctgaattgttccgtgcccggagactcatttttctactttgacgttctgcaatctatcacagatatcatccaaatcaacggtatccctacagtcgtgggcgtgtttacaacccagctcaacagtattcccggaagtgccgtctgtgcattttccatggatgatattgagaaggtgttcaagggacggttcaaggaacagaagacacctgattctgtgtggaccgccgtgcctgaggataaagtccctaagccacggcctggctgttgtgcgaaacatggactcgccgaggcctacaagacgagtatagacttccctgacgaaaccctgtcgttcattaagtcgcacccattgatggatagtgcggtccctccaattgcggacgaaccctggtttactaagactcgcgtgagataccgactcacggcgatcagtgtggaccatagcgccggaccctatcaaaattatactgttatttttgtgggttcagaagccggaatggtcctgaaggtcctggcaaagaccagtccctttagtctcaatgatagcgtcctcttagaggagatagaggcctataaccacgcaaagtgtagtgctgaaaatgaagaggacaagaaggtaatctccctacagctcgataaagaccaccatgcactttacgtggcgttctcttcctgtatcattaggataccccttagcagatgtgagagatatggaagttgcaaaaaatcttgtatcgcttcccgagacccctattgcggctggctgagtcagggttcatgcggcagggtgacaccgggaatgctcgccgaggggtacgagcaggatactgagttcggcaataccgcccatttaggtgactgccacgagatacttccaacttccaccactccagattataagatcttcgggggacccaccagcgacatggaagtttcttcatcctctgtgactacgatggctagtatcccagagatcacccctaaagttatagatacatggcgccctaagctgacgagttcccggaagttcgtggtgcaggatgacccaaacacgagtgacttcacggaccctctgtctggcatcccaaaaggcgttagatgggaggtccagtccggagaatccaatcagatggttcacatgaatgtgctcattacctgcgtattcgctgcttttgttttaggcgcttttatcgcaggggtcgccgtatattgctaccgtgatatgtttgtgaggaaaaacagaaagattcacaaagacgcagagtctgcccagagctgtaccgattccagtggatcctttgccaaacttaacgggcttttcgacagtcctgtgaaagagtaccaacagaatatagacagccccaagctctatagtaatttgctcacctctcggaaagagttaccccctaacggtgacaccaagtctatggtgatggaccataggggccagcccccagagctggctgcccttcccacccccgagtccacgccggtcctgcaccagaaaactctccaagcgatgaagagccactccgaaaaagcgcacggccacggcgcatccaggaaagagactccacagtttttcccatcctccccaccccctcactctcctttgagtcatggccacatccccagtgccatcgtactacccaacgctactcacgattacaatacatcattcagcaattcaaacgcccataaagccgaaaagaagctgcaaaacatcgatcacccattaacgaagtccagtagcaaacgcgaccacaggcgcagtgttgattccaggaacaccctgaacgatctgctcaagcacctgaacgaccctaactccaaccccaaggctatcatgggagacatccagatggctcatcagaacctcatgctggacccaatgggaagcatgtccgaagtaccccctaaggtgcccaaccgcgaggcctcactctattcgcccccaagtactctgcctagaaatagcccaacaaaaagggttgacgtccctactacgccaggcgtgcctatgacatccctggaacggcagaggggctatcacaagaattctagtcaaaggcacagtatttctgccatgcccaaaaatctcaatagcccgaacggcgtgctcctttctaggcaaccctctatgaatcgcggaggctacatgccgactcccactggtgcaaaggttgactacatccaggggaccccagtgtcagtgcacctgcagccaagcctctcccgccaatcttcctacacaagcaatgggactttacccagaacaggactgaaacgtacgccctcactgaagcccgatgttcctcctaaaccttccttcgttccgcagacgccctctgtgcgcccactgaataaatacacatactag

SEQ ID NO: 273320 - DNA, 6099 bp, Artificial Sequence
  derived and/or modified sequence
gcggccgcttcccaccgtccctctccccttactggcagagcgcgctgcgggcggactcccgggcccggagcagcccaccggccaccccaccgcccacccggctcccggtgtctcctcccggccgctctacccagcaactttccgtgctttgttccccgactggaaatgctttacggaagcgtcttggacagggtctccgccaggcgacaagagctcggtgctgagatgtgttacgttctcatctccccatcaattatggatggaaacaaataaggaagagtcaattttgctgagccccttctccggcaacgagaggcgttctgcagccgggagggagccgccgctcgcgccggcagccgctggcaggggcatggtgaggaggaaggtagctcagtggcatttctgagcaggggccaccctgacttcaccttggcccaccatgagggtcttcctgctttgtgcctacatactgctgctgatggtttcccagttgagggcagtcagctttcctgaagatgatgaaccccttaatactgtcgactatcactattcaaggcaatatccggtttttagaggacgcccttcaggcaatgaatcgcagcacaggctggactttcagctgatgttgaaaattcgagacacactttatattgctggcagggatcaagtttatacagtaaacttaaatgaaatgcccaaaacagaagtaatacccaacaagaaactgacatggcgatcaagacaacaggatcgagaaaactgtgctatgaaaggcaagcataaagatgaatgccacaactttatcaaagtatttgttccaagaaacgatgagatggtttttgtttgtggtaccaatgcattcaatcccatgtgtagatactacaggttgagtaccttagaatatgatggggaagaaattagtggcctggcaagatgcccatttgatgccagacaaaccaatgttgccctctttgctgatgggaagctgtattctgccacagtggctgacttcttggccagcgatgccgttatttatcgaagcatgggtgatggatctgcccttcgcacaataaaatatgattccaaatggataaaagagccacactttcttcatgccatagaatatggaaactatgtctatttcttctttcgagaaatcgctgtcgaacataataatttaggcaaggctgtgtattcccgcgtggcccgcatatgtaaaaacgacatgggtggttcccagcgggtcctggagaaacactggacttcatttctaaaggctcggctgaactgttctgtccctggagattcgtttttctactttgatgttctgcagtctattacagacataatacaaatcaatggcatccccactgtggtcggggtgtttaccacgcagctcaatagcatccctggttctgctgtctgtgcatttagcatggatgacattgaaaaagtattcaaaggacggtttaaggaacagaaaactccagattctgtttggacagcagttcccgaagacaaagtgccaaagccaaggcctggctgttgtgcaaaacacggccttgccgaagcttataaaacctccatcgatttcccggatgaaactctgtcattcatcaaatctcatcccctgatggactctgccgttccacccattgccgatgagccctggttcacaaagactcgggtcaggtacagactgacggccatctcagtggaccattcagccggaccctaccagaactacacagtcatctttgttggctctgaagctggcatggtacttaaagttctggcaaagaccagtcctttctctttgaacgacagcgtattactggaagagattgaagcctacaaccatgcaaagtgcagtgctgagaatgaggaagacaaaaaggtcatctcattacagttggataaagatcaccacgctttatatgtggcgttctctagctgcattatccgcatccccctcagtcgctgtgagcgttatggatcatgtaaaaagtcttgtattgcatctcgtgacccgtattgtggctggttaagccagggatcctgtggtagagtgaccccagggatgcttgctgaaggatatgaacaagacacagaattcggcaacacagctcatctaggggactgccatgaaattttgcctacttcaactacaccagattacaaaatatttggcggtccaacatctgacatggaggtatcttcatcttctgttaccacaatggcaagtatcccagaaatcacacctaaagtgattgatacctggagacctaaactgacaagctctcggaaatttgtagttcaagatgatccaaacacttctgattttactgatcctttatcgggtatcccaaagggtgtacgatgggaagtccagtctggagagtccaaccagatggtccacatgaatgtcctcatcacctgtgtctttgctgcttttgttttgggggcattcattgcaggtgtggcagtatactgctatcgagacatgtttgttcggaaaaacagaaagatccataaagatgcagagtccgcccagtcatgcacagactccagtggaagttttgccaaactgaatggtctctttgacagccctgtcaaggaataccaacagaatattgattctcctaaactgtatagtaacctgctaaccagtcggaaagagctaccacccaatggagatactaaatccatggtaatggaccatcgagggcaacctccagagttggctgctcttcctactcctgagtctacacccgtgcttcaccagaagaccctgcaggccatgaagagccactcagaaaaggcccatggccatggagcttcaaggaaagaaacccctcagttttttccgtctagtccgccacctcattccccattaagtcatgggcatatccccagtgccattgttcttccaaatgctacccatgactacaacacgtctttctcaaactccaatgctcacaaagctgaaaagaagcttcaaaacattgatcaccctctcacaaagtcatccagtaagagagatcaccggcgttctgttgattccagaaataccctcaatgatctcctgaagcatctgaatgacccaaatagtaaccccaaagccatcatgggagacatccagatggcacaccagaacttaatgctggatcccatgggatcgatgtctgaggtcccacctaaagtccctaaccgggaggcatcgctatactcccctccttcaactctccccagaaatagcccaaccaagcgagtggatgtccccaccactcctggagtcccaatgacttctctggaaagacaaagaggttatcacaaaaattcctcccagaggcactctatatctgctatgcctaaaaacttaaactcaccaaatggtgttttgttatccagacagcctagtatgaaccgtggaggatatatgcccacccccactggggcgaaggtggactatattcagggaacaccagtgagtgttcatctgcagccttccctctccagacagagcagctacaccagtaatggcactcttcctaggacgggactaaagaggacgccgtccttaaaacctgacgtgccaccaaagccttcctttgttcctcaaaccccatctgtcagaccactgaacaaatacacatactaggcctcaagtgtgctattcccatgtggctttatcctgtccgtgttgttgagaggatgatgttgtaagggtaccttaaaacaagagactcgcttgtattttaagagaaccaagtggccaaagaaactctttctaactttggcaacatcagaacttgccacatgtagctactgcagcaaggcttctgtgtacttgcctgaaaacaaaggaaggtgctggtcattccatttcttttgtttgaagctaaagagatgtgtagctcacaggggctaccttaccagtataaagagctgataacagtactcagaagaatctgtgaacaaatacttgaaaatgggttcaatgtagactgccattatgtgtggtcttcccattaaatgtgaacattttaatatgtatgcattcaccttgcctcttgcacaaatgtcaaaaaaaagatggtaatatctcaaagaaatgaacttgtagattaccaagcagtttgctaaaaattcaatctttgacccaagctgtagcatttttttttcatgtgtggcatctttttcatgccaccaacaaacttgttgtgtgtgtgcgtgtgtgtgtgtgtgtgtgtgtgtgtgtgtgtgttctgtacccactaggatttgtttaggtgcccattgcatctttttgtgctatggagttgtttacattaagcatgaccgaacgagagacaatactatttcccacaggagtccattgggttcagctttgaaagaggaatagaatcgaggctcctttgaccatcaaaatgatgaactttacttatgtggtacccaatgccagaatgtaagagttgcaagtgattttgtgctgctattcattaaaacttgtattccagtcttgccagcttaaggagatcaagatattaagaggtatccttgatttattttccagtattcagtagtaaaattttcctgtccactgtgaatcaaagcctgagtcactctatttaaccttggacacactaataaggttttattttgattgtgttcgtttccccccccccaatagtaaaatttctcctcctttaactcctcctaccccccaaggtaagaaacaaaaaacaaacaaacaaacaaaaatagaagacaaaagaaagacatatgaaaggaattgtaattggcttaacagaaacagtctgtaaaaacctaacagtggtgcaatcatgttgtctgtgttgtgttatgtgagaattttctcctaagtcatgcaggtaatgacaatatactgtaaataccacatgtgagtttacctgaatctgtgcattttgtgccttattcatgagaatgatagaagtactaaaatctgtcaagtgttttcagtatagcacattatttactgagtgccagttgtaaatgtttttcaaccagcacctaaaaagactcttttcaaaaaatcacagaaacaacctaggacaattatttgttacataatccgacctcatagcagcattacattctttgccgtgataaacattccactcctgctttcctaaggatgaaacagtgataatgtgaactcaaatgaggtttcctgggtaatgtgacacctgcagaaactatagagcgtcatttatacgtagtttggcagaaaccacttacggctgatgatgcgcaaccctgctgactgtttcagttaatatgctgcacaccacacacttgtttagtgaaccaaatctagaaagtaccaaggcagaggtatgctcctgctgtaatcaggcaaatgagttcaactggatttcttttgacaatactgttggtacctattacttgggggaggacatgttgcagaagaccagatcatttttatacagaatgtgaaatactgatacagttattcttttttttaaagaacattgttttataaagaacgtgatttccagtgatctctggaagcgctaaagctaaaatttctgttcttgaaacacttcagctttgcaactaaaatattacagattaataataaattaaaccaaccaatgataaacactactcagtccaccaacaacaaacgtgtttgaattcaccttaccaatattaatcccagcgtgtgtaaaacagaacagtaactctatgtgaccccagataacattttgtaacattgtgcttccttgtagtttgtaatgtgagttcaatcagtatttatgttgaaatttctaacattaaatctagtctctatcctgttaatttaatttttaaatgctttatccatttgtgcaaaggtaaacgcagattgtatcttttttaatggtacggcataaaaagtaaccctcaagtgaagtgtctctatactgttttatagagtactttaacatgaatagataccttgtaaacttgtattgtggatgtgtaaataatatgtactttgggtttttaacaccgcatgtaaagtcaaaataaaatatacaaatcattata

SEQ ID NO: 273321 - DNA, 3754 bp, Artificial Sequence
  derived and/or modified sequence
cgtccgtgcccgggggtgggacccgcgccgggagctgccgagtgcgtggagggagccaggctccggctcgcctgatggattgacttggagatggatcgaattacaccatttgccgtgcatcggtttgttttgctcctgctctgtcccgctgctgctgctgctgctgcaaggggtggtggcgagtttcaggattctatcaaggaagccaagacctaaggagacagagggatatctatttttacaatatttttctttattttctttcttccttgcgcgtggcaagcttttttttttctttttcttttttcttaccagcctccccccaatgaggtagctcagtggcatttctgagcaggggccaccctgacttcaccttggcccaccatgagggtcttcctgctttgtgcctacatactgctgctgatggtttcccagttgagggcagtcagctttcctgaagatgatgaaccccttaatactgtcgactatcactattcaaggcaatatccggtttttagaggacgcccttcaggcaatgaatcgcagcacaggctggactttcagctgatgttgaaaattcgagacacactttatattgctggcagggatcaagtttatacagtaaacttaaatgaaatgcccaaaacagaagtaatacccaacaagaaactgacatggcgatcaagacaacaggatcgagaaaactgtgctatgaaaggcaagcataaagatgaatgccacaactttatcaaagtatttgttccaagaaacgatgagatggtttttgtttgtggtaccaatgcattcaatcccatgtgtagatactacaggttgagtaccttagaatatgatggggaagaaattagtggcctggcaagatgcccatttgatgccagacaaaccaatgttgccctctttgctgatgggaagctgtattctgccacagtggctgacttcttggccagcgatgccgttatttatcgaagcatgggtgatggatctgcccttcgcacaataaaatatgattccaaatggataaaagagccacactttcttcatgccatagaatatggaaactatgtctatttcttctttcgagaaatcgctgtcgaacataataatttaggcaaggctgtgtattcccgcgtggcccgcatatgtaaaaacgacatgggtggttcccagcgggtcctggagaaacactggacttcatttctaaaggctcggctgaactgttctgtccctggagattcgtttttctactttgatgttctgcagtctattacagacataatacaaatcaatggcatccccactgtggtcggggtgtttaccacgcagctcaatagcatccctggttctgctgtctgtgcatttagcatggatgacattgaaaaagtattcaaaggacggtttaaggaacagaaaactccagattctgtttggacagcagttcccgaagacaaagtgccaaagccaaggcctggctgttgtgcaaaacacggccttgccgaagcttataaaacctccatcgatttcccggatgaaactctgtcattcatcaaatctcatcccctgatggactctgccgttccacccattgccgatgagccctggttcacaaagactcgggtcaggtacagactgacggccatctcagtggaccattcagccggaccctaccagaactacacagtcatctttgttggctctgaagctggcatggtacttaaagttctggcaaagaccagtcctttctctttgaacgacagcgtattactggaagagattgaagcctacaaccatgcaaagtgcagtgctgagaatgaggaagacaaaaaggtcatctcattacagttggataaagatcaccacgctttatatgtggcgttctctagctgcattatccgcatccccctcagtcgctgtgagcgttatggatcatgtaaaaagtcttgtattgcatctcgtgacccgtattgtggctggttaagccagggatcctgtggtagagtgaccccagggatgcttgctgaaggatatgaacaagacacagaattcggcaacacagctcatctaggggactgccatgaaattttgcctacttcaactacaccagattacaaaatatttggcggtccaacatctgacatggaggtatcttcatcttctgttaccacaatggcaagtatcccagaaatcacacctaaagtgattgatacctggagacctaaactgacaagctctcggaaatttgtagttcaagatgatccaaacacttctgattttactgatcctttatcgggtatcccaaagggtgtacgatgggaagtccagtctggagagtccaaccagatggtccacatgaatgtcctcatcacctgtgtctttgctgcttttgttttgggggcattcattgcaggtgtggcagtatactgctatcgagacatgtttgttcggaaaaacagaaagatccataaagatgcagagtccgcccagtcatgcacagactccagtggaagttttgccaaactgaatggtctctttgacagccctgtcaaggaataccaacagaatattgattctcctaaactgtatagtaacctgctaaccagtcggaaagagctaccacccaatggagatactaaatccatggtaatggaccatcgagggcaacctccagagttggctgctcttcctactcctgagtctacacccgtgcttcaccagaagaccctgcaggccatgaagagccactcagaaaaggcccatggccatggagcttcaaggaaagaaacccctcagttttttccgtctagtccgccacctcattccccattaagtcatgggcatatccccagtgccattgttcttccaaatgctacccatgactacaacacgtctttctcaaactccaatgctcacaaagctgaaaagaagcttcaaaacattgatcaccctctcacaaagtcatccagtaagagagatcaccggcgttctgttgattccagaaataccctcaatgatctcctgaagcatctgaatgacccaaatagtaaccccaaagccatcatgggagacatccagatggcacaccagaacttaatgctggatcccatgggatcgatgtctgaggtcccacctaaagtccctaaccgggaggcatcgctatactcccctccttcaactctccccagaaatagcccaaccaagcgagtggatgtccccaccactcctggagtcccaatgacttctctggaaagacaaagaggttatcacaaaaattcctcccagaggcactctatatctgctatgcctaaaaacttaaactcaccaaatggtgttttgttatccagacagcctagtatgaaccgtggaggatatatgcccacccccactggggcgaaggtggactatattcagggaacaccagtgagtgttcatctgcagccttccctctccagacagagcagctacaccagtaatggcactcttcctaggacgggactaaagaggacgccgtccttaaaacctgacgtgccaccaaagccttcctttgttcctcaaaccccatctgtcagaccactgaacaaatacacatactaggcctcaagtgtgctattcccatgtggctttatcctgtccgtgttgttgagaggatgatgttgtaagggtaccttaaaacaagagactcgcttgtattttaagagaaccaagtggccaaagaaactctttctaactttggcaacatcag

SEQ ID NO: 273322 - protein, 1054 aa, Artificial Sequence
  derived and/or modified sequence
MRVFLLCAYILLLMVSQLRAVSFPEDDEPLNTVDYHYSRQYPVFRGRPSGNESQHRLDFQLMLKIRDTLYIAGRDQVYTVNLNEMPKTEVIPNKKLTWRSRQQDRENCAMKGKHKDECHNFIKVFVPRNDEMVFVCGTNAFNPMCRYYRLSTLEYDGEEISGLARCPFDARQTNVALFADGKLYSATVADFLASDAVIYRSMGDGSALRTIKYDSKWIKEPHFLHAIEYGNYVYFFFREIAVEHNNLGKAVYSRVARICKNDMGGSQRVLEKHWTSFLKARLNCSVPGDSFFYFDVLQSITDIIQINGIPTVVGVFTTQLNSIPGSAVCAFSMDDIEKVFKGRFKEQKTPDSVWTAVPEDKVPKPRPGCCAKHGLAEAYKTSIDFPDETLSFIKSHPLMDSAVPPIADEPWFTKTRVRYRLTAISVDHSAGPYQNYTVIFVGSEAGMVLKVLAKTSPFSLNDSVLLEEIEAYNHAKCSAENEEDKKVISLQLDKDHHALYVAFSSCIIRIPLSRCERYGSCKKSCIASRDPYCGWLSQGSCGRVTPGMLAEGYEQDTEFGNTAHLGDCHDMEVSSSSVTTMASIPEITPKVIDTWRPKLTSSRKFVVQDDPNTSDFTDPLSGIPKGVRWEVQSGESNQMVHMNVLITCVFAAFVLGAFIAGVAVYCYRDMFVRKNRKIHKDAESAQSCTDSSGSFAKLNGLFDSPVKEYQQNIDSPKLYSNLLTSRKELPPNGDTKSMVMDHRGQPPELAALPTPESTPVLHQKTLQAMKSHSEKAHGHGASRKETPQFFPSSPPPHSPLSHGHIPSAIVLPNATHDYNTSFSNSNAHKAEKKLQNIDHPLTKSSSKRDHRRSVDSRNTLNDLLKHLNDPNSNPKAIMGDIQMAHQNLMLDPMGSMSEVPPKVPNREASLYSPPSTLPRNSPTKRVDVPTTPGVPMTSLERQRGYHKNSSQRHSISAMPKNLNSPNGVLLSRQPSMNRGGYMPTPTGAKVDYIQGTPVSVHLQPSLSRQSSYTSNGTLPRTGLKRTPSLKPDVPPKPSFVPQTPSVRPLNKYTY

SEQ ID NO: 273323 - protein, 219 aa, Artificial Sequence
  derived and/or modified sequence
MRVFLLCAYILLLMVSQLRAVSFPEDDEPLNTVDYHYSRQYPVFRGRPSGNESQHRLDFQLMLKIRDTLYIAGRDQVYTVNLNEMPKTEVIPNKKLTWRSRQQDRENCAMKGKHKDECHNFIKVFVPRNDEMVFVCGTNAFNPMCRYYRLSTLEYDGEEISGLARCPFDARQTNVALFADGKLYSATVADFLASDAVIYRSMGDGSALRTIKYDSKWIK

SEQ ID NO: 273324 - DNA, 3165 bp, Artificial Sequence
  derived and/or modified sequence
atgagagtgttcctgctgtgcgcctacatcctgctgctgatggtgagccagctgagagccgtgagcttccccgaggacgacgagcccctgaacaccgtggactaccactacagcagacagtaccccgtgttcagaggcagacccagcggcaacgagagccagcacagactggacttccagctgatgctgaagatcagagacaccctgtacatcgccggcagagaccaggtgtacaccgtgaacctgaacgagatgcccaagaccgaggtgatccccaacaagaagctgacctggagaagcagacagcaggacagagagaactgcgccatgaagggcaagcacaaggacgagtgccacaacttcatcaaggtgttcgtgcccagaaacgacgagatggtgttcgtgtgcggcaccaacgccttcaaccccatgtgcagatactacagactgagcaccctggagtacgacggcgaggagatcagcggcctggccagatgccccttcgacgccagacagaccaacgtggccctgttcgccgacggcaagctgtacagcgccaccgtggccgacttcctggccagcgacgccgtgatctacagaagcatgggcgacggcagcgccctgagaaccatcaagtacgacagcaagtggatcaaggagccccacttcctgcacgccatcgagtacggcaactacgtgtacttcttcttcagagagatcgccgtggagcacaacaacctgggcaaggccgtgtacagcagagtggccagaatctgcaagaacgacatgggcggcagccagagagtgctggagaagcactggaccagcttcctgaaggccagactgaactgcagcgtgcccggcgacagcttcttctacttcgacgtgctgcagagcatcaccgacatcatccagatcaacggcatccccaccgtggtgggcgtgttcaccacccagctgaacagcatccccggcagcgccgtgtgcgccttcagcatggacgacatcgagaaggtgttcaagggcagattcaaggagcagaagacccccgacagcgtgtggaccgccgtgcccgaggacaaggtgcccaagcccagacccggctgctgcgccaagcacggcctggccgaggcctacaagaccagcatcgacttccccgacgagaccctgagcttcatcaagagccaccccctgatggacagcgccgtgccccccatcgccgacgagccctggttcaccaagaccagagtgagatacagactgaccgccatcagcgtggaccacagcgccggcccctaccagaactacaccgtgatcttcgtgggcagcgaggccggcatggtgctgaaggtgctggccaagaccagccccttcagcctgaacgacagcgtgctgctggaggagatcgaggcctacaaccacgccaagtgcagcgccgagaacgaggaggacaagaaggtgatcagcctgcagctggacaaggaccaccacgccctgtacgtggccttcagcagctgcatcatcagaatccccctgagcagatgcgagagatacggcagctgcaagaagagctgcatcgccagcagagacccctactgcggctggctgagccagggcagctgcggcagagtgacccccggcatgctggccgagggctacgagcaggacaccgagttcggcaacaccgcccacctgggcgactgccacgacatggaggtgagcagcagcagcgtgaccaccatggccagcatccccgagatcacccccaaggtgatcgacacctggagacccaagctgaccagcagcagaaagttcgtggtgcaggacgaccccaacaccagcgacttcaccgaccccctgagcggcatccccaagggcgtgagatgggaggtgcagagcggcgagagcaaccagatggtgcacatgaacgtgctgatcacctgcgtgttcgccgccttcgtgctgggcgccttcatcgccggcgtggccgtgtactgctacagagacatgttcgtgagaaagaacagaaagatccacaaggacgccgagagcgcccagagctgcaccgacagcagcggcagcttcgccaagctgaacggcctgttcgacagccccgtgaaggagtaccagcagaacatcgacagccccaagctgtacagcaacctgctgaccagcagaaaggagctgccccccaacggcgacaccaagagcatggtgatggaccacagaggccagccccccgagctggccgccctgcccacccccgagagcacccccgtgctgcaccagaagaccctgcaggccatgaagagccacagcgagaaggcccacggccacggcgccagcagaaaggagaccccccagttcttccccagcagcccccccccccacagccccctgagccacggccacatccccagcgccatcgtgctgcccaacgccacccacgactacaacaccagcttcagcaacagcaacgcccacaaggccgagaagaagctgcagaacatcgaccaccccctgaccaagagcagcagcaagagagaccacagaagaagcgtggacagcagaaacaccctgaacgacctgctgaagcacctgaacgaccccaacagcaaccccaaggccatcatgggcgacatccagatggcccaccagaacctgatgctggaccccatgggcagcatgagcgaggtgccccccaaggtgcccaacagagaggccagcctgtacagcccccccagcaccctgcccagaaacagccccaccaagagagtggacgtgcccaccacccccggcgtgcccatgaccagcctggagagacagagaggctaccacaagaacagcagccagagacacagcatcagcgccatgcccaagaacctgaacagccccaacggcgtgctgctgagcagacagcccagcatgaacagaggcggctacatgcccacccccaccggcgccaaggtggactacatccagggcacccccgtgagcgtgcacctgcagcccagcctgagcagacagagcagctacaccagcaacggcaccctgcccagaaccggcctgaagagaacccccagcctgaagcccgacgtgccccccaagcccagcttcgtgccccagacccccagcgtgagacccctgaacaagtacacctactag

SEQ ID NO: 273325 - DNA, 3165 bp, Artificial Sequence
  derived and/or modified sequence
atgagagtctttctcttgtgcgcctacatcctattactgatggtgagccagttgcgggcagtgtcttttcccgaagacgacgaacctctgaacacagtagattatcactactctaggcaatatcccgtttttagaggcaggccctcgggcaacgaatcccagcaccggttggactttcagcttatgctcaagatcagagatacgctgtatatcgccggccgcgaccaggtctataccgtgaatctgaacgagatgcctaagaccgaagtaataccaaataaaaagctaacctggcgctcacggcagcaggatcgggaaaactgcgcgatgaaaggtaagcataaagacgagtgccacaacttcataaaagttttcgtgcctaggaacgacgagatggtgttcgtgtgcggtaccaacgcctttaatcccatgtgcaggtactaccgcctgagcactcttgagtacgatggtgaggagatcagcggtctggcacgctgcccattcgacgccaggcagacaaacgtggccctgtttgctgacgggaagttatactccgccacggtggcagatttccttgcctctgacgccgtgatctaccgaagcatgggagatggcagcgctctgagaacaatcaaatacgattcaaagtggatcaaggagccccacttcctgcacgcaattgagtacggaaattacgtgtacttcttttttcgtgagatcgccgtggagcataacaaccttggcaaagccgtatactcccgggtggctcgcatctgtaaaaacgatatgggaggttcacagcgcgtgcttgagaaacactggacaagtttcctaaaagcacgcctgaattgttcagttcctggggattcgttcttctactttgatgttctgcagagcataactgatattatccagattaatggaattcctactgtggtgggtgtgtttacaacacagcttaatagcataccgggcagtgcagtctgtgccttctcgatggacgatatcgaaaaggtgtttaaaggaagattcaaggagcagaagaccccggatagcgtatggacggcagtaccggaggacaaagtccccaagccacggccgggctgttgtgccaagcacggactcgccgaagcttataagactagtatcgatttccctgatgaaacactgagctttatcaagtctcatccattgatggattccgctgtgccccccattgctgacgaaccatggtttactaaaacccgcgtgaggtatcggttgacagctatcagtgtagaccacagcgctggtccataccaaaactatactgtaattttcgttggaagtgaggccggtatggtgctaaaagtgctggcaaaaacaagcccatttagcctgaacgattcagtgcttctcgaagaaatagaggcttataatcatgcaaagtgtagcgctgagaatgaggaggacaaaaaagtgatatctctacagctggataaggatcaccacgccctgtacgtggctttttcttcttgtattattagaatacctctttcaaggtgcgaaaggtacggcagttgtaaaaagagctgcattgcctctcgggacccttattgtggttggctctcccaagggtcatgcggccgcgtaacacccggaatgctagccgagggctatgaacaggacaccgaattcggcaacactgctcatctaggggactgccacgacatggaggtgtccagctcctccgtaactaccatggctagcattcctgagataactcccaaagtgatagacacatggcggccaaaactcacgtcaagtcgaaaatttgtggtgcaggacgaccccaacactagtgactttactgatcctctgtccggcatccccaagggggtcagatgggaggtccaatcgggcgagagtaaccagatggtgcatatgaatgtgctcattacatgtgtgttcgccgccttcgtcctcggggcctttatagccggcgtggccgtatattgctaccgtgacatgttcgtacgtaagaatcggaagatccataaagatgctgaaagtgcgcagtcttgtacggactcctctggcagctttgccaaactgaatgggcttttcgacagtcctgtgaaagaataccaacagaacattgacagtccaaaactgtattccaacttactcacttcgcgcaaagagctgccgcctaacggagataccaagtccatggtaatggaccaccggggtcagccccccgagctggctgcactgcccactccagaatctacgccggtgctgcatcaaaagactcttcaggccatgaagtcccacagcgagaaggcccacggccacggcgcctcgagaaaagaaaccccacagttcttcccatcaagcccacctccacattctccgctcagccacggacatattccctcggcaatcgtgctgcccaacgcaacacatgattataacacatcattctctaactctaacgcccataaggccgaaaagaagctgcagaacattgaccaccccctgacaaagagttcctccaaaagagaccatcggcgatcagttgactctagaaatactctaaacgatctcttgaagcatcttaacgatcctaactcaaaccctaaggcaattatgggtgatattcagatggcacatcagaatctgatgttagatccaatgggctctatgtcagaagtgcccccgaaagtgcccaacagggaagccagcctttattcaccaccctccactttgccacggaacagcccaacgaagcgcgtcgatgtccctacgacgcccggggtgcctatgacatctctagagcggcagagggggtatcataagaactcgtcacagaggcacagcatttcagcgatgcctaaaaacttaaacagcccaaatggtgtattgctctctagacagccctccatgaataggggtggctacatgcctacccccaccggagccaaagtcgattatattcagggtacacccgttagcgtccacctccagccctccctgtctcggcagtcttcttacaccagtaatggtactctaccacgtacaggcctgaaacgcacaccctcgcttaaacctgatgtacctcctaagccaagctttgtcccccaaaccccctcagtccgccccttgaataaatacacatattag

SEQ ID NO: 273326 - DNA, 3165 bp, Artificial Sequence
  derived and/or modified sequence
atgagggtcttcctgctgtgtgcctacatcctgctgctgatggtgtcccagctgcgggctgtgtccttcccagaagatgatgagcccctgaacacagtggactaccactacagccggcagtaccctgtgttccggggccggcccagcggaaatgaaagccagcaccggctggacttccagctgatgctgaagatccgggacaccctgtacatcgccggccgggaccaggtgtacacagtgaacctgaatgagatgcccaagacagaggtgatccccaacaagaagctgacctggaggagccggcagcaggaccgggagaactgtgccatgaagggcaagcacaaggatgagtgccacaacttcatcaaggtgtttgtgcccagaaatgatgagatggtgtttgtgtgtggcaccaatgccttcaaccccatgtgccgctactaccgcctgagcaccctggagtatgatggagaggagatcagcggcctggcccgctgcccctttgatgcccggcagaccaacgtggccctgtttgctgatggcaagctgtacagcgccaccgtggccgacttcctggccagtgatgctgtgatctaccgctccatgggagatggcagcgccctgcggaccatcaagtatgacagcaagtggatcaaggagccccacttcctgcacgccattgaatatggcaactacgtgtacttcttcttccgggagattgctgtggagcacaacaacctgggcaaggctgtgtacagccgggtggcccgcatctgcaagaatgacatgggcggcagccagagggtgctggagaagcactggaccagcttcctgaaggcccggctgaactgcagcgtgcctggggacagcttcttctactttgatgtgctgcagagcatcacagacatcatccagatcaatggcatccccaccgtggtgggcgtcttcaccacccagctgaacagcatccctggcagcgctgtgtgtgccttctccatggatgacatcgagaaggtgttcaagggccgcttcaaggagcagaagaccccagacagcgtgtggacagctgtgcctgaggacaaggtgcccaagcccaggcctggctgctgtgccaagcacggcctggccgaggcctacaagaccagcattgacttcccagatgagaccctgtccttcatcaagagccaccccctgatggattctgctgtgccccccatcgcagatgagccctggttcaccaagaccagggtgcgctaccgcctgacagccatctctgtggaccacagcgctggcccctaccagaactacaccgtcatctttgtgggcagcgaggccggcatggtgctgaaggtgctggccaagaccagccccttcagcctgaatgattctgtgctgctggaggagattgaggcctacaaccacgccaagtgcagcgcagaaaatgaggaggacaagaaggtgatcagcctgcagctggacaaggaccaccacgccctgtatgtggccttcagcagctgcatcatccgcatccccctgagccgctgtgaaagatatggcagctgcaagaagagctgcatcgccagccgggacccctactgcggctggctgagccagggcagctgtggccgggtgaccccaggcatgctggccgagggctatgagcaggacacagaatttggaaacacagcccacctgggggactgccacgacatggaggtgagcagcagctctgtgaccaccatggccagcatccctgagatcacccccaaggtgattgacacctggaggcccaagctgaccagcagcaggaagtttgtggtgcaggatgaccccaacaccagtgacttcacagaccccctgagcggcatccccaagggcgtgcgctgggaggtgcagagcggggagagcaaccagatggtgcacatgaatgtgctgatcacctgtgtgtttgctgcctttgtgctgggcgccttcatcgccggcgtggccgtgtactgctacagagacatgtttgtgaggaagaacaggaagatccacaaggatgctgagagcgcccagagctgcacagacagcagcggcagctttgccaagctgaatggcctgtttgacagccctgtgaaggagtaccagcagaacatcgacagccccaagctgtacagcaacctgctgaccagcaggaaggagctgccccccaacggggacaccaagtccatggtgatggaccaccggggccagcccccagagctggccgccctgcccaccccagagagcacccctgtgctgcaccagaagaccctgcaggccatgaagagccacagcgagaaggcccacggccatggagccagcaggaaggagaccccccagttcttccccagcagccccccaccccacagccccctgagccacggccacatccccagcgccatcgtgctgcccaatgccacccatgactacaacaccagcttcagcaacagcaatgcccacaaggccgagaagaagctgcagaacatcgaccaccccctgaccaagagcagcagcaagagggaccacagaagatctgtggacagcaggaacaccctgaatgacctgctgaagcacctgaatgaccccaacagcaaccccaaggccatcatgggagacatccagatggcccaccagaacctgatgctggaccccatgggctccatgtctgaggtgccccccaaggtgcccaaccgggaggccagcctgtacagcccccccagcaccctgcccaggaacagccccaccaagagggtggatgtgcccaccaccccaggagtgcccatgaccagcctggagcggcagaggggctaccacaagaacagcagccagaggcacagcatcagcgccatgcccaagaacctgaacagccccaacggggtgctgctgagccggcagcccagcatgaacagaggaggctacatgcccacccccaccggggccaaggtggactacatccagggcacccctgtgtctgtgcacctgcagcccagcctgagccggcagagcagctacaccagcaatggcaccctgcccaggacaggcctgaagaggacccccagcctgaagccagatgtgccccccaagcccagctttgtgccccagaccccatctgtgcggcccctgaacaagtacacctactag

SEQ ID NO: 273327 - DNA, 3165 bp, Artificial Sequence
  derived and/or modified sequence
atgcgggtgttcctgctgtgcgcctacatcctgctgctgatggtgagccagcttagagcagtgagtttccccgaggacgacgaacctctgaatactgtggactatcactacagccgccaatatcccgtctttaggggacgaccctcagggaacgaatcacaacacaggctcgacttccaactcatgcttaaaatcagggataccttgtacatcgctggacgagatcaggtgtacaccgtgaatctaaacgagatgcctaagacagaggtcattcccaacaagaagctgacatggaggagtagacagcaggatcgggaaaactgtgctatgaaagggaagcacaaagacgaatgccataattttatcaaggttttcgtcccgagaaacgacgagatggttttcgtgtgcggcacaaatgcctttaaccctatgtgcagatattaccgattgagcaccctagaatatgatggtgaggagatctcagggttggcaagatgtcccttcgatgcccggcagacaaacgtcgccctctttgcagacggcaagctgtattcagcgacagtggctgattttctggcctcggatgcagtcatttacaggtctatgggagacgggtctgctctgaggacgataaagtatgattcgaagtggattaaagaaccccactttcttcatgccatagagtatgggaattatgtctacttcttctttcgggagattgccgtagaacataacaacctgggcaaagcagtgtacagccgcgttgcccgcatttgcaaaaatgatatgggagggagtcagagagtgctagagaagcactggactagctttcttaaggcccgcctgaactgctccgtgcccggcgactcatttttttacttcgatgttctgcagtctatcacagatatcattcagatcaatggaatcccaacagtggtgggcgttttcaccactcagctgaactccatccctggctctgcagtctgcgccttctctatggatgacatcgagaaggttttcaagggcaggtttaaggagcagaaaacccctgactctgtgtggacggccgtcccggaagacaaggtgcccaagccccgaccaggatgttgcgccaagcatggtctagccgaggcttacaagacttccatcgacttcccagacgaaacactgtccttcatcaagtcccacccccttatggactcggctgttcctcccattgctgacgagccttggtttaccaagactcgagtaagataccgattaacagccatttctgttgaccattccgctggaccgtatcagaattatactgtgatcttcgttgggtccgaggccgggatggtgctgaaggttttggctaagacgagccctttttctctaaacgatagtgttctcctagaagagattgaagcatataatcacgccaagtgcagcgccgagaatgaggaagacaaaaaggtaatctctctgcaactggataaggaccatcacgccttgtacgtagcctttagtagctgtatcataaggatccccttgtcccgttgtgagcgctacgggagctgtaagaagtcttgcatagccagcagggatccttactgcggttggctgtcacaaggatcctgcggtagagtgactccaggaatgttagcagaaggttacgaacaagacacagagtttgggaacaccgctcacctgggggactgccacgacatggaggttagctcatccagcgttacgaccatggcgtcaatacctgaaattacacctaaggttattgacacctggaggcccaagttgaccagctctcggaagtttgtggtgcaggacgatcccaataccagtgacttcaccgacccgctgtccggtatccctaagggagtgcgctgggaagtacagagcggtgaaagtaaccagatggtgcacatgaacgtgctgattacctgtgtgtttgcagcctttgttctgggggctttcatcgccggggtggctgtgtattgttatagagatatgttcgtgaggaaaaatcggaaaatacacaaagatgccgagtctgcacagagctgcaccgactctagtggctcctttgccaaactgaatggcttgttcgactccccagtgaaggagtaccagcagaatatagactccccgaagctttactccaacctgctcactagccggaaagagctgcctcccaacggtgacaccaaatctatggtcatggatcaccgcggtcaacctcccgagttggccgcgttacctactccagaatctaccccagtgctgcatcagaagacgctccaggcaatgaaatctcacagcgaaaaggcccacggtcacggcgcctctcgcaaagagacccctcaattttttccttcatctccccccccacacagtcctctgagccatgggcacattccgagcgccattgtgctgcctaatgccacccatgactacaatacatcattcagcaattccaacgcacacaaagccgagaaaaagctccagaatatcgatcacccattaacaaaaagttcctccaaacgagaccaccggagatctgtcgacagccgcaatacccttaatgacctgcttaaacacctgaacgatcccaattccaatcctaaagcaattatgggcgatatccagatggctcatcaaaacctcatgctcgatcctatggggtctatgagcgaggtgccccctaaagtgccaaaccgtgaggctagcctttactctccgccaagtaccttgccgagaaatagcccaaccaagcgagtggatgtgcccacaacacccggggtgcccatgactagcctcgaaagacagcgcgggtaccataagaattcatcccaacgacatagcatttccgcgatgccaaaaaacctcaacagtcccaatggagtccttttatcaaggcagccctctatgaatcgcgggggttacatgcccactccaacgggagccaaagtggactatatacagggcacacccgtatccgtgcatcttcagccctcgctgtctaggcagagttcatacacctcaaatggcacgcttccacgaacaggcctcaagcgcactccctcactgaaacccgacgtccccccaaaaccttcattcgtgccacaaactccctctgtgcggcctctgaacaagtatacatactag

SEQ ID NO: 273328 - DNA, 3165 bp, Artificial Sequence
  derived and/or modified sequence
atgagggtgttcctcctctgtgcctatattttactcctgatggtcagccagttgagagctgttagtttccctgaggacgacgaaccgctcaataccgtcgactaccactacagcaggcaataccccgtcttccggggaagaccatctggcaacgaaagtcaacaccggctcgactttcagctgatgctgaagattagggacacgctttacatcgccggtagagaccaggtctacacagtcaacctgaatgagatgccaaagaccgaggttattccaaacaagaagctcacatggcggagcagacaacaggatcgggaaaattgtgcaatgaaagggaaacacaaagacgagtgccacaatttcatcaaagtgtttgttccacgtaatgacgagatggtcttcgtatgtggcaccaacgcattcaacccaatgtgtcgctactaccgcttatccaccctcgagtacgatggggaggagatctctggactggctagatgcccgttcgatgcccgacagaccaacgtggccctgtttgcagacgggaagctatatagtgctaccgtcgccgattttctcgcctcggatgcggtgatctacagaagcatgggagacggctctgccttgcgcactatcaagtacgacagcaaatggatcaaagagccacactttttacatgccatcgaatacggaaattacgtgtacttcttctttcgtgaaatcgcagtcgaacacaacaaccttggaaaggcagtttattcaagggtggcccgtatttgcaaaaatgacatgggcggatcccaacgcgtccttgaaaagcactggacctccttcctgaaggcgaggctcaattgtagtgttcccggtgattcttttttttactttgacgtcttgcagtcaatcacggacattatacagattaatggcattccaaccgttgtgggcgtcttcacaacacagctgaacagcataccagggagcgctgtttgtgcattctccatggacgatatcgagaaggtgttcaaagggagattcaaagaacaaaaaaccccagactcagtttggactgccgtgcctgaggacaaggttcctaagcctagacctggatgctgcgcgaagcacggcctggcagaagcatacaagacctccattgactttccggatgagaccttgtcgttcataaagagtcatccattaatggattcggccgtcccacctatcgcggatgagccgtggttcacaaagactcgagtgaggtataggttgacagctatcagcgtcgaccactctgctgggccttaccagaactatacagtgatatttgtcggcagtgaggctggaatggtgttgaaagtgctggctaaaacctccccgttcagcctgaacgactccgttctgctggaggaaattgaagcctacaaccacgctaaatgctccgctgaaaacgaggaggacaaaaaggtgataagcttacaattggataaggaccaccacgccctttacgtagccttcagctcatgcatcattcggatacctctctcccggtgtgagagatatggatcctgcaagaaatcatgcattgcctctcgggacccgtactgcggttggttaagtcagggatcctgcgggagggtcacccctgggatgctcgcagaaggctatgaacaagataccgaattcggcaatactgcgcacctgggggattgtcacgacatggaggttagttcgagttccgtgacaaccatggcctccatccctgagattacgcccaaggtcatcgacacttggagaccaaagttaactagttcccgcaagttcgtggtgcaggacgatcctaacactagcgacttcactgatcccctttccggcatacccaagggagtacgctgggaggtgcaatcaggcgaatcaaaccagatggtgcatatgaacgtgctcatcacatgcgtgtttgcggctttcgtgcttggcgcatttatcgcaggggtcgcagtgtattgttatagagatatgtttgttagaaaaaacagaaagattcataaagatgctgagagtgcccaatcatgcaccgattccagcggttcttttgccaaactgaatggcctgttcgacagtcccgtcaaagaataccaacagaatatcgatagccccaagctgtattccaatctgctcactagtcgtaaggagttgccaccaaatggcgatactaagtcgatggttatggatcacagggggcagccacccgagctggctgctctgcctacacctgagagcaccccagtgctacaccagaagactttacaggcgatgaagtcccacagcgagaaagcacacggacatggagcatccagaaaggaaacaccccaattctttccaagttccccacctccccactcacccctgtctcatggacacatacctagcgcaattgtgctgcccaatgcaacccacgactacaacacttctttttccaactcaaacgctcacaaggcagaaaaaaagcttcagaatatcgatcatcccctgacaaaatcttcctcaaaacgagaccaccgtagatccgtggactcccgcaacacactgaatgacctcttgaagcacctgaacgaccccaatagtaaccccaaagctatcatgggggatatacaaatggcccatcagaacctaatgctcgaccccatgggatcaatgagcgaagtcccacccaaggtgcctaatagggaggcgagtttatactcccccccttctacgcttccaagaaacagccctaccaagagagtcgacgtgcctactacaccaggggtccccatgacgagtctggagcgacaacggggataccataaaaacagctctcaaaggcactccatctccgctatgcccaaaaatctcaactcccccaatggcgtgctgttaagtcggcagccgtcaatgaaccggggaggatatatgcctacaccaaccggggctaaagttgactacatacaaggtacgcccgtgagcgtgcacctgcaaccttccctgtcaagacagtcttcttatacatccaacggcaccctccctcggaccgggctcaagagaaccccctctctgaagccagatgtgccccctaagccatcatttgtgccccagactccctcagtgagaccgctaaataaatacacctactag

SEQ ID NO: 273329 - DNA, 6039 bp, Artificial Sequence
  derived and/or modified sequence
gcggccgcttcccaccgtccctctccccttactggcagagcgcgctgcgggcggactcccgggcccggagcagcccaccggccaccccaccgcccacccggctcccggtgtctcctcccggccgctctacccagcaactttccgtgctttgttccccgactggaaatgctttacggaagcgtcttggacagggtctccgccaggcgacaagagctcggtgctgagatgtgttacgttctcatctccccatcaattatggatggaaacaaataaggaagagtcaattttgctgagccccttctccggcaacgagaggcgttctgcagccgggagggagccgccgctcgcgccggcagccgctggcaggggcatggtgaggaggaaggtagctcagtggcatttctgagcaggggccaccctgacttcaccttggcccaccatgagggtcttcctgctttgtgcctacatactgctgctgatggtttcccagttgagggcagtcagctttcctgaagatgatgaaccccttaatactgtcgactatcactattcaaggcaatatccggtttttagaggacgcccttcaggcaatgaatcgcagcacaggctggactttcagctgatgttgaaaattcgagacacactttatattgctggcagggatcaagtttatacagtaaacttaaatgaaatgcccaaaacagaagtaatacccaacaagaaactgacatggcgatcaagacaacaggatcgagaaaactgtgctatgaaaggcaagcataaagatgaatgccacaactttatcaaagtatttgttccaagaaacgatgagatggtttttgtttgtggtaccaatgcattcaatcccatgtgtagatactacaggttgagtaccttagaatatgatggggaagaaattagtggcctggcaagatgcccatttgatgccagacaaaccaatgttgccctctttgctgatgggaagctgtattctgccacagtggctgacttcttggccagcgatgccgttatttatcgaagcatgggtgatggatctgcccttcgcacaataaaatatgattccaaatggataaaagagccacactttcttcatgccatagaatatggaaactatgtctatttcttctttcgagaaatcgctgtcgaacataataatttaggcaaggctgtgtattcccgcgtggcccgcatatgtaaaaacgacatgggtggttcccagcgggtcctggagaaacactggacttcatttctaaaggctcggctgaactgttctgtccctggagattcgtttttctactttgatgttctgcagtctattacagacataatacaaatcaatggcatccccactgtggtcggggtgtttaccacgcagctcaatagcatccctggttctgctgtctgtgcatttagcatggatgacattgaaaaagtattcaaaggacggtttaaggaacagaaaactccagattctgtttggacagcagttcccgaagacaaagtgccaaagccaaggcctggctgttgtgcaaaacacggccttgccgaagcttataaaacctccatcgatttcccggatgaaactctgtcattcatcaaatctcatcccctgatggactctgccgttccacccattgccgatgagccctggttcacaaagactcgggtcaggtacagactgacggccatctcagtggaccattcagccggaccctaccagaactacacagtcatctttgttggctctgaagctggcatggtacttaaagttctggcaaagaccagtcctttctctttgaacgacagcgtattactggaagagattgaagcctacaaccatgcaaagtgcagtgctgagaatgaggaagacaaaaaggtcatctcattacagttggataaagatcaccacgctttatatgtggcgttctctagctgcattatccgcatccccctcagtcgctgtgagcgttatggatcatgtaaaaagtcttgtattgcatctcgtgacccgtattgtggctggttaagccagggatcctgtggtagagtgaccccagggatgcttgctgaaggatatgaacaagacacagaattcggcaacacagctcatctaggggactgccatgacatggaggtatcttcatcttctgttaccacaatggcaagtatcccagaaatcacacctaaagtgattgatacctggagacctaaactgacaagctctcggaaatttgtagttcaagatgatccaaacacttctgattttactgatcctttatcgggtatcccaaagggtgtacgatgggaagtccagtctggagagtccaaccagatggtccacatgaatgtcctcatcacctgtgtctttgctgcttttgttttgggggcattcattgcaggtgtggcagtatactgctatcgagacatgtttgttcggaaaaacagaaagatccataaagatgcagagtccgcccagtcatgcacagactccagtggaagttttgccaaactgaatggtctctttgacagccctgtcaaggaataccaacagaatattgattctcctaaactgtatagtaacctgctaaccagtcggaaagagctaccacccaatggagatactaaatccatggtaatggaccatcgagggcaacctccagagttggctgctcttcctactcctgagtctacacccgtgcttcaccagaagaccctgcaggccatgaagagccactcagaaaaggcccatggccatggagcttcaaggaaagaaacccctcagttttttccgtctagtccgccacctcattccccattaagtcatgggcatatccccagtgccattgttcttccaaatgctacccatgactacaacacgtctttctcaaactccaatgctcacaaagctgaaaagaagcttcaaaacattgatcaccctctcacaaagtcatccagtaagagagatcaccggcgttctgttgattccagaaataccctcaatgatctcctgaagcatctgaatgacccaaatagtaaccccaaagccatcatgggagacatccagatggcacaccagaacttaatgctggatcccatgggatcgatgtctgaggtcccacctaaagtccctaaccgggaggcatcgctatactcccctccttcaactctccccagaaatagcccaaccaagcgagtggatgtccccaccactcctggagtcccaatgacttctctggaaagacaaagaggttatcacaaaaattcctcccagaggcactctatatctgctatgcctaaaaacttaaactcaccaaatggtgttttgttatccagacagcctagtatgaaccgtggaggatatatgcccacccccactggggcgaaggtggactatattcagggaacaccagtgagtgttcatctgcagccttccctctccagacagagcagctacaccagtaatggcactcttcctaggacgggactaaagaggacgccgtccttaaaacctgacgtgccaccaaagccttcctttgttcctcaaaccccatctgtcagaccactgaacaaatacacatactaggcctcaagtgtgctattcccatgtggctttatcctgtccgtgttgttgagaggatgatgttgtaagggtaccttaaaacaagagactcgcttgtattttaagagaaccaagtggccaaagaaactctttctaactttggcaacatcagaacttgccacatgtagctactgcagcaaggcttctgtgtacttgcctgaaaacaaaggaaggtgctggtcattccatttcttttgtttgaagctaaagagatgtgtagctcacaggggctaccttaccagtataaagagctgataacagtactcagaagaatctgtgaacaaatacttgaaaatgggttcaatgtagactgccattatgtgtggtcttcccattaaatgtgaacattttaatatgtatgcattcaccttgcctcttgcacaaatgtcaaaaaaaagatggtaatatctcaaagaaatgaacttgtagattaccaagcagtttgctaaaaattcaatctttgacccaagctgtagcatttttttttcatgtgtggcatctttttcatgccaccaacaaacttgttgtgtgtgtgcgtgtgtgtgtgtgtgtgtgtgtgtgtgtgtgtgttctgtacccactaggatttgtttaggtgcccattgcatctttttgtgctatggagttgtttacattaagcatgaccgaacgagagacaatactatttcccacaggagtccattgggttcagctttgaaagaggaatagaatcgaggctcctttgaccatcaaaatgatgaactttacttatgtggtacccaatgccagaatgtaagagttgcaagtgattttgtgctgctattcattaaaacttgtattccagtcttgccagcttaaggagatcaagatattaagaggtatccttgatttattttccagtattcagtagtaaaattttcctgtccactgtgaatcaaagcctgagtcactctatttaaccttggacacactaataaggttttattttgattgtgttcgtttccccccccccaatagtaaaatttctcctcctttaactcctcctaccccccaaggtaagaaacaaaaaacaaacaaacaaacaaaaatagaagacaaaagaaagacatatgaaaggaattgtaattggcttaacagaaacagtctgtaaaaacctaacagtggtgcaatcatgttgtctgtgttgtgttatgtgagaattttctcctaagtcatgcaggtaatgacaatatactgtaaataccacatgtgagtttacctgaatctgtgcattttgtgccttattcatgagaatgatagaagtactaaaatctgtcaagtgttttcagtatagcacattatttactgagtgccagttgtaaatgtttttcaaccagcacctaaaaagactcttttcaaaaaatcacagaaacaacctaggacaattatttgttacataatccgacctcatagcagcattacattctttgccgtgataaacattccactcctgctttcctaaggatgaaacagtgataatgtgaactcaaatgaggtttcctgggtaatgtgacacctgcagaaactatagagcgtcatttatacgtagtttggcagaaaccacttacggctgatgatgcgcaaccctgctgactgtttcagttaatatgctgcacaccacacacttgtttagtgaaccaaatctagaaagtaccaaggcagaggtatgctcctgctgtaatcaggcaaatgagttcaactggatttcttttgacaatactgttggtacctattacttgggggaggacatgttgcagaagaccagatcatttttatacagaatgtgaaatactgatacagttattcttttttttaaagaacattgttttataaagaacgtgatttccagtgatctctggaagcgctaaagctaaaatttctgttcttgaaacacttcagctttgcaactaaaatattacagattaataataaattaaaccaaccaatgataaacactactcagtccaccaacaacaaacgtgtttgaattcaccttaccaatattaatcccagcgtgtgtaaaacagaacagtaactctatgtgaccccagataacattttgtaacattgtgcttccttgtagtttgtaatgtgagttcaatcagtatttatgttgaaatttctaacattaaatctagtctctatcctgttaatttaatttttaaatgctttatccatttgtgcaaaggtaaacgcagattgtatcttttttaatggtacggcataaaaagtaaccctcaagtgaagtgtctctatactgttttatagagtactttaacatgaatagataccttgtaaacttgtattgtggatgtgtaaataatatgtactttgggtttttaacaccgcatgtaaagtcaaaataaaatatacaaatcatt

SEQ ID NO: 273330 - protein, 343 aa, Artificial Sequence
  derived and/or modified sequence
MATLGHTFPFYAGPKPTFPMDTTLASIIMIFLTALATFIVILPGIRGKTRLFWLLRVVTSLFIGAAILAVNFSSEWSVGQVSTNTSYKAFSSEWISADIGLQVGLGGVNITLTGTPVQQLNETINYNEEFTWRLGENYAEEYAKALEKGLPDPVLYLAEKFTPRSPCGLYRQYRLAGHYTSAMLWVAFLCWLLANVMLSMPVLVYGGYMLLATGIFQLLALLFFSMATSLTSPCPLHLGASVLHTHHGPAFWITLTTGLLCVLLGLAMAVAHRMQPHRLKAFFNQSVDEDPMLEWSPEEGGLLSPRYRSMADSPKSQDIPLSEASSTKAYCKEAHPKDPDCAL

SEQ ID NO: 273331 - DNA, 1032 bp, Artificial Sequence
  derived and/or modified sequence
atggcaaccttgggacataccttcccattctatgccgggccaaagcccacctttccaatggacaccacattggctagtattatcatgatattcctcactgctctcgcaactttcatcgtaatcttgcctggcatacgcgggaagacccggcttttctggcttcttcgtgtagtgacctctctgttcattggggccgccatcctggctgtgaatttcagcagcgagtggtctgtggggcaagtgtctactaacacctcctataaggccttttcttcagagtggatttctgccgatatcggtctgcaagtggggttgggaggcgtgaatatcacactgaccggaacccctgtgcagcagttgaatgaaacaattaattataacgaagagtttacatggcgtctaggcgagaactatgccgaagagtatgccaaggcacttgaaaagggactgcctgatcccgtgctgtacttggccgaaaaattcacacctcgatcgccttgtggtctgtatcgacagtaccgcctcgccggtcactatacatcagctatgctgtgggtggcctttctgtgctggcttctggccaacgtgatgctgagtatgccagtgctcgtctatgggggctacatgctgcttgcaactggcatctttcaactcctggccctgcttttcttttctatggccaccagcctcacaagcccttgtcctcttcaccttggcgcgtctgtcctgcacacccaccacggtcccgccttttggatcaccctcaccactggtctcctttgtgtgctgctgggactcgcgatggctgtagcacaccgtatgcagccccaccggttgaaagccttctttaaccagtctgtagatgaggatcctatgctggagtggtctcccgaggaggggggtcttctgtcacctcggtaccgcagcatggctgacagcccgaagtcccaggatattccgctctctgaggcgtcttccaccaaggcctactgtaaggaggcgcaccccaaagatcccgattgcgcattgtag

SEQ ID NO: 273332 - DNA, 1032 bp, Artificial Sequence
  derived and/or modified sequence
atggccaccctgggccacaccttccccttctacgccggccccaagcccaccttccccatggacaccaccctggccagcatcatcatgatcttcctgacagccctggccaccttcatcgtcatcctgcccggcatccggggcaagaccaggctcttctggctgctgcgggtggtgaccagcctcttcatcggggccgccatcctggccgtgaacttcagcagcgagtggagcgtgggccaggtgtccaccaacaccagctacaaggccttcagcagcgagtggatctctgctgacatcggcctgcaggtgggcctgggcggcgtgaacatcaccctgaccggcacccctgtgcagcagctgaatgagaccatcaactacaatgaggagttcacctggaggctgggggagaactatgcagaggagtatgccaaggccctggagaagggcctgcctgaccctgtgctgtacctggccgagaagttcacccccaggagcccctgtggcctgtaccggcagtaccgcctggccggccactacaccagcgccatgctgtgggtggccttcctgtgctggctgctggccaacgtgatgctgtccatgcctgtgctggtgtatggaggctacatgctgctggccaccggcatcttccagctgctggccctgctcttcttctccatggccaccagcctgaccagcccctgccccctgcacctgggcgcctctgtgctgcacacccaccacggccctgccttctggatcaccctgaccaccggcctgctgtgtgtgctgctgggcctggccatggctgtggcccacaggatgcagccccaccggctgaaggccttcttcaaccagagcgtggatgaggaccccatgctggagtggagccctgaggagggcggcctgctgagcccccgctaccgctccatggctgacagccccaagagccaggacatccccctgtctgaggccagcagcaccaaggcctactgcaaggaggcccaccccaaggaccctgactgtgccctgtag

SEQ ID NO: 273333 - DNA, 1032 bp, Artificial Sequence
  derived and/or modified sequence
atggccaccctgggccacaccttccccttctacgccggccccaagcccactttcccaatggacaccacactggcatccatcatcatgatctttctcacagcgctggccacattcatcgttatccttcctggcatcaggggaaaaaccaggttgttctggctgttaagggtagttacttccttgtttatcggcgccgcaatcttggctgtcaattttagttccgaatggagcgtgggtcaggtttcgaccaacacctcttacaaggcctttagtagcgagtggatctcggctgatatcggtcttcaggttggccttggtggagtcaatatcaccttgaccggcacccctgtgcaacagctcaatgaaaccatcaactataatgaggaattcacatggaggctgggggaaaattacgccgaggaatatgctaaggctttagagaaaggactccccgatcccgtcctgtatctggctgagaagtttaccccccgaagcccctgtggcctctaccggcagtaccgactggctggccattacacgagcgctatgctgtgggtcgcgttcctgtgttggctgcttgccaatgtgatgctttccatgccagtcttagtgtacgggggctacatgctgctggctaccggaatttttcaattgctggccctactgttcttttcaatggctacctccttgacttcaccttgtccccttcatctgggcgcctccgtgttacacacccatcacggcccggctttctggatcactctcacaaccggcctgttgtgtgtcctgttaggattggctatggcagtggctcatcgcatgcagccacaccgcctcaaagcttttttcaaccagtcagtagatgaagaccccatgctggagtggtcacctgaagaggggggcctcttgtctccaagataccgatccatggcggacagccccaaatcccaggacatccccctcagtgaagcatcttccacaaaggcatactgcaaggaagcccatcccaaagacccagactgcgcactttag

SEQ ID NO: 273334 - DNA, 1032 bp, Artificial Sequence
  derived and/or modified sequence
atggccactctaggccacacattccccttctacgccggtcccaagcccaccttccccatggacacaaccttagcctcgattatcatgatcttcctcacagctctggccactttcatagtaatccttcccggaatccgcggaaagaccaggctgttttggcttttgcgggtggtcactagcctctttattggtgccgctattctcgccgtgaacttcagctctgaatggtctgtgggtcaggtgagcactaatacttcttataaggctttctcatccgagtggatttccgcggatattggcctacaggttggtttgggaggagtcaacatcacccttacgggaacaccagtgcagcaacttaatgaaacaatcaattataacgaggaattcacatggcgattgggcgagaattacgcagaggagtacgccaaagccttggagaaaggcctccccgatccagtgctctacctcgcagagaagttcacccctcgctccccctgtggcttgtaccggcagtaccgcctcgccggacactataccagtgccatgctatgggtggccttcctgtgttggctcctggcaaacgtgatgctgtccatgcctgtcctcgtatacggaggctacatgctcctggccaccggtatttttcagctcttagcattgttgttttttagcatggcaacatcactgacctcgccatgtcccctgcatctcggagccagcgtactgcacacccaccacggtcccgctttttggatcaccctcacgactgggctgctctgtgtgcttctgggtctggccatggctgtcgctcaccggatgcaaccgcatagacttaaagcctttttcaatcagtccgtggatgaagatccaatgttggaatggtcacccgaagaagggggtttactttctcctcggtaccgatctatggcggattcacccaagagccaggatattcctctatctgaggcctccagcacaaaggcatattgtaaggaggcccacccgaaggaccccgactgcgcgctatag

SEQ ID NO: 273335 - DNA, 1032 bp, Artificial Sequence
  derived and/or modified sequence
atggccaccctgggccacaccttccccttctacgccggccccaagcccaccttccccatggacaccaccctggccagcatcatcatgatcttcctgaccgccctggccaccttcatcgtgatcctgcccggcatcagaggcaagaccagactgttctggctgctgagagtggtgaccagcctgttcatcggcgccgccatcctggccgtgaacttcagcagcgagtggagcgtgggccaggtgagcaccaacaccagctacaaggccttcagcagcgagtggatcagcgccgacatcggcctgcaggtgggcctgggcggcgtgaacatcaccctgaccggcacccccgtgcagcagctgaacgagaccatcaactacaacgaggagttcacctggagactgggcgagaactacgccgaggagtacgccaaggccctggagaagggcctgcccgaccccgtgctgtacctggccgagaagttcacccccagaagcccctgcggcctgtacagacagtacagactggccggccactacaccagcgccatgctgtgggtggccttcctgtgctggctgctggccaacgtgatgctgagcatgcccgtgctggtgtacggcggctacatgctgctggccaccggcatcttccagctgctggccctgctgttcttcagcatggccaccagcctgaccagcccctgccccctgcacctgggcgccagcgtgctgcacacccaccacggccccgccttctggatcaccctgaccaccggcctgctgtgcgtgctgctgggcctggccatggccgtggcccacagaatgcagccccacagactgaaggccttcttcaaccagagcgtggacgaggaccccatgctggagtggagccccgaggagggcggcctgctgagccccagatacagaagcatggccgacagccccaagagccaggacatccccctgagcgaggccagcagcaccaaggcctactgcaaggaggcccaccccaaggaccccgactgcgccctgtag

SEQ ID NO: 273336 - protein, 314 aa, Artificial Sequence
  derived and/or modified sequence
MSVSGLKAELKFLASIFDKNHERFRIVSWKLDELHCQFLVPQQGSPHSLPPPLTLHCNITESYPSSSPIWFVDSEDPNLTSVLERLEDTKNNNLLRQQLKWLICELCSLYNLPKHLDVEMLDQPLPTGQNGTTEEVTSEEEEEEEEMAEDIEDLDHYEMKEEEPISGKKSEDEGIEKENLAILEKIRKTQRQDHLNGAVSGSVQASDRLMKELRDIYRSQSYKTGIYSVELINDSLYDWHVKLQKVDPDSPLHSDLQILKEKEGIEYILLNFSFKDNFPFDPPFVRVVLPVLSGGLVHPSKGRWLNVLTVVCLD

SEQ ID NO: 273337 - DNA, 945 bp, Artificial Sequence
  derived and/or modified sequence
atgagcgtgagcggcctgaaggccgagctgaagttcctggccagcatcttcgacaagaaccacgagagattcagaatcgtgagctggaagctggacgagctgcactgccagttcctggtgccccagcagggcagcccccacagcctgcccccccccctgaccctgcactgcaacatcaccgagagctaccccagcagcagccccatctggttcgtggacagcgaggaccccaacctgaccagcgtgctggagagactggaggacaccaagaacaacaacctgctgagacagcagctgaagtggctgatctgcgagctgtgcagcctgtacaacctgcccaagcacctggacgtggagatgctggaccagcccctgcccaccggccagaacggcaccaccgaggaggtgaccagcgaggaggaggaggaggaggaggagatggccgaggacatcgaggacctggaccactacgagatgaaggaggaggagcccatcagcggcaagaagagcgaggacgagggcatcgagaaggagaacctggccatcctggagaagatcagaaagacccagagacaggaccacctgaacggcgccgtgagcggcagcgtgcaggccagcgacagactgatgaaggagctgagagacatctacagaagccagagctacaagaccggcatctacagcgtggagctgatcaacgacagcctgtacgactggcacgtgaagctgcagaaggtggaccccgacagccccctgcacagcgacctgcagatcctgaaggagaaggagggcatcgagtacatcctgctgaacttcagcttcaaggacaacttccccttcgacccccccttcgtgagagtggtgctgcccgtgctgagcggcggcctggtgcaccccagcaagggcagatggctgaacgtgctgaccgtggtgtgcctggactag

SEQ ID NO: 273338 - DNA, 945 bp, Artificial Sequence
  derived and/or modified sequence
atgtccgtcagtggcctgaaggcggagctgaagttccttgcgtcaatattcgataagaatcacgagaggttccgcatcgttagttggaaactggacgagctccattgccagtttttagtacctcaacagggctcgccccatagcctgccacccccattgaccctacattgtaatattaccgaatcgtaccctagttctagccctatctggtttgtggacagcgaggacccgaacctaacaagcgtgctcgaacggctcgaagatacaaagaacaataacttgctgagacagcaactgaagtggctgatatgtgaattatgttcgctgtataatctgcctaagcacttagacgtcgaaatgctcgaccagcctctccccacaggtcaaaacggaaccactgaggaggtgacctctgaggaggaggaggaggaagaggaaatggccgaggacatcgaagacttggaccattacgagatgaaagaggaggaaccaatttccggaaagaagagcgaagatgagggcattgagaaggaaaatctggccatcctcgaaaaaatccggaagactcaaaggcaggaccacctcaacggagctgtaagcggcagcgtgcaggctagcgatcgcctgatgaaagagctgcgggacatctacagatcccagtcttacaagactggaatctactctgtcgaacttattaacgacagtttatacgattggcatgtaaaactgcagaaagtggaccctgacagccctctgcactcggatctgcaaattctcaaagagaaggagggcattgagtacatcctccttaacttctcttttaaggataattttcccttcgatccccccttcgtacgcgtggtgctccccgtattgagtggaggactggtgcacccatctaaaggacgctggctgaacgtactgacggttgtgtgtcttgattag

SEQ ID NO: 273339 - DNA, 945 bp, Artificial Sequence
  derived and/or modified sequence
atgtctgtgtctggcctgaaggccgagctgaagttcctggccagcatctttgacaagaaccacgagcgcttccgcatcgtgtcctggaagctggatgagctgcactgccagttcctggtgccccagcagggcagcccccacagcctgcccccacccctgaccctgcactgcaacatcacagagagctaccccagcagcagccccatctggtttgtggacagcgaggaccccaacctgacctctgtgctggagcggctggaggacaccaagaacaacaacctgctgcggcagcagctgaagtggctgatctgtgagctgtgcagcctgtacaacctgcccaagcacctggatgtggagatgctggaccagcccctgcccaccggccagaatggcaccacagaggaggtgaccagcgaggaggaggaggaggaggaggagatggctgaagatattgaggacctggaccactatgagatgaaggaggaggagcccatcagcggcaagaagtcagaagatgagggcatcgagaaggagaacctggccatcctggagaagatcaggaagacccagaggcaggaccacctgaatggagctgtgtctggctctgtgcaggccagtgaccggctgatgaaggagctgcgggacatctaccgcagccagagctacaagacaggcatctacagcgtggagctgatcaatgacagcctgtatgactggcacgtgaagctgcagaaggtggaccctgacagccccctgcacagcgacctgcagatcctgaaggagaaggagggcatcgagtacatcctgctgaacttctccttcaaggacaacttcccctttgaccccccatttgtgcgggtggtgctgcctgtgctgagcggcggcctggtgcaccccagcaagggccgctggctgaatgtgctgactgtggtgtgcctggactag

SEQ ID NO: 273340 - DNA, 945 bp, Artificial Sequence
  derived and/or modified sequence
atgagcgtgagcggcctgaaggccgagctgaagttcctggccagcatttttgacaagaatcatgaacgattccggatcgtatcctggaaactggacgagttgcattgccaatttctggtgccccagcagggcagcccgcactccctcccgccccccctgacactgcactgcaatattacagaaagttacccctcatcttcacccatctggttcgtggattccgaggacccaaatttaacctcagttctcgaacgtcttgaggacaccaaaaataataatctgctgaggcagcagctcaagtggttgatctgcgagctttgctccctttacaatctgcccaaacacctggatgtcgaaatgctggatcagccactacccactggccagaatggaacgactgaggaagtgacttccgaggaagaagaagaggaggaagaaatggccgaggatattgaggacctggaccactatgaaatgaaagaggaggaacctatctcagggaaaaagtccgaagacgagggcattgaaaaggaaaacctggccatactggaaaaaatccggaagactcagagacaggaccaccttaacggtgcggtcagtgggtctgtccaggcctccgatcgactgatgaaggagctgcgggatatctaccgatcacaaagctacaagacggggatttattccgtggagcttatcaatgattccctttacgattggcacgtaaaattacagaaggtggatccagacagcccactccacagtgatctccaaatactgaaagagaaagagggcattgagtacattctgctaaatttcagcttcaaagataatttccccttcgacccacccttcgtgcgagtggttctcccagttctgtcaggaggcctggtacacccttcaaaaggccgctggcttaatgtcttgactgtagtgtgcttggactag

SEQ ID NO: 273341 - DNA, 945 bp, Artificial Sequence
  derived and/or modified sequence
atgtcagtctccggtctgaaggccgagctgaagttcctggcctcaatctttgataagaaccacgaaaggtttcgaatagtcagctggaaacttgatgagttacattgccagtttcttgtgccacagcaggggtctccacacagcttgcctccacctctcacactccattgcaacattactgaatcttaccctagttcctcgcccatctggtttgtcgattccgaggatcccaacctcactagcgtcctggagagactggaggacacaaagaacaacaatctgctgaggcagcagctgaagtggctgatatgcgaactttgctccctgtacaatctgccaaagcaccttgacgtggagatgctggaccagcctctcccaactggccagaacggaaccaccgaggaggtcacctcggaggaggaggaggaagaagaagagatggcagaagatattgaagacctggaccactatgagatgaaagaagaagaaccaatcagtggcaaaaagagcgaggatgagggaatcgaaaaagaaaacctggccattctcgagaaaatacggaagactcagcgccaggatcatttaaatggggctgttagcggctccgtgcaggcgagcgatcgactgatgaaggagctgcgcgatatctatcgcagccaatcatacaaaactgggatatattccgtggaactgattaatgatagtctgtatgattggcatgttaagctacaaaaagtggaccccgactcccctcttcactccgatcttcagatcctgaaagagaaggagggaatcgaatacatcctgttgaatttctccttcaaggacaacttcccatttgatccccctttcgtgcgagtcgttctgcctgtgctctctggcggactagtccacccctcgaagggcagatggctcaacgtcctgaccgtcgtgtgtctggactag

SEQ ID NO: 273342 - DNA, 2883 bp, Artificial Sequence
  derived and/or modified sequence
cggccgggcgcgcgcgctctggcctcgtgcacgcgctgaaaccggagcgcgcagggcgcgccagggtgagggggacgggggcggggtgggggcagccctttcccaggcggtagcgggggcggcgtcgctgttgcccttttaagccgcggggccgccgcctcctgccgctggagtcggttacaaaggaagcgccacccaggccgccacacgccgaggcttccgcgcccctcgccattttccagcagcgctcgacgaggcggagccgcgagagcgcggcccaggccggccccgcggggcggtcgcggccgtgacggcggctccgggcccggctccccttccgcgcccggctccccttccgcgcccctcccgccggagatgaggggaagatgtccgtgtcagggctcaaggccgagctgaagttcctggcgtccatcttcgacaagaaccacgagcgattccgcatcgtcagttggaagctggacgagctgcactgccagttcctggtgccgcagcagggcagcccgcactcgctgccgccgccactcacgctccactgcaacatcacggaatcctatccatcttcttcaccgatatggtttgtggattctgaagacccaaatctgacatcagttctggaacgtctagaagatactaagaacaacaatttgcttcgtcagcaattgaagtggttgatatgtgaactctgcagtttatataaccttcctaagcacctggatgttgagatgctagatcaaccactacccacgggtcagaatgggacaacagaagaagtgacttcagaagaagaggaagaagaagaagagatggctgaagatatagaagacttagatcactatgagatgaaggaagaagagcctattagtgggaaaaagtcagaggatgaaggaattgaaaaagaaaatttggcaatattagagaaaattaggaagactcaaaggcaagaccatttaaatggtgcagtgtctgggtcagtgcaagcttcagatagacttatgaaagagctcagggacatatacagatcacagagttataaaacagggatttattcagtggaactcataaatgacagtttatatgactggcatgttaaactgcagaaggttgaccctgatagtcctttgcacagtgatcttcagatcttaaaagaaaaagaaggcatagaatatattttgcttaacttctcttttaaggataactttccatttgatcctccatttgttcgagtggtgttacctgttctctcaggagggctggtacacccctccaaaggaagatggctaaatgtgttgactgttgtatgtttggactaatgttgctttaaagaaaatctttctaacatgcagacaaaagctttgagtgcccctattacagcagtaccgaagatgttagttaatagatattttagtggataatctgtcatctgacatccagtataagttacagcctttgcattttgctcattttagatatcttggactgagcagtggggcctttactgtatttttcctgataaatacacatactggccactccttatctctttttcttgaaaagtgaactttttaaagcagccaagtcaacatcaggctactgaagttgaggctttagggtaactttcctatattgagcccatgggttacaaggatttgcaatatattgttccatttacagccaatacaggtttaatcgatgttcaatattggtttaggaaatttaaggccttctaaatcataatagctctttcatgtctaaaaccattttatgatattgccaaaatgtgataggaaacctactcattaaattgttaaactttttaatgactatgtgaagatatgaattgtttcctgaagataatactcttaattgagttgtattgtacttcttaggcaaagcagtgtaaaactgtatcaattaaggcttgtgagtagtgatttccactggggcatcagagtcttggctgggctgaatctgctgcttgttggttcagtgtttcttatgaacaagagccacagtacagagcttcaagttatttaaaatactaagtcatcttacgtttccattttattaacgggatgttgcaatcgtttgtaaactaataaacttataaagtgattggcacaaagactccttgagcaaaagctgtgcagttaagtacaaaaagatacttaatttggagactcttacagtaatttttgccatgtcaaaacaatggcttttacattgaaagattaatagaaactctacatatgttaatttttttatagaacctgactcaaatcaaggtactctccattttattgccttacctgaatcagtcctttttggttggtaatagatttttttatacacccacgtttgatttaaaagtaaattctagttcttaagcacttttaacaaatccagaagcacatttttctgcacaaacaagttacaaagttcaaaagtgtttcttgtgcattagctttgagattcagtttttaactttgtaaaccacatctgagagacttgtcatttctacattgtgtgtgtttaatttcttttgattccattttggttaagagagcagtaaatagattttctggtattcttgttcacttgattacatttgtataaagttctgattgccagttgctcagataacaagtgacaaggcagaattctttaaatcagtaaagttccttaagcctaaggctaaatcttgaatacattgttgaattctttaatatcctgatggcaagcagactgatagctgcacatttggcatgctttgtttaatggattttatttttaattgcagatttatttggcaatgtacagtaaattttgtaaacttgcatcaagtttatgaataaagaaccattt

SEQ ID NO: 273343 - protein, 673 aa, Artificial Sequence
  derived and/or modified sequence
MITVQEFCKAEEVDEDSVYGVFVSYIEIYNNYIYDLLEEVPFDPIKPKWNSCSTPMRNTDFVPPQSKLLREDKNHNMYVAGCTEVEVKSTEEAFEVFWRGQKKRRIANTHLNRESSRSHSVFNIKLVQAPLDADGDNVLQEKEQITISQLSLVDLAGSERTNRTRAEGNRLREAGNINQSLMTLRTCMDVLRENQMYGTNKMVPYRDSKLTHLFKNYFDGEGKVRMIVCVNPKAEDYEENLQVMRFAEVTQEVEVARPVDKAICGLTPGRRYRNQPRGPVGNEPLVTDVVLQSFPPLPSCEILDINDEQTLPRLIEALEKRHNLRQMMIDEFNKQSNAFKALLQEFDNAVLSKENHMQGKLNEKEKMISGQKLEIERLEKKNKTLEYKIEILEKTTTIYEEDKRNLQQELETQNQKLQRQFSDKRRLEARLQGMVTETTMKWEKECERRVAAKQLEMQNKLWVKDEKLKQLKAIVTEPKTEKPERPSRERDREKVTQRSVSPSPVPLLFQPDQNAPPIRLRHRRSRSAGDRWVDHKPASNMQTETVMQPHVPHAITVSVANEKALAKCEKYMLTHQELASDGEIETKLIKGDIYKTRGGGQSVQFTDIETLKQESPNGSRKRRSSTVAPAQPDGAESEWTDVETRCSVAVEMRAGSQLGPGYQHHAQPKRKKP

SEQ ID NO: 273344 - DNA, 2022 bp, Artificial Sequence
  derived and/or modified sequence
atgataaccgtgcaggaattctgtaaggcagaggaagtggacgaggattccgtgtatggggtgtttgtttcttacattgaaatctacaacaactacatatacgatctcctggaagaagtgccttttgatccaattaaacccaagtggaattcatgctcgacaccaatgcgtaacaccgacttcgtacctcctcagagcaaactcctgcgtgaggataaaaaccataacatgtacgtggccggctgcacggaggtggaagttaaaagcacagaggaggcatttgaggttttctggcgaggacagaagaagcgccggattgcaaacacacacttgaatcgggaatcttctaggtcacactctgtctttaatattaagctggtccaagccccgctcgacgctgatggcgacaacgtgctgcaagaaaaagagcagataacaataagccagctcagcctcgtggacctggcaggtagcgagcgtaccaatcgtacgcgtgccgaaggcaatcgcctccgagaagcaggaaatatcaatcagagccttatgacgctgagaacctgcatggacgtacttagggagaatcagatgtatggtacgaataaaatggtgccttaccgagatagcaagctcacgcacttatttaagaactattttgacggagaggggaaggtgagaatgattgtgtgcgttaaccctaaggccgaagattatgaggaaaacctccaggtgatgcgctttgccgaggtgactcaggaggtcgaggtcgccaggcctgtggacaaagcaatctgtggtctgacaccaggcaggcgctaccggaaccaacctcgcggccccgtgggtaatgaacctctagtcactgacgtggtgctgcagtcattcccccccctgccatcttgcgagattctcgacattaatgatgagcaaacactgcccagactgattgaggctctggaaaagcgtcataatttgcggcaaatgatgatagatgagtttaataaacagagtaacgcgtttaaagctctgcttcaggaatttgacaatgccgtacttagcaaggaaaatcacatgcagggaaaattgaacgaaaaagagaaaatgatttctggtcagaagctggagattgagaggcttgagaagaagaataagacgcttgagtacaaaattgaaatcctcgagaagacaacaactatttacgaggaggacaaacgtaacctgcagcaggagctcgagacccaaaatcagaagctgcagcgccagttctcagacaaaaggcgactggaagcccgcctacaggggatggttacggagaccacaatgaagtgggagaaggaatgcgagaggcgggtagcagctaagcaattggagatgcagaacaaactgtgggtcaaggacgagaagctgaaacagctcaaagcgattgtcaccgaaccaaaaaccgagaagccggaacgcccgagcagggagcgcgacagggaaaaagttacccagaggtccgtatccccctctcctgtaccattgttgtttcagccggatcaaaatgcaccaccaatacggctgcggcaccgaaggagcaggagcgccggcgatagatgggtcgatcacaaaccggcctctaatatgcagactgagactgttatgcaacctcatgtgcctcatgcaatcactgtgtcagtcgcgaacgaaaaggcacttgctaagtgtgaaaaatacatgttgacgcatcaagaactggcctccgacggcgaaattgagacgaaattgattaaaggagacatctataaaaccaggggtgggggccagagtgtccagttcacggacatcgagacattaaaacaggaaagccccaacggcagtaggaagcgcagaagctctactgtggcccccgcacagcccgacggggccgagagcgagtggaccgatgttgagacgagatgttctgtagctgtcgaaatgcgggccggcagccagctaggccccgggtaccagcaccacgcccagccgaagcgaaaaaaaccgtag

SEQ ID NO: 273345 - DNA, 2022 bp, Artificial Sequence
  derived and/or modified sequence
atgatcactgtgcaggagttttgcaaggcggaggaggtcgacgaggactccgtctacggtgtattcgtgtcttatatagagatctataacaattatatatacgatctgttggaagaagtcccgttcgatcccattaagcccaaatggaacagctgttccacccccatgaggaatacggatttcgtgcctccgcaatcaaagctgttaagagaagataagaatcacaacatgtacgtggccggatgcacagaagtggaggtgaagagcacagaggaagccttcgaggtgttctggcgcggacagaagaaacgaaggatcgccaacactcacttgaaccgggaaagcagccgaagccactccgtcttcaatattaagctcgtccaggctccactggacgctgacggggacaatgtgcttcaggaaaaagagcagataactatttcccagctctctcttgtggacctcgccgggtccgagcggactaaccgaacacgcgctgagggtaatcgtctccgcgaggccggaaacattaatcagtccctaatgacactcagaacttgcatggacgtgttaagagaaaatcagatgtacgggaccaataaaatggtgccctatcgggatagcaaattaactcatctatttaaaaattatttcgatggggagggaaaggtgcggatgattgtgtgcgtgaaccccaaggctgaggactatgaggagaatttgcaggtcatgcgcttcgctgaggtcacccaagaggtcgaggtcgctcgacctgtggacaaggccatctgtggcctgactcctggaagaagatatcgtaatcagccgagaggccccgtgggcaacgagcctctcgtgactgacgtggtgctgcagtctttcccccccctgccatcctgcgagattctagatatcaatgacgagcagactttgccccgcctaatcgaagccctggagaagagacacaacctccgtcagatgatgatcgacgagtttaacaagcaatcgaacgcttttaaggcattactgcaggaattcgataatgcggtattgagtaaggagaatcatatgcaggggaaactcaatgagaaagagaagatgatttccggacaaaagttggagatcgaaaggctggaaaaaaagaacaagactctggagtataagatcgagattctggaaaagacaacaacgatctatgaggaggacaaaaggaacttacaacaggaattggaaactcagaaccaaaaactacaaaggcagtttagcgacaaacgcaggctggaagcgcgattacaaggcatggttactgaaactactatgaagtgggagaaagaatgtgaacgccgagtcgcggccaaacagctcgaaatgcagaataagttgtgggttaaggacgagaaactgaagcaactcaaggcaattgtcaccgagccaaaaactgagaaaccagaacgtccgagcagggagagagacagagagaaggtgactcagaggagcgtgtcaccaagccctgttcctttactgttccaacctgaccaaaacgcccctccaattcgcctccgacatcggaggtctcgctccgccggggatcgttgggtcgaccataagccagcctccaatatgcagacagagaccgtaatgcagccgcacgtaccccatgctattactgtaagcgtggccaatgagaaggccctggccaagtgcgagaaatacatgctcacacaccaggaattggcctccgacggggagattgaaacaaagcttataaagggggacatctacaagacaagggggggcggccagtccgtccagttcaccgacatcgagaccttgaaacaggaaagtcccaatggctcccgcaaacgacggtctagcactgtggctcctgcacagccagatggtgctgaaagtgaatggaccgatgttgaaactaggtgctcagtcgctgtggaaatgagagctggatcacagttgggccctggttaccaacaccacgcgcaacccaagcgaaaaaagccatag

SEQ ID NO: 273346 - DNA, 2181 bp, Artificial Sequence
  derived and/or modified sequence
ttgaacttttctttttttagacgacaagtagatccagagtttgcagatatgataactgtacaagaattctgcaaagcagaagaggttgatgaagatagtgtctatggtgtatttgtctcttatattgaaatatataataattacatatatgatctattggaagaggtgccgtttgatcccataaaacccaagtggaacagttgcagcacacccatgaggaacacagattttgtacctccacaatctaaattgcttcgtgaagataagaaccataacatgtatgttgcaggatgtacagaagttgaagtgaaatctactgaggaggcttttgaagttttctggagaggccagaaaaagagacgtattgctaatacccatttgaatcgtgagtccagccgttcccatagcgtgttcaacattaaattagttcaggctcccttggatgcagatggagacaatgtcttacaggaaaaagaacaaatcactataagtcagttgtccttggtagatcttgctggaagtgaaagaactaaccggaccagagcagaagggaacagattacgtgaagctggtaatattaatcagtcactaatgacgctaagaacatgtatggatgtcctaagagagaaccaaatgtatggaactaacaagatggttccatatcgagattcaaagttaacccatctgttcaagaactactttgatggggaaggaaaagtgcggatgatcgtgtgtgtgaaccccaaggctgaagattatgaagaaaacttgcaagtcatgagatttgcggaagtgactcaagaagttgaagtagcaagacctgtagacaaggcaatatgtggtttaacgcctgggaggagatacagaaaccagcctcgaggtccagttggaaatgaaccattggttactgacgtggttttgcagagttttccacctttgccatcatgcgaaattttggatatcaacgatgagcagacacttccaaggctgattgaagccttagagaaacgacataacttacgacaaatgatgattgatgagtttaacaaacaatctaatgcttttaaagctttgttacaagaatttgacaatgctgttttaagtaaagaaaaccacatgcaagggaaactaaatgaaaaggagaagatgatctcaggacagaaattggaaatagaacgactggaaaagaaaaacaaaactttagaatataagattgagattttagagaaaacaactactatctatgaggaagataaacgcaatttgcaacaggaacttgaaactcagaaccagaaacttcagcgacagttttctgacaaacgcagattagaagccaggttgcaaggcatggtgacagaaacgacaatgaagtgggagaaagaatgtgagcgtagagtggcagccaaacagctggagatgcagaataaactctgggttaaagatgaaaagctgaaacaactgaaggctattgttaccgaacctaaaactgagaagccagagagaccctctcgggagcgagatcgagaaaaagttactcaaagatctgtttctccatcacctgtgcctttactctttcaacctgatcagaacgcaccaccaattcgtctccgacacagacgatcacgctctgcaggagacagatgggtagatcataagcccgcctctaacatgcaaactgaaacagtcatgcagccacatgtccctcatgccatcacagtatctgttgcaaatgaaaaggcactagctaagtgtgagaagtacatgctgacccaccaggaactagcctccgatggggagattgaaactaaactaattaagggtgatatttataaaacaaggggtggtggacaatctgttcagtttactgatattgagactttaaagcaagaatcaccaaatggtagtcgaaaacgaagatcttccacagtagcacctgcccaaccagatggtgcagagtctgaatggaccgatgtagaaacaaggtgttctgtggctgtggagatgagagcaggatcccagctgggacctggatatcagcatcacgcacaacccaagcgcaaaaagccatgaactgacagtcccagtactgaaagaacattttcatttgtgtggatgatttctcgaaagccatgccagaagcagtcttccaggtcatcttgtagaactccagctttgttgaaa

SEQ ID NO: 273347 - DNA, 2296 bp, Artificial Sequence
  derived and/or modified sequence
aaacgatcctcctgcctcagcccccctagtagctgggattagaggcacacgccaccatgcccggctaatttgtatttttagtagagacggggtttcaccatgttggccaggctggtcttgagttcctgatctcagacgacaagtagatccagagtttgcagatatgataactgtacaagaattctgcaaagcagaagaggttgatgaagatagtgtctatggtgtatttgtctcttatattgaaatatataataattacatatatgatctattggaagaggtgccgtttgatcccataaaacccaagtggaacagttgcagcacacccatgaggaacacagattttgtacctccacaatctaaattgcttcgtgaagataagaaccataacatgtatgttgcaggatgtacagaagttgaagtgaaatctactgaggaggcttttgaagttttctggagaggccagaaaaagagacgtattgctaatacccatttgaatcgtgagtccagccgttcccatagcgtgttcaacattaaattagttcaggctcccttggatgcagatggagacaatgtcttacaggaaaaagaacaaatcactataagtcagttgtccttggtagatcttgctggaagtgaaagaactaaccggaccagagcagaagggaacagattacgtgaagctggtaatattaatcagtcactaatgacgctaagaacatgtatggatgtcctaagagagaaccaaatgtatggaactaacaagatggttccatatcgagattcaaagttaacccatctgttcaagaactactttgatggggaaggaaaagtgcggatgatcgtgtgtgtgaaccccaaggctgaagattatgaagaaaacttgcaagtcatgagatttgcggaagtgactcaagaagttgaagtagcaagacctgtagacaaggcaatatgtggtttaacgcctgggaggagatacagaaaccagcctcgaggtccagttggaaatgaaccattggttactgacgtggttttgcagagttttccacctttgccatcatgcgaaattttggatatcaacgatgagcagacacttccaaggctgattgaagccttagagaaacgacataacttacgacaaatgatgattgatgagtttaacaaacaatctaatgcttttaaagctttgttacaagaatttgacaatgctgttttaagtaaagaaaaccacatgcaagggaaactaaatgaaaaggagaagatgatctcaggacagaaattggaaatagaacgactggaaaagaaaaacaaaactttagaatataagattgagattttagagaaaacaactactatctatgaggaagataaacgcaatttgcaacaggaacttgaaactcagaaccagaaacttcagcgacagttttctgacaaacgcagattagaagccaggttgcaaggcatggtgacagaaacgacaatgaagtgggagaaagaatgtgagcgtagagtggcagccaaacagctggagatgcagaataaactctgggttaaagatgaaaagctgaaacaactgaaggctattgttaccgaacctaaaactgagaagccagagagaccctctcgggagcgagatcgagaaaaagttactcaaagatctgtttctccatcacctgtgcctttactctttcaacctgatcagaacgcaccaccaattcgtctccgacacagacgatcacgctctgcaggagacagatgggtagatcataagcccgcctctaacatgcaaactgaaacagtcatgcagccacatgtccctcatgccatcacagtatctgttgcaaatgaaaaggcactagctaagtgtgagaagtacatgctgacccaccaggaactagcctccgatggggagattgaaactaaactaattaagggtgatatttataaaacaaggggtggtggacaatctgttcagtttactgatattgagactttaaagcaagaatcaccaaatggtagtcgaaaacgaagatcttccacagtagcacctgcccaaccagatggtgcagagtctgaatggaccgatgtagaaacaaggtgttctgtggctgtggagatgagagcaggatcccagctgggacctggatatcagcatcacgcacaacccaagcgcaaaaagccatgaactgacagtcccagtactgaaagaacattttcatttgtgtggatgatttctcgaaagccatgccagaagcagtcttccaggtcatcttgtagaactccagctttgttgaaa

SEQ ID NO: 273348 - DNA, 2022 bp, Artificial Sequence
  derived and/or modified sequence
atgatcaccgtgcaggagttctgcaaggccgaggaggtggatgaagattctgtgtatggagtgtttgtgtcctacatcgagatctacaacaactacatctatgacctgctggaggaggtgccctttgaccccatcaagcccaagtggaacagctgcagcacccccatgaggaacacagactttgtgcccccccagagcaagctgctgcgggaggacaagaaccacaacatgtatgtggccggctgcacagaggtggaggtgaagagcacagaggaggcctttgaggtgttctggaggggccagaagaagaggcgcatcgccaacacccacctgaaccgggagagcagccgcagccacagcgtcttcaacatcaagctggtgcaggcccccctggatgctgatggagacaacgtgctgcaggagaaggagcagatcaccatcagccagctgagcctggtggacctggccggcagcgagaggaccaacagaaccagggctgagggcaaccggctgcgggaggccggcaacatcaaccagagcctgatgaccctgcggacctgcatggatgtgctgcgggagaaccagatgtatggcaccaacaagatggtgccctacagagacagcaagctgacccacctgttcaagaactactttgatggagagggcaaggtgaggatgattgtgtgtgtgaaccccaaggcagaagattatgaggagaacctgcaggtgatgagatttgctgaggtgacccaggaggtggaggtggcccggcctgtggacaaggccatctgtggcctgaccccaggccgccgctacagaaaccagccccggggccctgtgggcaatgagcccctggtgacagatgtggtgctgcagagcttcccccccctgcccagctgtgagatcctggacatcaatgatgagcagaccctgccccggctgattgaggccctggagaagaggcacaacctgcggcagatgatgattgatgagttcaacaagcagagcaatgccttcaaggccctgctgcaggagtttgacaatgctgtgctgagcaaggagaaccacatgcagggcaagctgaatgagaaggagaagatgatcagcggccagaagctggagattgagcggctggagaagaagaacaagaccctggagtacaagattgagatcctggagaagaccaccaccatctatgaggaggacaagaggaacctgcagcaggagctggagacccagaaccagaagctgcagaggcagttcagtgacaagaggcggctggaggcccggctgcagggcatggtgacagagaccaccatgaagtgggagaaggaatgtgagcggcgggtggccgccaagcagctggagatgcagaacaagctgtgggtgaaggatgagaagctgaagcagctgaaggccatcgtgacagagcccaagacagagaagccagagcggcccagccgggagcgggaccgggagaaggtgacccagaggtctgtgagccccagccctgtgcccctgctcttccagcctgaccagaatgccccacccatccggctgcggcacagaagaagccgctctgctggggaccgctgggtggaccacaagccagccagcaacatgcagacagaaacagtgatgcagccccacgtgccccacgccatcaccgtgtctgtggccaatgagaaggccctggccaagtgtgagaagtacatgctgacccaccaggagctggccagtgatggagaaattgagaccaagctgatcaagggggacatctacaagacccggggcggcggccagagcgtgcagttcacagacatcgagaccctgaagcaggagagccccaacggcagcaggaagaggaggagcagcacagtggccccagcccagccagatggagctgagagcgagtggacagatgtggagacccgctgcagcgtggccgtggagatgagagctggcagccagctgggccctggctaccagcaccacgcccagcccaagaggaagaagccctag

SEQ ID NO: 273349 - DNA, 2022 bp, Artificial Sequence
  derived and/or modified sequence
atgatcaccgtgcaggagttctgcaaggccgaggaggtggacgaggatagcgtctatggagtctttgtgagctatatcgaaatatacaataactatatctacgaccttctggaagaagtacccttcgacccaataaagcccaagtggaacagttgcagtacccccatgcgaaacaccgacttcgtcccaccccagtccaaactgctgagagaggataaaaatcacaatatgtacgttgctggatgtaccgaagtcgaagtgaaatcaacagaggaggcgttcgaagtgttttggcgcggacagaaaaagcgcagaattgctaacacccatctgaacagggaatccagcaggtcccacagcgtcttcaacattaagctcgtgcaagcgcccctcgacgccgacggggacaatgtgctgcaggagaaagagcagataaccatctctcagttatcactggttgatctggcgggttccgagcgcacgaatagaacaagggccgagggcaatagactgcgtgaggcgggaaatattaatcaatcactgatgacgctgaggacatgcatggatgtcctgagggagaaccagatgtacggtaccaataaaatggttccctaccgggacagcaagcttacccacctctttaagaattatttcgacggggagggcaaagtccgtatgattgtgtgcgtgaacccaaaggcagaggattatgaggaaaatctgcaggtgatgcggttcgcagaagttacacaggaggtcgaggtagcccgtccagtggacaaggcaatatgcggcctgacccctggaagacgttaccggaaccagccgagggggccggtcgggaacgaacccctggtgacggatgtggtgctccaaagcttccctcctctgccctcatgcgagatcctggatataaacgatgagcagaccctgcctcggcttatagaggcccttgaaaaaaggcataatttgagacagatgatgatcgatgaatttaataagcagtcaaatgccttcaaagctttattacaagagtttgacaacgctgtgctgtctaaggagaaccatatgcaggggaaactgaatgaaaaggagaagatgatctctggccaaaagctagagatcgagcggctcgagaagaagaacaagactttggagtataagatagagatcctagaaaaaacgaccaccatttatgaagaggacaaacgaaatctgcagcaggagctggaaactcagaatcagaagttacagcgccagttctctgataaaagaaggctggaggccaggctgcagggaatggtcacagagacaacgatgaagtgggaaaaagaatgcgaacgaagagtggcagcgaagcagctggagatgcagaataaactgtgggtcaaagatgagaaactcaagcaactcaaagctattgtaacggaacctaagaccgaaaagcccgaaagacctagcagggaaagagatagggagaaagttacacagagatcagtttccccaagtcctgtaccacttctgtttcagcccgatcaaaacgcccccccaattcgcctgcgccacaggaggtcccggtccgcaggcgatagatgggtggaccacaaaccagccagtaatatgcagaccgagaccgttatgcaaccccacgtgccgcatgccatcaccgtgtctgttgccaacgagaaggctctcgcaaaatgtgaaaaatacatgctcacccatcaggaattggcttctgatggagaaattgaaactaaacttattaaaggagatatttacaagacccgcggcggaggccaatccgtgcagttcaccgatatcgaaacattgaagcaggagtcgcccaacggctcacgaaaaaggaggtccagcactgtcgcacctgctcaaccagatggcgccgaaagtgagtggaccgacgtagagacacgctgtagcgtggccgtcgagatgagagcaggcagtcagctcggtcccggatatcagcaccacgcgcagcctaaacgcaagaagccctag

SEQ ID NO: 273350 - DNA, 2022 bp, Artificial Sequence
  derived and/or modified sequence
atgatcaccgtgcaggagttctgcaaggccgaggaggtggacgaggatagcgtgtatggcgtatttgtgagttacatcgaaatttacaataactatatttatgatttattggaagaggtgcccttcgacccaatcaaacctaagtggaatagctgttcaacccccatgcgcaatacagactttgtccccccacagagcaagttgcttcgcgaagataaaaaccacaatatgtacgtggctgggtgcacagaagtcgaggtgaagtctacggaggaggcgttcgaggttttttggcgggggcagaagaagaggcggatcgctaacacacacctgaacagagagtcctctcgctctcacagcgtcttcaacatcaagctcgtgcaggccccactcgatgctgatggagacaacgtcttacaagaaaaggaacagatcaccatttctcagttgtcactggtggacctggccggttccgaaagaacaaatcgtaccagagcggagggaaaccgactacgcgaggcgggcaacataaaccagtctttaatgaccctccggacctgcatggacgttctgagggaaaaccagatgtatgggaccaataagatggtgccgtacagggattctaagctcacacatcttttcaaaaattatttcgacggcgaggggaaagtgcgaatgatcgtgtgcgtgaatccaaaagccgaagactacgaagagaatctccaggtcatgcgctttgctgaggttactcaagaagtggaggttgcccggcctgtggataaggccatttgcgggctgaccccaggacggaggtatcgcaaccagccccgtggcccagtgggtaacgaacctctggtcacagatgtggtcctgcagtctttcccccctttgccatcttgcgagattcttgatatcaacgacgagcagacactgccccgcctgattgaagcgctggagaagcggcacaacctcagacagatgatgattgacgagttcaataagcaatccaacgcattcaaggccctgctgcaggagttcgataatgctgtcctatctaaagagaaccatatgcaaggcaagctcaacgagaaagaaaagatgatctcaggccagaaactagagatcgaacgcttggagaagaaaaataaaaccctagagtataagattgaaatcctcgaaaaaacgaccacaatctatgaggaggacaaaagaaacctacaacaagagcttgaaacgcaaaaccagaaattgcagagacagttttccgacaagaggcgacttgaggctcggctgcaggggatggtaactgagaccactatgaagtgggagaaggagtgcgagaggcgagtcgctgctaagcagttagaaatgcagaataaactgtgggttaaagacgagaaactgaagcagctcaaggccatcgtgactgagcctaagaccgaaaagccggaaagaccctcccgggagagggatcgagagaaggtcactcagcggtctgtttcgccatcaccagtgcccctgctgttccagcctgatcagaatgctcccccgattcgcctgcgacacaggaggagcagatccgccggcgatagatgggttgaccataagccggccagtaatatgcagacagagaccgtgatgcagcctcacgttccccacgcaatcacagtgtctgtcgccaatgaaaaagcactagccaagtgtgagaaatacatgctgacccaccaagagctagcctcagatggggaaatcgagactaaactaattaagggggatatatataaaaccagaggaggcgggcaaagcgtgcagtttacggacattgagacactcaaacaagaatcacctaatggatcccgaaaaaggaggtcgtccactgtggccccggctcagccagacggcgcagagagtgagtggactgatgttgagacccgctgcagtgtggcagtggagatgcgggcaggaagtcagctggggcccggatatcagcaccacgcacaacctaagaggaaaaagccttag

SEQ ID NO: 273351 - DNA, 2022 bp, Artificial Sequence
  derived and/or modified sequence
atgatcacggtccaggagttttgcaaggctgaggaggttgatgaagatagcgtgtatggcgtttttgtctcctatattgagatttacaataactacatttacgacctcttggaagaagtcccattcgatccaattaaacccaagtggaacagctgctcaacacccatgagaaacaccgatttcgtgccccctcagtcaaagctcttacgagaggataaaaaccataatatgtacgtggccggatgtacagaggttgaagtgaagagcactgaggaggcgttcgaagtgttctggaggggccagaagaagcgcaggatagcaaacactcacctgaaccgagagagctccagatcacatagtgtgttcaacatcaaactcgtgcaagctccactcgacgctgatggtgacaacgttcttcaggaaaaggagcagattaccatttcgcaactgagcctggtggacctggccggaagcgaacgaactaatcgcacccgtgccgaaggcaataggctgcgggaggcaggcaacataaaccagagtttgatgacgctgcggacatgtatggacgtcctacgtgaaaatcagatgtacggcaccaataaaatggtaccatacagagatagcaaacttactcatctctttaagaactacttcgacggtgagggtaaggtgcgcatgattgtatgcgttaaccccaaggccgaagactatgaagagaacctgcaggttatgcgcttcgccgaggtgacacaagaagtggaggtggccaggcccgtggataaagcaatctgtggcttaactcctggacgtcggtaccggaatcagccccgtgggcctgtgggcaatgagccactggtaactgacgttgtcctgcaatcgttcccgcctctgcccagctgcgagattctcgacattaatgatgagcagacactccccaggcttatcgaggcacttgagaaacgccacaacttaagacagatgatgatcgatgaattcaataagcagtccaatgcatttaaagccctgctgcaggagtttgacaacgccgtgcttagcaaagaaaaccacatgcagggcaagttgaacgagaaggagaaaatgatcagcggccagaagctagagatcgaacgtctcgagaagaagaacaagacactggagtacaagatagagatccttgaaaagaccacaactatctacgaagaggacaaaaggaatctgcaacaggaactcgagactcagaatcaaaagctgcagcgccaattttccgacaagcgtaggttggaggcacggcttcagggcatggttaccgagacaaccatgaagtgggaaaaggagtgcgaaaggagggtggctgctaagcagctggagatgcagaacaagctgtgggtgaaggatgaaaagctgaagcagttaaaggcaatcgttaccgagcccaaaactgaaaagcctgaaaggccttcacgcgaaagagatagggaaaaggtcacacaacggagtgtgtccccatcacctgtccctctgttatttcaaccagatcagaatgcacccccaattagactgagacaccggagatccagatccgccggtgatcggtgggtcgatcataagccagcaagcaacatgcagacagaaacggtgatgcaaccccacgttccgcatgccattacagtgtctgttgctaacgagaaggcactcgccaaatgtgagaaatacatgctcacacaccaagaattggcgagcgatggggaaatcgaaacaaaattaatcaagggcgatatctacaaaacgcgcggtggcggacaaagtgttcagttcaccgatattgagactctgaagcaggaatctccgaacggcagtaggaagcgaaggtcctccacggtggcacccgctcagcctgatggagccgagtcagagtggactgacgtagagacccgatgttcggtggctgtggagatgagagccggatcacagctgggtccaggttaccagcatcatgcacagcccaagcgcaagaagccttag

SEQ ID NO: 273352 - DNA, 2022 bp, Artificial Sequence
  derived and/or modified sequence
atgatcacagtgcaggaattctgtaaagccgaggaggttgacgaggacagcgtgtatggggtctttgtgagctatatcgagatttacaataattatatatatgacttactggaagaagttccttttgaccccataaaacccaagtggaattcttgtagtacacccatgcggaatacggactttgtgcctccccagtccaagcttcttcgtgaggacaagaaccataacatgtacgtggccggttgtaccgaggttgaggtgaagtccactgaggaggcctttgaggtattttggcgaggtcaaaaaaaacggagaatcgcaaatacacacctgaatagggaaagctcccgaagtcactccgtattcaatatcaagctggtgcaggcccctctggatgccgatggggataatgtactgcaggagaaggagcagattacaatcagccagttaagtctcgtggatctcgcgggttcggagcggaccaaccgcacaagggccgagggcaaccgtttacgcgaggccggaaatatcaaccaatccctaatgacattacggacatgcatggatgttttgcgggaaaaccagatgtatggcaccaacaagatggtcccctatcgagactctaaacttacccacctctttaaaaactacttcgacggagaaggaaaagttaggatgattgtgtgcgttaacccaaaggccgaggactacgaggagaacctgcaagtgatgaggtttgcagaggtgacacaggaagtcgaggttgccaggcccgtcgataaggccatctgcgggttgacacccggacggaggtatcgaaaccagcccagaggccctgtcggtaatgagcctctggtgacggatgttgtcctccaatccttccctcctctcccgagctgtgagatcctagatatcaatgatgaacagacactccctcgactcatagaggcactggagaagcgccataatctccggcaaatgatgatcgatgaattcaacaagcaatccaatgcatttaaagccctgctccaggagtttgacaatgccgttctatccaaagagaaccatatgcaggggaaattgaatgaaaaggagaaaatgatcagcggccagaagctggagatcgagcggctggagaagaagaataagacactggagtataaaatcgaaatattagagaaaactaccacaatctacgaggaggacaaaaggaatcttcaacaggagcttgagactcaaaaccaaaaattgcagcgccaattctctgataaaagacggttagaggctaggctgcagggaatggtcactgagactacaatgaagtgggaaaaggagtgtgagcggagggtggccgctaaacaacttgagatgcaaaataagttgtgggtcaaagatgaaaaactcaagcagctgaaggctattgtgaccgaaccaaaaacagaaaaacccgaaagaccatcgcgcgagcgcgacagagagaaagtgactcagcgctccgtgagcccatctccggtgccactccttttccaacctgatcagaatgctccacccatcagactaaggcaccgtcggtcccggtcagcaggtgaccgctgggtggatcacaagcctgcgagtaacatgcagactgaaacagtgatgcagcctcacgttcctcatgcaatcacagtatcagtcgcgaacgaaaaagccttggccaaatgcgaaaagtacatgctgacgcaccaggagctagcatctgacggcgaaattgagacgaaactgattaagggagatatctataagacaaggggaggaggacagagcgtccagtttacagatattgaaacgctgaaacaggaaagtcccaatggaagcagaaagcggagatccagcaccgtggcacccgcacagcccgacggcgctgagtccgaatggacagatgttgaaactcgatgctcagtggcagtggaaatgagagccggatcgcaattggggccagggtaccagcaccacgctcaaccgaagaggaagaagccttag

SEQ ID NO: 273353 - DNA, 2022 bp, Artificial Sequence
  derived and/or modified sequence
atgatcaccgtgcaggagttctgcaaggccgaggaggtggacgaggacagcgtgtacggcgtgttcgtgagctacatcgagatctacaacaactacatctacgacctgctggaggaggtgcccttcgaccccatcaagcccaagtggaacagctgcagcacccccatgagaaacaccgacttcgtgcccccccagagcaagctgctgagagaggacaagaaccacaacatgtacgtggccggctgcaccgaggtggaggtgaagagcaccgaggaggccttcgaggtgttctggagaggccagaagaagagaagaatcgccaacacccacctgaacagagagagcagcagaagccacagcgtgttcaacatcaagctggtgcaggcccccctggacgccgacggcgacaacgtgctgcaggagaaggagcagatcaccatcagccagctgagcctggtggacctggccggcagcgagagaaccaacagaaccagagccgagggcaacagactgagagaggccggcaacatcaaccagagcctgatgaccctgagaacctgcatggacgtgctgagagagaaccagatgtacggcaccaacaagatggtgccctacagagacagcaagctgacccacctgttcaagaactacttcgacggcgagggcaaggtgagaatgatcgtgtgcgtgaaccccaaggccgaggactacgaggagaacctgcaggtgatgagattcgccgaggtgacccaggaggtggaggtggccagacccgtggacaaggccatctgcggcctgacccccggcagaagatacagaaaccagcccagaggccccgtgggcaacgagcccctggtgaccgacgtggtgctgcagagcttcccccccctgcccagctgcgagatcctggacatcaacgacgagcagaccctgcccagactgatcgaggccctggagaagagacacaacctgagacagatgatgatcgacgagttcaacaagcagagcaacgccttcaaggccctgctgcaggagttcgacaacgccgtgctgagcaaggagaaccacatgcagggcaagctgaacgagaaggagaagatgatcagcggccagaagctggagatcgagagactggagaagaagaacaagaccctggagtacaagatcgagatcctggagaagaccaccaccatctacgaggaggacaagagaaacctgcagcaggagctggagacccagaaccagaagctgcagagacagttcagcgacaagagaagactggaggccagactgcagggcatggtgaccgagaccaccatgaagtgggagaaggagtgcgagagaagagtggccgccaagcagctggagatgcagaacaagctgtgggtgaaggacgagaagctgaagcagctgaaggccatcgtgaccgagcccaagaccgagaagcccgagagacccagcagagagagagacagagagaaggtgacccagagaagcgtgagccccagccccgtgcccctgctgttccagcccgaccagaacgccccccccatcagactgagacacagaagaagcagaagcgccggcgacagatgggtggaccacaagcccgccagcaacatgcagaccgagaccgtgatgcagccccacgtgccccacgccatcaccgtgagcgtggccaacgagaaggccctggccaagtgcgagaagtacatgctgacccaccaggagctggccagcgacggcgagatcgagaccaagctgatcaagggcgacatctacaagaccagaggcggcggccagagcgtgcagttcaccgacatcgagaccctgaagcaggagagccccaacggcagcagaaagagaagaagcagcaccgtggcccccgcccagcccgacggcgccgagagcgagtggaccgacgtggagaccagatgcagcgtggccgtggagatgagagccggcagccagctgggccccggctaccagcaccacgcccagcccaagagaaagaagccctag

SEQ ID NO: 273354 - protein, 1408 aa, Artificial Sequence
  derived and/or modified sequence
MWSLTASEGESTTAHFFLGAGDEGLGTRGIGMRPEESDSELLEDEEDEVPPEPQIIVGICAMTKKSKSKPMTQILERLCRFDYLTVVILGEDVILNEPVENWPSCHCLISFHSKGFPLDKAVAYSKLRNPFLINDLAMQYYIQDRREVYRILQEEGIDLPRYAVLNRDPARPEECNLIEGEDQVEVNGAVFPKPFVEKPVSAEDHNVYIYYPSSAGGGSQRLFRKIGSRSSVYSPESSVRKTGSYIYEEFMPTDGTDVKVYTVGPDYAHAEARKSPALDGKVERDSEGKEIRYPVMLTAMEKLVARKVCVAFKQTVCGFDLLRANGHSFVCDVNGFSFVKNSMKYYDDCAKILGNTIMRELAPQFQIPWSIPTEAEDIPIVPTTSGTMMELRCVIAIIRHGDRTPKQKMKMEVKHPRFFALFEKHGGYKTGKLKLKRPEQLQEVLDITRLLLAELEKEPGGEIEEKTGKLEQLKSVLEMYGHFSGINRKVQLTYYPHGVKASNEGQDPQRETLAPSLLLVLKWGGELTPAGRVQAEELGRAFRCMYPGGQGDYAGFPGCGLLRLHSTFRHDLKIYASDEGRVQMTAAAFAKGLLALEGELTPILVQMVKSANMNGLLDSDGDSLSSCQHRVKARLHHILQQDAPFGPEDYDQLAPTRSTSLLNSMTIIQNPVKVCDQVFALIENLTHQIRERMQDPRSVDLQLYHSETLELMLQRWSKLERDFRQKSGRYDISKIPDIYDCVKYDVQHNGSLGLQGTAELLRLSKALADVVIPQEYGISREEKLEIAVGFCLPLLRKILLDLQRTHEDESVNKLHPLYSRGVLSPGRHVRTRLYFTSESHVHSLLSVFRYGGLLDETQDAQWQRALDYLSAISELNYMTQIVIMLYEDNTQDPLSEERFHVELHFSPGVKGVEEEGSAPAGCGFRPASSENEEMKTNQGSMENLCPGKASDEPDRALQTSPQPPEGPGLPRRSPLIRNRKAGSMEVLSETSSSRPGGYRLFSSSRPPTEMKQSGLGSQCTGLFSTTVLGGSSSAPNLQDYARSHGKKLPPASLKHRDGFEGCSMVPTIYPLETLHNALSLRQVSEFLSRVCQRHTDAQAQASAALFDSMHSSQASDNPFSPPRTLHSPPLQLQQRSEKPPWYSSGPSSTVSSAGPSSPTTVDGNSQFGFSDQPSLNSHVAEEHQGLGLLQETPGSGAQELSIEGEQELFEPNQSPQVPPMETSQPYEEVSQPCQEVPDISQPCQDISEALSQPCQKVPDISQQCQENHDNGNHTCQEVPHISQPCQKSSQLCQKVSEEVCQLCLENSEEVSQPCQGVSVEVGKLVHKFHVGVGSLVQETLVEVGSPAEEIPEEVIQPYQEFSVEVGRLAQETSAINLLSQGIPEIDKPSQEFPEEIDLQAQEVPEEIN

SEQ ID NO: 273355 - DNA, 4227 bp, Artificial Sequence
  derived and/or modified sequence
atgtggagcctgaccgccagcgagggcgagagcaccaccgcccacttcttcctgggcgccggcgacgagggcctgggcaccagaggcatcggcatgagacccgaggagagcgacagcgagctgctggaggacgaggaggacgaggtgccccccgagccccagatcatcgtgggcatctgcgccatgaccaagaagagcaagagcaagcccatgacccagatcctggagagactgtgcagattcgactacctgaccgtggtgatcctgggcgaggacgtgatcctgaacgagcccgtggagaactggcccagctgccactgcctgatcagcttccacagcaagggcttccccctggacaaggccgtggcctacagcaagctgagaaaccccttcctgatcaacgacctggccatgcagtactacatccaggacagaagagaggtgtacagaatcctgcaggaggagggcatcgacctgcccagatacgccgtgctgaacagagaccccgccagacccgaggagtgcaacctgatcgagggcgaggaccaggtggaggtgaacggcgccgtgttccccaagcccttcgtggagaagcccgtgagcgccgaggaccacaacgtgtacatctactaccccagcagcgccggcggcggcagccagagactgttcagaaagatcggcagcagaagcagcgtgtacagccccgagagcagcgtgagaaagaccggcagctacatctacgaggagttcatgcccaccgacggcaccgacgtgaaggtgtacaccgtgggccccgactacgcccacgccgaggccagaaagagccccgccctggacggcaaggtggagagagacagcgagggcaaggagatcagataccccgtgatgctgaccgccatggagaagctggtggccagaaaggtgtgcgtggccttcaagcagaccgtgtgcggcttcgacctgctgagagccaacggccacagcttcgtgtgcgacgtgaacggcttcagcttcgtgaagaacagcatgaagtactacgacgactgcgccaagatcctgggcaacaccatcatgagagagctggccccccagttccagatcccctggagcatccccaccgaggccgaggacatccccatcgtgcccaccaccagcggcaccatgatggagctgagatgcgtgatcgccatcatcagacacggcgacagaacccccaagcagaagatgaagatggaggtgaagcaccccagattcttcgccctgttcgagaagcacggcggctacaagaccggcaagctgaagctgaagagacccgagcagctgcaggaggtgctggacatcaccagactgctgctggccgagctggagaaggagcccggcggcgagatcgaggagaagaccggcaagctggagcagctgaagagcgtgctggagatgtacggccacttcagcggcatcaacagaaaggtgcagctgacctactacccccacggcgtgaaggccagcaacgagggccaggacccccagagagagaccctggcccccagcctgctgctggtgctgaagtggggcggcgagctgacccccgccggcagagtgcaggccgaggagctgggcagagccttcagatgcatgtaccccggcggccagggcgactacgccggcttccccggctgcggcctgctgagactgcacagcaccttcagacacgacctgaagatctacgccagcgacgagggcagagtgcagatgaccgccgccgccttcgccaagggcctgctggccctggagggcgagctgacccccatcctggtgcagatggtgaagagcgccaacatgaacggcctgctggacagcgacggcgacagcctgagcagctgccagcacagagtgaaggccagactgcaccacatcctgcagcaggacgcccccttcggccccgaggactacgaccagctggcccccaccagaagcaccagcctgctgaacagcatgaccatcatccagaaccccgtgaaggtgtgcgaccaggtgttcgccctgatcgagaacctgacccaccagatcagagagagaatgcaggaccccagaagcgtggacctgcagctgtaccacagcgagaccctggagctgatgctgcagagatggagcaagctggagagagacttcagacagaagagcggcagatacgacatcagcaagatccccgacatctacgactgcgtgaagtacgacgtgcagcacaacggcagcctgggcctgcagggcaccgccgagctgctgagactgagcaaggccctggccgacgtggtgatcccccaggagtacggcatcagcagagaggagaagctggagatcgccgtgggcttctgcctgcccctgctgagaaagatcctgctggacctgcagagaacccacgaggacgagagcgtgaacaagctgcaccccctgtacagcagaggcgtgctgagccccggcagacacgtgagaaccagactgtacttcaccagcgagagccacgtgcacagcctgctgagcgtgttcagatacggcggcctgctggacgagacccaggacgcccagtggcagagagccctggactacctgagcgccatcagcgagctgaactacatgacccagatcgtgatcatgctgtacgaggacaacacccaggaccccctgagcgaggagagattccacgtggagctgcacttcagccccggcgtgaagggcgtggaggaggagggcagcgcccccgccggctgcggcttcagacccgccagcagcgagaacgaggagatgaagaccaaccagggcagcatggagaacctgtgccccggcaaggccagcgacgagcccgacagagccctgcagaccagcccccagccccccgagggccccggcctgcccagaagaagccccctgatcagaaacagaaaggccggcagcatggaggtgctgagcgagaccagcagcagcagacccggcggctacagactgttcagcagcagcagaccccccaccgagatgaagcagagcggcctgggcagccagtgcaccggcctgttcagcaccaccgtgctgggcggcagcagcagcgcccccaacctgcaggactacgccagaagccacggcaagaagctgccccccgccagcctgaagcacagagacggcttcgagggctgcagcatggtgcccaccatctaccccctggagaccctgcacaacgccctgagcctgagacaggtgagcgagttcctgagcagagtgtgccagagacacaccgacgcccaggcccaggccagcgccgccctgttcgacagcatgcacagcagccaggccagcgacaaccccttcagcccccccagaaccctgcacagcccccccctgcagctgcagcagagaagcgagaagcccccctggtacagcagcggccccagcagcaccgtgagcagcgccggccccagcagccccaccaccgtggacggcaacagccagttcggcttcagcgaccagcccagcctgaacagccacgtggccgaggagcaccagggcctgggcctgctgcaggagacccccggcagcggcgcccaggagctgagcatcgagggcgagcaggagctgttcgagcccaaccagagcccccaggtgccccccatggagaccagccagccctacgaggaggtgagccagccctgccaggaggtgcccgacatcagccagccctgccaggacatcagcgaggccctgagccagccctgccagaaggtgcccgacatcagccagcagtgccaggagaaccacgacaacggcaaccacacctgccaggaggtgccccacatcagccagccctgccagaagagcagccagctgtgccagaaggtgagcgaggaggtgtgccagctgtgcctggagaacagcgaggaggtgagccagccctgccagggcgtgagcgtggaggtgggcaagctggtgcacaagttccacgtgggcgtgggcagcctggtgcaggagaccctggtggaggtgggcagccccgccgaggagatccccgaggaggtgatccagccctaccaggagttcagcgtggaggtgggcagactggcccaggagaccagcgccatcaacctgctgagccagggcatccccgagatcgacaagcccagccaggagttccccgaggagatcgacctgcaggcccaggaggtgcccgaggagatcaactag

SEQ ID NO: 273356 - DNA, 5586 bp, Artificial Sequence
  derived and/or modified sequence
aggttcggctgcgcgagcggagggaggcggttccctcttatgcttttcatctccatccccagccccacccacagccagggggcttgggttctgagctgatggggtacccccctctgcagagcgggatgagtgggtgttccggcagggatgtggtcattgacggccagtgagggcgagagtaccacggcccacttcttccttggagctggagatgaggggctgggcacccgtggaataggcatgaggccagaagagagtgacagcgagctccttgaggatgaggaggatgaagtgcctcctgaacctcagatcattgttggcatctgtgccatgaccaagaaatccaagtccaagccaatgactcaaatcctagagcgactctgcagatttgactacctgactgttgtcattctgggagaagatgtaatccttaatgaacctgtggaaaactggccatcctgccactgcctcatctctttccactccaaaggctttcctctggacaaagctgttgcttactccaagcttcgaaacccctttcttatcaatgatctggccatgcagtattacatccaagataggagggaggtgtaccggatcctgcaggaagagggtattgatctgcctcgatatgctgtgctcaaccgtgatcctgcccggcctgaggaatgcaacctgatagaaggtgaagaccaagtagaggtcaatggagctgtctttcccaagccctttgtggagaagccagtgagtgcagaagaccacaatgtttacatctactaccccagctcagctggaggaggaagccagcgtctctttcgtaagattggcagccgaagcagtgtttactctcctgagagcagcgtccgaaagacggggtcgtacatctatgaggagtttatgccaacagatggcacagatgtcaaggtgtatacagtggggccagattatgcccatgctgaagctagaaaatctccagctttggatgggaaggttgaacgagacagtgaggggaaagagattcgatatccagtcatgctgactgccatggaaaagctggtggccaggaaagtctgcgtagctttcaagcaaacagtttgtggatttgaccttcttcgtgccaatggtcattcctttgtgtgtgatgtcaatggctttagttttgtcaagaactcgatgaaatactacgatgactgtgccaagattctggggaacaccataatgcgggagcttgccccacagttccagattccatggtccatccccacggaggctgaggacattcccattgttcccaccacatctggcactatgatggaacttcgttgtgtcattgcaattattcgtcatggggatcgtactcccaagcagaagatgaagatggaagtgaaacacccaaggttttttgctctgtttgaaaaacatggtggctacaagacagggaaattaaaactcaagcgacctgagcagctccaggaggtgctggatatcacaaggctgttgttggctgaactggagaaagaaccaggtggtgagatcgaggagaagactggaaaactagagcagctgaagtctgtactggagatgtatggtcacttctcaggtataaaccggaaggtacaattgacttactaccctcatggagtaaaagcttctaatgaggggcaagatccacagagggaaactctggccccatctctgttgctggtactgaagtggggtggagaactgactcctgctggccgtgttcaggctgaggagctggggcgagcttttcgctgcatgtaccctggaggacagggtgactatgctggcttccctggttgtgggctgcttcgtctccatagcactttccgccacgatctcaagatctatgcctctgatgagggtcgtgttcagatgactgctgctgccttcgccaagggccttctggctctagaaggggagctgacacccattttggtgcaaatggtgaagagtgccaacatgaatgggctactggacagcgatggggattccttgagcagctgccagcaccgggtgaaggctcggctgcaccatattctacagcaggatgcgccctttggccctgaggactacgatcagctggctcccaccagaagtacttccctgctcaactccatgactatcatccagaatcctgtgaaggtctgtgatcaggtatttgccctgatcgaaaacctcacccaccagatccgggaacgaatgcaggaccccaggtctgtagacctgcagctctaccacagtgagacactagagctaatgctacagcgttggagcaagctggagcgtgactttcgacagaagagtgggcgctatgatatcagtaagatccctgacatctatgactgtgtcaagtatgatgtgcagcacaatgggagtctgggacttcaaggcacagcagagttgctccgtctctctaaggcactggctgatgtggtcattccccaggagtacgggatcagtcgggaggagaaactggaaattgctgtgggcttctgtcttccactgttgcggaagatactacttgacctgcagagaacccacgaggatgagtctgtcaacaagctgcatcccctgtactcccgaggcgtgctctccccaggtcgccacgttcgaacgcgtctctatttcaccagtgagagccatgtccactccctgctcagtgtcttccgttatggaggacttcttgatgagacccaggatgcacaatggcagcgagctttggattatcttagtgccatctcagagcttaactacatgacccagattgtcatcatgctttatgaggacaacacacaggatcccttatcagaggaacggttccatgtggagctacacttcagccccggagtgaaaggtgttgaggaagaaggcagtgccccggctggctgtggattccgtccagcctcttctgagaatgaggagatgaaaaccaaccaaggcagtatggagaacctgtgtccaggaaaggcatcagatgaaccagaccgggcattgcagacttcaccccagcctcctgagggccctggccttccgaggagatcacccctcattcgtaaccgaaaagctggttccatggaggtactttctgagacttcatcctcgaggcctggtggctaccggctcttttcatcttcacggccacccacagaaatgaagcagagtggcctaggctcacagtgcacagggctgttcagcaccacagtgctgggtggctcctccagtgccccgaatcttcaggactacgcccgcagccatggcaaaaagctaccacctgccagtctgaagcaccgagatgggtttgaagggtgttccatggtgcctaccatctaccctctggaaacactgcataatgccctttccctacgtcaagtgagtgaattcttgagtagagtctgccagcgccacactgatgcccaggcacaggcatctgcagccctctttgattccatgcacagcagccaggcctcagataacccattttctccaccacgtactcttcattcacctcccctgcaactccagcagcgctctgagaagcccccttggtacagcagtggcccttctagcactgtgtccagtgctggtccttcttcccctactacagtagatggtaactcccaatttggcttcagtgatcaaccctccctaaattcacacgtggctgaagaacatcaaggccttgggctgctccaggagacccctgggagtggagcacaagagctctccatagaaggggagcaagagctttttgaaccaaatcagtccccacaggtgccacctatggaaaccagccagccatacgaggaggtcagccagccatgtcaggaggtccctgacatcagccagccatgccaggacatttctgaggcgctcagccagccatgtcagaaggtccctgacatcagccagcaatgccaggagaaccatgacaatggtaaccacacatgccaggaggtccctcacatcagccagccatgccagaagtccagccaactgtgccagaaagtctctgaggaagtttgccagctatgtctggagaactccgaggaggtcagccagccatgccagggggtctctgtggaggttggcaagctggtccataagttccatgtaggggttggtagcttggtccaggaaacccttgtagaagttggcagcccagctgaagagatccctgaggaggtcatccagccataccaggagttctctgtggaggttggcaggctggcccaggagacttctgcgatcaatctgttatctcagggcatccctgagattgataaaccatcccaagagttccctgaggagattgatctgcaggcccaggaggtccctgaggagataaattagaagtcctgggtggtccctgaagtgattgatcagctgcctggagagggtattcctcaagcccagcatccatctggtgatccaaaccctcagagccagtctctagcccatgaccagcactcaccccttccaccagcaacatgtgattaattttctcattagtggtatcacactataccagccatttgagccagcaaccttttctgttggctaactcactggccagctctcaccagcggtgtctggggaagtagttctctttgtatgaagcatacctgtgccagagctgtggttgaggaggagccagttttaggttcgaagaagccattggctcctcacttagccattagacttgaataggatttccttggggtgggttggtctgtcattacccagccttctctgagcatcctaggaaatcacagattgttaaaggaaatgccgcttcactgctgaagacaccatctggcgacagcaaatgcaaaagaggggactctagggtcttcacttttctggggaaatgttcacgacttctcaaggtacgcttagaccatatgtgcattcaggggactcttgtctttgccagcactcctcaggtgagcccgggatggctatctgaaatgtctggaaaatagagtcccttccccaaacatctgacatggccactaaatctttagacttgccttatagatccttccatatcatccccaagtgccccttctgcctcagtcctgttcctctgggcaatagctctagggaaaagtaggtattagactgctgtgcaaaattcagagcaactacttaaaatgctctagaggattcttagccagtctgtgaaagtgggcctcctctgtggtggggctgtttggcttaggagatgctgtagtagtagagataatcaggttctattttaagcaatcagcagagatcaatattgtacagatacaagcaaaggtttaataaatatatatatatatatttatttctgtagttgtgccagggacagactggccaaagaccaaacactgcagggtccccaagaaatttgtccttatatcattgtgtctgagggccagatatgattatgaagctttttccaaagatccagggatgggaatgggagtgggtaggaggggtaatgcggtcattggagtcgggggctggaacattatgagtgctcaataaatataaactaatgagaatggtggtgatgga

SEQ ID NO: 273357 - DNA, 4227 bp, Artificial Sequence
  derived and/or modified sequence
atgtggtcactgactgcctctgagggcgaaagcactaccgctcattttttcctcggggccggggatgagggactcgggacccggggcatcgggatgaggcctgaggagagcgattccgagctgcttgaagacgaggaggatgaggtgccccccgagcctcagataattgtgggcatttgtgctatgacaaaaaagagcaagtcaaaacctatgacccagattctggagcgcctctgcagattcgattacctgaccgtggttatactaggagaggatgtcattctgaatgagcccgtggagaattggccaagttgtcactgcctgatttcttttcactcaaagggcttccctctggataaggctgtggcttattctaaactcagaaacccgtttttgattaacgatctcgcaatgcaatactacatacaagaccggagggaagtgtatagaatcctgcaggaggaggggatcgaccttccacggtacgccgtgctcaaccgagatccagcccgccctgaagagtgcaacctgattgagggcgaggatcaggttgaggttaatggcgccgttttcccaaaacctttcgtcgagaaaccagtttctgctgaagaccataacgtgtacatctactatcccagcagtgccggcggcggttcacagagactgttccggaagatcggttcgcggtctagcgtgtacagtccagaaagttccgttcgcaagacgggtagctatatttacgaggagtttatgcccaccgacggcacggacgttaaggtctataccgtggggcccgattatgcccatgctgaagccaggaagtctccagctcttgacggcaaagtggagagggactccgagggtaaggagatcaggtatccagtaatgttgacagctatggaaaagctggttgcccgaaaggtgtgtgttgccttcaaacaaacagtttgcggtttcgacctcttgcgggcgaatggccactctttcgtgtgcgacgtgaatggctttagttttgtcaaaaacagtatgaagtattacgacgactgcgccaaaattctggggaacaccatcatgcgagagctagccccccagttccagattccgtggtccatccccaccgaggcagaggacatccctattgtcccaacgacttccggcaccatgatggagctccgatgcgtgattgccatcatccggcatggggacaggacgccaaagcagaaaatgaagatggaggtgaagcatccacggtttttcgccctcttcgagaagcacggcgggtacaagacgggaaaactgaaactgaagcgccctgaacagttgcaggaagttctcgacattacaaggctacttctggccgaacttgaaaaagaaccagggggtgagattgaagagaagaccggcaaactggaacagcttaagtcggttcttgagatgtatgggcacttcagcggaatcaatagaaaggttcaactgacttactaccctcatggagtcaaagctagcaatgaggggcaagaccctcagcgcgagacactcgctcctagtctgctccttgtacttaagtggggcggagagttgacgcccgctggccgcgtgcaggcagaagaattgggcagagcatttcgttgtatgtatcccggaggacaaggagattatgctggcttccctggatgcggactgctccgcctgcattcaactttccgacatgatcttaagatttacgcctctgatgaaggaagagtccagatgactgccgccgcattcgcaaaaggtttgttagctctggagggcgaactgaccccgatactcgtgcagatggtcaaaagcgcaaacatgaatggcttacttgactctgatggtgattctctgtcatcatgccagcatagggtaaaggccaggctccatcacatcctgcagcaggacgccccctttgggcctgaagattacgatcaattggcgcccacccgttcaacctctctgctcaattctatgactattatccaaaaccccgtaaaagtgtgtgaccaggtctttgcccttatagaaaatctgacccaccaaattcgtgagcgcatgcaggacccgcgtagcgtcgacttacaattgtaccactccgagaccctcgagttgatgctccagaggtggtctaagctcgaacgggacttcagacagaaatcagggcggtatgacatttcaaagatcccagacatatatgactgcgtcaaatacgatgtgcagcacaatggttccttggggctgcaaggtaccgcagaattacttcgcctctctaaggccctggccgacgtggttatccctcaggagtatggaatatcccgggaagagaaactggagatagccgtaggcttctgtcttcccctgctgcggaaaatactactagatttgcagaggactcacgaggacgagagtgtcaacaaactccatcccctttactctcggggcgtactgtctcccggtagacacgtgagaacacgtctgtactttacgagtgaatctcacgttcactctctgctctcagttttcagatatgggggtctgctcgacgagacgcaggacgctcagtggcagagggcgctggactatttgtctgccatatccgaactaaattatatgacccagatcgtgattatgctctacgaggacaacacccaagacccattgtcagaggaacggttccatgtggaactccacttctcgcctggcgtcaaaggcgtcgaggaggaaggcagtgcaccagcggggtgcgggttccgcccggcctcaagcgaaaatgaagagatgaaaactaatcaggggtccatggagaatttgtgtccaggtaaggcctccgatgagcctgatcgcgccctccaaacttccccacaacctcctgaaggccccgggctgcctaggagatcaccacttattcgcaaccgaaaggccggctctatggaggtcctttctgaaacatcttctagtagacccggcggctacagattgttttcatcttctcggccgcccaccgagatgaagcagagtggcctaggctcacagtgtacaggactgtttagcaccaccgtgctcggaggaagctcctccgccccgaatctgcaggactacgcccgaagccacggcaaaaagctccctcccgccagtctaaaacacagggatggatttgaagggtgctcaatggtccccaccatctatccacttgagaccttacacaacgcgctttccttacgacaggtctctgagtttctgtcaagagtatgtcagcgacacaccgacgcccaggcccaagccagtgccgccttattcgattcgatgcactcttcacaggcgagtgacaaccctttctcaccacctcgtactctccatagcccacccctacagttgcagcagaggtccgaaaagcccccctggtattctagtggcccaagctccacagttagctctgccggtccgagctcaccaaccaccgtggatgggaattcccaattcggattctctgatcaaccgtcattaaactcacatgtcgctgaggagcatcaaggcctaggtctgttgcaggaaaccccaggatctggtgcccaggagctctctatagagggcgagcaggagctgtttgaacctaatcagagccctcaggtaccgccgatggaaacgagccaaccctatgaagaggtgtcccagccgtgccaggaggtccccgacatctcccagccttgtcaggatatctctgaggctctgtctcaaccttgtcagaaggttcctgacattagccagcagtgccaagagaaccacgacaacggaaaccacacatgccaggaggttccccacatctcacagccatgccagaagagctcgcagctttgccagaaagtcagcgaagaggtctgccaactgtgcctagagaactcagaggaagtgtctcagccgtgtcagggggttagcgtcgaggtcggcaaactggtgcataagttccacgtgggagtagggtcactggtgcaagaaactctagttgaagtcggctcccccgccgaagagatccccgaggaggtgatacagccctatcaagaattttctgtggaggttggccgtttggcacaggagacctctgccattaacctactgtctcaaggcattcccgaaatcgacaagccctcgcaggagtttcccgaagagatcgatctgcaggcccaggaggtaccggaggaaataaactag

SEQ ID NO: 273358 - DNA, 5565 bp, Artificial Sequence
  derived and/or modified sequence
gcgggactcaagagtagccttcctcgaggacctgcctttcccatttgctgcctgaagttaatgtttcttgctggccaaatcagggacatgccggcattagcgggatgagtgggtgttccggcagggatgtggtcattgacggccagtgagggcgagagtaccacggcccacttcttccttggagctggagatgaggggctgggcacccgtggaataggcatgaggccagaagagagtgacagcgagctccttgaggatgaggaggatgaagtgcctcctgaacctcagatcattgttggcatctgtgccatgaccaagaaatccaagtccaagccaatgactcaaatcctagagcgactctgcagatttgactacctgactgttgtcattctgggagaagatgtaatccttaatgaacctgtggaaaactggccatcctgccactgcctcatctctttccactccaaaggctttcctctggacaaagctgttgcttactccaagcttcgaaacccctttcttatcaatgatctggccatgcagtattacatccaagataggagggaggtgtaccggatcctgcaggaagagggtattgatctgcctcgatatgctgtgctcaaccgtgatcctgcccggcctgaggaatgcaacctgatagaaggtgaagaccaagtagaggtcaatggagctgtctttcccaagccctttgtggagaagccagtgagtgcagaagaccacaatgtttacatctactaccccagctcagctggaggaggaagccagcgtctctttcgtaagattggcagccgaagcagtgtttactctcctgagagcagcgtccgaaagacggggtcgtacatctatgaggagtttatgccaacagatggcacagatgtcaaggtgtatacagtggggccagattatgcccatgctgaagctagaaaatctccagctttggatgggaaggttgaacgagacagtgaggggaaagagattcgatatccagtcatgctgactgccatggaaaagctggtggccaggaaagtctgcgtagctttcaagcaaacagtttgtggatttgaccttcttcgtgccaatggtcattcctttgtgtgtgatgtcaatggctttagttttgtcaagaactcgatgaaatactacgatgactgtgccaagattctggggaacaccataatgcgggagcttgccccacagttccagattccatggtccatccccacggaggctgaggacattcccattgttcccaccacatctggcactatgatggaacttcgttgtgtcattgcaattattcgtcatggggatcgtactcccaagcagaagatgaagatggaagtgaaacacccaaggttttttgctctgtttgaaaaacatggtggctacaagacagggaaattaaaactcaagcgacctgagcagctccaggaggtgctggatatcacaaggctgttgttggctgaactggagaaagaaccaggtggtgagatcgaggagaagactggaaaactagagcagctgaagtctgtactggagatgtatggtcacttctcaggtataaaccggaaggtacaattgacttactaccctcatggagtaaaagcttctaatgaggggcaagatccacagagggaaactctggccccatctctgttgctggtactgaagtggggtggagaactgactcctgctggccgtgttcaggctgaggagctggggcgagcttttcgctgcatgtaccctggaggacagggtgactatgctggcttccctggttgtgggctgcttcgtctccatagcactttccgccacgatctcaagatctatgcctctgatgagggtcgtgttcagatgactgctgctgccttcgccaagggccttctggctctagaaggggagctgacacccattttggtgcaaatggtgaagagtgccaacatgaatgggctactggacagcgatggggattccttgagcagctgccagcaccgggtgaaggctcggctgcaccatattctacagcaggatgcgccctttggccctgaggactacgatcagctggctcccaccagaagtacttccctgctcaactccatgactatcatccagaatcctgtgaaggtctgtgatcaggtatttgccctgatcgaaaacctcacccaccagatccgggaacgaatgcaggaccccaggtctgtagacctgcagctctaccacagtgagacactagagctaatgctacagcgttggagcaagctggagcgtgactttcgacagaagagtgggcgctatgatatcagtaagatccctgacatctatgactgtgtcaagtatgatgtgcagcacaatgggagtctgggacttcaaggcacagcagagttgctccgtctctctaaggcactggctgatgtggtcattccccaggagtacgggatcagtcgggaggagaaactggaaattgctgtgggcttctgtcttccactgttgcggaagatactacttgacctgcagagaacccacgaggatgagtctgtcaacaagctgcatcccctgtactcccgaggcgtgctctccccaggtcgccacgttcgaacgcgtctctatttcaccagtgagagccatgtccactccctgctcagtgtcttccgttatggaggacttcttgatgagacccaggatgcacaatggcagcgagctttggattatcttagtgccatctcagagcttaactacatgacccagattgtcatcatgctttatgaggacaacacacaggatcccttatcagaggaacggttccatgtggagctacacttcagccccggagtgaaaggtgttgaggaagaaggcagtgccccggctggctgtggattccgtccagcctcttctgagaatgaggagatgaaaaccaaccaaggcagtatggagaacctgtgtccaggaaaggcatcagatgaaccagaccgggcattgcagacttcaccccagcctcctgagggccctggccttccgaggagatcacccctcattcgtaaccgaaaagctggttccatggaggtactttctgagacttcatcctcgaggcctggtggctaccggctcttttcatcttcacggccacccacagaaatgaagcagagtggcctaggctcacagtgcacagggctgttcagcaccacagtgctgggtggctcctccagtgccccgaatcttcaggactacgcccgcagccatggcaaaaagctaccacctgccagtctgaagcaccgagatgggtttgaagggtgttccatggtgcctaccatctaccctctggaaacactgcataatgccctttccctacgtcaagtgagtgaattcttgagtagagtctgccagcgccacactgatgcccaggcacaggcatctgcagccctctttgattccatgcacagcagccaggcctcagataacccattttctccaccacgtactcttcattcacctcccctgcaactccagcagcgctctgagaagcccccttggtacagcagtggcccttctagcactgtgtccagtgctggtccttcttcccctactacagtagatggtaactcccaatttggcttcagtgatcaaccctccctaaattcacacgtggctgaagaacatcaaggccttgggctgctccaggagacccctgggagtggagcacaagagctctccatagaaggggagcaagagctttttgaaccaaatcagtccccacaggtgccacctatggaaaccagccagccatacgaggaggtcagccagccatgtcaggaggtccctgacatcagccagccatgccaggacatttctgaggcgctcagccagccatgtcagaaggtccctgacatcagccagcaatgccaggagaaccatgacaatggtaaccacacatgccaggaggtccctcacatcagccagccatgccagaagtccagccaactgtgccagaaagtctctgaggaagtttgccagctatgtctggagaactccgaggaggtcagccagccatgccagggggtctctgtggaggttggcaagctggtccataagttccatgtaggggttggtagcttggtccaggaaacccttgtagaagttggcagcccagctgaagagatccctgaggaggtcatccagccataccaggagttctctgtggaggttggcaggctggcccaggagacttctgcgatcaatctgttatctcagggcatccctgagattgataaaccatcccaagagttccctgaggagattgatctgcaggcccaggaggtccctgaggagataaattagaagtcctgggtggtccctgaagtgattgatcagctgcctggagagggtattcctcaagcccagcatccatctggtgatccaaaccctcagagccagtctctagcccatgaccagcactcaccccttccaccagcaacatgtgattaattttctcattagtggtatcacactataccagccatttgagccagcaaccttttctgttggctaactcactggccagctctcaccagcggtgtctggggaagtagttctctttgtatgaagcatacctgtgccagagctgtggttgaggaggagccagttttaggttcgaagaagccattggctcctcacttagccattagacttgaataggatttccttggggtgggttggtctgtcattacccagccttctctgagcatcctaggaaatcacagattgttaaaggaaatgccgcttcactgctgaagacaccatctggcgacagcaaatgcaaaagaggggactctagggtcttcacttttctggggaaatgttcacgacttctcaaggtacgcttagaccatatgtgcattcaggggactcttgtctttgccagcactcctcaggtgagcccgggatggctatctgaaatgtctggaaaatagagtcccttccccaaacatctgacatggccactaaatctttagacttgccttatagatccttccatatcatccccaagtgccccttctgcctcagtcctgttcctctgggcaatagctctagggaaaagtaggtattagactgctgtgcaaaattcagagcaactacttaaaatgctctagaggattcttagccagtctgtgaaagtgggcctcctctgtggtggggctgtttggcttaggagatgctgtagtagtagagataatcaggttctattttaagcaatcagcagagatcaatattgtacagatacaagcaaaggtttaataaatatatatatatatatttatttctgtagttgtgccagggacagactggccaaagaccaaacactgcagggtccccaagaaatttgtccttatatcattgtgtctgagggccagatatgattatgaagctttttccaaagatccagggatgggaatgggagtgggtaggaggggtaatgcggtcattggagtcgggggctggaacattatgagtgctcaataaatataaactaatgagaatggtggtgatgga

SEQ ID NO: 273359 - DNA, 4227 bp, Artificial Sequence
  derived and/or modified sequence
atgtggtcgctcacggcatctgagggtgagtcaactaccgcacattttttccttggcgctggggatgaggggctgggcacccgtggtattggtatgaggcctgaggagtctgacagcgaactactcgaagacgaagaagatgaggttccaccagagccccagatcatcgtggggatttgtgccatgactaagaagagtaaatcaaagcccatgactcaaattctggagcgcttgtgcagattcgactacttaacagtggtaatcctcggggaagatgttatccttaacgagcctgttgaaaactggccaagctgtcattgtctcatttcattccatagcaagggtttccccctggacaaggcagttgcatactccaagctgcggaaccccttcctaattaatgatttggcaatgcagtactacatccaggacagacgtgaggtgtataggattcttcaagaggaagggatcgacctgccgcggtacgctgttttgaatcgggatccggcacgtcccgaggaatgcaacttgatcgaaggtgaagatcaggtggaggttaacggagctgtgtttcccaagccttttgtggagaagccagtcagcgcagaagaccacaacgtgtatatatactatcccagcagtgccggaggaggatctcagcggctctttaggaagattggcagtcgctcgtcagtgtattctcctgagtcttctgtgagaaagacaggttcatacatttacgaagaattcatgcctacagatggcaccgatgttaaagtgtacaccgtgggccccgattatgcacatgcggaagctcgtaagtcccctgccctggacggcaaagttgaacgcgatagcgaaggcaaagagatccggtaccccgttatgctcacagccatggaaaaattagtggccagaaaggtctgcgttgctttcaaacagacagtatgtgggtttgacctcctgagagcaaatggccactcttttgtctgtgacgttaatgggttttctttcgttaaaaactccatgaagtattacgatgattgtgcaaagattttgggaaacacaattatgcgcgagctggcccctcagtttcagatcccatggtctattccaaccgaagcagaggacatacccatagtgccgactacatctggaacaatgatggaactgcgctgtgtgattgctatcatcagacacggagacagaacacccaaacagaaaatgaaaatggaagtgaagcatcccagatttttcgcgctgtttgagaaacacggcggctacaaaaccgggaaacttaagctaaagcgccctgagcagctgcaagaggttctggacattacaagactgctcctggccgaactggaaaaggaaccaggtggtgagatcgaggagaagaccgggaaacttgagcagttaaagagcgtgctagagatgtacgggcatttttccggcatcaacagaaaagtgcaacttacatattacccgcatggagtcaaagcgtctaatgaaggacaagatccacagagggagaccctggccccaagcttgctgctggtgttgaagtgggggggagagctcaccccggcaggtcgcgttcaggcagaggaactggggagggcatttaggtgcatgtatccgggagggcagggggattatgccggattccccggttgcgggctgctcagattacactcaactttcagacacgatctgaaaatatacgcatcagatgaggggcgggtgcagatgactgcggctgcttttgctaaaggactcctcgctcttgaaggagaactgacgcccatcctggtgcagatggtcaaaagcgccaacatgaatgggctcctggactcggacggcgactcactctcttcatgccagcacagagttaaggctagacttcaccacattttgcaacaggacgctccgttcggacccgaagactacgaccaacttgccccaacccgctcaacttccctgttaaactccatgaccataattcaaaatcccgtcaaggtgtgcgatcaagtgtttgccctcatcgagaacctgactcatcagataagggaaaggatgcaagaccctcgatctgtcgatctccaactatatcattcggaaacacttgagcttatgctccagcgatggagcaagttagaacgagactttcgacagaaatccgggaggtatgatataagtaaaattcctgacatttacgattgtgtgaagtatgacgtccagcataacggcagtctggggctgcagggaactgcagaactgctgcgcctaagcaaggcgttggccgatgtggtcattccccaagagtacggtattagccgagaagagaagctggaaatcgctgtgggcttctgcctgccattattgaggaaaatcctgttggatctccagcgtactcatgaggatgagagcgtgaacaaactgcacccattgtacagccgtggggtcctctctccaggcaggcacgtgcgaactaggctctacttcacaagcgaatctcacgttcacagcttgctgagtgtgtttagatatgggggactcctggacgagactcaggacgcccagtggcaacgagccctggattacttatccgcgattagtgaactcaattatatgacgcagatcgtcattatgttgtacgaggataatacacaagaccctctgtcagaggaacgattccacgtagagcttcattttagccctggcgtaaagggggtggaggaagagggcagcgcacccgccggatgcggatttcgccctgcatcctcggaaaatgaagaaatgaaaactaaccagggatccatggagaacctgtgccctggaaaggcaagcgacgagccagaccgggccctgcagacctcgccacagccccctgaagggccggggctgccccggagatcacctctgatcagaaacagaaaggccggatctatggaggtcctgtccgagaccagctcttcacggccaggcgggtatagactgttctcatcatctcggccacccactgagatgaaacagtcaggattggggtcccagtgtacaggactgttttcaactacagtgcttggcggaagctcctctgctcctaacttgcaggattacgcacgctctcatggcaagaagctgccccccgccagcctaaagcatagggacggatttgagggttgctccatggtacccaccatctatccattagagacactgcataacgcgctatccttaaggcaagttagcgagtttctgagcagagtgtgccagagacataccgacgcacaggctcaggcctcagctgctctctttgattctatgcacagcagccaagcatctgataacccattcagcccaccaaggaccctgcacagtcctcccctgcagctgcagcaacgctccgagaaaccgccatggtactcctcaggcccgtcctccactgtgtcctcagctggcccttcctcacccaccaccgtggacgggaatagccagtttggcttttcggaccagccaagcctgaatagtcatgtggctgaagagcatcagggactggggctgctccaagaaacccctggctccggtgcccaggagctgagcatagaaggtgagcaagaactgttcgaaccaaatcagtccccacaggtgccgcccatggaaacaagccagccgtacgaagaagtcagccagccctgtcaagaggtccccgatataagccagccatgccaagatatctctgaggccttgtcccaaccgtgccagaaggttccagacatttctcagcagtgtcaggagaatcacgataacggtaaccatacctgtcaggaagtgccacacatctcacagccatgccagaagagttcgcagctctgtcaaaaagttagtgaggaagtgtgccagctgtgtctggagaattctgaggaagtgagtcagccctgccagggggtgtccgttgaagttggcaagctggtccataaatttcacgttggcgtggggtctttggtgcaggagaccctagtcgaagttgggtccccagccgaagaaattccagaagaagtgattcaaccgtaccaggagttctcagtagaggtggggcggttggctcaggaaacctctgcaattaacctgttgtcgcagggaattcctgaaattgacaagccaagtcaagaatttcccgaggagattgacctgcaggcgcaggaggttcctgaggaaatcaattag

SEQ ID NO: 273360 - DNA, 4227 bp, Artificial Sequence
  derived and/or modified sequence
atgtggagcctgaccgcatctgagggagagtccaccacagctcacttctttctgggggctggcgacgagggtctcggcaccaggggaatcgggatgagaccagaggagtccgactccgagctacttgaagacgaagaagacgaggtaccccccgagccacagattatcgtaggtatttgcgccatgactaagaaaagtaagagcaaaccaatgactcagatccttgaacgcctttgtcggtttgactatctcactgtagtgatcctgggggaggacgtgatccttaatgaacccgtggaaaattggccatcatgccattgtctgatttcctttcacagtaagggtttccctcttgataaggccgtcgcgtactccaagctccggaatccctttctgatcaatgatctggcgatgcagtactatatacaggatagacgagaggtgtacagaatactccaggaggaaggcattgatctgcccagatatgctgtgttgaatagagaccctgcaagacccgaagagtgcaacctaatagagggagaggaccaggtggaggtgaacggagcagtctttccaaagccatttgttgaaaaacctgtttctgctgaggaccataacgtgtacatttattacccatcgtccgctggcggcggttctcagcgcctgttccggaaaattgggagtcggagctctgtgtacagtcctgagtcctctgtgaggaagaccggcagctatatatatgaagagttcatgcccacggatgggactgatgtgaaggtgtatacagtcggaccggattatgcccacgccgaggctcgtaagagtccagcactcgatggtaaggtcgagagagatagtgagggtaaggagatcagatatcctgtaatgctgacagcaatggagaagctcgtggcaaggaaggtgtgtgttgcatttaagcagaccgtttgcggatttgacctcctcagagccaatggccacagtttcgtgtgtgatgtgaatggctttagcttcgtcaagaattcaatgaaatactacgacgactgtgctaagatcctcgggaatactatcatgagagagctggctcctcagttccagatcccttggagcatcccaactgaagctgaagatattcccattgtccctaccactagtgggacaatgatggagttacgctgcgtaatcgccattataagacatggagacagaacgcctaagcagaaaatgaagatggaagtgaagcaccctaggttctttgccttattcgagaaacacggcggctataagacaggcaaattaaaacttaaaaggcctgaacaactgcaggaggtattggacattacgagactgttattagccgaactggagaaggagcccggcggcgaaattgaggagaaaacaggaaaactggagcagctgaagagcgtcttggaaatgtacggacatttctcaggcatcaaccggaaggtacagctgacctactatcctcacggagttaaagcgtccaacgaggggcaggacccgcagagggaaactctggcaccatctcttctgctggtgttaaagtggggcggagagctaacgcctgcgggaagggtccaagcggaggaactaggccgggcgtttcgctgtatgtatcctggggggcaaggcgattacgcggggtttcctggttgtggtctgttgcgactccacagtacattcagacacgatctaaagatttatgcttccgacgaggggcgggtccaaatgactgcagctgcttttgctaaggggctcctagccttggaaggggagctcactccaattcttgtgcaaatggttaaatcggctaacatgaatggtctcttggatagcgatggcgattcactatcctcctgtcagcatagagttaaagcacgactgcatcatattctccagcaagatgcaccttttggccccgaggactatgatcagctggcgccaacccggtccacatctcttttaaactccatgactattattcagaatcccgtgaaagtgtgcgatcaggttttcgcactcattgaaaatttgacacatcaaatccgtgaaaggatgcaggatcccaggtccgtggacctgcagttgtaccactcggagacactggaactcatgctacaaagatggtcaaaacttgaaagagatttcagacaaaaaagtggacggtacgatatctctaaaatacccgacatatatgactgcgtaaaatacgacgtacaacataatgggagtctgggcctgcagggcaccgcagaactgctgcgcctgagcaaggcgcttgcagatgtcgtcatcccacaggagtacggcatttcccgggaagaaaaactggagatcgcagtgggattttgcctccccctgcttcgcaagatcctcctggacctgcagagaacacacgaagatgaatcggttaacaagcttcacccactgtacagccggggagttctgtctccaggcagacacgtacgaactcgcttatatttcacgtcagagtcacacgtgcatagcttattatcggtcttcagatacgggggcctgctcgacgagacgcaagacgcacagtggcaacgtgctcttgattacttgtcagcgatttccgagcttaactacatgacacagatcgtgatcatgctgtacgaggataatacacaggatccactgagtgaggagagatttcatgtcgagctccatttctcaccgggggtgaaaggcgtcgaggaggagggcagcgctcctgcagggtgcggattcaggccagcatctagcgagaacgaggagatgaaaactaaccaggggagcatggaaaacctatgccctggtaaggcctccgatgagcccgacagagcacttcagactagcccccagcccccagagggacctggccttcctcgcaggagcccactgattcgcaatcgcaaagcaggatccatggaagtgctgtcagaaaccagttcctcgagaccaggaggatatcggctgttttcatcgtctagaccacccacagagatgaaacagtcaggcctaggatcccagtgcacgggcctgttctccaccacagtacttggagggagtagctccgcccctaacttacaggattatgcacggtcccacggaaaaaagcttccaccggcaagccttaaacaccgggacggcttcgagggatgctctatggtgcctactatttatccactcgagacccttcataatgcactgagtctgagacaagtttcagagtttctgtccagagtatgccagcgccacacagacgcccaagctcaggccagcgcggcgcttttcgactctatgcattcttcccaggccagcgataatccgttttctccacctcggaccctccattcccctcccctgcaacttcagcaacgcagtgagaaacctccttggtacagtagtggtcccagctccactgtctctagtgccggtccatccagtcctaccacagtggacggaaattctcaatttggttttagtgaccagcctagcctgaacagccacgtggccgaggaacaccagggcttgggcctgctgcaagagactccgggctctggtgctcaagagttaagtatcgagggcgagcaggagctttttgagccaaatcagtccccccaagtgcctcccatggaaacttctcagccatacgaagaggtgtcacagccatgtcaggaggtcccagatatttcccaaccttgccaggacattagtgaagccctgagtcaaccctgtcagaaggttccagatatttcccagcagtgccaggagaatcatgataatggaaatcacacgtgtcaggaagttccccatatctcacagccttgccagaagtcctcccagctgtgccagaaggtctccgaagaggtctgccaactctgtttggaaaactcagaagaagtgagccagccatgtcagggtgttagcgtggaggtggggaaactggtacacaaatttcacgttggagtgggctccctggtacaggagactctcgtggaggtggggtctccagccgaggagatacccgaggaagttatccagccctatcaagagttctcagtcgaagtcggtcgcttagcgcaggagacaagtgccatcaatctgttaagccagggtatcccagaaattgacaaaccaagccaggaatttcccgaggagatcgacctgcaggcacaggaggtgcctgaagagatcaattag

SEQ ID NO: 273361 - DNA, 4227 bp, Artificial Sequence
  derived and/or modified sequence
atgtggagcctgacagccagcgagggggagagcaccacagcccacttcttcctgggcgctggagatgagggcctgggcacccggggcatcggcatgaggcctgaggagagtgacagcgagctgctggaggatgaggaggatgaggtgcccccagagccccagatcatcgtgggcatctgtgccatgaccaagaagagcaagagcaagcccatgacccagatcctggagcggctgtgccgctttgactacctgactgtggtgatcctgggagaagatgtgatcctgaatgaacctgtggagaactggcccagctgccactgcctgatctccttccacagcaagggcttccccctggacaaggctgtggcctacagcaagctgaggaaccccttcctgatcaatgacctggccatgcagtactacatccaggacagaagagaggtgtaccgcatcctgcaggaggagggcatcgacctgcccaggtatgctgtgctgaacagagatcctgcccggcctgaggagtgcaacctgattgaaggagaggaccaggtggaggtgaatggagctgtgttccccaagccctttgtggagaagcctgtgtctgctgaggaccacaacgtgtacatctactaccccagcagcgctgggggcggcagccagaggctcttcaggaagattggcagccgcagctctgtgtacagccctgagagctctgtgaggaagacaggcagctacatctatgaggagttcatgcccacagatggaacagatgtgaaggtgtacacagtgggccctgactatgcccacgccgaggccaggaagagccctgccctggatggcaaggtggagcgggacagcgagggcaaggagatccgctaccctgtgatgctgacagccatggagaagctggtggccaggaaggtgtgtgtggccttcaagcagacagtgtgtggctttgacctgctgcgggccaacggccacagctttgtgtgtgatgtgaatggcttctcctttgtgaagaacagcatgaagtactatgatgactgtgccaagatcctgggcaacaccatcatgagggagctggccccccagttccagatcccctggagcatccccacagaagctgaggacatccccatcgtgcccaccaccagcggcaccatgatggagctgcgctgtgtgattgccatcatccgccacggggacaggacccccaagcagaagatgaagatggaggtgaagcacccccgcttctttgccctgtttgagaagcatggaggctacaagacaggcaagctgaagctgaagaggcctgagcagctgcaggaggtgctggacatcacccggctgctgctggccgagctggagaaggagcctggaggagaaattgaggagaagacaggcaagctggagcagctgaagtctgtgctggagatgtatggccacttcagcggcatcaacaggaaggtgcagctgacctactacccccatggagtgaaggccagcaatgaaggccaggacccccagcgggagaccctggcccccagcctgctgctggtgctgaagtggggcggggagctgaccccagctggccgggtgcaggccgaggagctgggccgggccttccgctgcatgtacccaggcggccagggcgactatgccggcttccctggctgcggcctgctgcggctgcacagcaccttcagacatgacctgaagatctatgccagtgatgagggccgggtgcagatgacagctgctgcctttgccaagggcctgctggccctggagggggagctgacccccatcctggtgcagatggtgaagagcgccaacatgaatggcctgctggacagtgatggagacagcctgagcagctgccagcaccgggtgaaggcccggctgcaccacatcctgcagcaggatgccccctttggacctgaggactatgaccagctggcccccaccaggagcaccagcctgctgaacagcatgaccatcatccagaaccctgtgaaggtgtgtgaccaggtgtttgccctgattgagaacctgacccaccagatccgggagaggatgcaggaccccaggtctgtggacctgcagctgtaccacagcgagaccctggagctgatgctgcagcgctggagcaagctggagcgggacttccggcagaagagcggccgctatgacatcagcaagatcccagacatctatgactgtgtgaagtatgatgtgcagcacaacggcagcctgggcctgcagggcacagctgagctgctgcggctgagcaaggccctggctgatgtggtgatcccccaggagtatggcatcagccgggaggagaagctggagattgctgtgggcttctgcctgcccctgctgaggaagatcctgctggacctgcagaggacccatgaagatgagagcgtgaacaagctgcaccccctgtacagcagaggagtgctgagccctggccgccacgtgaggacccggctgtacttcaccagcgagagccacgtgcacagcctgctgagcgtcttccgctatggaggcctgctggatgagacccaggatgcccagtggcagagggccctggactacctgagcgccatcagcgagctgaactacatgacccagatcgtcatcatgctgtatgaggacaacacccaggaccccctgtctgaggagcgcttccacgtggagctgcacttcagccctggggtgaagggcgtggaggaggagggcagcgccccagctggctgcggcttccggcctgccagcagtgaaaatgaggagatgaagaccaaccagggctccatggagaacctgtgccctgggaaggccagtgatgagccagaccgggccctgcagaccagcccccagcccccagagggccctggcctgcccaggaggagccccctcatccggaacaggaaggccggctccatggaggtgctgtctgagaccagcagcagcaggcctgggggctaccgcctcttcagcagcagccggcccccaacagagatgaagcagagcggcctgggcagccagtgcaccggcctcttcagcaccaccgtgctgggcggcagcagcagcgcccccaacctgcaggactatgcccggagccacggcaagaagctgcccccagccagcctgaagcacagagatggctttgagggctgcagcatggtgcccaccatctaccccctggagaccctgcacaatgccctgagcctgcggcaggtgtctgagttcctgagccgggtgtgccagaggcacacagatgcccaggcccaggccagcgctgccctgtttgacagcatgcacagcagccaggccagtgacaaccccttcagcccccccaggaccctgcacagcccccccctgcagctgcagcagaggtctgagaagccaccctggtacagcagcggccccagcagcacagtgagcagcgctggccccagcagccccaccaccgtggatggcaacagccagtttggcttcagtgaccagcccagcctgaacagccacgtggccgaggagcaccagggcctgggcctgctgcaggagaccccaggcagcggggcccaggagctgagcattgaaggagagcaggagctgtttgagcccaaccagagcccccaggtgccccccatggagaccagccagccctatgaggaggtgtcccagccctgccaggaggtgcctgacatcagccagccctgccaggacatcagcgaggccctgagccagccctgccagaaggtgcctgacatcagccagcagtgccaggagaaccacgacaatggaaaccacacctgccaggaggtgccccacatcagccagccctgccagaagagcagccagctgtgccagaaggtgtctgaggaggtgtgccagctgtgcctggagaacagcgaggaggtgtcccagccctgccagggcgtgtctgtggaggtgggcaagctggtgcacaagttccacgtgggcgtgggcagcctggtgcaggagaccctggtggaggtgggcagccctgctgaggagatccctgaggaggtgatccagccctaccaggagttctctgtggaggtgggccgcctggcccaggagaccagcgccatcaacctgctgagccagggcatccctgagattgacaagcccagccaggagttccctgaggagattgacctgcaggcccaggaggtgcctgaggagatcaactag

SEQ ID NO: 273362 - DNA, 5638 bp, Artificial Sequence
  derived and/or modified sequence
accgcaaagaagtcgcgctttgattgggccgctgtcaggtgtcgctgcctgcaggttcggctgcgcgagcggagggaggcggttccctcttatgcttttcatctccatccccagccccacccacagccagggggcttgggttctgagctgatggggtacccccctctgcagagcgggatgagtgggtgttccggcagggatgtggtcattgacggccagtgagggcgagagtaccacggcccacttcttccttggagctggagatgaggggctgggcacccgtggaataggcatgaggccagaagagagtgacagcgagctccttgaggatgaggaggatgaagtgcctcctgaacctcagatcattgttggcatctgtgccatgaccaagaaatccaagtccaagccaatgactcaaatcctagagcgactctgcagatttgactacctgactgttgtcattctgggagaagatgtaatccttaatgaacctgtggaaaactggccatcctgccactgcctcatctctttccactccaaaggctttcctctggacaaagctgttgcttactccaagcttcgaaacccctttcttatcaatgatctggccatgcagtattacatccaagataggagggaggtgtaccggatcctgcaggaagagggtattgatctgcctcgatatgctgtgctcaaccgtgatcctgcccggcctgaggaatgcaacctgatagaaggtgaagaccaagtagaggtcaatggagctgtctttcccaagccctttgtggagaagccagtgagtgcagaagaccacaatgtttacatctactaccccagctcagctggaggaggaagccagcgtctctttcgtaagattggcagccgaagcagtgtttactctcctgagagcagcgtccgaaagacggggtcgtacatctatgaggagtttatgccaacagatggcacagatgtcaaggtgtatacagtggggccagattatgcccatgctgaagctagaaaatctccagctttggatgggaaggttgaacgagacagtgaggggaaagagattcgatatccagtcatgctgactgccatggaaaagctggtggccaggaaagtctgcgtagctttcaagcaaacagtttgtggatttgaccttcttcgtgccaatggtcattcctttgtgtgtgatgtcaatggctttagttttgtcaagaactcgatgaaatactacgatgactgtgccaagattctggggaacaccataatgcgggagcttgccccacagttccagattccatggtccatccccacggaggctgaggacattcccattgttcccaccacatctggcactatgatggaacttcgttgtgtcattgcaattattcgtcatggggatcgtactcccaagcagaagatgaagatggaagtgaaacacccaaggttttttgctctgtttgaaaaacatggtggctacaagacagggaaattaaaactcaagcgacctgagcagctccaggaggtgctggatatcacaaggctgttgttggctgaactggagaaagaaccaggtggtgagatcgaggagaagactggaaaactagagcagctgaagtctgtactggagatgtatggtcacttctcaggtataaaccggaaggtacaattgacttactaccctcatggagtaaaagcttctaatgaggggcaagatccacagagggaaactctggccccatctctgttgctggtactgaagtggggtggagaactgactcctgctggccgtgttcaggctgaggagctggggcgagcttttcgctgcatgtaccctggaggacagggtgactatgctggcttccctggttgtgggctgcttcgtctccatagcactttccgccacgatctcaagatctatgcctctgatgagggtcgtgttcagatgactgctgctgccttcgccaagggccttctggctctagaaggggagctgacacccattttggtgcaaatggtgaagagtgccaacatgaatgggctactggacagcgatggggattccttgagcagctgccagcaccgggtgaaggctcggctgcaccatattctacagcaggatgcgccctttggccctgaggactacgatcagctggctcccaccagaagtacttccctgctcaactccatgactatcatccagaatcctgtgaaggtctgtgatcaggtatttgccctgatcgaaaacctcacccaccagatccgggaacgaatgcaggaccccaggtctgtagacctgcagctctaccacagtgagacactagagctaatgctacagcgttggagcaagctggagcgtgactttcgacagaagagtgggcgctatgatatcagtaagatccctgacatctatgactgtgtcaagtatgatgtgcagcacaatgggagtctgggacttcaaggcacagcagagttgctccgtctctctaaggcactggctgatgtggtcattccccaggagtacgggatcagtcgggaggagaaactggaaattgctgtgggcttctgtcttccactgttgcggaagatactacttgacctgcagagaacccacgaggatgagtctgtcaacaagctgcatcccctgtactcccgaggcgtgctctccccaggtcgccacgttcgaacgcgtctctatttcaccagtgagagccatgtccactccctgctcagtgtcttccgttatggaggacttcttgatgagacccaggatgcacaatggcagcgagctttggattatcttagtgccatctcagagcttaactacatgacccagattgtcatcatgctttatgaggacaacacacaggatcccttatcagaggaacggttccatgtggagctacacttcagccccggagtgaaaggtgttgaggaagaaggcagtgccccggctggctgtggattccgtccagcctcttctgagaatgaggagatgaaaaccaaccaaggcagtatggagaacctgtgtccaggaaaggcatcagatgaaccagaccgggcattgcagacttcaccccagcctcctgagggccctggccttccgaggagatcacccctcattcgtaaccgaaaagctggttccatggaggtactttctgagacttcatcctcgaggcctggtggctaccggctcttttcatcttcacggccacccacagaaatgaagcagagtggcctaggctcacagtgcacagggctgttcagcaccacagtgctgggtggctcctccagtgccccgaatcttcaggactacgcccgcagccatggcaaaaagctaccacctgccagtctgaagcaccgagatgggtttgaagggtgttccatggtgcctaccatctaccctctggaaacactgcataatgccctttccctacgtcaagtgagtgaattcttgagtagagtctgccagcgccacactgatgcccaggcacaggcatctgcagccctctttgattccatgcacagcagccaggcctcagataacccattttctccaccacgtactcttcattcacctcccctgcaactccagcagcgctctgagaagcccccttggtacagcagtggcccttctagcactgtgtccagtgctggtccttcttcccctactacagtagatggtaactcccaatttggcttcagtgatcaaccctccctaaattcacacgtggctgaagaacatcaaggccttgggctgctccaggagacccctgggagtggagcacaagagctctccatagaaggggagcaagagctttttgaaccaaatcagtccccacaggtgccacctatggaaaccagccagccatacgaggaggtcagccagccatgtcaggaggtccctgacatcagccagccatgccaggacatttctgaggcgctcagccagccatgtcagaaggtccctgacatcagccagcaatgccaggagaaccatgacaatggtaaccacacatgccaggaggtccctcacatcagccagccatgccagaagtccagccaactgtgccagaaagtctctgaggaagtttgccagctatgtctggagaactccgaggaggtcagccagccatgccagggggtctctgtggaggttggcaagctggtccataagttccatgtaggggttggtagcttggtccaggaaacccttgtagaagttggcagcccagctgaagagatccctgaggaggtcatccagccataccaggagttctctgtggaggttggcaggctggcccaggagacttctgcgatcaatctgttatctcagggcatccctgagattgataaaccatcccaagagttccctgaggagattgatctgcaggcccaggaggtccctgaggagataaattagaagtcctgggtggtccctgaagtgattgatcagctgcctggagagggtattcctcaagcccagcatccatctggtgatccaaaccctcagagccagtctctagcccatgaccagcactcaccccttccaccagcaacatgtgattaattttctcattagtggtatcacactataccagccatttgagccagcaaccttttctgttggctaactcactggccagctctcaccagcggtgtctggggaagtagttctctttgtatgaagcatacctgtgccagagctgtggttgaggaggagccagttttaggttcgaagaagccattggctcctcacttagccattagacttgaataggatttccttggggtgggttggtctgtcattacccagccttctctgagcatcctaggaaatcacagattgttaaaggaaatgccgcttcactgctgaagacaccatctggcgacagcaaatgcaaaagaggggactctagggtcttcacttttctggggaaatgttcacgacttctcaaggtacgcttagaccatatgtgcattcaggggactcttgtctttgccagcactcctcaggtgagcccgggatggctatctgaaatgtctggaaaatagagtcccttccccaaacatctgacatggccactaaatctttagacttgccttatagatccttccatatcatccccaagtgccccttctgcctcagtcctgttcctctgggcaatagctctagggaaaagtaggtattagactgctgtgcaaaattcagagcaactacttaaaatgctctagaggattcttagccagtctgtgaaagtgggcctcctctgtggtggggctgtttggcttaggagatgctgtagtagtagagataatcaggttctattttaagcaatcagcagagatcaatattgtacagatacaagcaaaggtttaataaatatatatatatatatttatttctgtagttgtgccagggacagactggccaaagaccaaacactgcagggtccccaagaaatttgtccttatatcattgtgtctgagggccagatatgattatgaagctttttccaaagatccagggatgggaatgggagtgggtaggaggggtaatgcggtcattggagtcgggggctggaacattatgagtgctcaataaatataaactaatgagaatggtggtgatgga

SEQ ID NO: 273363 - DNA, 4227 bp, Artificial Sequence
  derived and/or modified sequence
atgtggagcctgaccgccagcgagggcgagagcaccaccgcccacttcttcttgggtgctggggatgaggggttagggacccgggggatcggaatgagacctgaggaatcagattccgaactgctcgaggatgaggaagacgaagtgccgcctgagccccagatcatcgtcgggatttgcgctatgaccaagaaatccaaatccaagcccatgactcagatcctggaaagactgtgccgctttgactacctaaccgttgtcatactcggtgaggacgtaatccttaacgaacctgtagaaaactggccctcatgtcactgtctgatttcgttccattccaagggcttcccactagataaagcggtggcttatagcaaactgcgcaaccccttcctgatcaatgacctcgcgatgcagtattacattcaggatcggcgtgaggtttaccggattctccaggaggagggtattgatctcccacgctacgccgtgctcaatcgtgatccagcccggcccgaagagtgtaacttaattgaaggggaggaccaagttgaggtgaacggggctgttttccccaagccattcgtagagaagccagtttcagcggaggatcacaatgtgtacatctattatcctagctctgcaggaggcgggagtcagcgactcttccgcaagatcggatcccgttcttctgtctactcacccgagtcatccgttagaaaaaccggtagttatatctatgaggaatttatgcccacagatggaactgacgtgaaggtatatacggtcggccccgactatgcacatgcggaggcacgcaagagcccagctctggacggcaaagtggagcgagacagtgaggggaaagaaatcagatatccagtgatgctcaccgccatggaaaagctggtggcccgaaaggtatgcgtcgcctttaagcaaaccgtctgcggattcgatctcctgagagccaacggacacagctttgtgtgtgacgttaacggcttttccttcgtcaaaaattccatgaagtactacgatgactgtgccaaaatcctagggaataccatcatgcgggagcttgccccccaattccagattccttggtctatccctacagaggccgaagatatccccatcgtgcctaccacaagcggtactatgatggagcttaggtgtgtaatcgccatcatcagacatggcgaccgtacacccaagcaaaagatgaaaatggaagttaaacatcccaggtttttcgccctcttcgaaaagcacgggggctataaaactggaaagctgaaactgaagcgaccagaacagctgcaggaggtcctggatataacaagactgctgttggccgagctggagaaggagccaggcggggaaatcgaagaaaaaacaggcaaattagaacagctgaagagcgtgctggaaatgtatggtcacttctctggcattaaccgtaaggtgcaactgacttactacccacatggcgtgaaagcctccaatgaaggacaggatcctcagagggaaaccctcgccccctcactgctcctcgtcctcaaatggggaggagagttgaccccagctggccgggtgcaggctgaagagctgggtagagcctttcgctgtatgtaccctgggggtcagggagattacgcgggattcccgggttgtggattactgcgacttcatagcaccttccgccatgatctgaagatctacgctagcgacgaggggcgggtacagatgaccgcagctgcattcgcaaaaggcctgttggcattggaaggcgaactcaccccaatcttggtgcagatggtaaaatccgcgaatatgaacggattactggattccgatggcgacagcctctccagctgccagcacagggtaaaagcacgcctccaccacattctccagcaagatgcaccatttggtcctgaagactatgatcaacttgcccctacacgaagcacatcccttctgaactcaatgaccataatccagaatcctgtaaaagtttgcgaccaggtcttcgccctgatcgaaaacctgactcaccaaatccgcgaaagaatgcaggatcctcgctctgtggatcttcagttgtatcactctgagaccctcgagctgatgttgcaaagatggtccaaactggagcgcgactttaggcagaaaagcggacggtatgatatctctaagattcctgacatctatgattgcgtgaagtacgatgtgcagcacaacgggtcattaggcctgcagggcacggctgagcttctgcgcctctccaaggccttggccgacgtcgtgatcccacaagaatacgggatttcccgagaggaaaaactggaaatagcggtcggcttctgcctccctctgcttcgcaagatcctgcttgatctccagaggacacacgaggacgaaagcgtcaacaaactgcatcccctatacagtcggggagtcctgtcccccggacgccatgtgcgcacccggctgtactttacatcagagtcccatgttcacagcctgctgtctgtcttcaggtacgggggactgctggacgagacccaagatgctcagtggcagagggccctagattacttgtctgccatctcagagttgaattacatgacccagatagtgattatgctgtatgaggacaatactcaagatccactgtctgaagagcggtttcatgttgagctgcacttttcccctggcgtaaaaggtgttgaggaagaagggtccgcccccgccggatgcggtttccgacctgccagctctgagaatgaagagatgaaaacaaatcagggaagtatggaaaacttatgccctggcaaggcttctgacgagcccgatagagccctccagacatcccctcagcctccagagggccccgggctgccccggcgcagcccgttgattaggaataggaaggccggctccatggaagtcctatctgaaacgtctagctcgagaccaggtggctatcgacttttcagtagttccaggccaccgaccgagatgaaacagagcggactgggctcgcagtgcaccggtctattctctactactgtactgggagggagttcctcggcccctaatctgcaggattacgctcgttctcacggaaagaaactaccccctgcctctctgaagcatagggacgggttcgagggatgttccatggtgcctactatctatccacttgagaccctccacaatgccttaagtctgcggcaggtgtccgagttcctatcacgagtgtgccagcgccacactgatgcgcaggcccaggcttcagcagctctttttgactccatgcacagctcacaggctagcgacaaccccttttccccgcctcggaccttacattctccaccactgcagctgcagcagagaagcgagaaacccccgtggtactcgagtgggccctcgagcaccgtgtccagtgccgggcccagcagtcccactacagtcgacggcaacagccagtttggcttctccgaccagccatcactgaactctcacgttgccgaagagcatcagggtctgggtctgttacaggaaacccccggctctggggctcaggaactgtcaatagagggggaacaagagttgttcgaacccaaccagagccctcaggtgcctcccatggaaacctcacagccatatgaggaggtgagtcaaccctgccaggaagtaccggacatttcgcagccatgccaagatatttccgaagctctttcgcagccgtgtcagaaggtacccgacatatcccaacaatgccaagaaaaccacgataacggtaatcatacttgccaggaggtgccacacattagccagccatgccagaagtcgtcgcaactgtgtcaaaaggtgagcgaagaagtttgccagctgtgtctagagaattcagaagaagtgtctcagccctgccagggggtgagcgtggaggtgggcaaattggtacacaagtttcatgttggagtgggttcacttgtccaagaaaccctggttgaagtgggcagcccagccgaagagatacccgaagaggttattcagccttaccaggagttctccgtggaggtcggacgcctcgcccaggagacctcagcgatcaatctactttcgcagggcattcctgaaatcgacaagccctcccaggaattcccagaggagatcgacctgcaagcacaagaagttcctgaggagatcaactag

SEQ ID NO: 273364 - DNA, 4227 bp, Artificial Sequence
  derived and/or modified sequence
atgtggagcctgaccgccagcgagggcgagagcaccaccgcccactttttcctgggcgcaggggatgagggtctgggcacccggggcattgggatgaggccggaggagtcggacagcgagcttctggaggacgaagaggatgaggtccctccagaaccccagatcatcgtgggaatttgtgccatgacaaagaagagtaagagcaagcccatgacccagatattagaacggctgtgtaggttcgattacctcactgtggtgattctcggggaggacgttatactgaacgaacccgtagaaaattggccatcttgccactgtctgattagctttcatagcaaggggttcccactagataaggctgttgcgtattctaagcttagaaaccccttcctcatcaatgacttagctatgcagtactacatacaagataggcgggaggtttacaggattctgcaagaagaaggcatcgatctaccccgttacgctgtgctcaatagagacccagccaggccggaggagtgcaaccttattgagggagaagatcaggtcgaggtaaatggcgccgtatttcctaagccgtttgtggaaaagcctgtgtccgcagaggatcacaatgtgtacatctattatccatcatcagctgggggaggatctcagcgcctttttagaaagattggttctaggtcaagcgtgtactctccagaaagctctgtgcgcaagactggatcctatatatatgaggaattcatgcctacagacggcactgatgtgaaagtctatactgttggcccagattatgcgcatgccgaggcaagaaagagtcctgcccttgacggcaaggtcgagagagattcagaggggaaggaaatccgttatccggtcatgctgacagccatggagaagcttgtcgcgcgcaaagtttgcgtggcatttaaacagaccgtttgtggcttcgatctcctgcgggccaacggacattctttcgtgtgcgacgtgaacgggttcagtttcgtcaagaatagcatgaaatattacgatgactgcgcaaagatattgggcaataccatcatgagggagctggccccacaattccagataccctggtccatcccgaccgaagctgaggacatcccaatcgtaccaacaacctccggcaccatgatggagctccggtgcgtgattgcaattataaggcatggcgaccggacacccaagcagaaaatgaaaatggaagtcaagcacccaaggttcttcgctttatttgagaagcacggggggtacaagaccggtaagctgaagttgaaaaggccagagcagttacaggaggttctggatattacacggctgctgctggccgaactcgagaaggagccaggtggcgagatcgaagagaagacgggtaaattggaacagttgaaatctgtgctcgaaatgtacgggcatttttctggaattaatcgcaaagtgcagctaacttattatccacatggcgtgaaggctagtaatgaaggccaagacccacagcgggagactctggcccccagcctgctcttggtgctgaaatggggaggcgaactgactccagccggtagagtccaggccgaggaactgggacgtgcgttcagatgcatgtatccaggtggccagggggactacgcagggtttcctggttgcggacttctacgattgcactctaccttccggcacgatctgaaaatatacgcctctgacgaggggcgggtacaaatgacggctgcagcatttgctaagggtctgctcgccttagaaggagagctaacaccaatcctggtccaaatggtcaaaagtgcaaatatgaatggactcctcgactcagacggtgactccctgtcatcttgtcagcatagagtcaaggcaagactccaccacatcctgcagcaggacgcccccttcgggccggaggactacgaccagctcgcccccacaaggtctacatccttgttaaattctatgactattatccagaatcctgtaaaagtatgcgaccaagtgtttgcactcatcgagaacctgactcaccagatcagagagcgcatgcaagatccaaggtcagtagacctgcaactctaccattcagaaactttagagctgatgcttcaacggtggtccaaattggaacgggactttcgacaaaagtccggccgatatgacatcagtaagattcccgacatctatgactgcgtcaaatatgatgtacaacataatggctccttaggtcttcagggcacggctgaactgcttagactgagtaaagcattagcagatgttgtcatcccgcaagaatacggaataagcagggaagagaaattggagattgccgtgggcttctgtcttccactcctcagaaaaattctgctggatctgcaacgcactcacgaagatgaaagcgtcaataagctgcacccgctttatagcaggggcgttcttagccctgggcggcatgttcggacacgcctgtactttacgagcgaaagtcacgtgcacagccttcttagtgttttccgatacgggggcctcctggacgaaacccaggacgcacagtggcagcgtgccctggactaccttagtgccatctctgaactgaactacatgacccagatcgtgatcatgttatatgaagacaacacccaggatccactgtctgaggagcgcttccacgtagaactgcacttttccccaggcgtgaaaggcgtcgaggaggagggaagtgcaccagctggttgtggttttcgtccagccagcagcgaaaatgaggagatgaagactaaccaaggctccatggaaaatctatgcccaggcaaggcatcagatgagcccgaccgagcccttcagacaagccctcagccacctgagggacccggactaccgcgtaggagtcctttgattcgaaatcgcaaggccggaagcatggaggttctctcagagacatcttcctctcggcccggcgggtacaggctgttttcatcctctcgacccccaactgagatgaagcaaagtggcctgggatcacagtgcaccggcttattctcaactaccgtccttggaggcagctccagtgccccgaatctgcaagattatgcaaggtctcacggcaagaagctcccccccgcttccctaaaacaccgcgacggtttcgaggggtgttccatggtgccaactatatacccgctggagacgctgcataatgccttaagccttaggcaagtgtccgagttcctgtctcgcgtttgtcagcgccatacagacgcccaagcacaagcctccgccgctttattcgattccatgcactcatcccaggcatctgacaatcctttctcaccccctcgaactctgcattccccacccctccaactgcagcagcggagtgaaaaaccgccttggtactcttccggacccagctccactgtaagcagcgctggtccctcaagccccaccacagtggacggaaacagccagttcgggttctccgaccagcctagtctgaacagccacgtcgcagaagagcaccaaggccttggcctgctgcaggagactccggggagcggtgctcaggaactgagcatcgagggtgagcaggaactgtttgagcccaaccaatccccccaggtccccccgatggagacgtcccagccctacgaggaggtgtctcaaccctgccaggaggttccagacataagccagccctgtcaggacattagcgaggcacttagtcagccctgtcagaaggtgcctgatatatcacagcagtgtcaggagaatcacgacaacggcaatcacacatgccaagaggtcccccacatctctcaaccctgtcaaaaatcttcccagctctgtcaaaaggtaagtgaggaggtgtgtcagttatgcctggagaatagcgaggaggttagccagccttgccagggtgtttctgtggaggttggaaaactcgtgcacaaatttcacgtaggcgtaggatccttggtacaggaaaccttagtggaagtcggcagcccagccgaggagattcccgaggaggttatccaaccataccaggaatttagtgtcgaggtgggaaggctcgcccaggagacgtcagctataaatctactatcacagggaatccctgaaattgataagccttcacaggaattccccgaggagatcgatctgcaggcccaggaggtcccggaggagataaactag

SEQ ID NO: 273365 - DNA, 4227 bp, Artificial Sequence
  derived and/or modified sequence
atgtggagcctgaccgccagcgagggcgagagcaccaccgcccacttttttcttggtgccggcgacgaaggtttaggtacgcgaggtatcggtatgcggccggaggagagcgacagcgagctgttggaagatgaagaggatgaggtgcctccagagcctcagataattgttggaatttgtgcaatgacaaagaagtctaagtccaagccaatgactcagatccttgagaggctgtgtagattcgattaccttaccgtggttatcctgggtgaggatgtaattctgaacgagcccgtcgaaaattggcccagttgccactgccttatttcgtttcacagcaaaggcttcccactggacaaagccgtggcgtacagtaagctgagaaacccatttctgatcaacgacctggccatgcagtactatatccaagatagacgcgaagtttacagaattctgcaggaggagggtatcgatctgccaaggtatgccgtgttaaatcgggatccggcacggcccgaggaatgtaatctgattgagggggaggatcaagtggaagtgaatggcgccgtatttcctaagccctttgtggaaaaacccgtgtccgccgaagatcacaatgtttatatctattacccatcctccgctggtggcggcagccagcgtctgtttcgcaagatcggcagtcgttcctctgtttattctccggagagttctgttcgcaaaacaggctcttacatttacgaagagtttatgccgaccgacgggactgacgttaaggtctacacagtcggccctgactacgcacacgccgaggcccgtaaatccccagccttagatgggaaggtcgagcgcgattcagaagggaaagagatcaggtacccagtgatgctgaccgccatggagaagctcgttgcccggaaggtgtgtgtcgcctttaagcaaactgtctgcgggttcgatcttctacgcgcaaatggacattcttttgtgtgtgatgtgaatggcttcagcttcgtgaagaattctatgaaatactatgacgactgcgcaaagatcctgggcaacacaatcatgagggaactcgctccccagtttcagattccttggtctatccccaccgaggccgaagatatccccattgtgcccacaacttcaggcacgatgatggagctccggtgcgtgatcgccattatcagacacggagaccgcacaccaaagcagaagatgaagatggaagtcaagcacccaagatttttcgcactatttgagaaacatggtggatataagaccggcaaactgaaactgaagcgtcctgaacaactacaggaggtgctggacatcacacgcctgctcttagctgagctcgagaaagagccaggtggcgagattgaagagaagacagggaagctggaacagcttaaatccgtgttggaaatgtacgggcatttcagcggtattaacagaaaggtgcagctcacctattatccacatggggttaaagcaagcaatgaggggcaagacccgcaaagggagaccctcgcacccagtctcctgttagtcctcaagtgggggggtgagcttacaccggcaggtagggtgcaggcggaagagctaggaagggcattcagatgtatgtatcccggaggccagggggactatgccggattccccgggtgcggcttgctgcgcttacacagcacttttcggcatgatcttaagatctatgcttccgatgaagggcgggttcaaatgaccgctgccgcattcgcaaaagggctgttagcactggagggtgagctaacgcctatccttgtccagatggtgaagtctgcaaacatgaacgggctccttgattcagacggcgattcactgtcctcctgccagcacagagtgaaggcccgtctgcatcatatcctccagcaggacgcaccttttggccccgaagactacgaccaactcgctccaacacggtccactagcctgttaaacagcatgaccattattcagaacccggtaaaggtttgtgaccaggttttcgccctaatcgagaacctcacgcaccagataagagagcggatgcaagatcctcggtccgtggatctgcagctgtaccacagcgaaacactggagttgatgttgcagagatggtcaaagctggagcgagactttagacagaaatcaggtagatacgacatcagcaagatacccgacatttacgactgtgtgaagtacgacgtccagcacaacggctccctggggttgcaaggaaccgccgagctgctgcggttgtctaaagccttggcagatgtagtaattccacaggagtacgggattagccgcgaggagaaactcgagatagcggtgggcttttgtctgccactgctcaggaaaatcttgctcgacctgcagcgtacacacgaggacgagtctgtgaataagctccaccctctgtattcccgcggggtcctgagtcccgggaggcacgtgcggaccagactttacttcacttccgagtcacatgtgcattccctgctcagcgtatttcgttatggggggttacttgatgaaacacaggatgcacagtggcagcgagctctggactatctttccgctatctctgagctgaattatatgactcaaattgtgattatgctgtacgaggacaacacccaggatcccttgtcagaggagagatttcacgttgagctgcacttttcacccggggtaaagggcgtcgaagaagagggtagtgccccagctggttgcggctttcgacccgcctccagcgaaaacgaagaaatgaaaaccaaccaaggctctatggagaatttgtgccccgggaaggcctcggacgaacccgatcgggctctgcagactagtccacagcccccagagggacccggactgcctcgaaggtccccacttattcggaatcgcaaggcgggcagcatggaggtactgtccgagacatcatccagccggcctggcggttacagactgttttcgtcctcacgccctccgaccgaaatgaaacagtccggtctcggtagtcagtgtaccggccttttctctactaccgtcctgggaggcagtagcagtgcccctaatcttcaagactatgccagaagccatggtaagaaactgcctcccgcttctttgaagcatcgggatgggtttgaaggctgctcaatggtgcccaccatttatccactggagacgctgcataacgctttaagtctgcggcaggtgagtgaatttctgtctcgggtctgccaaaggcacactgacgcacaggcacaggccagtgcggcccttttcgacagtatgcattcaagtcaagcatctgataatccctttagtccaccccgtacgctgcatagcccacccctccagctccaacagaggagtgagaagcctccctggtattcgtcgggcccgtcatccacggtgagctctgccggccctagtagtccaacaaccgttgatggcaatagccaattcggcttcagcgatcagccgagtttgaattctcatgtcgccgaagaacaccaagggctgggcttgctccaggagactcccggctctggagctcaggagctgtccattgagggggagcaagaactcttcgaacccaaccagtcaccccaggtccccccaatggagactagccagccctatgaagaagtctcccagccctgtcaggaagtcccagacatatctcaaccttgtcaggacatttccgaggcattaagccagccttgccagaaggttcccgacatctctcaacaatgtcaggagaaccatgataacgggaaccacacctgccaagaggtacctcatatatcccagccttgccagaaatcgagtcagctgtgtcagaaggtcagtgaagaggtctgccagctgtgccttgagaactctgaagaagtgtcccaaccatgtcagggtgtgtccgtcgaagttggcaagttagtgcacaagtttcacgtcggcgtagggagcctggtccaggaaacgttagtggaggttggttcacccgcagaagaaattcctgaagaagttattcaaccctatcaggagttcagtgtcgaggttggcagactagcgcaggagacctcagcgatcaatctccttagccaaggcatcccggagattgataaaccaagtcaggaatttcccgaagaaattgatcttcaggcccaggaagttcctgaggaaatcaactag

SEQ ID NO: 273366 - DNA, 4227 bp, Artificial Sequence
  derived and/or modified sequence
atgtggtcccttaccgcctccgaaggggaaagcacaactgcgcacttttttctcggcgcaggcgatgaggggctcggaacgagggggatcggcatgcgcccagaggaatctgactcggagctgctcgaagatgaagaggacgaggtaccgcctgagcctcagataattgttggaatatgcgccatgacaaagaaatccaagtcaaagccgatgactcagatcttagagagactctgtcgcttcgactatcttacagttgtaatcctcggagaagacgtgatcttgaacgaacctgtcgagaattggccttcctgccattgtctcatttcttttcacagtaagggcttcccgttggataaagctgtcgcctacagtaaactgcgaaatccttttttgatcaacgacctggccatgcagtattatatccaggaccgcagagaagtttatcgtatcttacaagaggagggcatcgacctccctcggtatgccgtgttgaaccgcgacccagctagacccgaagagtgtaacctgatcgaaggcgaagaccaggtcgaggtgaatggggctgtgtttccaaagcccttcgtcgagaagcccgtgtcagctgaagaccataatgtctatatctactatccaagctcagctgggggaggctcccagagactgtttcggaagattggatccagatcaagcgtatatagtccagaatcatcagttaggaaaaccggaagttacatctatgaggagtttatgcctacagacggaactgacgtgaaggtgtacaccgtcggccctgactatgctcatgctgaagcgaggaagtcccctgctctggacggaaaggtggagcgcgatagtgagggcaaggagataagataccccgttatgttaactgcaatggaaaaacttgtcgcacgcaaagtgtgcgtagccttcaaacagacagtctgcggattcgacctgctccgtgctaacggtcactccttcgtgtgtgatgttaatggattctcctttgttaaaaacagcatgaagtactatgacgactgcgcgaaaatactcgggaatacaatcatgagggaactcgctccccaatttcagattccttggtctatccccactgaagccgaagatatccccattgtgccaacgacatctggtaccatgatggaactacgctgcgtaattgctataattcgccacggtgaccgcactcctaaacagaagatgaagatggaggttaaacatccgagattcttcgcactgtttgagaaacatggcggatataaaacaggcaagctgaaactgaaacgaccagaacaactccaggaggttttggatataacccgcctgcttcttgccgaactagaaaaggagcctggcggagaaatcgaagaaaagaccggcaagctcgagcaattgaaaagcgtgctggagatgtacgggcatttctccggaataaaccggaaggtgcagctcacctattatcctcacggtgtcaaggcctcaaatgaaggccaagacccacagagagagactttggccccttcactgctgctcgttctgaaatggggtggtgaactgaccccagctggccgagtgcaagctgaggaactgggccgagcatttaggtgtatgtatcccggagggcagggagactatgcaggatttcccggttgcggactcctgcggctgcatagcacattccggcacgatctcaagatttacgcgtcagatgaaggcagggttcagatgacagccgcagcctttgccaagggtttgctggctctggaaggggaattgacgccaattttggtccaaatggtgaagagcgcaaacatgaacggccttctggatagcgacggggatagcttgtcctcatgtcagcatcgggtgaaagcaagattgcatcatattttgcagcaggatgccccttttgggcctgaagattacgatcagctcgcccctactcggtccacttctctgctgaacagcatgacaatcatccagaatccagttaaggtttgcgaccaggtgtttgcactaattgagaatctgacccaccagatcagagaaaggatgcaggacccccgatctgtcgacctgcagctgtaccatagtgagaccctagagctgatgcttcagcgctggtctaagctggaaagggatttccggcagaaatccggaagatacgatatttctaaaatccccgatatctacgactgtgtcaagtatgatgtgcagcacaatgggagtttaggactccagggcacagctgagctgttacggttgtcaaaggccctggccgacgtcgttatcccacaggagtacggcattagtcgcgaggaaaaattagagatcgcggtggggttctgcctccccctgctacggaaaattctgttggatctgcaacggacacatgaagacgagtcagtcaacaaactccatcctctgtactctcggggagtgctctctccgggtaggcacgtgcggacccgcctttactttaccagtgaatcccacgtccattccctcctaagtgtctttagatacggaggcctgctggacgaaacacaggacgcacagtggcagcgggcactcgattacctttcagccatctcggaactgaattacatgacacagattgttatcatgctctacgaagacaatactcaggatccactgagtgaggagaggtttcatgtcgaactccattttagcccgggagtaaaaggtgtcgaggaagaaggcagtgcccctgccggttgcggattcaggccagcgtccagcgagaacgaggaaatgaagacaaaccagggatctatggagaacctctgccccggtaaagctagtgacgaacctgacagagccctccagacatctccgcagccacccgagggcccaggtttgcccagaagaagcccgctgatcaggaataggaaagccggatccatggaagttctgtcggagacatcatcttctaggcccggagggtatcgcctgttctcctcttccaggcccccaaccgaaatgaaacaatccgggctggggagccaatgcaccggcctcttttccacaactgtcttggggggatcatctagcgcgccaaacctgcaggattacgcgcgaagtcacgggaagaaactgccaccagccagccttaaacaccgcgacgggtttgagggctgttcaatggtcccaactatttatcctctggagacacttcataatgctctgagtctgcgtcaggtgagcgagttccttagcagagtctgccagcggcacaccgacgcccaggcccaggcgtctgcagctttgttcgactccatgcatagcagtcaagcttcagacaatccttttagcccaccacggaccctgcacagccctcctttacagttgcaacagcgcagtgagaagcccccatggtactctagcggtcctagcagtaccgtcagcagtgcaggtccatctagccccaccaccgtcgacggcaattcccagtttgggttctcagatcagccctctttgaactctcatgtggctgaggaacatcagggcctgggcctgcttcaggagacgcccggtagcggagcccaggagctctcaatcgagggggaacaggagttattcgagcccaaccagtcgccccaggtccccccaatggagacctcacagccctacgaggaagtgtcccaaccgtgccaggaagtacccgacatcagtcaaccatgccaggacatctcagaggcactgagccagccatgccaaaaggtgccagacatcagccagcagtgtcaggagaaccacgacaacgggaaccacacatgccaagaggtgccccatatctcccagccatgtcaaaaatcttctcagctgtgtcagaaggtttctgaagaagtgtgccagctgtgccttgagaactcggaagaggtgtcccaaccctgccagggggtctcagtagaggtcggaaagttggtgcacaagtttcacgtcggtgtcggctcattagtgcaagagactctcgtcgaggtgggatctccagcagaagaaatcccagaagaggtgatacagccctaccaggaattttcagttgaggtgggacggcttgcccaggagactagcgcaatcaaccttctgtcccaggggatacctgaaatcgataaaccttcccaagagttcccagaagaaatagatctgcaagcgcaggaggtgcccgaagaaattaactag

SEQ ID NO: 273367 - DNA, 4227 bp, Artificial Sequence
  derived and/or modified sequence
atgtggagtctgacagcaagcgagggtgagagtactaccgcgcacttcttcctgggagctggggatgaagggctgggcactagggggatcggcatgcgccctgaggagtctgatagcgaactgctggaggacgaggaagacgaggtccctcccgagccccagatcatcgtaggtatttgtgccatgaccaaaaaatccaagagcaaaccaatgacccaaatcttggaacggttgtgccgatttgattacctcaccgtcgtcattctgggggaggatgtgatcctcaatgagccggtggagaactggcccagctgtcactgcctcataagcttccatagcaagggttttccattggataaagccgttgcgtatagcaagctacggaatccttttctaatcaatgatctcgctatgcagtactatatccaggaccggcgagaagtgtatagaattctgcaggaagagggcattgaccttccccgttatgcagtgctaaatagggatccagctcggccagaggagtgtaacttaattgaaggcgaggatcaagtcgaagtcaacggagccgtatttccaaaaccctttgtcgagaaacccgttagtgctgaggaccataatgtgtacatctattatccatcctccgcagggggagggagccagcgcttgttccgaaaaatcggatccagaagctccgtctattcgcctgaatcatcagtgcgcaagaccggttcctacatatatgaagagtttatgcccactgacggcactgatgttaaggtttataccgtcggtccagactatgctcatgcagaggctcggaagagcccagctctggatggaaaggtcgagcgggactccgaagggaaagagatcagataccctgtgatgctcacagcaatggaaaaactggtggctcggaaagtttgtgtggctttcaaacagaccgtttgcggcttcgacttactacgcgctaacggccattctttcgtgtgcgacgtgaatggtttcagcttcgttaaaaactcgatgaagtattacgatgactgcgccaagatcctggggaacactattatgcgggagctggcaccccaattccagatcccttggagtatccctacagaggcggaggatattcctatcgttcccaccacatcaggaacaatgatggagctgcgctgtgttatcgcaatcatccgccacggggatcgcaccccaaaacaaaaaatgaagatggaggtgaaacatccgcgattctttgccctcttcgaaaagcatggcggatataagactggcaaactcaagctcaagcggccagagcagcttcaggaggtgctggatatcacacgccttctgcttgctgagctggagaaagaacccggtggagagattgaagagaagactgggaagttagagcaacttaagtcggtcctagaaatgtatggacacttctctgggattaatcgaaaagtgcagctgacctactatcctcacggtgtgaaggcaagcaatgaggggcaggatccacaacgtgagactttagcaccatccttgctgctcgttctcaagtggggtggagagttgacacctgctgggcgagtgcaggcagaggagcttggaagagcttttaggtgtatgtatcccggtggtcagggggattatgccggattcccaggctgtggcctcctgcgcttgcactccacgttccggcatgacctcaaaatatacgcctctgacgaaggcagagttcagatgacggccgctgcatttgccaaaggacttctcgctttagagggggagctgactccaatcctagtgcagatggtcaagtccgctaacatgaatgggcttctggactccgatggggacagtttgagcagctgtcaacacagggtcaaggcccgtctccaccatattctccaacaggacgccccatttggccctgaagactacgatcagctggcccctacacgatccacttctctattgaattcaatgacaatcatccagaatcctgtaaaggtttgcgaccaggtctttgctcttatcgaaaatcttacccatcaaattagggagcgaatgcaagatccaagatctgtcgatttgcagctctatcactccgagacgttggaactcatgttacagcgctggagcaagttggagcgtgactttcgtcaaaaatctggtaggtatgatataagcaagatccccgatatttacgattgtgtcaagtatgacgtgcagcataacggaagcctgggactccagggcactgccgagctgctgcggctgtccaaagccctggccgatgttgttatcccccaggagtacggaatttctcgtgaagagaagcttgaaattgccgtgggcttttgcctccccctgctccggaaaattctcctggatctgcagcgcacacacgaggatgagagtgtgaataagctgcaccctctatacagtagaggggtactgtcaccaggcaggcacgtccgcactcggctgtacttcacttccgaatcccatgttcattcgttgctgtcagtgtttaggtatgggggtttactcgatgaaacgcaggatgcccaatggcagcgcgcactggactatctgtccgcaattagcgaactcaattacatgacacaaatcgtcatcatgctctatgaagataatacccaggaccccctgagtgaggaacgcttccacgtggaactgcattttagtcctggcgttaagggagtggaggaggagggcagcgcaccagcaggctgtggttttaggcctgcaagtagtgaaaatgaagagatgaaaacaaatcagggcagtatggagaatctctgccctggcaaagctagcgatgagcctgaccgggctctgcaaacgtctccccagccccctgaaggccctggacttccgagaagatctccactgatccggaacagaaaggcaggaagtatggaggttctctcagaaacctccagctccaggcccggtggctatcgcctgttttcatctagccgaccccctactgagatgaaacagtccggcttggggtcccagtgcactgggctgttctcaaccactgtcctgggcggatcctctagtgcaccaaacctacaggactatgccagatcccatggcaagaaattgcccccagcctctctaaagcaccgtgacggatttgagggatgtagtatggtgcccacaatatatcctctcgagacactgcacaatgccctgagcttgaggcaggtgtccgagtttctatctagagtttgtcaacggcatacagacgcccaggcccaagccagcgccgcactgttcgacagcatgcattcctcccaggctagcgacaatcctttctctccacctcgtacgctgcatagtccaccactccagctgcagcaaagatcagagaagcccccttggtactcatccggtccctcttccaccgtgtcaagcgcgggaccttcatcgcctaccaccgtcgacggaaacagccagttcgggttctccgatcagccctctctgaactcgcatgtggctgaggaacaccagggacttgggctactgcaagagaccccaggatctggtgcacaagaattaagtatagaaggcgagcaagagctctttgagccaaaccagagcccgcaggttccaccaatggaaactagtcagccgtatgaagaggtttcacagccttgtcaggaggtcccagacattagccagccatgccaggacatatctgaagccctaagccagccatgccagaaggtaccggacatcagccagcagtgccaggagaaccacgacaatgggaaccacacgtgtcaggaagtcccacatatttcacagccgtgtcagaaaagctcccagctgtgccagaaggttagcgaggaggtttgtcaactgtgcctcgagaactccgaggaagtttctcagccatgtcagggagtgagtgtcgaagtcggaaagctcgttcacaagttccatgtaggcgtgggaagccttgtgcaggagacactggtcgaggtcgggtcacccgctgaagaaattcccgaagaagttatccagccctaccaggaattctcagtagaagttggtaggttagcccaggagaccagtgcaatcaaccttcttagtcagggcatcccagaaatcgataagccctcgcaagagtttcccgaagaaatagatctgcaggcccaggaggttcctgaggagatcaattag

SEQ ID NO: 273368 - DNA, 4227 bp, Artificial Sequence
  derived and/or modified sequence
atgtggtctctgacggctagcgagggtgagagcactacagctcatttttttcttggcgcaggcgacgagggcctggggacacgcggtatcggaatgagacccgaagagtccgacagcgagttgctggaggacgaggaggacgaagtgccaccggagccccagattatcgtcgggatatgtgcaatgactaaaaaatcaaagagcaagcccatgacccagatacttgagagactctgcaggttcgactatctgacagttgtgatactgggggaggatgtaatcctcaacgagcctgtggagaattggccgtcgtgccattgcctgatttcattccactcaaagggctttccccttgataaggccgtggcatactccaagttgcggaacccttttctgattaatgatctggcgatgcagtattatatacaagaccggcgagaagtgtatcgcatcctccaggaagaggggatagacttgccaagatatgccgttctcaatcgggatccggctcggccagaggaatgcaacttgattgagggagaggaccaggtagaggtgaacggtgctgtcttccctaaaccatttgtcgaaaagcccgtgtcggcagaggaccataatgtctacatttattatccatcctccgccggtggagggtcacaaaggcttttccggaagatcgggagccggagttcggtttattccccagagagttctgttcgcaagaccgggtcctatatttacgaggaatttatgcccactgatggaaccgatgtcaaggtgtatactgtggggcctgactatgcccatgctgaggccagaaagagtccagccctcgatggcaaggtcgaacgcgatagcgagggaaaagagatcagatacccagtgatgctaaccgctatggagaaactcgtggcgcgtaaggtttgtgtcgccttcaaacaaacggtgtgtggatttgacctcctgcgggctaacggacatagtttcgtctgcgacgtcaatggtttttcatttgtgaaaaactcaatgaagtactatgatgactgcgcaaaaatcctgggaaatacgataatgcgcgagttggcccctcaattccagattccatggagtattcccactgaggccgaagacatcccaatagtccctactaccagtggaacaatgatggagcttagatgcgtgatagcaattattcgtcatggagataggacccccaaacagaagatgaaaatggaggtgaaacaccctagattcttcgcactcttcgaaaaacacggcggatacaagaccggcaagcttaagctaaaacgcccagagcagctccaggaggtcctggatattactcggcttttgttggccgagctggagaaagaacccggaggagaaattgaagagaaaacaggaaaactggagcagttaaagagtgtgttggagatgtatggacacttttcaggaatcaaccgcaaggtccaactcacgtactatccccatggggtgaaggcctcgaacgagggccaggatcctcaacgggagaccctcgccccttccctgctgctggtcctgaaatggggcggagagttaacacccgctggtagggtacaagccgaggagctgggcagggcatttcggtgcatgtatcctggcggtcaaggcgactacgcaggctttcccggatgtgggctacttcgacttcattctacctttagacacgatttgaaaatttatgcaagcgacgaaggccgagtacagatgacggcagcagcatttgccaagggtctcctggcattagaaggcgaactgaccccaattctggtccagatggtcaagtcagccaacatgaacggccttttagattcagacggagatagcctgtcttcttgccagcatagggtgaaggctcggctacaccacatactgcaacaggatgccccattcggacccgaggattacgaccagcttgcccctactcgcagcacctccctcttaaactcgatgacaatcatccagaacccggttaaagtatgcgatcaggtcttcgcattgatagaaaatttaacacaccagattagggagaggatgcaagatcctcgatcagtggatctccaactgtaccactcagagacacttgaactcatgttgcaaaggtggagcaagctggagcgcgactttagacagaagtccggcaggtatgacatatctaagatccccgatatctatgactgcgtaaaatacgacgtgcagcataatgggtcgcttggcctccaaggaactgccgagttgttgagactgtctaaggctttggcagacgttgttataccccaggagtatggaatctctcgggaagaaaaattggaaatcgctgtcggcttttgtctcccgttgcttcgcaaaattcttttggacttacagaggacacacgaggacgaatcagtaaataaactccacccgctctacagtcgcggtgtcctgtcccccggacgccatgttaggacaaggttgtatttcacttctgaatcgcatgtacacagcctgctctccgtatttaggtatggcggtctgctcgacgagacgcaggatgcccagtggcagagagccctagactacttatccgccatatccgagctcaactacatgacacaaattgtgataatgctgtacgaagacaatacgcaggaccccctgtctgaggaacggtttcacgtagaactccatttttccccaggagttaagggtgtggaagaagagggatctgctccagcaggctgcggcttccgtcctgcatcttcagaaaatgaggaaatgaaaacgaaccagggaagtatggaaaatctttgccccggaaaggcttccgacgaacccgatcgtgcgcttcagacctcccctcagcccccagagggaccgggactccctaggcgttctcccttgatccggaataggaaagctggtagtatggaggtcctttctgagacgagctcctcccgtcccggagggtacaggctttttagttcatcgaggccacccaccgaaatgaagcagtcaggtcttggcagtcagtgcacggggttgttctccacgacagttttgggcggatcctcttccgcaccaaacctgcaagattacgcaaggagtcacgggaagaagttgccaccagcatcactcaagcaccgggatggttttgagggctgttccatggtacccacaatttaccctctggaaacgttacataatgctttatcccttcggcaggttagtgagtttctgagccgtgtctgccagcggcacaccgacgcgcaagcccaggcctcggcggcactgtttgatagcatgcactcctctcaggcctcggacaatcccttcagcccaccacgaacactgcattccccaccactccagcttcagcaaagatctgaaaagccaccgtggtactcctctggtcccagctcaacagtcagcagcgccggaccttcctcacccactacagtagatgggaacagtcagttcgggttctcagatcagccgtccctaaactcccacgtggccgaggaacatcagggattgggccttctgcaggagacccccggtagcggtgcccaggaactgtcaatagagggagaacaggagctgtttgagcctaaccagtctccccaggtgccccctatggaaacctcccagccatatgaagaagtgagccaaccttgccaggaggtgcccgacatctcccagccatgccaagatattagtgaagccttgagtcaaccttgccagaaggtcccagatatctctcagcagtgtcaggagaaccacgacaatgggaaccacacttgccaggaagttccccacatttctcagccatgtcagaaaagcagccagctgtgtcagaaagtgagtgaggaggtctgtcagctgtgcctcgaaaatagcgaggaagtgtcacagccctgtcaaggagtgagtgtagaggtcgggaagctcgtgcacaaattccacgtgggggttggcagtctagtacaggaaaccctggtggaagtgggatccccagccgaggagatccctgaggaggtaatccaaccatatcaggaattctcagtggaggttgggagattggcccaggagacgagtgcaatcaacctactgagtcaagggataccagagatcgataaaccttctcaggaattccctgaggagattgatctccaggcacaggaagtgcccgaggagattaattag

SEQ ID NO: 273369 - protein, 425 aa, Artificial Sequence
  derived and/or modified sequence
MNAMLETPELPAVFDGVKLAAVAAVLYVIVRCLNLKSPTAPPDLYFQDSGLSRFLLKSCPLLTKEYIPPLIWGKSGHIQTALYGKMGRVRSPHPYGHRKFITMSDGATSTFDLFEPLAEHCVGDDITMVICPGIANHSEKQYIRTFVDYAQKNGYRCAVLNHLGALPNIELTSPRMFTYGCTWEFGAMVNYIKKTYPLTQLVVVGFSLGGNIVCKYLGETQANQEKVLCCVSVCQGYSALRAQETFMQWDQCRRFYNFLMADNMKKIILSHRQALFGDHVKKPQSLEDTDLSRLYTATSLMQIDDNVMRKFHGYNSLKEYYEEESCMRYLHRIYVPLMLVNAADDPLVHESLLTIPKSLSEKRENVMFVLPLHGGHLGFFEGSVLFPEPLTWMDKLVVEYANAICQWERNKLQCSDTEQVEADLE

SEQ ID NO: 273370 - DNA, 1278 bp, Artificial Sequence
  derived and/or modified sequence
atgaatgccatgttggaaactcccgaactgccggcagtttttgatggtgtgaagctagcggctgttgccgcggtactgtatgtgattgttcgatgccttaacctgaagtccccaaccgcgcctcctgacttgtattttcaggattccggactaagccgattcctgcttaaaagttgccctttgttaactaaggagtatattcctccattaatttggggaaagagtggccatattcaaaccgcactgtacggaaagatggggagggtgagaagtccccacccttatggccacaggaaatttatcaccatgtccgacggagccacgtccacgttcgacctctttgagccattagctgagcactgcgtcggcgatgatataaccatggttatatgtcctggcattgccaatcactcggaaaaacagtacatacggaccttcgtggactacgctcagaagaatggatacaggtgcgcagtactaaaccacttgggagcactccccaacattgagctcacaagcccgcgcatgtttacatacggatgcacctgggaatttggcgccatggtgaactacattaagaaaacatatcccctgacccaactcgttgtggttggtttctcactgggcggaaatattgtgtgtaaatacctgggggagacacaggcaaatcaggagaaggtcctctgttgtgtttccgtttgccaggggtatagtgcactcagagctcaagagacattcatgcaatgggatcagtgtcgtcgattctataattttcttatggccgataacatgaaaaaaatcatcctgtctcacaggcaggccctttttggagatcacgtcaagaagccacagtcactggaggataccgatctgagcaggttgtacactgctactagcctgatgcaaatcgatgacaatgtaatgaggaagttccacggatacaactctctgaaggagtattatgaagaagagtcttgcatgcggtatttgcaccgtatatacgtcccactgatgttggtcaacgccgcagacgacccactcgttcatgagagtctgctgaccatcccaaagagtctcagcgaaaaaagggagaatgtgatgttcgtgttacccctccatggcggccacctgggctttttcgaaggaagcgtgctttttcctgaaccattaacctggatggataaactggtggtcgagtacgcaaatgccatttgtcagtgggaacggaataaattacagtgttctgacacagagcaggtggaagccgacctggagtag

SEQ ID NO: 273371 - DNA, 1278 bp, Artificial Sequence
  derived and/or modified sequence
atgaatgcaatgctcgaaaccccagaacttcccgctgtcttcgatggggtgaaactagccgcagtggctgctgtgctgtatgtgatcgtgaggtgtctcaaccttaagtctccgactgccccccctgacctgtacttccaggatagcggactgagcagattcctgctcaagtcttgtcccctgctgacgaaagaatatattcccccactgatctggggtaagtctggccacattcagacagcactttacggtaagatgggccgcgtgcggtctcctcatccctacgggcacaggaagttcattactatgagtgacggtgcaacttccaccttcgatctctttgagcccctcgccgaacactgcgtgggcgatgatattaccatggttatttgtcctgggattgctaaccacagcgagaaacagtacatccgtacatttgttgactacgcccaaaagaacgggtatcgatgcgcagttctgaatcatctcggtgctttaccgaacatcgaactgacttcaccaaggatgttcacatatggatgtacctgggagtttggcgccatggtaaactatattaagaaaacatatcccctcacgcagctcgttgtcgttggtttcagtctaggcggaaacatagtatgtaagtacctgggggaaactcaggccaatcaggaaaaggtgttgtgctgtgtcagtgtgtgtcaaggttattccgcattgagggctcaggagacgtttatgcagtgggaccagtgtagaaggttttacaatttccttatggctgacaatatgaagaagatcatactctcacatcgccaagccctcttcggtgaccatgtgaaaaagccacagagcctcgaagacaccgacttgtcacggttgtacacagcaacgagcctcatgcaaatcgacgataatgtgatgcgcaagttccatggatataacagcttaaaggaatattatgaggaagagtcatgcatgcgatatctgcacagaatctacgtgcctctgatgttagtcaatgccgccgacgatcctcttgttcacgaatcattacttacaatccccaagtcactctcagaaaaaagggaaaatgtgatgttcgtgctacccttacacggaggtcacctcgggtttttcgaaggaagcgtgctattccccgagccccttacatggatggataaactggttgtagaatatgcgaatgctatctgccagtgggaaaggaacaaactccagtgtagtgatactgaacaggtagaggcggaccttgagtag

SEQ ID NO: 273372 - DNA, 1278 bp, Artificial Sequence
  derived and/or modified sequence
atgaatgccatgctggagaccccagagctgcctgctgtgtttgatggagtgaagctggccgctgtggccgctgtgctgtatgtgattgtgcgctgcctgaacctgaagagccccacagcccccccagacctgtacttccaggacagcggcctgagccgcttcctgctgaagagctgccccctgctgaccaaggagtacatccccccactcatctggggcaagagcggccacatccagacagccctgtatggcaagatgggccgggtgcgcagcccccacccctacggccacaggaagttcatcaccatgtctgatggagccaccagcacctttgacctgtttgagcccctggccgagcactgtgtgggagatgacatcaccatggtgatctgccccggcatcgccaaccacagcgagaagcagtacatccgcacctttgtggactatgcccagaagaatggctaccgctgtgctgtgctgaaccacctgggcgccctgcccaacatcgagctgaccagccccaggatgttcacctacggctgcacctgggagtttggagccatggtgaactacatcaagaagacctaccccctgacccagctggtggtggtgggcttcagcctgggcggcaacatcgtgtgcaagtacctgggggagacccaggccaaccaggagaaggtgctgtgctgcgtgtctgtgtgccagggctacagcgccctgcgggcccaggagaccttcatgcagtgggaccagtgccgccgcttctacaacttcctgatggctgacaacatgaagaagatcatcctgagccaccggcaggccctgtttggagaccacgtgaagaagccccagagcctggaggacacagacctgagccggctgtacacagccaccagcctgatgcagattgatgacaacgtgatgaggaagttccacggctacaacagcctgaaggagtactatgaggaggagagctgcatgagatacctgcaccgcatctacgtgcccctgatgctggtgaatgctgctgatgaccccctggtgcatgagagcctgctgaccatccccaagagcctgtctgagaagcgggagaatgtgatgtttgtgctgcccctgcatggaggccacctgggcttctttgagggctctgtgctcttccctgagcccctgacctggatggacaagctggtggtggagtatgccaatgccatctgccagtgggagaggaacaagctgcagtgcagcgacacagagcaggtggaggccgacctggagtag

SEQ ID NO: 273373 - DNA, 1278 bp, Artificial Sequence
  derived and/or modified sequence
atgaacgccatgctggagacccccgagctgcccgccgtgttcgacggcgtgaagcttgcagcggttgcagcggttctatatgtgattgtgagatgtctgaaccttaagagtccaacagctccaccggatttatattttcaggactctggcctgtctcgcttcctcttgaagagctgtccactactcactaaagagtatattcccccacttatctggggaaaatcaggccacatccagaccgccctgtacgggaagatgggacgcgtgcggagcccccatccctacggacaccgtaaatttatcactatgtctgacggcgcgacgagcaccttcgacctgttcgagcccctcgccgaacactgcgtgggggacgatattaccatggtcatttgcccgggaattgctaatcattcagaaaaacaatacatcaggacctttgtcgactacgcgcaaaaaaacggatatcgctgcgccgtgctcaaccacttgggggcactccccaatatcgaactgacctccccccgcatgttcacatacggatgcacctgggagtttggcgctatggtgaactacatcaaaaaaacctaccctctgacccagttagtcgtggtcgggttctcacttggaggcaacatcgtttgtaagtatctaggggagacgcaggcaaaccaagagaaggttctctgctgtgtatctgtgtgccagggctactccgctctgagggcccaagaaaccttcatgcagtgggaccagtgtagacgattctacaacttcctcatggccgacaatatgaaaaaaattattctgagccaccgacaggccctatttggggaccatgttaagaaaccccagagcctggaagatactgaccttagtcgattgtacaccgccacatccctgatgcagatcgacgataacgtgatgaggaagttccacggttataactcccttaaagaatattatgaggaagagtcatgcatgcggtacctacaccggatctacgtgccactcatgctggtgaacgccgccgacgacccgctggtgcatgaaagtctgctcactattccgaaaagtctctctgagaagcgggagaacgtcatgttcgttctcccgcttcatggcggacacctgggattctttgaagggtccgttctgtttcctgaacccttaacatggatggataaattggttgtggaatacgccaatgccatttgccagtgggaacggaacaagctccagtgctccgatacagaacaagttgaagcggatttagagtag

SEQ ID NO: 273374 - DNA, 1278 bp, Artificial Sequence
  derived and/or modified sequence
atgaacgccatgctggagacccccgagctgcccgccgtgttcgacggagtgaagctagccgccgtcgcagcagtgctctacgtgatagtccgatgtctcaatttaaagtctccaactgctcctccagacttgtacttccaagactccgggctgagcaggtttctactgaagtcatgcccgttgctgacaaaggagtatatacctcccttgatctgggggaagagtggccacatacagaccgccctgtatggcaaaatggggagagtaaggtctcctcatccgtatggacatcgcaaattcattactatgtcagacggtgcaacaagtacttttgacctgttcgaaccccttgctgagcactgcgtgggcgatgatatcacaatggtgatttgtcccggaatcgctaatcatagcgagaaacagtatatccgaacattcgttgactacgcgcagaagaacgggtatcgttgtgccgtcttgaaccatctcggcgccctcccaaatatcgagttgacgtctcctcggatgttcacctatggctgcacctgggagtttggtgccatggtcaattatatcaaaaaaacctacccccttacccagctagtggtggtgggctttagtttaggcgggaatatagtctgtaagtatctcggcgaaacgcaagccaaccaggagaaagtattgtgttgcgtcagcgtgtgccaagggtattcggctctcagggcgcaagagacgttcatgcagtgggatcagtgtcgtcgtttttataatttcctaatggccgataatatgaaaaaaattattctgtcccaccggcaggcactctttggagaccacgtcaagaaaccccaatccctggaggacacagatctgagcaggctttatacagccacctcccttatgcaaattgacgataatgtgatgagaaagttccatggttataactcccttaaggaatattatgaagaagaaagttgtatgaggtacctgcaccgaatatacgtgcccctgatgctcgtgaacgcagcagatgatcctctcgttcacgaaagccttttaaccatcccaaaatccctttctgagaaacgagagaacgtgatgttcgtcctgcccctacacggcggccacctaggcttctttgaggggagtgttctgtttccagaacctctgacatggatggacaaactcgtcgtcgaatacgctaatgcaatttgtcagtgggagagaaacaagttgcaatgctccgacaccgagcaggttgaagccgacctggagtag

SEQ ID NO: 273375 - DNA, 1278 bp, Artificial Sequence
  derived and/or modified sequence
atgaatgccatgctggaaacccccgagctgcccgctgtgttcgatggagtcaagctggcagccgtggccgctgtgctgtatgttatcgtgcgctgtcttaatcttaaatcgccgacagctccccctgatctctattttcaagattcaggattgagtcgattcctattgaaatcctgtcccctgctgacaaaagagtatatcccccctctaatttggggtaaatcaggtcacattcaaacagcactctatggaaagatgggaagggtacggtcgccacatccatacgggcatcgcaagttcatcacaatgtctgatggcgcaaccagtacattcgacctgtttgaacccttagccgagcattgcgtcggagacgatattacgatggtcatatgccctgggatcgcaaatcacagcgaaaaacagtacatccggactttcgtggattatgcccagaagaatggctatcgctgcgcagtcctcaaccatttgggagctctgccaaacatagagctgacctcccctcggatgttcacctatggctgcacctgggaatttggcgctatggtgaactatatcaaaaaaacataccccctgacccagctggttgtggttgggttcagcctgggcggaaatatcgtgtgtaagtacctgggggagacacaggcgaatcaagaaaaggtactatgttgcgtgtcagtatgtcagggatactcagccctgagagctcaggaaacatttatgcagtgggatcagtgcaggcgcttctataattttcttatggccgacaatatgaaaaagatcattctctcacataggcaggccctttttggtgatcacgtaaagaagccgcagtctttggaagacacagatctgagtcgcctgtacacagcgacctctctcatgcagatcgacgataacgttatgagaaagttccacggatacaactcattgaaagagtattatgaggaagagtcgtgtatgcgctacctgcaccgcatttacgtgccgcttatgttggtgaacgccgcagacgatcctctggtgcatgagtcgctgctgacaatcccaaaatccctgtccgagaaaagggaaaatgtcatgtttgtcctgcctctacatgggggacatttgggctttttcgaaggcagcgttttgtttcctgaacccctcacctggatggataaactggttgttgaatatgcaaatgctatttgtcagtgggaaaggaacaagctccagtgctcggacacggagcaggtggaggcggaccttgagtag

SEQ ID NO: 273376 - DNA, 1278 bp, Artificial Sequence
  derived and/or modified sequence
atgaacgctatgctcgagactcctgagctaccagccgtgtttgatggcgtaaagttggccgctgtggctgcagtactatatgtgatagtgaggtgcctgaatcttaagagccccaccgccccacctgatttgtatttccaggattctggacttagccgcttcctcctcaaaagctgtcccctgctcactaaagaatacatcccccctttgatctggggaaaatccggccatattcagaccgcgctttatggcaagatgggtcgcgtacggtcaccacacccttacggccacaggaaatttattactatgtcagacggcgctacaagtaccttcgacctcttcgagcctcttgccgagcattgcgtgggggatgacattactatggtcatctgtccgggtatcgccaaccattcagaaaagcaatacatacgcacattcgtggattacgcccagaaaaacggctaccgatgtgccgtcctgaatcaccttggagctttgccaaacattgaactgactagccccaggatgttcacatatggatgcacatgggaattcggggcaatggttaattacatcaaaaagacctatcctctgactcaattagtggttgtcggctttagcttggggggaaacatcgtctgtaagtacctgggcgagacgcaggcaaatcaagaaaaggttttatgttgcgtcagtgtttgtcagggctatagcgctcttagagcccaagaaacatttatgcagtgggatcagtgtcggagattctacaatttcttaatggccgataacatgaaaaagattatcttatcacacaggcaggcgttatttggagaccacgttaagaaaccccagtcactcgaggacactgacctctcaagactatatactgccactagtctcatgcagattgacgacaacgtgatgcgtaaattccacgggtacaattctctgaaggagtattacgaggaggaatcctgcatgcgctacctccaccgaatctacgtgcccctcatgctggtcaacgccgctgatgaccctctggtacacgagtcattattgacaatacctaagagcttgtctgagaagagagaaaacgtgatgttcgtccttccgctccacgggggtcatctcggattctttgagggctccgtactattccctgagccactgacctggatggataagctcgtggtggagtatgccaatgctatctgccagtgggagcgcaacaagctgcagtgtagcgataccgaacaagtggaagccgacttggagtag

SEQ ID NO: 273377 - DNA, 8711 bp, Artificial Sequence
  derived and/or modified sequence
actccgggctggccttatccagtagcgtctgggtccctggactaaagccgtcaaatgtaaccaattgctgaggagctctcccctaagaatcccgcctccactctgaggaacagcttcgctgatcaatggatcccctcctagacgcaatgagcgcgcggggcaagtggagaagcggctgaactgcccaatgaacaagcggtttccgtggttaggggcgtggcagaagcggtcgtcaggggcgtggcggcagttacttgggcggggccggtagcggcgggagctgcactggccaggggttccggctgtatatccatgagcgccgctggcagccggggagctgcaggaaccagactgggggcgagctgagcacctgtagtcaatcacacgcagcttttaggtttgtttgaataagagatctgacctgaccggcccaactgtacaactcttcaaggaaaattcgtatttgcagtgggaagaataagtaacattgatcaagatgaatgccatgctggagactcccgaactcccagccgtgtttgatggagtgaagctggctgcagtggctgctgtgctgtacgtgatcgtccggtgtttgaacctgaagagccccacagccccacctgacctctacttccaggactcggggctctcacgctttctgctcaagtcctgtcctcttctgaccaaagaatacattccaccgttgatctgggggaaaagtggacacatccagacagccttgtatgggaagatgggaagggtgaggtcgccacatccttatgggcaccggaagttcatcactatgtctgatggagccacttctacattcgacctcttcgagcccttggctgagcactgtgttggagatgatatcaccatggtcatctgccctggaattgccaatcacagcgagaagcaatacatccgcactttcgttgactacgcccagaaaaatggctatcggtgcgccgtgctgaaccacctgggtgccctgcccaacattgaattgacctcgccacgcatgttcacctatggctgcacgtgggaatttggagccatggtgaactacatcaagaagacatatcccctgacccagctggtcgtcgtgggcttcagcctgggtggtaacattgtgtgcaaatacttgggggagactcaggcaaaccaagagaaggtcctgtgctgcgtcagcgtgtgccaggggtacagtgcactgagggcccaggaaaccttcatgcaatgggatcagtgccggcggttctacaacttcctcatggctgacaacatgaagaagatcatcctctcgcacaggcaagctctttttggagaccatgttaagaaaccccagagcctggaagacacggacttgagccggctctacacagcaacatccctgatgcagattgatgacaatgtgatgaggaagtttcacggctataactccctgaaggaatactatgaggaagaaagttgcatgcggtacctgcacaggatttatgttcctctcatgctggttaatgcagctgacgatccgttggtgcatgaaagtcttctaaccattccaaaatctctttcagagaaacgagagaacgtcatgtttgtgctgcctctgcatgggggccacttgggcttctttgagggctctgtgctgttccccgagcccctgacatggatggataagctggtggtggagtacgccaacgccatttgccaatgggagcgtaacaagttgcagtgctctgacacggagcaggtggaggccgacctggagtgaggcctccggactctggcacgctccagcagccctcctctggaagctgcgtcccctcaccccctgtttcaggtctcccatctccctcagtgacctggatctgacctcacaccatcagcagggggcacccaccatgcacacctgtctcggagtaggcagctcttcctgggagctccaggctatttttgtgcttagttactggttttctccattgcattgttaggcatggtgacaagtgacagagttcttgccctctgtccagtttcagcatctggttgcttttaagccaagtacatctagtttccctattaaaaatgtgtctgaatagcgattttgctttgccaccaaaaggcttttccctgagaacagtgaaggatgtatgtcattttgtggtggttgtatgtgtccttacatagaccttaaaaagagctcacccttccaggccaatgctgaagacacagctccgcttgggagcctgagaacccaggcttcccaggccagagtgtggcttcttaaacggcaaaggaaattcctttgagtcacaagccaagttttcgccctgtctcctgagaccatttccctacgctttgctgctgctgagagttacgtgaggcacttgttaaaaattcagcctcccaggtccctcccctcggagaggctgattcactgggtctgggaaggagcctggggattttaatttttcacaagtgccccagatgattctcatcaccaagcaaattttggaaatgctgttcaacagcgcccttaaattggaaacatctttgcagctcgttttattgaaattcataatcaggggtgtcctctagctcccacggtctccagagcagcaaggccggctatggagctgccgtcgtgtgaccacagtgtgatgtctcagaagggctctgggtgggctgagcatctgggctgtgccctggctctgcttttcaccctggacaaagtcgctgtggacttcaatttcttcacctctaaaatgggggacttggaccaggtagattgctgagctcactaccaggttcaaagttcaatgacaaactcagtttactgaggtttgagagaacatccctccaggggagcctgggagctgctctcccagtctaagcatgtagatatcatcgtttgccttttgtgtgtgtgtgtcccttatttgataaaaagatgttttgagttgttttttttttaagcactcacttgtaattttagtttttaaacccaagtccctctaactttgcctttgataccaaacaattcaaaagttggatctgagtttggagaaagatatttccaacctaagtgggtattattttgaaaccagatttttaatttaatagcctatatttgtagtctgttggataggtgtttccaaagtgtgtcttctcaagtgaaaacgcaactctaggtttcaagtactccttttctccgatcctgtggtacttgaatatccaaaaaccctgcactttgaacaatcagctgttgctatctggaactaaacagaactatgagtaaaattgcctggatactttaaaaagatatttttcctccttcatctcctttgactccaggacagactggaatataagtagtgggtctgcatggatgtttcagggatcaaaggagccacctgggcgcctgagtgccaaccctcagggccacaggtgggtgtggtttgggcacgggtccaagtgactgtgacgggacccgtgggcatgggtccaggtctgtaacctgaagaagttgttttctgacaatcaccaaatcatccgaatgacatcaaaagcagcccttatctcagagactgagatttctgtggtctcaacttcgctttggtataatttctggcactcaccagcctctatcattatgactttccccccagtgtattatttctctaataggtttccttttcacgttcttttagcacagactggcactttaccctctcagtttggaagttagcccctctcctctgttacttttcccttcacccaactacagctgtgatctagaacattcatagtcatatttctgctactactaccttcatttatcaagactttttatgagaataggtaaaccaagcaataacttcctaggactgaatcaccaccccagaagagcgagaggctcctttcatatgcctgaggccacaccccttaacctgttctgacaaaatagtggctggcccatgtaccagctccattcagaaattcaggaagagaaaagacagccctgttgtcacacaaaccggtgtgggggagggtggagcctggtctgcacggcagtcctggtggcccctgtggaggacaggcagggctggcagcatagcctttgttgccacacaaccggaatttgctcccccaggactgtgggagccagtgtcccagctgaaatctttttagtgtgtggctctgaatggcactcacattccattttggctcacatgaaactaactgaagccctttgttcaagcttcaggctcttaggcatggaaatgagaatgtgactgtggctgtcttacaggaaaattcttgtttgtccctgaatgagagcacagaggcattgaattcacagagctgcaaacttgcctgataaatgagggagtggcagtttatagataggtcatcttttttccttcctccaggtgtccttgcctttcttcccaaagtcattcatttctgatgagtatatgaatccccctcttgctagtaaggttctatttgggctaaaacaaggctgaatttttaaagagtatttgaatatattttagaatcaaattgaggctataaattgcatcaatctggacaattccattgcaggaataatatgttaaaaaccaatggggagaagcacccacatctctcctgtagcactccgtgtctcataagcaatttgaagacacttacaagtaactgattccagtcaaattaggattaactgactcaaaaaatggtgtcaagtttctttaatgtttttatgttagaagtgagtttaacagacttgaagaaaactgttatcttttcctgctgtgagtttacacaaatgattccagagcagaatgaaagcagaaagctgttggttacaatattcttttaacctctctgcagcattttacacttactgggaaccttatgattcaccgtaagagtggaaatatacctgagttcgtgtcctaatggtctctaattcacattggatcgtgggcaaatcacctcacctctctgagcctgttccctcctcttagaccatctctaagaccacttcatctatttacacatcatttgcttgaacattgctgaacatctgcgtgaacttggcctctccagcccttgcaggtggaaacagctgtgtcaaggctcaaggctcacgctgaggggacttggagggagggggcttctgcattaagctttcctggtgaagacccttgatcttgtccaaagccctgtgtctttgactggcttctcttcagagtccccgttgtcatcgtaagacccttgctgtttggagggtggtcttgtgactgtggcagctgctggccgctggaatgaggagcctatctccatcctccagtgtgactcaggcagagcattgagaattcccagggcagaaatccttcctgctcaggctttcattctaaaactacagtcttcattaaagctgaactttctgggtagctgagcttatatgcccggcatctgaatgagagctctctttgtaactgtgtgacttgagatctagtttgccagctcctgggaaacaatacatgtgttcttgtttgtgtttgctcagcaagcagatgtctgagatgtaagaagcttttcttttcctgtggcattgattctgacttagagctgaagtaaaagatcactgaaacatcacgtcaagttgaagtcactcataggtctttgtcctttaggcaggacaggagagtcattaagaagcatttcactgtagcattctatcacaatatcatctggaattgttttctttgcccagaaagccttaacttgcctctagagaatccctggtattacaacgatattgcggcattagaattccaactcttctgctgtggaagtttgaagcgaagctgcagcaaaaccagagaatttcctcaagtggcctgtaggctccttgttatcttatgcccccacccctccctcaacaatatgagtgatccagaactggcccaaacacctcagctctggtccctttttgcccttcttggccttactctgttgttcaaagccactttggattgcttggatgcttcgaacagccatgaaaagtagcctgcctgtggcatttagaggccaagcaattgacagaaagggtttcttctacctctgttatctaagcagagggaagtaaacctctcaccgccccccacccctcactgcccccgattaccctagaattgctttcgccaaattgtagttgaagctaaggaaggggaatctggcccctgctgggagagggaactggaatgccacacaaggcaaggcctgcttccttccttcccctctgctgctgctgcctcggaacgctgcagcccaggcttcctcccacagtggcccttggaagcaggccgcagagtagacagctgctccttttggaagagtcagtcccctgtgttttctgaactgtttttcctagcatgtatgtgggtagagctttcatgcatctctagtaataataagctgaaattagttttttttttaattctccaatttaaaacttttaattaaaaagtaaattttaatgtcgaaaatgcaaacttggggagggcagaaagatcacacacaaggctgtcacttcatacttgcaggattgcacagcagccgggcagaggcgctcctcacttcccagatggggcggcgggcagcagagacgcacctcacttcctagacagtgcggcagccaggcacaggcacacctcacttcccagacagttgggcggccaggcaagcgctcctcacttcccagatggggcggctcccgggaagcggggctcctcacttcccagacagggtggccaggcagaggtgctcctcacttcccagaacaattctttatgaatttgataaaggactgaagtgcaactgaaagctgctagtgatgatctggtaatatacaatttgtccagtagccagtttgtttttattgtgttttctaaccataagagatcattaaaggcaaagcctgtatgacgctgtacacacacaaaaaaatggtcaccgcaggccatactaccaatgaaatggtaggtaaacaaatcttctggtcaagagaaaaaaaaaagaaatagcactctgcatgctttgctctacaagacgaatttccctagaaagaatccaatgaaggccgggcatagtggctcactcctgtaatcccagcactttggaggccgaggcgggtagatcacctgaggttaggagttcaagaccagcctggccaacatggtgaaaccccttctctactaaaaatgcaaaaattagctgggtgtggtggcgggcgcctgtaatcccagctactcgggaggctgaggtgggagaattgcttgaacccaggagacggaggttgcagtgagccgagatcacgcctctgcactccagcctgggcaacaagagtgagactccgtctccaaaaaaagaaaaggaatccagtgaaaatggctgcaattacaacaagaagtgaaggaagaagactggtgacatctctgaaggatgcagttgaggttgatccaggtttatccgaatatgctacctttctgagccttaaaccttcatctctcaggtgttgatttgcttctgatagcttcatcatttctccctgaagtcttttacactcttctgttagtttccttgtttcagtatcatgaagtgaagcactgtgtggttgtggcgtgggcccgtcttgcttagatgcattcagtgggacagctttgctgggttccatgtcattcaatttatcattttcattggggatctccatttggaatccattaattcatgaggttttgcctcattccacacagcttccatatctgaagtgtttagtggagcaaaaattgtaccataaacttgtgtttactcttttcattcggatcatagtcaaagggctgtagcattactgaaacagtcacagttgaccctgggtcaataattccactgttgggcctcacacagtaccggtgaggcacggtagtcttcactttgaaacacacttttctatccgatggatttcgcaatttaagatttgtagtgactacatctgtgaaggggcctttgaatttgaggtctatgggcgggtcgaggaccaggatctgctcgtgcttcgccgtggccccggaggcagacgccattggagagacagcgcagagcagggggcggcttgctcgctgggggcgggggacgatggcgagaggggagggggagcgagttcgcatctctccttttcctggttagactctgttcaaccacattcttatgttggcagatctgcttccagattgatttttagagcaccatcactttcacattcctgattctgattttgttttgttttgtttgggttttctgaaacttaaaatgctgccccgaaaatactatatttttgagtttgtgttctgaaagcctccgtgctgctggatctttggggggaaatacaggatccttcagcactgaggtgtttaagatttgcaactagcaatgcaattttttctaaatatggggatatttacctttattaagaaattatactaaacattgatgtccttgatcattttatgttctcatattacttttgattctactatgattgtgtggtggtgaacaaagatcattacaaacaaaaactgtaattttgttatatttgattcaatggaatttacctaaaaaataaagactaaaaatgtggtgtg

SEQ ID NO: 273378 - DNA, 8688 bp, Artificial Sequence
  derived and/or modified sequence
tgtcaggagggcgtagtttgcaaaacatccctcccagtggtactgatgccttttcgcaggttctgtcctcttcatttgcaagccactgctttatccacgagggtgctccctacttatgccagtgaattaatttttggcacagatgaatccttcatatttatctggatttagctggtagcatttgtctcctaagacttggtcacagaggaatccatgtgaccttcaggccttctgctctaaactggcaggagatcctgtttctactcacagcgtccgagggtctggtggccgagccctgaggggcgctgttgctcccaggtggcagaattcagcatcagagagccacacagctgaaagagatggatggcttttaggtttgtttgaataagagatctgacctgaccggcccaactgtacaactcttcaaggaaaattcgtatttgcagtgggaagaataagtaacattgatcaagatgaatgccatgctggagactcccgaactcccagccgtgtttgatggagtgaagctggctgcagtggctgctgtgctgtacgtgatcgtccggtgtttgaacctgaagagccccacagccccacctgacctctacttccaggactcggggctctcacgctttctgctcaagtcctgtcctcttctgaccaaagaatacattccaccgttgatctgggggaaaagtggacacatccagacagccttgtatgggaagatgggaagggtgaggtcgccacatccttatgggcaccggaagttcatcactatgtctgatggagccacttctacattcgacctcttcgagcccttggctgagcactgtgttggagatgatatcaccatggtcatctgccctggaattgccaatcacagcgagaagcaatacatccgcactttcgttgactacgcccagaaaaatggctatcggtgcgccgtgctgaaccacctgggtgccctgcccaacattgaattgacctcgccacgcatgttcacctatggctgcacgtgggaatttggagccatggtgaactacatcaagaagacatatcccctgacccagctggtcgtcgtgggcttcagcctgggtggtaacattgtgtgcaaatacttgggggagactcaggcaaaccaagagaaggtcctgtgctgcgtcagcgtgtgccaggggtacagtgcactgagggcccaggaaaccttcatgcaatgggatcagtgccggcggttctacaacttcctcatggctgacaacatgaagaagatcatcctctcgcacaggcaagctctttttggagaccatgttaagaaaccccagagcctggaagacacggacttgagccggctctacacagcaacatccctgatgcagattgatgacaatgtgatgaggaagtttcacggctataactccctgaaggaatactatgaggaagaaagttgcatgcggtacctgcacaggatttatgttcctctcatgctggttaatgcagctgacgatccgttggtgcatgaaagtcttctaaccattccaaaatctctttcagagaaacgagagaacgtcatgtttgtgctgcctctgcatgggggccacttgggcttctttgagggctctgtgctgttccccgagcccctgacatggatggataagctggtggtggagtacgccaacgccatttgccaatgggagcgtaacaagttgcagtgctctgacacggagcaggtggaggccgacctggagtgaggcctccggactctggcacgctccagcagccctcctctggaagctgcgtcccctcaccccctgtttcaggtctcccatctccctcagtgacctggatctgacctcacaccatcagcagggggcacccaccatgcacacctgtctcggagtaggcagctcttcctgggagctccaggctatttttgtgcttagttactggttttctccattgcattgttaggcatggtgacaagtgacagagttcttgccctctgtccagtttcagcatctggttgcttttaagccaagtacatctagtttccctattaaaaatgtgtctgaatagcgattttgctttgccaccaaaaggcttttccctgagaacagtgaaggatgtatgtcattttgtggtggttgtatgtgtccttacatagaccttaaaaagagctcacccttccaggccaatgctgaagacacagctccgcttgggagcctgagaacccaggcttcccaggccagagtgtggcttcttaaacggcaaaggaaattcctttgagtcacaagccaagttttcgccctgtctcctgagaccatttccctacgctttgctgctgctgagagttacgtgaggcacttgttaaaaattcagcctcccaggtccctcccctcggagaggctgattcactgggtctgggaaggagcctggggattttaatttttcacaagtgccccagatgattctcatcaccaagcaaattttggaaatgctgttcaacagcgcccttaaattggaaacatctttgcagctcgttttattgaaattcataatcaggggtgtcctctagctcccacggtctccagagcagcaaggccggctatggagctgccgtcgtgtgaccacagtgtgatgtctcagaagggctctgggtgggctgagcatctgggctgtgccctggctctgcttttcaccctggacaaagtcgctgtggacttcaatttcttcacctctaaaatgggggacttggaccaggtagattgctgagctcactaccaggttcaaagttcaatgacaaactcagtttactgaggtttgagagaacatccctccaggggagcctgggagctgctctcccagtctaagcatgtagatatcatcgtttgccttttgtgtgtgtgtgtcccttatttgataaaaagatgttttgagttgttttttttttaagcactcacttgtaattttagtttttaaacccaagtccctctaactttgcctttgataccaaacaattcaaaagttggatctgagtttggagaaagatatttccaacctaagtgggtattattttgaaaccagatttttaatttaatagcctatatttgtagtctgttggataggtgtttccaaagtgtgtcttctcaagtgaaaacgcaactctaggtttcaagtactccttttctccgatcctgtggtacttgaatatccaaaaaccctgcactttgaacaatcagctgttgctatctggaactaaacagaactatgagtaaaattgcctggatactttaaaaagatatttttcctccttcatctcctttgactccaggacagactggaatataagtagtgggtctgcatggatgtttcagggatcaaaggagccacctgggcgcctgagtgccaaccctcagggccacaggtgggtgtggtttgggcacgggtccaagtgactgtgacgggacccgtgggcatgggtccaggtctgtaacctgaagaagttgttttctgacaatcaccaaatcatccgaatgacatcaaaagcagcccttatctcagagactgagatttctgtggtctcaacttcgctttggtataatttctggcactcaccagcctctatcattatgactttccccccagtgtattatttctctaataggtttccttttcacgttcttttagcacagactggcactttaccctctcagtttggaagttagcccctctcctctgttacttttcccttcacccaactacagctgtgatctagaacattcatagtcatatttctgctactactaccttcatttatcaagactttttatgagaataggtaaaccaagcaataacttcctaggactgaatcaccaccccagaagagcgagaggctcctttcatatgcctgaggccacaccccttaacctgttctgacaaaatagtggctggcccatgtaccagctccattcagaaattcaggaagagaaaagacagccctgttgtcacacaaaccggtgtgggggagggtggagcctggtctgcacggcagtcctggtggcccctgtggaggacaggcagggctggcagcatagcctttgttgccacacaaccggaatttgctcccccaggactgtgggagccagtgtcccagctgaaatctttttagtgtgtggctctgaatggcactcacattccattttggctcacatgaaactaactgaagccctttgttcaagcttcaggctcttaggcatggaaatgagaatgtgactgtggctgtcttacaggaaaattcttgtttgtccctgaatgagagcacagaggcattgaattcacagagctgcaaacttgcctgataaatgagggagtggcagtttatagataggtcatcttttttccttcctccaggtgtccttgcctttcttcccaaagtcattcatttctgatgagtatatgaatccccctcttgctagtaaggttctatttgggctaaaacaaggctgaatttttaaagagtatttgaatatattttagaatcaaattgaggctataaattgcatcaatctggacaattccattgcaggaataatatgttaaaaaccaatggggagaagcacccacatctctcctgtagcactccgtgtctcataagcaatttgaagacacttacaagtaactgattccagtcaaattaggattaactgactcaaaaaatggtgtcaagtttctttaatgtttttatgttagaagtgagtttaacagacttgaagaaaactgttatcttttcctgctgtgagtttacacaaatgattccagagcagaatgaaagcagaaagctgttggttacaatattcttttaacctctctgcagcattttacacttactgggaaccttatgattcaccgtaagagtggaaatatacctgagttcgtgtcctaatggtctctaattcacattggatcgtgggcaaatcacctcacctctctgagcctgttccctcctcttagaccatctctaagaccacttcatctatttacacatcatttgcttgaacattgctgaacatctgcgtgaacttggcctctccagcccttgcaggtggaaacagctgtgtcaaggctcaaggctcacgctgaggggacttggagggagggggcttctgcattaagctttcctggtgaagacccttgatcttgtccaaagccctgtgtctttgactggcttctcttcagagtccccgttgtcatcgtaagacccttgctgtttggagggtggtcttgtgactgtggcagctgctggccgctggaatgaggagcctatctccatcctccagtgtgactcaggcagagcattgagaattcccagggcagaaatccttcctgctcaggctttcattctaaaactacagtcttcattaaagctgaactttctgggtagctgagcttatatgcccggcatctgaatgagagctctctttgtaactgtgtgacttgagatctagtttgccagctcctgggaaacaatacatgtgttcttgtttgtgtttgctcagcaagcagatgtctgagatgtaagaagcttttcttttcctgtggcattgattctgacttagagctgaagtaaaagatcactgaaacatcacgtcaagttgaagtcactcataggtctttgtcctttaggcaggacaggagagtcattaagaagcatttcactgtagcattctatcacaatatcatctggaattgttttctttgcccagaaagccttaacttgcctctagagaatccctggtattacaacgatattgcggcattagaattccaactcttctgctgtggaagtttgaagcgaagctgcagcaaaaccagagaatttcctcaagtggcctgtaggctccttgttatcttatgcccccacccctccctcaacaatatgagtgatccagaactggcccaaacacctcagctctggtccctttttgcccttcttggccttactctgttgttcaaagccactttggattgcttggatgcttcgaacagccatgaaaagtagcctgcctgtggcatttagaggccaagcaattgacagaaagggtttcttctacctctgttatctaagcagagggaagtaaacctctcaccgccccccacccctcactgcccccgattaccctagaattgctttcgccaaattgtagttgaagctaaggaaggggaatctggcccctgctgggagagggaactggaatgccacacaaggcaaggcctgcttccttccttcccctctgctgctgctgcctcggaacgctgcagcccaggcttcctcccacagtggcccttggaagcaggccgcagagtagacagctgctccttttggaagagtcagtcccctgtgttttctgaactgtttttcctagcatgtatgtgggtagagctttcatgcatctctagtaataataagctgaaattagttttttttttaattctccaatttaaaacttttaattaaaaagtaaattttaatgtcgaaaatgcaaacttggggagggcagaaagatcacacacaaggctgtcacttcatacttgcaggattgcacagcagccgggcagaggcgctcctcacttcccagatggggcggcgggcagcagagacgcacctcacttcctagacagtgcggcagccaggcacaggcacacctcacttcccagacagttgggcggccaggcaagcgctcctcacttcccagatggggcggctcccgggaagcggggctcctcacttcccagacagggtggccaggcagaggtgctcctcacttcccagaacaattctttatgaatttgataaaggactgaagtgcaactgaaagctgctagtgatgatctggtaatatacaatttgtccagtagccagtttgtttttattgtgttttctaaccataagagatcattaaaggcaaagcctgtatgacgctgtacacacacaaaaaaatggtcaccgcaggccatactaccaatgaaatggtaggtaaacaaatcttctggtcaagagaaaaaaaaaagaaatagcactctgcatgctttgctctacaagacgaatttccctagaaagaatccaatgaaggccgggcatagtggctcactcctgtaatcccagcactttggaggccgaggcgggtagatcacctgaggttaggagttcaagaccagcctggccaacatggtgaaaccccttctctactaaaaatgcaaaaattagctgggtgtggtggcgggcgcctgtaatcccagctactcgggaggctgaggtgggagaattgcttgaacccaggagacggaggttgcagtgagccgagatcacgcctctgcactccagcctgggcaacaagagtgagactccgtctccaaaaaaagaaaaggaatccagtgaaaatggctgcaattacaacaagaagtgaaggaagaagactggtgacatctctgaaggatgcagttgaggttgatccaggtttatccgaatatgctacctttctgagccttaaaccttcatctctcaggtgttgatttgcttctgatagcttcatcatttctccctgaagtcttttacactcttctgttagtttccttgtttcagtatcatgaagtgaagcactgtgtggttgtggcgtgggcccgtcttgcttagatgcattcagtgggacagctttgctgggttccatgtcattcaatttatcattttcattggggatctccatttggaatccattaattcatgaggttttgcctcattccacacagcttccatatctgaagtgtttagtggagcaaaaattgtaccataaacttgtgtttactcttttcattcggatcatagtcaaagggctgtagcattactgaaacagtcacagttgaccctgggtcaataattccactgttgggcctcacacagtaccggtgaggcacggtagtcttcactttgaaacacacttttctatccgatggatttcgcaatttaagatttgtagtgactacatctgtgaaggggcctttgaatttgaggtctatgggcgggtcgaggaccaggatctgctcgtgcttcgccgtggccccggaggcagacgccattggagagacagcgcagagcagggggcggcttgctcgctgggggcgggggacgatggcgagaggggagggggagcgagttcgcatctctccttttcctggttagactctgttcaaccacattcttatgttggcagatctgcttccagattgatttttagagcaccatcactttcacattcctgattctgattttgttttgttttgtttgggttttctgaaacttaaaatgctgccccgaaaatactatatttttgagtttgtgttctgaaagcctccgtgctgctggatctttggggggaaatacaggatccttcagcactgaggtgtttaagatttgcaactagcaatgcaattttttctaaatatggggatatttacctttattaagaaattatactaaacattgatgtccttgatcattttatgttctcatattacttttgattctactatgattgtgtggtggtgaacaaagatcattacaaacaaaaactgtaattttgttatatttgattcaatggaatttacctaaaaaataaagactaaaaatgtggtgtg

SEQ ID NO: 273379 - DNA, 1278 bp, Artificial Sequence
  derived and/or modified sequence
atgaacgccatgctggagacccccgagctgcccgccgtgttcgacggcgtgaagctggccgccgtggccgccgtgctgtacgtgatcgtgagatgcctgaacctgaagagccccaccgccccccccgacctgtacttccaggacagcggcctgagcagattcctgctgaagagctgccccctgctgaccaaggagtacatcccccccctgatctggggcaagagcggccacatccagaccgccctgtacggcaagatgggcagagtgagaagcccccacccctacggccacagaaagttcatcaccatgagcgacggcgccaccagcaccttcgacctgttcgagcccctggccgagcactgcgtgggcgacgacatcaccatggtgatctgccccggcatcgccaaccacagcgagaagcagtacatcagaaccttcgtggactacgcccagaagaacggctacagatgcgccgtgctgaaccacctgggcgccctgcccaacatcgagctgaccagccccagaatgttcacctacggctgcacctgggagttcggcgccatggtgaactacatcaagaagacctaccccctgacccagctggtggtggtgggcttcagcctgggcggcaacatcgtgtgcaagtacctgggcgagacccaggccaaccaggagaaggtgctgtgctgcgtgagcgtgtgccagggctacagcgccctgagagcccaggagaccttcatgcagtgggaccagtgcagaagattctacaacttcctgatggccgacaacatgaagaagatcatcctgagccacagacaggccctgttcggcgaccacgtgaagaagccccagagcctggaggacaccgacctgagcagactgtacaccgccaccagcctgatgcagatcgacgacaacgtgatgagaaagttccacggctacaacagcctgaaggagtactacgaggaggagagctgcatgagatacctgcacagaatctacgtgcccctgatgctggtgaacgccgccgacgaccccctggtgcacgagagcctgctgaccatccccaagagcctgagcgagaagagagagaacgtgatgttcgtgctgcccctgcacggcggccacctgggcttcttcgagggcagcgtgctgttccccgagcccctgacctggatggacaagctggtggtggagtacgccaacgccatctgccagtgggagagaaacaagctgcagtgcagcgacaccgagcaggtggaggccgacctggagtag

SEQ ID NO: 273380 - protein, 764 aa, Artificial Sequence
  derived and/or modified sequence
MGFSSELCSPQGHGVLQQMQEAELRLLEGMRKWMAQRVKSDREYAGLLHHMSLQDSGGQSRAISPDSPISQTHSQDIEKLKSQYRALARDSAQAKRKYQEASKDKDRDKAKDKYVRSLWKLFAHHNRYVLGVRAAQLHHQHHHQLLLPGLLRSLQDLHEEMACILKEILQEYLEISSLVQDEVVAIHREMAAAAARIQPEAEYQGFLRQYGSAPDVPPCVTFDESLLEEGEPLEPGELQLNELTVESVQHTLTSVTDELAVATEMVFRRQEMVTQLQQELRNEEENTHPRERVQLLGKRQVLQEALQGLQVALCSQAKLQAQQELLQTKLEHLGPGEPPPVLLLQDDRHSTSSSEQEREGGRTPTLEILKSHISGIFRPKFSLPPPLQLIPEVQKPLHEQLWYHGAIPRAEVAELLVHSGDFLVRESQGKQEYVLSVLWDGLPRHFIIQSLDNLYRLEGEGFPSIPLLIDHLLSTQQPLTKKSGVVLHRAVPKDKWVLNHEDLVLGEQIGRGNFGEVFSGRLRADNTLVAVKSCRETLPPDLKAKFLQEARILKQYSHPNIVRLIGVCTQKQPIYIVMELVQGGDFLTFLRTEGARLRVKTLLQMVGDAAAGMEYLESKCCIHRDLAARNCLVTEKNVLKISDFGMSREEADGVYAASGGLRQVPVKWTAPEALNYGRYSSESDVWSFGILLWETFSLGASPYPNLSNQQTREFVEKGGRLPCPELCPDAVFRLMEQCWAYEPGQRPSFSTIYQELQSIRKRHR

SEQ ID NO: 273381 - DNA, 2295 bp, Artificial Sequence
  derived and/or modified sequence
atgggcttcagcagcgagctgtgcagcccccagggccacggcgtgctgcagcagatgcaggaggccgagctgagactgctggagggcatgagaaagtggatggcccagagagtgaagagcgacagagagtacgccggcctgctgcaccacatgagcctgcaggacagcggcggccagagcagagccatcagccccgacagccccatcagccagacccacagccaggacatcgagaagctgaagagccagtacagagccctggccagagacagcgcccaggccaagagaaagtaccaggaggccagcaaggacaaggacagagacaaggccaaggacaagtacgtgagaagcctgtggaagctgttcgcccaccacaacagatacgtgctgggcgtgagagccgcccagctgcaccaccagcaccaccaccagctgctgctgcccggcctgctgagaagcctgcaggacctgcacgaggagatggcctgcatcctgaaggagatcctgcaggagtacctggagatcagcagcctggtgcaggacgaggtggtggccatccacagagagatggccgccgccgccgccagaatccagcccgaggccgagtaccagggcttcctgagacagtacggcagcgcccccgacgtgcccccctgcgtgaccttcgacgagagcctgctggaggagggcgagcccctggagcccggcgagctgcagctgaacgagctgaccgtggagagcgtgcagcacaccctgaccagcgtgaccgacgagctggccgtggccaccgagatggtgttcagaagacaggagatggtgacccagctgcagcaggagctgagaaacgaggaggagaacacccaccccagagagagagtgcagctgctgggcaagagacaggtgctgcaggaggccctgcagggcctgcaggtggccctgtgcagccaggccaagctgcaggcccagcaggagctgctgcagaccaagctggagcacctgggccccggcgagcccccccccgtgctgctgctgcaggacgacagacacagcaccagcagcagcgagcaggagagagagggcggcagaacccccaccctggagatcctgaagagccacatcagcggcatcttcagacccaagttcagcctgcccccccccctgcagctgatccccgaggtgcagaagcccctgcacgagcagctgtggtaccacggcgccatccccagagccgaggtggccgagctgctggtgcacagcggcgacttcctggtgagagagagccagggcaagcaggagtacgtgctgagcgtgctgtgggacggcctgcccagacacttcatcatccagagcctggacaacctgtacagactggagggcgagggcttccccagcatccccctgctgatcgaccacctgctgagcacccagcagcccctgaccaagaagagcggcgtggtgctgcacagagccgtgcccaaggacaagtgggtgctgaaccacgaggacctggtgctgggcgagcagatcggcagaggcaacttcggcgaggtgttcagcggcagactgagagccgacaacaccctggtggccgtgaagagctgcagagagaccctgccccccgacctgaaggccaagttcctgcaggaggccagaatcctgaagcagtacagccaccccaacatcgtgagactgatcggcgtgtgcacccagaagcagcccatctacatcgtgatggagctggtgcagggcggcgacttcctgaccttcctgagaaccgagggcgccagactgagagtgaagaccctgctgcagatggtgggcgacgccgccgccggcatggagtacctggagagcaagtgctgcatccacagagacctggccgccagaaactgcctggtgaccgagaagaacgtgctgaagatcagcgacttcggcatgagcagagaggaggccgacggcgtgtacgccgccagcggcggcctgagacaggtgcccgtgaagtggaccgcccccgaggccctgaactacggcagatacagcagcgagagcgacgtgtggagcttcggcatcctgctgtgggagaccttcagcctgggcgccagcccctaccccaacctgagcaaccagcagaccagagagttcgtggagaagggcggcagactgccctgccccgagctgtgccccgacgccgtgttcagactgatggagcagtgctgggcctacgagcccggccagagacccagcttcagcaccatctaccaggagctgcagagcatcagaaagagacacagatag

SEQ ID NO: 273382 - DNA, 2295 bp, Artificial Sequence
  derived and/or modified sequence
atgggttttagttcagagctgtgctccccgcaaggacatggcgtactgcagcagatgcaggaagcagaattgcgcctcttggagggaatgagaaagtggatggctcaaagagtgaagtcagatagagaatacgccgggctcctgcatcacatgtctctgcaggactcaggaggtcaatcccgggcaattagccccgacagccctatttctcagacacattcgcaggatattgaaaagctcaaatcgcagtatcgcgcgcttgcccgagattctgcccaggcaaagcggaagtaccaggaggccagcaaagacaaggatcgggacaaggcgaaggataaatacgttcggtcgctgtggaagttgttcgcacatcataaccgttacgttctgggcgttcgggccgcccagctacatcaccaacaccaccaccagttgttgctgccgggcctcctccgaagtctgcaggacttacacgaagagatggcttgtattcttaaggagatccttcaggaatatttggaaatcagttccctggtccaggatgaggttgtcgccatacaccgtgagatggccgccgccgctgcccgtatccaaccggaggcagaataccaagggttcctgagacaatatgggtccgcacccgacgttcccccctgtgtgactttcgacgagtcactgctggaagagggcgagccgctggagccaggtgaattgcagctgaacgaactcactgtcgaaagcgtacagcatacacttacttcagtgactgatgagctagccgtagccaccgaaatggtctttcggagacaggaaatggttacacaactgcagcaggaactcaggaacgaggaggagaacactcatcctcgggaacgggtgcagctcctaggcaagagacaagtgctgcaggaagccctgcagggtctgcaggtagccctgtgctcccaagctaagcttcaagcccagcaggaactgctacagacaaaattggagcatcttgggccaggggaacccccaccagtgctgctgcttcaagacgacaggcacagtactagcagcagcgagcaggaaagagagggcggcagaacacctactctcgagatcctcaagtcacacatatctgggatcttccgaccaaagttcagcttgcccccccctctgcagctcatccccgaggttcagaaacctctgcatgaacagctttggtatcacggcgcaatccctagagccgaggtagctgagctcctagtgcactctggagactttttggtccgcgagtcacagggcaagcaggagtatgtgctatccgtcctgtgggatggtcttccacggcattttatcatacagtccttagacaatctgtatcgactagagggggagggcttcccatcaattccactgttgattgaccatctgctcagcacccagcaacctctcacaaagaagagcggcgtggtgttacacagggcagtgcctaaagataaatgggtgctgaaccatgaggatttagtgttgggggagcaaattgggaggggcaactttggggaggtcttctctggcagactcagagcggacaacacactcgtggctgtcaaatcctgcagagagacgctgcccccggacctgaaggcaaagtttctgcaggaagcccgcatactgaagcagtactcccaccctaatattgtacggctgattggagtctgtacgcagaagcagcccatctatatcgtgatggagctggtacagggcggagactttctcacgtttctccgaacagaaggtgcccggctgcgcgtgaaaactctcctgcagatggtgggtgatgccgccgccggaatggagtaccttgagagtaagtgctgcatccacagggatttggcagcgaggaactgcctcgtcaccgagaagaacgtgctgaaaataagtgatttcgggatgtctagagaggaagcggatggggtgtatgcggcatccggcggcctgaggcaggttccggtcaagtggaccgcacccgaagctttgaattatggccgatattcgagtgaaagtgatgtgtggtcttttggtatactgttatgggaaacattcagcctgggtgcctccccctatcccaacctcagcaaccagcagactcgggagttcgttgagaaggggggacgtttgccctgtccggaactgtgccccgacgcagtttttcggctcatggagcagtgctgggcatatgaaccgggacagcggccctccttcagcaccatctatcaggaactccagtcgatccgaaaacgccatcgctag

SEQ ID NO: 273383 - DNA, 2302 bp, Artificial Sequence
  derived and/or modified sequence
atgggcttctcttccgagctgtgcagcccccagggccacggggtcctgcagcaaatgcaggaggccgagcttcgtctactggagggcatgagaaagtggatggcccagcgggtcaagagtgacagggagtatgcaggactgcttcaccacatgtccctgcaggacagtgggggccagagccgggccatcagccctgacagccccatcagtcagacccacagccaggacattgagaagctgaagagccagtaccgagctctggcacgggacagtgcccaagccaagcgcaagtaccaggaggccagcaaagacaaggaccgtgacaaggctaaggacaagtatgtgcgcagcctgtggaagctctttgctcaccacaaccgctatgtgctgggcgtgcgggctgcgcagctacaccaccagcaccaccaccagctcctgctgcccggcctgctgcggtcactgcaggacctgcacgaggagatggcttgcatcctgaaggagatcctgcaggaatacctggagattagcagcctggtgcaggatgaggtggtggccattcaccgggagatggctgcagctgctgcccgcatccagcctgaggctgagtaccaaggcttcctgcgacagtatgggtccgcacctgacgtcccaccctgtgtcacgttcgatgagtcactgcttgaggagggtgaaccgctggagcctggggagctccagctgaacgagctgactgtggagagcgtgcagcacacgctgacctcagtgacagatgagctggctgtggccaccgagatggtgttcaggcggcaggagatggttacgcagctgcaacaggagctccggaatgaagaggagaacacccacccccgggagcgggtgcagctgctgggcaagaggcaagtgctgcaagaagcactgcaggggctgcaggtagcgctgtgcagccaggccaagctgcaggcccagcaggagttgctgcagaccaagctggagcacctgggccccggcgagcccccgcctgtgctgctcctgcaggatgaccgccactccacgtcgtcctcggagcaggagcgagaggggggaaggacacccacgctggagatccttaagagccacatctcaggaatcttccgccccaagttctcgctccctccaccgctgcagctcattccggaggtgcagaagcccctgcatgagcagctgtggtaccacggggccatcccgagggcagaggtggctgagctgctggtgcactctggggacttcctggtgcgggagagccagggcaagcaggagtacgtgctgtcggtgctgtgggatggtctgccccggcacttcatcatccagtccttggataacctgtaccgactggaaggggaaggctttcctagcattcctttgctcatcgaccacctactgagcacccagcagcccctcaccaagaagagtggtgttgtcctgcacagggctgtgcccaaggacaagtgggtgctgaaccatgaggacctggtgttgggtgagcagattggacgggggaactttggcgaagtgttcagcggacgcctgcgagccgacaacaccctggtggcggtgaagtcttgtcgagagacgctcccacctgacctcaaggccaagtttctacaggaagcgaggatcctgaagcagtacagccaccccaacatcgtgcgtctcattggtgtctgcacccagaagcagcccatctacatcgtcatggagcttgtgcaggggggcgacttcctgaccttcctccgcacggagggggcccgcctgcgggtgaagactctgctgcagatggtgggggatgcagctgctggcatggagtacctggagagcaagtgctgcatccaccgggacctggctgctcggaactgcctggtgacagagaagaatgtcctgaagatcagtgactttgggatgtcccgagaggaagccgatggggtctatgcagcctcagggggcctcagacaagtccccgtgaagtggaccgcacctgaggcccttaactacggccgctactcctccgaaagcgacgtgtggagctttggcatcttgctctgggagaccttcagcctgggggcctccccctatcccaacctcagcaatcagcagacacgggagtttgtggagaaggggggccgtctgccctgcccagagctgtgtcctgatgccgtgttcaggctcatggagcagtgctgggcctatgagcctgggcagcggcccagcttcagcaccatctaccaggagctgcagagcatccgaaagcggcatcggtgaggctggg

SEQ ID NO: 273384 - DNA, 2295 bp, Artificial Sequence
  derived and/or modified sequence
atgggcttcagcagcgagctgtgcagcccccagggccatggagtgctgcagcagatgcaggaggccgagctgcggctgctggagggcatgaggaagtggatggcccagagggtgaagagtgaccgggagtatgccggcctgctgcaccacatgagcctgcaggacagcggcggccagagccgggccatcagcccagacagccccatcagccagacccacagccaggacatcgagaagctgaagagccagtaccgggccctggcccgggacagcgcccaggccaagaggaagtaccaggaggccagcaaggacaaggaccgggacaaggccaaggacaagtatgtgcgcagcctgtggaagctgtttgcccaccacaaccgctacgtgctgggcgtgcgggccgcccagctgcaccaccagcaccaccaccagctgctgctgcccggcctgctgcggagcctgcaggacctgcacgaggagatggcctgcatcctgaaggagatcctgcaggagtacctggagatcagcagcctggtgcaggatgaggtggtggccatccaccgggagatggctgctgctgctgcccgcatccagcctgaggccgagtaccagggcttcctgcggcagtatggcagcgccccagatgtgcccccctgtgtgacctttgatgagagcctgctggaggagggggagcccctggagcctggagagctgcagctgaatgagctgactgtggagagcgtgcagcacaccctgacctctgtgacagatgagctggccgtggccacagagatggtgttccggcggcaggagatggtgacccagctgcagcaggagctgagaaatgaggaggagaacacccacccccgggagcgggtgcagctgctgggcaagaggcaggtgctgcaggaggccctgcagggcctgcaggtggccctgtgcagccaggccaagctgcaggcccagcaggagctgctgcagaccaagctggagcacctgggccctggagagcccccacctgtgctgctgctgcaggatgacagacacagcaccagcagcagcgagcaggagcgggagggcggccgcacccccaccctggagatcctgaagagccacatcagcggcatcttccggcccaagttcagcctgcccccacccctgcagctgatccctgaggtgcagaagcccctgcacgagcagctgtggtaccacggggccatccccagggctgaggtggccgagctgctggtgcacagcggggacttcctggtgcgggagagccagggcaagcaggagtatgtgctgtctgtgctgtgggatggcctgcccaggcacttcatcatccagagcctggacaacctgtaccgcctggagggggagggcttccccagcatccccctgctgattgaccacctgctgagcacccagcagcccctgaccaagaagtctggagtggtgctgcacagagctgtgcccaaggacaagtgggtgctgaaccacgaggacctggtgctgggggagcagatcggccggggcaactttggagaggtgttttctggccgcctgcgggctgacaacaccctggtggccgtgaagagctgccgggagaccctgcccccagacctgaaggccaagttcctgcaggaggcccgcatcctgaagcagtacagccaccccaacatcgtgcggctgattggagtgtgcacccagaagcagcccatctacatcgtgatggagctggtgcagggcggggacttcctgaccttcctgaggacagagggcgcccggctgcgggtgaagaccctgctgcagatggtgggagatgctgctgctggcatggagtacctggagagcaagtgctgcatccaccgggacctggccgccaggaactgcctggtgacagagaagaatgtgctgaagatcagtgactttggcatgagccgggaggaggctgatggagtgtatgctgccagcggcggcctgcggcaggtgcctgtgaagtggacagcccctgaggccctgaactacggccgctacagcagcgagagtgatgtgtggagctttggcatcctgctgtgggagaccttcagcctgggcgccagcccctaccccaacctgagcaaccagcagacccgggagtttgtggagaagggcggccgcctgccctgcccagagctgtgcccagatgctgtgttccggctgatggagcagtgctgggcctatgagcccggccagaggcccagcttcagcaccatctaccaggagctgcagagcatcaggaagaggcacaggtag

SEQ ID NO: 273385 - DNA, 2295 bp, Artificial Sequence
  derived and/or modified sequence
atgggcttcagcagcgagctgtgcagcccccagggccacggcgtgctgcagcaaatgcaagaggccgagctgagattactggagggcatgagaaaatggatggcacagagggtcaaatcagaccgcgagtacgccggactgttacaccacatgtctttacaggacagcggaggacaaagtagagcaatctcacctgatagccccatttcccaaacgcacagccaggatatcgagaagttgaaatcccaatatagagcgttagccagggactctgctcaggctaagcgaaagtaccaggaagcaagcaaggataaggatagggataaagccaaggacaaatacgtgagaagtctgtggaaactgttcgctcaccacaatagatatgtgctgggcgtccgcgcggcgcagctccatcaccagcatcaccaccaactgctgctgccgggccttcttcggtctctccaggacttgcatgaggaaatggcctgtatcttgaaggagatcctgcaagagtacttggaaatttctagtttagtgcaggatgaagtcgtggccattcaccgtgagatggcggctgccgcggctcgcatccagcccgaggccgaataccaagggtttctaaggcagtatggcagcgctcctgatgtacccccatgcgtaacattcgacgagtccctgctcgaggagggcgagcccctggaacccggggaactacaactgaatgaattgactgtggagtccgttcagcacactctgacttctgttaccgacgaattggcggtcgcgacagaaatggtcttccgaagacaggagatggtaacccaacttcagcaagagttacgcaatgaagaggaaaacactcaccctagggaacgggtccagctcctgggaaagcgtcaggtccttcaagaggccctacagggactccaagtggctttgtgcagccaggctaagctccaggcccagcaggagctgcttcagacaaagttggaacatctcggtcctggtgagcctccacctgtgttgctcttgcaggacgacaggcacagcacctcatcttccgagcaggaaagggaaggaggcaggacccctactcttgaaatcctaaagtcccacatcagtggcatttttcgtccgaagttctctttaccacctccactccagttaatccctgaggtgcaaaaacctctgcatgaacaattatggtatcacggagcaatccctagggccgaggtagcagagctgcttgtgcactcgggggacttcctcgtgcgcgagtcccagggaaagcaggaatacgtattaagtgtgctgtgggatgggctgccgaggcatttcataattcagagtctggataacctgtaccgcttggagggcgaaggattccccagcatacccctcctcatcgatcatctgctcagtactcagcaaccattgaccaagaagagtggagtggtgctgcatcgcgctgtcccaaaagacaaatgggttctcaaccacgaagacttagttttgggagaacagatcggccggggcaatttcggtgaggtcttctcagggagactccgggcagataacacacttgtcgcggtgaagtcctgtcgggagactcttcccccagacttaaaggcgaaattcctgcaggaagcgaggattctgaagcagtactcacaccctaacattgtgcgtctcatcggcgtctgtacccagaagcagcctatctatatcgtgatggagctggttcaaggcggggatttcctgaccttcctgcgaacagaaggagccagactcagagtgaaaacactgctccaaatggtgggcgatgctgccgcaggtatggagtatctggagtctaagtgctgtatccatcgcgacctcgctgccagaaactgtctggtcacagagaagaatgtgctaaagattagcgattttggaatgtcccgagaggaggccgacggggtctacgctgcatcaggaggacttagacaggtaccggtgaaatggaccgcgcctgaggccctcaactatgggcgatatagttccgaatccgacgtttggtcatttggcatactactatgggagactttctccctgggcgcgtctccttatcctaatctgagcaaccaacaaacaagagagtttgtggagaagggaggacggctcccatgtcccgaactctgtcccgatgcagtgtttcgtcttatggaacaatgctgggcctacgagcccggacagcggccttctttctccactatctaccaggagctccagagcatcagaaaacgccaccgttag

SEQ ID NO: 273386 - DNA, 2295 bp, Artificial Sequence
  derived and/or modified sequence
atgggcttcagctctgaactgtgttcacctcaaggccatggggttttgcagcagatgcaagaggcagaacttcggctcttagaaggaatgaggaagtggatggctcagcgggtaaaatccgacagagaatacgccggtctcctacaccacatgtcactgcaggactcaggagggcaatcaagggccatcagtcccgatagccctatatctcagacccactcccaggatatcgaaaaattgaagtctcagtacagagcactggccagggatagcgctcaggccaagcgtaagtaccaggaggctagcaaggacaaggacagagacaaggcaaaagataaatacgtgagatcactttggaagctgtttgcccaccacaatcggtatgttctaggagtgagggcagcccaattgcatcaccaacatcaccaccaactgctgttgcctggcctgctgaggtcacttcaggacctgcatgaggagatggcatgcatcctgaaggagatcctccaggagtacctggaaatcagctctctggttcaggatgaagtggttgccatccatcgggagatggcagccgctgccgcacgcatccagcctgaggccgaataccagggattcctgcgtcagtacggatcagctccggacgtccccccttgtgttacctttgacgagagcctcctggaggagggcgaacccttagagccgggtgaactccaactgaatgagctgactgttgagagcgtccagcataccttaacttccgtcaccgatgagctggccgtcgcaaccgagatggtgtttcgacgccaggaaatggtcacacaactgcagcaagagctgcgcaacgaagaagagaatactcatccccgtgaacgggtccaactgttggggaaacggcaagttctgcaggaagccctacagggattgcaggtggcactgtgcagtcaagctaaactccaagctcagcaggagctgctccagactaaactcgaacatctcgggccaggcgaaccaccgcctgtgcttctgcttcaagacgaccggcactccacgtctagcagcgaacaggaaagagaaggcggacggaccccaactctcgaaatcctaaaatctcatatttccgggatttttcggccaaaattctccctgcccccaccgctacagcttattcctgaagttcaaaagccccttcatgagcagctctggtatcacggggctataccaagagccgaggtcgccgagttgctggtgcactccggagatttccttgtgcgggaatcacagggtaaacaagaatacgtccttagcgtcctctgggatggactgccacgacacttcataattcagtcacttgataacctgtatcgtttagaaggggaagggtttccaagcatccccttattgattgaccatctgctttcaactcagcagcctcttactaaaaaaagcggagtggtgctgcacagggcagtgcccaaagataaatgggtgctgaatcatgaggatttggttttgggtgaacagattgggaggggcaacttcggagaagttttcagtggacgtctgagagccgacaacaccctggtagctgtgaaatcctgtagggaaactctgccaccagacctaaaggccaagtttctgcaagaagcccgtattctgaagcagtacagccaccctaacatcgttcggcttattggcgtttgtacccagaaacagcctatttatattgtcatggaattagtccagggcggtgactttctcactttcttacggaccgaaggagcacgcctcagggtgaaaacattgctccagatggtcggcgatgcagccgctggcatggaatatctggaatcaaaatgctgcatccatagggacctcgccgctagaaattgcctggttactgagaaaaacgtgctcaagatctcagactttggaatgtccagggaagaggcagacggggtgtacgcagctagtgggggtttgagacaagtgccagttaaatggactgcgcctgaagctctgaattatggcaggtattccagcgaatcagacgtttggtctttcggtatccttctttgggagactttctcacttggcgctagtccatatccgaacctttcaaatcagcaaactagagagttcgtggaaaaggggggaaggctgccttgtcccgaactctgcccggacgctgtctttaggctcatggagcagtgttgggcttacgaacccggtcaaagaccatccttttctacaatctaccaagaactgcagtctatccggaagcgacacagatag

SEQ ID NO: 273387 - protein, 42 aa, Artificial Sequence
  derived and/or modified sequence
MGFSSELCSPQGHGVLQQMQEAELRLLEGMRKWMAQRVKSDR

SEQ ID NO: 273388 - protein, 115 aa, Artificial Sequence
  derived and/or modified sequence
MGFSSELCSPQGHGVLQQMQEAELRLLEGMRKWMAQRVKSDREYAGLLHHMSLQDSGGQSRAISPDSPISQSWAEITSQTEGLSRLLRQHAEDLNSGPLSKLSLLIRERQQLRKT

SEQ ID NO: 273389 - protein, 752 aa, Artificial Sequence
  derived and/or modified sequence
MGFSSELCSPQGHGVLQQMQEAELRLLEGMRKWMAQRVKSDREYAGLLHHMSLQDSGGQSRAISPDSPISQSWAEITSQTEGLSRLLRQHAEDLNSGPLSKLSLLIRERQQLRKTYSEQWQQLQQELTKTHSQDIEKLKSQYRALARDSAQAKRKYQEASKDKDRDKAKDKYVRSLWKLFAHHNRYVLGVRAAQLHHQHHHQLLLPGLLRSLQDLHEEMACILKEILQEYLEISSLVQDEVVAIHREMAAAAARIQPEAEYQGFLRQYGSAPDVPPCVTFDESLLEEGEPLEPGELQLNELTVESVQHTLTSVTDELAVATEMVFRRQEMVTQLQQELRNEEENTHPRERVQLLGKRQVLQEALQGLQVALCSQAKLQAQQELLQTKLEHLGPGEPPPVLLLQDDRHSTSSSEQEREGGRTPTLEILKSHISGIFRPKFSNLYRLEGEGFPSIPLLIDHLLSTQQPLTKKSGVVLHRAVPKDKWVLNHEDLVLGEQIGRGNFGEVFSGRLRADNTLVAVKSCRETLPPDLKAKFLQEARILKQYSHPNIVRLIGVCTQKQPIYIVMELVQGGDFLTFLRTEGARLRVKTLLQMVGDAAAGMEYLESKCCIHRDLAARNCLVTEKNVLKISDFGMSREEADGVYAASGGLRQVPVKWTAPEALNYGRYSSESDVWSFGILLWETFSLGASPYPNLSNQQTREFVEKGGRLPCPELCPDAVFRLMEQCWAYEPGQRPSFSTIYQELQSIRKRHR

SEQ ID NO: 273390 - protein, 147 aa, Artificial Sequence
  derived and/or modified sequence
MGFSSELCSPQGHGVLQQMQEAELRLLEGMRKWMAQRVKSDREYAGLLHHMSLQDSGGQSRAISPDSPISQSWAEITSQTEGLSRLLRQHAEDLNSGPLSKLSLLIRERQQLRKTYSEQWQQLQQELTKTHSQDIEKLKSQYRALAR

SEQ ID NO: 273391 - protein, 169 aa, Artificial Sequence
  derived and/or modified sequence
MGFSSELCSPQGHGVLQQMQEAELRLLEGMRKWMAQRVKSDREYAGLLHHMSLQDSGGQSRAISPDSPISQSWAEITSQTEGLSRLLRQHAEDLNSGPLSKLSLLIRERQQLRKTYSEQWQQLQQELTKTHSQDIEKLKSQYRALARDSAQAKRKYQEASKDKDRDKAK

SEQ ID NO: 273392 - DNA, 348 bp, Artificial Sequence
  derived and/or modified sequence
atgggcttcagcagcgagctgtgcagcccccagggccacggcgtgctgcagcagatgcaggaggccgagctgagactgctggagggcatgagaaagtggatggcccagagagtgaagagcgacagagagtacgccggcctgctgcaccacatgagcctgcaggacagcggcggccagagcagagccatcagccccgacagccccatcagccagagctgggccgagatcaccagccagaccgagggcctgagcagactgctgagacagcacgccgaggacctgaacagcggccccctgagcaagctgagcctgctgatcagagagagacagcagctgagaaagacctag

SEQ ID NO: 273393 - DNA, 2259 bp, Artificial Sequence
  derived and/or modified sequence
atgggcttcagcagcgagctgtgcagcccccagggccacggcgtgctgcagcagatgcaggaggccgagctgagactgctggagggcatgagaaagtggatggcccagagagtgaagagcgacagagagtacgccggcctgctgcaccacatgagcctgcaggacagcggcggccagagcagagccatcagccccgacagccccatcagccagagctgggccgagatcaccagccagaccgagggcctgagcagactgctgagacagcacgccgaggacctgaacagcggccccctgagcaagctgagcctgctgatcagagagagacagcagctgagaaagacctacagcgagcagtggcagcagctgcagcaggagctgaccaagacccacagccaggacatcgagaagctgaagagccagtacagagccctggccagagacagcgcccaggccaagagaaagtaccaggaggccagcaaggacaaggacagagacaaggccaaggacaagtacgtgagaagcctgtggaagctgttcgcccaccacaacagatacgtgctgggcgtgagagccgcccagctgcaccaccagcaccaccaccagctgctgctgcccggcctgctgagaagcctgcaggacctgcacgaggagatggcctgcatcctgaaggagatcctgcaggagtacctggagatcagcagcctggtgcaggacgaggtggtggccatccacagagagatggccgccgccgccgccagaatccagcccgaggccgagtaccagggcttcctgagacagtacggcagcgcccccgacgtgcccccctgcgtgaccttcgacgagagcctgctggaggagggcgagcccctggagcccggcgagctgcagctgaacgagctgaccgtggagagcgtgcagcacaccctgaccagcgtgaccgacgagctggccgtggccaccgagatggtgttcagaagacaggagatggtgacccagctgcagcaggagctgagaaacgaggaggagaacacccaccccagagagagagtgcagctgctgggcaagagacaggtgctgcaggaggccctgcagggcctgcaggtggccctgtgcagccaggccaagctgcaggcccagcaggagctgctgcagaccaagctggagcacctgggccccggcgagcccccccccgtgctgctgctgcaggacgacagacacagcaccagcagcagcgagcaggagagagagggcggcagaacccccaccctggagatcctgaagagccacatcagcggcatcttcagacccaagttcagcaacctgtacagactggagggcgagggcttccccagcatccccctgctgatcgaccacctgctgagcacccagcagcccctgaccaagaagagcggcgtggtgctgcacagagccgtgcccaaggacaagtgggtgctgaaccacgaggacctggtgctgggcgagcagatcggcagaggcaacttcggcgaggtgttcagcggcagactgagagccgacaacaccctggtggccgtgaagagctgcagagagaccctgccccccgacctgaaggccaagttcctgcaggaggccagaatcctgaagcagtacagccaccccaacatcgtgagactgatcggcgtgtgcacccagaagcagcccatctacatcgtgatggagctggtgcagggcggcgacttcctgaccttcctgagaaccgagggcgccagactgagagtgaagaccctgctgcagatggtgggcgacgccgccgccggcatggagtacctggagagcaagtgctgcatccacagagacctggccgccagaaactgcctggtgaccgagaagaacgtgctgaagatcagcgacttcggcatgagcagagaggaggccgacggcgtgtacgccgccagcggcggcctgagacaggtgcccgtgaagtggaccgcccccgaggccctgaactacggcagatacagcagcgagagcgacgtgtggagcttcggcatcctgctgtgggagaccttcagcctgggcgccagcccctaccccaacctgagcaaccagcagaccagagagttcgtggagaagggcggcagactgccctgccccgagctgtgccccgacgccgtgttcagactgatggagcagtgctgggcctacgagcccggccagagacccagcttcagcaccatctaccaggagctgcagagcatcagaaagagacacagatag

SEQ ID NO: 273394 - DNA, 444 bp, Artificial Sequence
  derived and/or modified sequence
atgggcttcagcagcgagctgtgcagcccccagggccacggcgtgctgcagcagatgcaggaggccgagctgagactgctggagggcatgagaaagtggatggcccagagagtgaagagcgacagagagtacgccggcctgctgcaccacatgagcctgcaggacagcggcggccagagcagagccatcagccccgacagccccatcagccagagctgggccgagatcaccagccagaccgagggcctgagcagactgctgagacagcacgccgaggacctgaacagcggccccctgagcaagctgagcctgctgatcagagagagacagcagctgagaaagacctacagcgagcagtggcagcagctgcagcaggagctgaccaagacccacagccaggacatcgagaagctgaagagccagtacagagccctggccagatag

SEQ ID NO: 273395 - DNA, 510 bp, Artificial Sequence
  derived and/or modified sequence
atgggcttcagcagcgagctgtgcagcccccagggccacggcgtgctgcagcagatgcaggaggccgagctgagactgctggagggcatgagaaagtggatggcccagagagtgaagagcgacagagagtacgccggcctgctgcaccacatgagcctgcaggacagcggcggccagagcagagccatcagccccgacagccccatcagccagagctgggccgagatcaccagccagaccgagggcctgagcagactgctgagacagcacgccgaggacctgaacagcggccccctgagcaagctgagcctgctgatcagagagagacagcagctgagaaagacctacagcgagcagtggcagcagctgcagcaggagctgaccaagacccacagccaggacatcgagaagctgaagagccagtacagagccctggccagagacagcgcccaggccaagagaaagtaccaggaggccagcaaggacaaggacagagacaaggccaagtag

SEQ ID NO: 273396 - DNA, 348 bp, Artificial Sequence
  derived and/or modified sequence
atggggttcagcagtgagctgtgctctccacaaggccacggcgtcctccagcagatgcaagaagccgaacttcgcctgctggaaggcatgcgaaaatggatggctcagagggtgaagagtgatagggagtacgccggcctcttacaccatatgtcattgcaggattcaggaggtcagtcccgtgctatctcgccagatagtcccattagtcagagttgggcagaaatcactagccagactgaaggattaagtcgtcttctcaggcagcacgcggaggatctgaattctggcccgttgagtaaactctcacttttgattagagagcggcagcagttgcgtaagacctag

SEQ ID NO: 273397 - DNA, 2259 bp, Artificial Sequence
  derived and/or modified sequence
atgggattttcgtctgagctatgctcccctcaaggacacggcgtgttgcagcagatgcaggaagccgagctacgcctgctggagggaatgcggaaatggatggcgcagagggtgaaatccgaccgagaatatgccggactcctgcatcatatgtctctgcaagattctggcggccagtctcgggccatctcaccagattccccgatctcccagtcgtgggccgaaattacttcccaaacggaaggcctctctcggcttcttagacaacacgcagaggaccttaattcaggcccacttagcaaacttagcctgctgatccgggagaggcagcagctcagaaagacctattcagaacagtggcagcagctgcagcaggagctgactaagacacacagtcaggacatcgagaagttgaagtctcaataccgggccttggctagagacagtgcccaggctaaaagaaagtaccaggaggcttccaaagataaggacagagacaaggctaaagacaagtatgttaggtccctgtggaagctcttcgctcaccacaacagatacgtgctgggtgttcgcgccgcccagctccatcaccagcaccaccaccagctcttacttcctggccttctccgcagcctgcaggacctgcatgaagaaatggcgtgcattttgaaagagatcctgcaggaatacctggaaattagctctctggtgcaggacgaggtagtggcaattcaccgtgagatggcagctgccgccgcaagaattcagccagaggcagagtaccaggggttcttgcgacagtacggctccgcccctgacgtcccaccttgcgtgacattcgacgagtctctgttggaagaaggcgaaccattagagcctggggagctgcagctaaatgagctgacagtggagtccgtacaacacacactgacttctgtgacggatgaactggctgtcgctacggagatggtttttaggaggcaggagatggtgactcagctgcaacaggaactgagaaatgaagaagagaatacccaccctcgagaaagagtccagctgttgggcaagcgacaagtcctgcaagaagccctgcagggcctgcaagtggccctgtgttcccaggctaagctccaggcgcagcaggaactcctgcaaacaaaactagaacatctcggcccaggtgagccaccaccagtactgctgctacaggatgatcgccatagcacaagctctagtgaacaggagagagagggcggacgtactcccaccttggagatcctgaaatcccatatctctggtatattcaggcccaagttctctaatctttacaggctagagggcgagggcttccctagcatacccctgctcatcgatcaccttctttctactcagcagcccctgaccaaaaaatcaggcgtggtgttgcatagggcagtcccaaaggataagtgggtgctgaaccatgaggacttagtcctgggcgaacaaatcgggcggggaaatttcggagaggtgtttagcggcaggttacgcgccgacaacactttggtggcggttaagagctgtagggagacgctccctcctgacttaaaggctaagtttcttcaggaggcccggatattaaaacagtactcacatccaaacatcgtcaggctcattggtgtttgtacacagaagcagcctatttatatagtcatggaattagtgcaaggtggcgacttcctcacgtttctgcggacagaaggggcacggctgagggttaagacacttctccagatggtcggcgatgccgccgcgggtatggagtacttggagtcaaaatgctgcatacatagggacctggctgctagaaactgcctcgttaccgaaaagaacgtccttaaaatttccgactttggtatgagtagggaggaggccgatggtgtatacgctgcatcgggcggactgaggcaagttccagtcaagtggaccgctcctgaagccctcaattacggaagatattcatccgagtctgatgtgtggtcctttggcatccttttgtgggaaactttttccctcggtgcctcaccataccccaacttgagcaaccagcagacaagggagtttgtggagaagggtggtcggctcccgtgcccagagctctgtcctgacgctgtcttcaggcttatggagcagtgctgggcttacgaaccaggtcagcgaccatcgttcagcaccatctaccaagagcttcagagcatcaggaagcgccacaggtag

SEQ ID NO: 273398 - DNA, 444 bp, Artificial Sequence
  derived and/or modified sequence
atgggctttagcagcgaactgtgcagtcctcagggccatggggttcttcagcagatgcaagaagcagagctgaggctcctggagggcatgaggaagtggatggctcagagagtgaaaagcgaccgtgagtacgcagggttgctgcatcacatgtctctgcaggattccggaggacagtctagggccatatcaccagacagtcctatttcgcaaagctgggccgagatcacatcacagacagagggcttgtcaaggctgctccggcagcacgctgaggacctcaacagcggacccctgtctaaactctcgctcctgatcagggaacggcaacagctgcgcaaaacttacagtgaacaatggcagcaattacaacaggaactaaccaagacccattcccaagatatcgaaaaacttaaatcccaatacagagccttggctcggtag

SEQ ID NO: 273399 - DNA, 510 bp, Artificial Sequence
  derived and/or modified sequence
atgggtttctcttccgagctgtgctcaccccagggccacggtgtactacaacagatgcaagaggccgagctacggctcctggaaggaatgcggaagtggatggcccagcgggtcaaatcagatagggaatatgccgggctcttgcatcatatgagtctgcaggattctggcgggcagagtcgggcaatctcccccgattccccgatctcacagtcatgggctgagataacctctcagacggaggggttgtcacggcttctgaggcagcatgctgaggatctcaattcaggcccgctgagcaagctgtctctgctaattagggagcgacagcagctgagaaagacctacagtgagcaatggcagcaattgcaacaggagctgactaaaacacactcacaggacatcgagaagctgaagagccaatatagagctttggccagagatagtgcacaggccaagcgaaagtatcaggaagccagcaaggacaaagaccgagacaaagcaaaatag

SEQ ID NO: 273400 - DNA, 544 bp, Artificial Sequence
  derived and/or modified sequence
agctggggcaggcttggcctgtcgaggacctgggcaagggtgtccctgtaaggggtggtgggtggaagggcctggggagggaggctccaggttggctcctgttcccgaacgtgcggaggagaccctgacgctaaggaagcaatgagggccagtccccaggccaggctgctgctgggtacccatggctgcgtaacagcactatgggcttctcttccgagctgtgcagcccccagggccacggggtcctgcagcaaatgcaggaggccgagcttcgtctactggagggcatgagaaagtggatggcccagcgggtcaagagtgacagggagtatgcaggactgcttcaccacatgtccctgcaggacagtgggggccagagccgggccatcagccctgacagccccatcagtcagtcctgggctgagatcaccagccaaactgagggcctgagccgcttgctgcggcagcacgcagaggatctgaactcagggcccctgagcaagctgagcctgctcatccgggaacggcagcagcttcgcaagac

SEQ ID NO: 273401 - DNA, 2266 bp, Artificial Sequence
  derived and/or modified sequence
atgggcttctcttccgagctgtgcagcccccagggccacggggtcctgcagcaaatgcaggaggccgagcttcgtctactggagggcatgagaaagtggatggcccagcgggtcaagagtgacagggagtatgcaggactgcttcaccacatgtccctgcaggacagtgggggccagagccgggccatcagccctgacagccccatcagtcagtcctgggctgagatcaccagccaaactgagggcctgagccgcttgctgcggcagcacgcagaggatctgaactcagggcccctgagcaagctgagcctgctcatccgggaacggcagcagcttcgcaagacctacagcgagcagtggcagcagctgcagcaggagctcaccaagacccacagccaggacattgagaagctgaagagccagtaccgagctctggcacgggacagtgcccaagccaagcgcaagtaccaggaggccagcaaagacaaggaccgtgacaaggctaaggacaagtatgtgcgcagcctgtggaagctctttgctcaccacaaccgctatgtgctgggcgtgcgggctgcgcagctacaccaccagcaccaccaccagctcctgctgcccggcctgctgcggtcactgcaggacctgcacgaggagatggcttgcatcctgaaggagatcctgcaggaatacctggagattagcagcctggtgcaggatgaggtggtggccattcaccgggagatggctgcagctgctgcccgcatccagcctgaggctgagtaccaaggcttcctgcgacagtatgggtccgcacctgacgtcccaccctgtgtcacgttcgatgagtcactgcttgaggagggtgaaccgctggagcctggggagctccagctgaacgagctgactgtggagagcgtgcagcacacgctgacctcagtgacagatgagctggctgtggccaccgagatggtgttcaggcggcaggagatggttacgcagctgcaacaggagctccggaatgaagaggagaacacccacccccgggagcgggtgcagctgctgggcaagaggcaagtgctgcaagaagcactgcaggggctgcaggtagcgctgtgcagccaggccaagctgcaggcccagcaggagttgctgcagaccaagctggagcacctgggccccggcgagcccccgcctgtgctgctcctgcaggatgaccgccactccacgtcgtcctcggagcaggagcgagaggggggaaggacacccacgctggagatccttaagagccacatctcaggaatcttccgccccaagttctcgaacctgtaccgactggaaggggaaggctttcctagcattcctttgctcatcgaccacctactgagcacccagcagcccctcaccaagaagagtggtgttgtcctgcacagggctgtgcccaaggacaagtgggtgctgaaccatgaggacctggtgttgggtgagcagattggacgggggaactttggcgaagtgttcagcggacgcctgcgagccgacaacaccctggtggcggtgaagtcttgtcgagagacgctcccacctgacctcaaggccaagtttctacaggaagcgaggatcctgaagcagtacagccaccccaacatcgtgcgtctcattggtgtctgcacccagaagcagcccatctacatcgtcatggagcttgtgcaggggggcgacttcctgaccttcctccgcacggagggggcccgcctgcgggtgaagactctgctgcagatggtgggggatgcagctgctggcatggagtacctggagagcaagtgctgcatccaccgggacctggctgctcggaactgcctggtgacagagaagaatgtcctgaagatcagtgactttgggatgtcccgagaggaagccgatggggtctatgcagcctcagggggcctcagacaagtccccgtgaagtggaccgcacctgaggcccttaactacggccgctactcctccgaaagcgacgtgtggagctttggcatcttgctctgggagaccttcagcctgggggcctccccctatcccaacctcagcaatcagcagacacgggagtttgtggagaaggggggccgtctgccctgcccagagctgtgtcctgatgccgtgttcaggctcatggagcagtgctgggcctatgagcctgggcagcggcccagcttcagcaccatctaccaggagctgcagagcatccgaaagcggcatcggtgaggctggg

SEQ ID NO: 273402 - DNA, 587 bp, Artificial Sequence
  derived and/or modified sequence
gagtcggtccgaggccgtcccaggagcagctgcccgtgcgggtacctctagccccggggcctggaggagcggtgggagctgggggcgcggcaggcaggggcagagcaggcgttccgagggccagagacccacccagaacagcactatgggcttctcttccgagctgtgcagcccccagggccacggggtcctgcagcaaatgcaggaggccgagcttcgtctactggagggcatgagaaagtggatggcccagcgggtcaagagtgacagggagtatgcaggactgcttcaccacatgtccctgcaggacagtgggggccagagccgggccatcagccctgacagccccatcagtcagtcctgggctgagatcaccagccaaactgagggcctgagccgcttgctgcggcagcacgcagaggatctgaactcagggcccctgagcaagctgagcctgctcatccgggaacggcagcagcttcgcaagacctacagcgagcagtggcagcagctgcagcaggagctcaccaagacccacagccaggacattgagaagctgaagagccagtaccgagctctggcacggg

SEQ ID NO: 273403 - DNA, 1096 bp, Artificial Sequence
  derived and/or modified sequence
aaaccgcgggaggaggaagcgcggaatcaggaactggccggggtccgcaccgggcctgagtcggtccgaggccgtcccaggagcagctgcccgtgcgggtacctctagccccggggcctggaggagcggtgggagctgggggcgcggcaggcaggggcagagcaggcgttccgagggccagagacccacccagaacagcactatgggcttctcttccgagctgtgcagcccccagggccacggggtcctgcagcaaatgcaggaggccgagcttcgtctactggagggcatgagaaagtggatggcccagcgggtcaagagtgacagggagtatgcaggactgcttcaccacatgtccctgcaggacagtgggggccagagccgggccatcagccctgacagccccatcagtcaggtgggtctctatgggactctggtgggtgctggctgtatctgccttctccttcctctcctgggggccctctggggcagtggctggagatctggcaggccaatgcttgggagccattgtgcccccctccctgcctcccccatctgtgctgtatagtcctgggctgagatcaccagccaaactgagggcctgagccgcttgctgcggcagcacgcagaggatctgaactcagggcccctgagcaagctgagcctgctcatccgggaacggcagcagcttcgcaagacctacagcgagcagtggcagcagctgcagcaggagctcaccaagacccacagccaggacattgagaagctgaagagccagtaccgagctctggcacgggacagtgcccaagccaagcgcaagtaccaggaggccagcaaagacaaggaccgtgacaaggctaaggacaagtatgtgcgcagcctgtggaagctctttgctcaccacaaccgctatgtgctgggcgtgcgggctgcgcagctacaccaccagcaccaccaccagctcctgctgcccggcctgctgcggtcactgcaggacctgcacgaggagatggcttgcatcctgaaggagatcctgcaggaatacctggagattagcagcctggtgcaggatgaggtggtggccattcaccgggag

SEQ ID NO: 273404 - DNA, 587 bp, Artificial Sequence
  derived and/or modified sequence
ggaatcaggaactggccggggtccgcaccgggcctgagtcggtccgaggccgtcccaggagcagctgcccgtgcggcactatgggcttctcttccgagctgtgcagcccccagggccacggggtcctgcagcaaatgcaggaggccgagcttcgtctactggagggcatgagaaagtggatggcccagcgggtcaagagtgacagggagtatgcaggactgcttcaccacatgtccctgcaggacagtgggggccagagccgggccatcagccctgacagccccatcagtcagtcctgggctgagatcaccagccaaactgagggcctgagccgcttgctgcggcagcacgcagaggatctgaactcagggcccctgagcaagctgagcctgctcatccgggaacggcagcagcttcgcaagacctacagcgagcagtggcagcagctgcagcaggagctcaccaagacccacagccaggacattgagaagctgaagagccagtaccgagctctggcacgggacagtgcccaagccaagcgcaagtaccaggaggccagcaaagacaaggaccgtgacaaggctaag

SEQ ID NO: 273405 - DNA, 348 bp, Artificial Sequence
  derived and/or modified sequence
atgggcttcagcagcgagctgtgcagcccccagggccatggagtgctgcagcagatgcaggaggccgagctgcggctgctggagggcatgaggaagtggatggcccagagggtgaagagtgaccgggagtatgccggcctgctgcaccacatgagcctgcaggacagcggcggccagagccgggccatcagcccagacagccccatcagccagagctgggccgagatcaccagccagacagagggcctgagccggctgctgcggcagcacgccgaggacctgaacagcggccccctgagcaagctgagcctgctgatccgggagcggcagcagctgaggaagacctag

SEQ ID NO: 273406 - DNA, 2259 bp, Artificial Sequence
  derived and/or modified sequence
atgggcttcagcagcgagctgtgcagcccccagggccatggagtgctgcagcagatgcaggaggccgagctgcggctgctggagggcatgaggaagtggatggcccagagggtgaagagtgaccgggagtatgccggcctgctgcaccacatgagcctgcaggacagcggcggccagagccgggccatcagcccagacagccccatcagccagagctgggccgagatcaccagccagacagagggcctgagccggctgctgcggcagcacgccgaggacctgaacagcggccccctgagcaagctgagcctgctgatccgggagcggcagcagctgaggaagacctacagcgagcagtggcagcagctgcagcaggagctgaccaagacccacagccaggacatcgagaagctgaagagccagtaccgggccctggcccgggacagcgcccaggccaagaggaagtaccaggaggccagcaaggacaaggaccgggacaaggccaaggacaagtatgtgcgcagcctgtggaagctgtttgcccaccacaaccgctacgtgctgggcgtgcgggccgcccagctgcaccaccagcaccaccaccagctgctgctgcccggcctgctgcggagcctgcaggacctgcacgaggagatggcctgcatcctgaaggagatcctgcaggagtacctggagatcagcagcctggtgcaggatgaggtggtggccatccaccgggagatggctgctgctgctgcccgcatccagcctgaggccgagtaccagggcttcctgcggcagtatggcagcgccccagatgtgcccccctgtgtgacctttgatgagagcctgctggaggagggggagcccctggagcctggagagctgcagctgaatgagctgactgtggagagcgtgcagcacaccctgacctctgtgacagatgagctggccgtggccacagagatggtgttccggcggcaggagatggtgacccagctgcagcaggagctgagaaatgaggaggagaacacccacccccgggagcgggtgcagctgctgggcaagaggcaggtgctgcaggaggccctgcagggcctgcaggtggccctgtgcagccaggccaagctgcaggcccagcaggagctgctgcagaccaagctggagcacctgggccctggagagcccccacctgtgctgctgctgcaggatgacagacacagcaccagcagcagcgagcaggagcgggagggcggccgcacccccaccctggagatcctgaagagccacatcagcggcatcttccggcccaagttcagcaacctgtaccgcctggagggggagggcttccccagcatccccctgctgattgaccacctgctgagcacccagcagcccctgaccaagaagtctggagtggtgctgcacagagctgtgcccaaggacaagtgggtgctgaaccacgaggacctggtgctgggggagcagatcggccggggcaactttggagaggtgttttctggccgcctgcgggctgacaacaccctggtggccgtgaagagctgccgggagaccctgcccccagacctgaaggccaagttcctgcaggaggcccgcatcctgaagcagtacagccaccccaacatcgtgcggctgattggagtgtgcacccagaagcagcccatctacatcgtgatggagctggtgcagggcggggacttcctgaccttcctgaggacagagggcgcccggctgcgggtgaagaccctgctgcagatggtgggagatgctgctgctggcatggagtacctggagagcaagtgctgcatccaccgggacctggccgccaggaactgcctggtgacagagaagaatgtgctgaagatcagtgactttggcatgagccgggaggaggctgatggagtgtatgctgccagcggcggcctgcggcaggtgcctgtgaagtggacagcccctgaggccctgaactacggccgctacagcagcgagagtgatgtgtggagctttggcatcctgctgtgggagaccttcagcctgggcgccagcccctaccccaacctgagcaaccagcagacccgggagtttgtggagaagggcggccgcctgccctgcccagagctgtgcccagatgctgtgttccggctgatggagcagtgctgggcctatgagcccggccagaggcccagcttcagcaccatctaccaggagctgcagagcatcaggaagaggcacaggtag

SEQ ID NO: 273407 - DNA, 444 bp, Artificial Sequence
  derived and/or modified sequence
atgggcttcagcagcgagctgtgcagcccccagggccatggagtgctgcagcagatgcaggaggccgagctgcggctgctggagggcatgaggaagtggatggcccagagggtgaagagtgaccgggagtatgccggcctgctgcaccacatgagcctgcaggacagcggcggccagagccgggccatcagcccagacagccccatcagccagagctgggccgagatcaccagccagacagagggcctgagccggctgctgcggcagcacgccgaggacctgaacagcggccccctgagcaagctgagcctgctgatccgggagcggcagcagctgaggaagacctacagcgagcagtggcagcagctgcagcaggagctgaccaagacccacagccaggacatcgagaagctgaagagccagtaccgggccctggccaggtag

SEQ ID NO: 273408 - DNA, 510 bp, Artificial Sequence
  derived and/or modified sequence
atgggcttcagcagcgagctgtgcagcccccagggccatggagtgctgcagcagatgcaggaggccgagctgcggctgctggagggcatgaggaagtggatggcccagagggtgaagagtgaccgggagtatgccggcctgctgcaccacatgagcctgcaggacagcggcggccagagccgggccatcagcccagacagccccatcagccagagctgggccgagatcaccagccagacagagggcctgagccggctgctgcggcagcacgccgaggacctgaacagcggccccctgagcaagctgagcctgctgatccgggagcggcagcagctgaggaagacctacagcgagcagtggcagcagctgcagcaggagctgaccaagacccacagccaggacatcgagaagctgaagagccagtaccgggccctggcccgggacagcgcccaggccaagaggaagtaccaggaggccagcaaggacaaggaccgggacaaggccaagtag

SEQ ID NO: 273409 - DNA, 348 bp, Artificial Sequence
  derived and/or modified sequence
atgggcttcagcagcgagctgtgcagcccccagggccacggcgtgctacagcagatgcaggaagccgagctgagactgctcgagggaatgagaaagtggatggctcagcgggtgaagagcgatcgcgagtatgctgggctcctgcaccacatgtccctacaggatagtggtgggcaatccagagccatttcacccgacagccctatctcacagagctgggctgagatcaccagccagaccgaggggctttctagactcctgcgccagcacgccgaggacctgaactcagggcccctgtcaaagttgagcctgctgatcagggagagacaacagctgcggaaaacttag

SEQ ID NO: 273410 - DNA, 2259 bp, Artificial Sequence
  derived and/or modified sequence
atgggcttcagcagcgagctgtgcagcccccagggccacggcgtgcttcaacagatgcaggaggctgaacttaggctgctggagggcatgcggaaatggatggcccagcgagtcaagagcgatagagagtacgccgggcttctacaccacatgtctctccaggactcaggcgggcagtcccgggctatcagtcctgactcaccgatcagccaaagctgggctgagatcacatcccagaccgaggggttatcccgcctcctgcggcagcatgcagaggatttgaactctggtcctctctcaaagctttcccttttaatcagggagcgccagcagttaagaaaaacgtattcagaacaatggcagcagctgcagcaggagttgacaaaaacacacagccaagatatagaaaagttaaagtcacagtaccgagcactcgcccgcgactccgcacaggcaaaaagaaagtatcaagaagcaagtaaggataaagatcgcgataaagctaaggataagtacgttcgcagcctttggaagctgtttgcccaccacaatcgctatgtgctgggtgtgcgcgccgcacagttgcaccaccaacatcaccaccagttgttactaccaggactgcttcgctccttgcaagaccttcatgaggaaatggcttgcatactcaaggagattctccaggaatacctggaaatctcctccttggtacaggacgaagttgtggcaatccacagggagatggccgccgcggccgcacgcattcagccagaagcggaataccaaggatttctccgccagtacggctctgcaccggacgttccaccatgcgtcacgttcgatgagtctctgctggaggagggagagccgcttgagcctggcgaactgcaattgaatgaattaaccgtcgaaagcgtgcagcacaccctcacctctgtgaccgatgagctggctgtggctactgaaatggtgttccggcgccaggagatggttacccagctgcaacaagagttgcggaacgaagaggaaaacacacatccacgggaacgggttcaactcctaggtaaacgtcaagtgctgcaggaagcccttcagggccttcaggttgccctgtgtagtcaggcaaaactgcaagcccaacaggaactgctgcaaaccaaactcgagcacctcggacctggtgaacctcctccagtccttctgctgcaggatgaccgtcactcaaccagtagtagcgagcaggaacgcgaagggggaaggactccaaccctggaaattttgaagtcccacatttccgggatctttcgccccaagttcagtaacctgtaccgcttggaaggcgaggggtttccaagcatccccctgctaatcgaccacctattgtctactcaacagccactgaccaagaagtctggagtcgtgctccatcgagcagtccccaaggataagtgggtgctgaatcacgaagacctcgttctgggcgaacaaataggacggggcaattttggtgaagtcttttccggtcgcttgcgggccgacaatacccttgtggccgtgaagtcttgcagagagaccctgccacccgacttaaaagcaaagttcctgcaggaggcgcggatcttgaagcagtactctcatccaaacatcgtgcgactgataggcgtatgtacccagaaacagcccatctatatcgtcatggaactggtgcaggggggagatttcctcacattcctccgaacggagggagcaagactcagagtaaagactctgctacaaatggtaggtgatgctgctgccgggatggagtatctggagtcaaagtgttgcatccaccgcgacctagctgccaggaactgtttggttactgaaaagaacgtgctgaagatttcagactttggtatgagtagggaagaggctgacggcgtctacgccgctagcggcggcctccggcaggtgcccgtcaagtggaccgctccggaagccctcaattatggtagatacagctctgagtcggatgtgtggtccttcggcattcttctgtgggagactttttctctgggcgcatccccttatccaaacttgtctaatcaacaaacacgggaattcgtcgagaagggaggtcggcttccgtgtcctgaactgtgtccggacgctgtctttcgacttatggaacagtgctgggcatacgagcctggccagagaccgtcatttagcactatctaccaggagctgcagagcatacggaaacggcaccgttag

SEQ ID NO: 273411 - DNA, 444 bp, Artificial Sequence
  derived and/or modified sequence
atgggcttcagcagcgagctgtgcagcccccagggccacggcgtgctccaacaaatgcaggaggcggagttacgtcttctcgaggggatgcggaagtggatggcccagcgggttaaaagtgacagggagtacgcaggcttattacaccatatgtctcttcaagacagcggtggtcagagcagagcaatctctcctgatagtcctatctctcagtcctgggccgagataacaagccaaaccgaagggctaagccgacttttacggcagcacgcagaggatctgaatagcggtcctctgtccaaattatccctcctgatcagggaaaggcagcaactgcggaagacatatagcgagcaatggcagcagctgcaacaagaactcaccaaaacacatagccaggacatcgagaagttgaagtcccagtaccgcgccttggccagatag

SEQ ID NO: 273412 - DNA, 510 bp, Artificial Sequence
  derived and/or modified sequence
atgggcttcagcagcgagctgtgcagcccccagggccacggcgtgctgcagcagatgcaggaagctgagctcaggctactggaaggcatgagaaaatggatggcacagagggtaaagtccgaccgtgagtacgcgggcctgctgcaccacatgagtctgcaggacagcggcggccagagtagggcgatttctccagacagcccgataagtcagagctgggccgaaattacatcacagaccgaggggctatcccggctcttgagacagcatgctgaggatttaaacagcggcccactttcaaaactctctctacttattagagagcgtcagcagctaagaaaaacatactctgagcaatggcagcagctccagcaagaactgacaaagactcactctcaagacatcgaaaagcttaaatcgcagtacagggccttagcgcgagactctgcacaggccaaaaggaaatatcaggaagcctccaaagacaaagatcgcgataaagccaaatag

SEQ ID NO: 273413 - DNA, 348 bp, Artificial Sequence
  derived and/or modified sequence
atgggcttctcgtcggaactctgcagccctcagggacacggcgttctgcagcagatgcaggaggccgagctgcgattactcgagggtatgaggaaatggatggcccagcgggttaagagcgacagggagtacgcagggctgctacaccacatgagccttcaagatagcgggggacagagtcgtgccataagccctgattctccaatctcccagtcgtgggccgaaataactagccagaccgaggggctcagtaggcttctgaggcagcacgccgaggatctaaattcagggcctctgtcaaagcttagtcttctaattcgggagcggcaacaacttcgtaagacatag

SEQ ID NO: 273414 - DNA, 2259 bp, Artificial Sequence
  derived and/or modified sequence
atgggctttagttccgaactgtgctcccctcagggtcacggtgttctgcagcagatgcaggaagcagaactccgcttgttggaagggatgcggaaatggatggcccaacgtgtgaagagcgaccgggaatacgcaggcctgctccatcatatgtcgcttcaggacagtgggggacagagtagagccatttcccccgactcaccgatttctcagagctgggctgagattacctcccagacagaggggctgagtcgactactgcggcagcacgctgaagacctcaattctgggcctttatctaagcttagtctgcttatccgggagaggcagcagctgaggaagacgtattcagaacaatggcagcaacttcagcaggagttgaccaagacacattctcaagacattgaaaagctaaagagtcagtaccgcgctctggccagggatagtgcacaagcaaagaggaagtaccaggaggcctcaaaagacaaggaccgcgacaaagctaaagataaatacgtcaggtccctgtggaaactattcgcacatcacaaccggtacgttctaggcgtgagagctgcacagcttcaccatcagcaccatcaccagctccttcttccaggcttgctgcgaagcctgcaggacttgcatgaagagatggcttgcattctcaaggagatactgcaggaatatcttgagatctccagcctggtgcaggatgaagtagtcgccatccaccgagaaatggcagctgccgctgcacgaattcaacctgaggcagaataccaggggttcctcagacagtacggctcagcacctgacgttcctccctgcgtgacattcgacgagtctctgttagaggaaggtgagccactcgagcctggcgagttgcagctgaatgaacttacagtggaatccgtacagcacacactgacttcagtgaccgatgaactggcagttgctaccgagatggtgttccgcagacaggagatggtcacacagctgcagcaggaactgcgcaacgaggaggaaaatacccatccaagagagcgtgttcagctgctgggcaagcgacaggtcctccaagaggctctgcaggggctgcaggtagctctctgctcacaggccaagttacaggcgcagcaggagctgctgcagacgaagctggagcacctgggccctggggaaccgcctcccgtgctgctgctccaagacgatcgccacagtacatcatcatcagagcaggagagggaaggaggcaggacccccacactggaaatcctgaagtcgcacatttccggcatatttcgaccaaaattttcaaacctctaccggcttgagggtgaggggttccccagtattccgctgttaatcgaccatttgctgagcacccagcaaccattgaccaagaaaagcggcgtggtgttacatcgagccgttcctaaggacaagtgggtgttgaatcacgaggatctcgtcctaggagagcaaatcggccgaggtaattttggtgaggtgttcagcgggcgactgagggctgacaatacactcgtggcagttaaatcgtgcagagagacattgcccccagacctcaaggccaagttccttcaggaagctcgaatcttaaaacagtactcccaccccaacatagttcgactgattggggtgtgcacacagaagcagcctatctacatcgtaatggaactggtgcaggggggagatttcctgacatttctgcgaaccgaaggtgctagactgagggtgaagaccttattgcagatggtaggggatgctgccgcaggcatggagtatctggaaagcaaatgctgcatccaccgcgacctcgctgcccgaaactgcctcgtcaccgaaaagaatgttctgaagatttcagatttcggcatgagccgtgaagaggcggacggggtgtacgcagcctccggcggtctgagacaggtgccagtgaaatggactgcacccgaagccctgaactatgggagatacagtagcgagtccgatgtctggtctttcgggatattactgtgggaaactttctcattgggtgcaagtccctatcccaacttaagtaatcagcagacccgtgagttcgtggagaaagggggtaggctgccttgccccgaactgtgcccagacgcagtctttcgccttatggaacagtgctgggcctacgagcctggacagaggcctagcttcagcaccatttatcaagaactccagtcaatcagaaaaaggcatagatag

SEQ ID NO: 273415 - DNA, 444 bp, Artificial Sequence
  derived and/or modified sequence
atgggtttctccagcgagctatgttcaccacagggccacggtgtgttacagcaaatgcaggaggcagaattacgcttgcttgaaggcatgcgtaaatggatggcacaaagagtgaagtccgacagggagtatgctggactccttcatcatatgagccttcaagacagtggagggcagtcccgggctatttctccagattcgcctatcagccagtcttgggctgaaatcacaagtcagacggaggggctgagtaggcttctccgacagcacgccgaagacttgaactccgggccattaagtaaactgtcacttttgataagagaaagacaacagctgcggaagacctacagtgagcagtggcaacagttacagcaagaactgactaaaacccactcccaggacatcgagaaactcaagtcccagtacagagcccttgcccgatag

SEQ ID NO: 273416 - DNA, 510 bp, Artificial Sequence
  derived and/or modified sequence
atgggattctcatctgagctgtgtagtccccaggggcacggcgtgctgcaacagatgcaggaggccgagttacgcctgctggaaggcatgaggaaatggatggcgcagagagtgaagagcgacagggagtatgcaggcctccttcatcatatgtccctccaggactccggcggacagagccgagccatttctcccgattcccctattagtcaatcctgggccgagattacaagccagacagaaggtctgtcgcgacttctgcgccagcacgctgaggacctcaattctggcccattgtcaaaattatcactgcttatcagagagcgccagcaacttcggaagacttattcagaacaatggcaacagctgcagcaggagctcactaagacccacagtcaggatattgagaaactgaagagtcagtatagagccctggcccgtgattcagcccaggcaaaaagaaaataccaggaggcaagcaaagataaggatcgggacaaagctaaatag

SEQ ID NO: 273417 - protein, 1343 aa, Artificial Sequence
  derived and/or modified sequence
MGLEAQRLPGAEEAPVRVALRVRPLLPKELLHGHQSCLQVEPGLGRVTLGRDRHFGFHVVLAEDAGQEAVYQACVQPLLEAFFEGFNATVFAYGQTGSGKTYTMGEASVASLLEDEQGIVPRAMAEAFKLIDENDLLDCLVHVSYLEVYKEEFRDLLEVGTASRDIQLREDERGNVVLCGVKEVDVEGLDEVLSLLEMGNAARHTGATHLNHLSSRSHTVFTVTLEQRGRAPSRLPRPAPGQLLVSKFHFVDLAGSERVLKTGSTGERLKESIQINSSLLALGNVISALGDPQRRGSHIPYRDSKITRILKDSLGGNAKTVMIACVSPSSSDFDETLNTLNYASRAQNIRNRATVNWRPEAERPPEETASGARGPPRHRSETRIIHRGRRAPGPATASAAAAMRLGAECARYRACTDAAYSLLRELQAEPGLPGAAARKVRDWLCAVEGERSALSSASGPDSGIESASVEDQAAQGAGGRKEDEGAQQLLTLQNQVARLEEENRDFLAALEDAMEQYKLQSDRLREQQEEMVELRLRLELVRPGWGGPRLLNGLPPGSFVPRPHTAPLGGAHAHVLGMVPPACLPGDEVGSEQRGEQVTNGREAGAELLTEVNRLGSGSSAASEEEEEEEEPPRRTLHLRRNRISNCSQRAGARPGSLPERKGPELCLEELDAAIPGSRAVGGSKARVQARQVPPATASEWRLAQAQQKIRELAINIRMKEELIGELVRTGKAAQALNRQHSQRIRELEQEAEQVRAELSEGQRQLRELEGKELQDAGERSRLQEFRRRVAAAQSQVQVLKEKKQATERLVSLSAQSEKRLQELERNVQLMRQQQGQLQRRLREETEQKRRLEAEMSKRQHRVKELELKHEQQQKILKIKTEEIAAFQRKRRSGSNGSVVSLEQQQKIEEQKKWLDQEMEKVLQQRRALEELGEELHKREAILAKKEALMQEKTGLESKRLRSSQALNEDIVRVSSRLEHLEKELSEKSGQLRQGSAQSQQQIRGEIDSLRQEKDSLLKQRLEIDGKLRQGSLLSPEEERTLFQLDEAIEALDAAIEYKNEAITCRQRVLRASASLLSQCEMNLMAKLSYLSSSETRALLCKYFDKVVTLREEQHQQQIAFSELEMQLEEQQRLVYWLEVALERQRLEMDRQLTLQQKEHEQNMQLLLQQSRDHLGEGLADSRRQYEARIQALEKELGRYMWINQELKQKLGGVNAVGHSRGGEKRSLCSEGRQAPGNEDELHLAPELLWLSPLTEGAPRTREETRDLVHAPLPLTWKRSSLCGEEQGSPEELRQREAAEPLVGRVLPVGEAGLPWNFGPLSKPRRELRRASPGMIDVRKNPL

SEQ ID NO: 273418 - DNA, 4032 bp, Artificial Sequence
  derived and/or modified sequence
atgggcctggaagctcaacgactgcctggcgctgaagaagccccagttagggtcgccctgcgcgtgcggcctctgttgccaaaagaactcctgcacggccaccagagctgcctgcaagtagaacctggcttggggcgggtaacattgggcagagaccgtcacttcggatttcacgttgtgctcgcggaggatgccgggcaggaggctgtttaccaggcctgtgtccagcctctgctggaggctttcttcgaaggatttaatgccacagtgttcgcatatggccaaaccgggagcggaaagacctacacaatgggtgaagcgtccgtggcctcccttctggaagacgagcaaggtatcgtcccccgagccatggctgaggctttcaaactgatcgacgagaacgatcttctggattgtctggttcacgtgtcttacctggaagtctataaagaggaattccgggacctgcttgaggtaggcacagcatctcgcgacatccagcttcgcgaggatgagcggggaaatgtggtcctttgtggggtgaaagaagtagatgtcgaaggcctcgatgaggtgctgtccctgctggaaatggggaacgctgcgcggcataccggcgcaacgcatctgaatcacctgtctagtagaagtcatactgtttttaccgtgactctcgagcaacgcggccgggcaccatctcgcctcccacggccagcaccgggccaactcctggtatccaagttccactttgttgacctcgctggtagcgagcgggtgttgaagaccggatcaactggagaaaggctgaaggaaagcatacagataaacagttctctcttagccctgggcaacgtaatctccgccctcggggatccacagcggcggggtagtcatattccctaccgagattctaagataaccagaatcctcaaggacagcttaggaggtaatgctaagactgtcatgatcgcttgtgtctctccaagcagcagcgattttgacgaaaccctcaataccctcaactatgcctccagagcccagaacattagaaatcgcgccaccgttaactggaggccagaggcagaaaggcctcccgaggagacggctagcggcgcaagagggccacccagacatcggtcagaaaccagaatcatccacagaggtagaagggccccagggcccgcaacagctagtgctgctgcagccatgcggcttggggctgagtgcgctcggtacagagcgtgcaccgatgctgcgtacagtctcttgcgagagctacaagcagagccgggacttccaggcgcggccgcgagaaaggttcgggactggctatgtgccgtagagggggaacggagcgcactgtccagtgcctcaggcccggactcagggatagagagcgcctccgtagaggatcaagcagcacaaggcgcaggtgggcgtaaagaggatgaaggcgcccagcagcttctgacgctgcagaaccaggtggctcgtctggaagaagaaaaccgcgactttcttgccgcccttgaggacgctatggagcagtacaagctacagtctgaccgtctgcgggagcagcaggaggagatggtggagcttcgccttaggctagaactcgtgcggcccggatggggtggtcccaggcttctaaacggactgcctcccggctcgtttgttccgcggccccacacggcccccctggggggggcccatgcccatgtgctgggtatggtgccacccgcttgtctgccgggcgacgaggtggggtccgaacagaggggggagcaggtgacgaacggtagggaagcaggtgcagaactattaaccgaagtgaaccgtttaggctccggctcttcagctgcctccgaagaagaagaagaggaggaagaacctcctagacgcactttgcatctgcggcgcaatcggatcagcaactgtagccaacgcgcaggcgcgcgtcctggttcccttccggaacgcaaggggcctgaactctgcctcgaggagttagacgccgcaattccaggtagtagagctgtaggcgggagcaaggcacgcgtgcaagctagacaggtcccaccggcaaccgcctctgagtggagattggctcaggcacagcagaagattcgagaactggccatcaacattagaatgaaagaagaacttatcggcgaattagtcagaacaggaaaggcagcccaggctctgaaccgccaacactcccagcgcatccgtgagctggagcaggaagctgagcaggtcagagcagagctttcagagggccagcgccagctgcgcgagctggagggaaaagagctacaggacgccggcgaacgaagtcgtttgcaagagttcaggagacgagtggccgctgctcagagccaggtgcaggtgttgaaggagaaaaagcaggctaccgaacggctggtttcactgagcgcgcagtccgagaagaggctgcaggagttagagcggaatgtgcagctcatgcgacaacagcagggacaattacagagacgtctccgggaggagaccgagcaaaagaggcggctagaggcggagatgtcgaagcggcagcaccgggtcaaggaactggagctcaagcatgaacagcaacagaaaatcttaaaaataaagacagaggagatcgctgcattccagcggaagcggagatcaggaagcaacggatccgtggtgagcctggaacagcagcagaaaatcgaggagcagaaaaaatggctggaccaggaaatggaaaaagttctgcagcagaggcgtgcacttgaagagctgggagaagagctgcataagcgggaggctattctagctaagaaagaagccctgatgcaagagaagaccggcttagaaagcaaacgcctgagaagctcccaagccttaaacgaagacatcgtgcgcgtttccagtcggctggagcacctggaaaaggagctgtcggaaaagagtggccagctacgacaggggagtgctcaaagccagcagcagatccgcggggagatcgattctcttaggcaggagaaagattccttgcttaaacagcgcttggagattgatggcaagctgagacaaggctctttgctgagtcctgaagaggagaggactctgttccagctagatgaagccatcgaggccctggacgccgctatcgagtacaagaatgaggctataacttgtaggcaaagagtgttgcgcgctagcgcctcccttctttctcagtgtgagatgaacctgatggctaagctcagttacctgtccagttctgaaacccgggccctgctatgcaagtattttgacaaggtggttactttgcgcgaggaacagcaccagcagcaaatcgccttctcagaactggaaatgcaactcgaggaacagcagagacttgtgtactggttggaggtggcgctggagagacagagactggaaatggaccggcagctcacccttcagcaaaaagagcacgagcaaaatatgcagttgctactgcagcagtctagagatcatctgggcgaagggttggctgactcccggagacaatacgaggctaggatccaggcactggagaaagaactgggaaggtacatgtggattaaccaggagctgaagcagaagctaggcggagtcaatgcagtcggacactcaaggggaggcgaaaagagaagcctgtgcagcgagggccggcaagcccctgggaacgaggatgagcttcatctggcaccagagttgctgtggctgtcccccctgacagagggcgctccacgaactcgggaagagacccgtgacctggtgcatgcaccccttccattaacctggaagagaagcagtctgtgcggcgaagaacaggggagccccgaagaactgaggcagcgcgaggccgctgagccgcttgtggggagagtgctgccggttggcgaggctggattgccatggaatttcggacccctgtccaaaccccggagagaactgcgcagggcaagcccaggtatgatagatgttcgaaaaaaccccctgtag

SEQ ID NO: 273419 - DNA, 4032 bp, Artificial Sequence
  derived and/or modified sequence
atgggcctggaggcccagaggctgcctggagctgaggaggcccctgtgcgggtggccctgcgggtgcggcccctgctgcccaaggagctgctgcacggccaccagagctgcctgcaggtggagcccggcctgggccgggtgaccctgggccgggacagacacttcggcttccacgtggtgctggctgaagatgctggccaggaggccgtgtaccaggcctgtgtgcagcccctgctggaggccttctttgagggcttcaatgccaccgtgtttgcctacggccagacaggcagcggcaagacctacaccatgggagaggcctctgtggccagcctgctggaggatgagcagggcatcgtgccccgggccatggccgaggccttcaagctgattgatgaaaatgacctgctggactgcctggtgcacgtgtcctacctggaggtgtacaaggaggagttccgggacctgctggaggtgggcacagccagccgggacatccagctgcgggaggatgaaagaggaaatgtggtgctgtgtggggtgaaggaggtggatgtggagggcctggatgaggtgctgagcctgctggagatgggaaatgctgcccggcacactggagccacccacctgaaccacctgagcagccgcagccacacagtgttcaccgtgaccctggagcagaggggccgggcccccagccggctgcccaggcctgcccctggccagctgctggtgtccaagttccactttgtggacctggccggcagcgagcgggtgctgaagacaggcagcactggagagcggctgaaggagagcatccagatcaacagcagcctgctggccctgggcaatgtcatcagcgccctgggggacccccagaggcggggcagccacatcccctacagagacagcaagatcacccgcatcctgaaggacagcctgggcggcaatgccaagacagtgatgattgcctgtgtgagccccagcagcagtgactttgatgagaccctgaacaccctgaactatgccagccgggcccagaacatccggaacagagccaccgtgaactggaggcctgaggccgagcggcccccagaggagacagccagcggggcccggggccccccaagacacaggtctgagacccgcatcatccaccggggcagaagagcccctggccctgccacagccagcgctgctgctgccatgaggctgggcgcagaatgtgcccgctaccgggcctgcacagatgctgcctacagcctgctgcgggagctgcaggccgagcccggcctgcctggagctgctgccaggaaggtgcgggactggctgtgtgctgtggagggggagaggtctgccctgagcagcgccagcggccctgacagcggcatcgagagcgcctctgtggaggaccaggccgcccagggcgccggcggcaggaaggaggatgaaggagcccagcagctgctgaccctgcagaaccaggtggcccggctggaggaggagaacagagacttcctggccgccctggaggatgccatggagcagtacaagctgcagagcgaccggctgcgggagcagcaggaggagatggtggagctgcggctgcggctggagctggtgcggcccggctggggcggcccccggctgctgaatggcctgcccccaggcagctttgtgccccggccccacacagcccccctgggcggggcccacgcccacgtgctgggcatggtgcccccagcctgcctgcctggagatgaggtgggcagcgagcagagaggagagcaggtgaccaacggccgggaggccggggctgagctgctgacagaggtgaaccggctgggcagcggcagcagcgctgccagcgaggaggaggaggaggaggaggagccccccaggaggaccctgcacctgcggaggaaccgcatcagcaactgcagccagagagctggggcccggcccggcagcctgcctgagaggaagggccctgagctgtgcctggaggagctggatgctgccatccctggcagcagagctgtgggcggcagcaaggcccgggtgcaggcccggcaggtgcccccagccacagccagcgagtggaggctggcccaggcccagcagaagatccgggagctggccatcaacatccgcatgaaggaggagctgattggagagctggtgaggacaggcaaggccgcccaggccctgaaccggcagcacagccagaggatccgggagctggagcaggaggccgagcaggtgcgggcagagctgtctgagggccagaggcagctgcgggagctggagggcaaggagctgcaggatgctggggagaggagccggctgcaggagttcagaagaagagtggccgccgcccagagccaggtgcaggtgctgaaggagaagaagcaggccacagagcggctggtgtccctgagcgcccagagcgagaagaggctgcaggagctggagagaaatgtgcagctgatgaggcagcagcagggccagctgcagaggcggctgcgggaggagacagagcagaagaggcggctggaggccgagatgagcaagaggcagcaccgggtgaaggagctggagctgaagcatgagcagcagcagaagatcctgaagatcaagacagaggagattgctgccttccagaggaagagaagaagtggcagcaatggatctgtggtgtccctggagcagcagcagaagattgaggagcagaagaagtggctggaccaggagatggagaaggtgctgcagcagaggcgggccctggaggagctgggggaggagctgcacaagcgggaggccatcctggccaagaaggaggccctgatgcaggagaagacaggcctggagagcaagaggctgcggagcagccaggccctgaatgaagatattgtgcgggtgagcagccggctggagcacctggagaaggagctgtctgagaagagcggccagctgcggcagggcagcgcccagagccagcagcagatccggggggagattgacagcctgcggcaggagaaggacagcctgctgaagcagaggctggagattgatggcaagctgcggcagggcagcctgctgagccctgaggaggagaggaccctcttccagctggatgaggccatcgaggccctggatgctgccatcgagtacaagaatgaggccatcacctgccggcagagggtgctgcgggccagcgccagcctgctgagccagtgtgagatgaacctgatggccaagctgagctacctgagcagcagcgagacccgggccctgctgtgcaagtactttgacaaggtggtgaccctgcgggaggagcagcaccagcagcagatcgccttcagcgagctggagatgcagctggaggagcagcagaggctggtgtactggctggaggtggccctggagcggcagaggctggagatggaccggcagctgaccctgcagcagaaggagcacgagcagaacatgcagctgctgctgcagcagagccgggaccacctgggggagggcctggccgacagccggcggcagtatgaggcccgcatccaggccctggagaaggagctgggccgctacatgtggatcaaccaggagctgaagcagaagctgggcggcgtgaatgctgtgggccacagccggggcggggagaagaggagcctgtgcagcgagggccggcaggcccctggaaatgaagatgagctgcacctggcccctgagctgctgtggctgagccccctgacagaaggagcccccaggacccgggaggagacccgggacctggtgcacgcccccctgcccctgacctggaagaggagcagcctgtgtggggaggagcagggcagccctgaggagctgcggcagcgggaggccgctgagcccctggtgggccgggtgctgcctgtgggggaggccggcctgccctggaactttggccccctgagcaagccccggcgggagctgcggcgggccagccctggcatgattgatgtgaggaagaaccccctgtag

SEQ ID NO: 273420 - DNA, 4032 bp, Artificial Sequence
  derived and/or modified sequence
atgggcctggaggcccagcggctgcccggcgccgaggaggcccccgttagggtggccctgagggtgcgtccgctcctcccaaaagagctcctccacgggcaccagagttgcctgcaggtggaaccagggctcgggagagtcacactaggacgtgacagacactttgggtttcacgtggtgctggcagaagatgctgggcaggaggctgtgtatcaggcctgcgttcagcccctgctagaggcattctttgagggtttcaatgccacagtttttgcttacggccagaccggaagcgggaagacgtataccatgggtgaagcctcagttgccagcttgttggaggacgagcagggtatagttcctagggccatggcggaggcttttaaactgatagacgagaatgatctgctcgattgcttggtgcatgtgagttaccttgaggtatataaggaggaatttcgtgacttattagaggtgggcaccgcaagccgggacatacaactccgggaggacgagcggggtaacgtggttctgtgcggcgtgaaagaagtcgacgttgaagggctggatgaagttttgagcctgctggagatggggaacgccgcacggcataccggcgcgactcatcttaaccacctgtcctcccgcagtcacaccgttttcacggtcacattagagcagcgggggcgcgctcctagccgtctccctcggccggcgccaggccagttgttagtctctaaattccatttcgtggatctcgctggttccgagcgagtgttgaaaaccggcagtaccggcgagcggctgaaagaatctatccagattaactcatctctgctagccctgggaaatgttatctccgcgctgggcgatcctcaacgcagaggctcacacatcccatacagggactccaagatcacccggattctcaaagacagtctgggtggcaatgccaagacggttatgattgcctgcgtgtccccatcctcatctgactttgacgagaccctcaatacattgaattacgcatctcgcgcccagaatatcaggaacagagcaactgtgaactggcgacccgaggccgagcggcccccagaggagacggcttcaggggcccgtggaccgccgcgccaccggagtgagaccaggataattcatcgagggcgaagagccccaggccccgccaccgcttccgctgctgctgcaatgcgcttgggcgcggagtgtgcccgctatagagcatgcactgatgcagcttactcactgttgcgagagctccaagcggaaccgggactgccaggcgccgcagccaggaaggtgcgggattggctctgcgctgtggagggggaaagatccgccctcagctcagcttccggacccgacagtggaatcgagtcagcctctgtggaagatcaggcagcccagggagccggcggccgcaaggaagacgagggcgcccaacagctgttaacccttcagaatcaggtggctaggcttgaggaagaaaatagagacttcctagcggcactggaagacgcaatggaacagtacaagttgcagtcagacagactgcgagagcagcaagaagagatggtagagctgagactcagattagagcttgtaaggcctggatggggtgggccgaggctgcttaatggattgcccccgggatctttcgtgccacgccctcataccgcccccctggggggcgctcacgcccacgtcctggggatggtgcctcctgcatgcttgcctggtgacgaggttggttctgagcaaagaggcgagcaagtgacgaacgggagggaagctggcgccgagcttctgacagaagttaaccgcctgggttcaggttcctccgctgcaagcgaggaagaagaagaggaagaggagcctccaagacggactttgcacttgcgacgaaacagaatcagcaactgttcgcaaagggcaggggctaggcccggctccctgcccgaacgcaagggtcctgagttatgtctggaggagctggacgctgctatccctggatcacgggccgttggaggctcgaaagcccgcgtgcaggccaggcaggtgcccccagctacagcctctgaatggaggttagcacaggcccagcagaagattcgagaactcgccataaacattcggatgaaagaagaattgataggggagctcgtgaggactgggaaagccgctcaggccttaaaccgccagcactcacagagaattcgcgagttggagcaggaagcagagcaggtgagggcagaacttagcgaaggacagaggcagttgcgcgagttagagggaaaggaactgcaggacgccggcgagcgctcacgtctccaggagttcagaagaagggtcgctgccgctcagagtcaggtacaagtcctcaaagagaagaagcaggccaccgaacgccttgtttctctttctgcacagtccgagaaaaggcttcaagagttggagaggaacgtccagctcatgcgccagcaacagggccagctgcagagacggttgcgcgaagagacggagcagaaaaggcgcttggaggctgagatgagcaaaagacagcaccgggttaaagaacttgaactgaagcatgaacagcaacaaaaaattctgaaaattaagactgaagaaatcgctgcctttcagcggaaacgtcggagtgggagcaatggaagcgtggttagtctagagcaacagcagaagattgaggaacaaaagaagtggttggaccaggaaatggaaaaagtcttacagcaaaggcgagcgctggaggaactcggggaagaactgcacaaacgcgaggcaatattggccaagaaagaggcgctgatgcaggagaagaccgggctggaaagcaagcggctccgctcttcacaggctctcaacgaagacattgttagagtgtcatcccgactggagcacttagaaaaggaactatccgaaaaatccggccagcttcggcaggggtccgctcagtcacagcagcaaatacgaggcgaaattgatagcctgagacaagagaaagattcactgctgaaacagcggcttgagatcgacggcaagcttaggcagggatcactgctgtctcctgaagaggaacgaacccttttccagcttgatgaggccattgaagcgctcgatgcagcaatcgagtataagaatgaggcgattacgtgccgccaacgggtactacgcgcatcagcaagcctactgagccaatgcgaaatgaacctcatggccaagctgagctacctgtcaagcagcgagactcgggccctcttatgcaagtattttgacaaggtggtcacgttgcgggaggagcagcaccagcagcagatagctttctctgaattggaaatgcagctcgaggagcaacagagacttgtttattggttagaagtggcactagagcgtcagagattagagatggaccggcagttgacccttcagcaaaaagaacacgaacaaaacatgcaactccttctccaacagagtagagaccatctgggagaaggcttagccgatagccgacgccaatacgaggctaggattcaggccttggaaaaagagcttggccgatacatgtggattaaccaagaactgaagcaaaaacttgggggagtaaatgcagtcggtcacagtaggggaggagaaaagaggagcttgtgtagcgagggacgccaagcccctggcaacgaggacgagttgcacctggcccccgaacttctgtggctcagccctttgacagaaggagcccctcgaactcgggaagagactcgagacctcgtacatgcgcccttaccgctgacttggaaaagatcgtctctttgcggtgaggagcaaggctccccagaagagttgcgacagcgcgaggcggcagagcccctcgtggggagggttctgcccgtcggagaagccggactgccctggaactttgggccacttagtaaaccgcgtagggaactgaggagagccagccccggcatgatagacgtgcgaaagaatccattgtag

SEQ ID NO: 273421 - DNA, 4032 bp, Artificial Sequence
  derived and/or modified sequence
atgggcttagaggcccagagactaccgggtgctgaggaggcccctgtgcgggtcgctctgcgtgtaagacctctcctgccaaaggagctcctccacggccatcaaagttgcctgcaggtcgagccaggacttggacgggtgacactgggcagagatagacattttggtttccacgtggtgctagctgaggacgcagggcaggaggcggtgtaccaggcctgtgttcagcctctgcttgaggccttcttcgagggtttcaacgccaccgtgtttgcttatggccagacagggagcggtaagacttatacgatgggggaggccagtgtggcgtccctgttggaagacgaacaaggcattgtgcctcgggctatggcagaagccttcaagctgattgatgagaacgacttattggattgtctcgtgcatgtgtcgtatcttgaggtgtacaaagaagagtttagggatcttttggaggtgggtacagcctcccgcgatatccagctccgcgaggatgagagggggaatgtggtactgtgcggcgtgaaggaagtcgatgtggagggactcgatgaagtgttgtccctgctggagatgggaaatgctgctagacacaccggcgcaactcatttaaaccacctgtcatcccgcagtcacacggtcttcactgtcacattagaacagcgcggacgcgctccctctagactgcccaggcccgctccgggacaactccttgtgtccaaattccactttgtggacctagctggcagcgagcgcgttctcaaaactggttccactggagagaggctgaaagagagcattcaaatcaatagctccctcctggcccttggtaatgtgatttcggccctgggggacccccagagacggggtagccacataccttatcgagattctaaaatcacacggattctgaaagacagtctaggaggaaacgcgaagaccgtgatgattgcttgtgtgtctcccagctcaagtgattttgacgagactctgaatacgcttaactatgccagccgggcacagaatatccggaaccgagctactgttaactggcgtccggaggcggaacgcccaccagaggaaacagccagtggggctagaggacctccccgacaccggtccgagaccagaattatacaccgcggaagacgggcacctggcccagccacagccagcgccgctgcagctatgcgactcggggcagagtgcgcacggtatcgagcctgcacggatgctgcctattctcttctccgggaactgcaggccgagcccggactccctggcgctgccgctcgtaaggtgcgggactggctgtgcgccgtggagggcgagaggagcgcactgagtagtgcatcagggccagacagcggcatagagagcgcgagtgtcgaggaccaagctgcacaaggcgctggcggtagaaaagaggacgagggtgctcaacagctgctgaccctacagaatcaggtggcacggctggaggaagaaaatagggattttctggccgcactcgaggacgcgatggagcagtataagctccagtcagacagactcagagaacagcaggaggagatggtggagttgcgacttagactcgaactcgtgcggccagggtggggcggacccagactgctgaacgggctgccgcctggctcctttgtgccccgaccccacacagctccactcggcggagcccacgcccacgtgcttggcatggtgcctccagcttgcttgccaggtgatgaagttggctccgaacagagaggcgagcaggtgactaacggccgtgaagcaggggcagagctgttgacagaggtcaaccggctaggttctgggagcagtgccgcttctgaggaagaggaagaagaagaggagccccctcgaaggacgcttcatctgaggcgtaatcgaatcagcaactgctctcagagagcaggagccagacccggtagcctgccagagaggaagggtcctgaactgtgtttagaggaattggatgctgccattcctggcagcagagcagtcggtggatccaaggccagggtgcaggccagacaggtaccacccgcaacggcaagcgaatggcgcctcgcacaggctcagcaaaagatcagggagctcgctatcaacatccgaatgaaagaggagctgattggggaactggttcgtacggggaaggccgctcaggctctgaatagacagcactcccagcggatcagagaactcgagcaggaagcagagcaggtgagggccgaactctctgaagggcagcgccagctgcgcgagcttgagggaaaagagctacaagacgccggtgagagaagccggctgcaggaattccgccgacgggtagccgctgcccagtcccaggtacaggtgttaaaagagaaaaagcaggcaactgagagactggtatccctctctgctcagtcggaaaaacggctgcaggagctggagcgcaacgttcagctgatgcgtcaacagcagggacagctgcagcgacgactgcgcgaggaaactgagcaaaaaagacgtttggaagccgaaatgagcaagcggcagcacagagtcaaagagctagaactgaagcatgagcagcagcaaaaaatccttaagattaaaacagaggaaattgcagccttccagcgtaagcgcaggagtgggtccaacggaagtgtcgtgtctctagagcagcaacaaaagatcgaggagcagaagaaatggttagaccaggaaatggaaaaagtactgcagcaaagacgcgcacttgaggaactgggagaggaactgcacaaacgtgaggccatcctcgctaagaaggaagccctgatgcaggaaaagaccggcctggagtccaaacgccttcggtcctcacaagcactgaacgaggacattgtgcgcgtgtcatcccggctagaacacctggaaaaggaactgtcagagaaaagtggccagctccgccaggggtccgcccagagccagcaacagattcggggagagatagacagtcttcggcaggagaaggattctctcctgaaacaaagactggagattgatgggaagctacggcaggggagtcttctcagtccagaagaggaacgcacactgttccagttagacgaggcgattgaggccctcgacgcagcgatcgaatataagaacgaggccatcacttgccggcagcgggtgcttcgcgctagcgctagccttctgtctcagtgtgagatgaatctgatggccaagctgtcctacctgtcatcctctgaaactagagccctcttgtgtaagtacttcgataaggtagtcaccctcagagaggagcagcaccaacagcagattgcttttagtgagttggaaatgcagttggaggagcaacaacgcctagtgtactggttagaagtcgcactggagcggcagcgtctggagatggacagacagctgaccctgcagcagaaagaacacgagcagaatatgcagctgctgcttcagcaaagccgagaccacttaggagaaggcctggctgacagcagaagacagtacgaagccaggatccaggccttggaaaaagaacttggaaggtatatgtggattaaccaagagttaaagcaaaagctgggaggggtaaatgctgtgggacactcaaggggaggtgagaagcgcagtttatgcagtgaaggacgccaggcgccaggtaatgaggacgagctacacctcgctccagagctgctttggctctctcctctgacagagggcgcacccaggacaagggaggagactcgagacctggtgcatgccccattgccactgacttggaagcgtagtagcctgtgtggggaagagcaggggtcccccgaggaactccgccaaagggaggcagccgagcccctggttggtcgggtgttgcctgtgggagaggctggcctcccctggaacttcgggcctctctctaaacccagaagagagctgaggcgggcttcacctggaatgatcgacgtgcggaaaaacccactgtag

SEQ ID NO: 273422 - DNA, 4032 bp, Artificial Sequence
  derived and/or modified sequence
atgggcctggaggcccagagactgcccggcgccgaggaggcccccgtgagagtggccctgagagtgagacccctgctgcccaaggagctgctgcacggccaccagagctgcctgcaggtggagcccggcctgggcagagtgaccctgggcagagacagacacttcggcttccacgtggtgctggccgaggacgccggccaggaggccgtgtaccaggcctgcgtgcagcccctgctggaggccttcttcgagggcttcaacgccaccgtgttcgcctacggccagaccggcagcggcaagacctacaccatgggcgaggccagcgtggccagcctgctggaggacgagcagggcatcgtgcccagagccatggccgaggccttcaagctgatcgacgagaacgacctgctggactgcctggtgcacgtgagctacctggaggtgtacaaggaggagttcagagacctgctggaggtgggcaccgccagcagagacatccagctgagagaggacgagagaggcaacgtggtgctgtgcggcgtgaaggaggtggacgtggagggcctggacgaggtgctgagcctgctggagatgggcaacgccgccagacacaccggcgccacccacctgaaccacctgagcagcagaagccacaccgtgttcaccgtgaccctggagcagagaggcagagcccccagcagactgcccagacccgcccccggccagctgctggtgagcaagttccacttcgtggacctggccggcagcgagagagtgctgaagaccggcagcaccggcgagagactgaaggagagcatccagatcaacagcagcctgctggccctgggcaacgtgatcagcgccctgggcgacccccagagaagaggcagccacatcccctacagagacagcaagatcaccagaatcctgaaggacagcctgggcggcaacgccaagaccgtgatgatcgcctgcgtgagccccagcagcagcgacttcgacgagaccctgaacaccctgaactacgccagcagagcccagaacatcagaaacagagccaccgtgaactggagacccgaggccgagagaccccccgaggagaccgccagcggcgccagaggcccccccagacacagaagcgagaccagaatcatccacagaggcagaagagcccccggccccgccaccgccagcgccgccgccgccatgagactgggcgccgagtgcgccagatacagagcctgcaccgacgccgcctacagcctgctgagagagctgcaggccgagcccggcctgcccggcgccgccgccagaaaggtgagagactggctgtgcgccgtggagggcgagagaagcgccctgagcagcgccagcggccccgacagcggcatcgagagcgccagcgtggaggaccaggccgcccagggcgccggcggcagaaaggaggacgagggcgcccagcagctgctgaccctgcagaaccaggtggccagactggaggaggagaacagagacttcctggccgccctggaggacgccatggagcagtacaagctgcagagcgacagactgagagagcagcaggaggagatggtggagctgagactgagactggagctggtgagacccggctggggcggccccagactgctgaacggcctgccccccggcagcttcgtgcccagaccccacaccgcccccctgggcggcgcccacgcccacgtgctgggcatggtgccccccgcctgcctgcccggcgacgaggtgggcagcgagcagagaggcgagcaggtgaccaacggcagagaggccggcgccgagctgctgaccgaggtgaacagactgggcagcggcagcagcgccgccagcgaggaggaggaggaggaggaggagccccccagaagaaccctgcacctgagaagaaacagaatcagcaactgcagccagagagccggcgccagacccggcagcctgcccgagagaaagggccccgagctgtgcctggaggagctggacgccgccatccccggcagcagagccgtgggcggcagcaaggccagagtgcaggccagacaggtgccccccgccaccgccagcgagtggagactggcccaggcccagcagaagatcagagagctggccatcaacatcagaatgaaggaggagctgatcggcgagctggtgagaaccggcaaggccgcccaggccctgaacagacagcacagccagagaatcagagagctggagcaggaggccgagcaggtgagagccgagctgagcgagggccagagacagctgagagagctggagggcaaggagctgcaggacgccggcgagagaagcagactgcaggagttcagaagaagagtggccgccgcccagagccaggtgcaggtgctgaaggagaagaagcaggccaccgagagactggtgagcctgagcgcccagagcgagaagagactgcaggagctggagagaaacgtgcagctgatgagacagcagcagggccagctgcagagaagactgagagaggagaccgagcagaagagaagactggaggccgagatgagcaagagacagcacagagtgaaggagctggagctgaagcacgagcagcagcagaagatcctgaagatcaagaccgaggagatcgccgccttccagagaaagagaagaagcggcagcaacggcagcgtggtgagcctggagcagcagcagaagatcgaggagcagaagaagtggctggaccaggagatggagaaggtgctgcagcagagaagagccctggaggagctgggcgaggagctgcacaagagagaggccatcctggccaagaaggaggccctgatgcaggagaagaccggcctggagagcaagagactgagaagcagccaggccctgaacgaggacatcgtgagagtgagcagcagactggagcacctggagaaggagctgagcgagaagagcggccagctgagacagggcagcgcccagagccagcagcagatcagaggcgagatcgacagcctgagacaggagaaggacagcctgctgaagcagagactggagatcgacggcaagctgagacagggcagcctgctgagccccgaggaggagagaaccctgttccagctggacgaggccatcgaggccctggacgccgccatcgagtacaagaacgaggccatcacctgcagacagagagtgctgagagccagcgccagcctgctgagccagtgcgagatgaacctgatggccaagctgagctacctgagcagcagcgagaccagagccctgctgtgcaagtacttcgacaaggtggtgaccctgagagaggagcagcaccagcagcagatcgccttcagcgagctggagatgcagctggaggagcagcagagactggtgtactggctggaggtggccctggagagacagagactggagatggacagacagctgaccctgcagcagaaggagcacgagcagaacatgcagctgctgctgcagcagagcagagaccacctgggcgagggcctggccgacagcagaagacagtacgaggccagaatccaggccctggagaaggagctgggcagatacatgtggatcaaccaggagctgaagcagaagctgggcggcgtgaacgccgtgggccacagcagaggcggcgagaagagaagcctgtgcagcgagggcagacaggcccccggcaacgaggacgagctgcacctggcccccgagctgctgtggctgagccccctgaccgagggcgcccccagaaccagagaggagaccagagacctggtgcacgcccccctgcccctgacctggaagagaagcagcctgtgcggcgaggagcagggcagccccgaggagctgagacagagagaggccgccgagcccctggtgggcagagtgctgcccgtgggcgaggccggcctgccctggaacttcggccccctgagcaagcccagaagagagctgagaagagccagccccggcatgatcgacgtgagaaagaaccccctgtag

SEQ ID NO: 273423 - protein, 72 aa, Artificial Sequence
  derived and/or modified sequence
MKLKKQVTVCGAAIFCVAVFSLYLMLDRVQHDPTRHQNGGNFPRSQISVLQNRIEQLEQLLEENHEIISHIK

SEQ ID NO: 273424 - protein, 76 aa, Artificial Sequence
  derived and/or modified sequence
MKLKKQVTVCGAAIFCVAVFSLYLMLDRVQHDPTRHQNGGNFPRSQISVLQNRIEQLEQLLEENHEIISHIKDSVL

SEQ ID NO: 273425 - DNA, 153 bp, Artificial Sequence
  derived and/or modified sequence
atgaagctgaagaagcaggtcaccgtgtgcggggctgcaattttttgcgtcgctgtgttcagtttgtaccttatgcttgatagggtccagcacgatccgacccgccaccagaatggcgggaacttcccgcggagccagatttctgtgctttag

SEQ ID NO: 273426 - DNA, 153 bp, Artificial Sequence
  derived and/or modified sequence
atgaagctgaagaagcaggtgacagtgtgtggggccgccatcttctgtgtggccgtgttcagcctgtacctgatgctggacagagtgcagcacgaccccaccaggcaccagaatggaggcaacttccccaggagccagatctctgtgctgtag

SEQ ID NO: 273427 - DNA, 153 bp, Artificial Sequence
  derived and/or modified sequence
atgaagctgaagaagcaggtgaccgtgtgcggcgccgccatcttctgtgtggcagtgttttcgctgtatttgatgcttgaccgggtgcagcatgatcccactaggcatcaaaatggtggcaattttccgcgttcccagatcagcgtgctttag

SEQ ID NO: 273428 - DNA, 153 bp, Artificial Sequence
  derived and/or modified sequence
atgaagctcaaaaaacaggtcacggtatgtggagccgctatattctgtgtggccgttttttcactgtaccttatgttggaccgggttcagcatgatccaacccgccaccaaaacggaggaaacttcccgcgaagtcaaatttctgtgttatag

SEQ ID NO: 273429 - DNA, 153 bp, Artificial Sequence
  derived and/or modified sequence
atgaagctgaagaagcaggtgaccgtgtgcggcgccgccatcttctgcgtggccgtgttcagcctgtacctgatgctggacagagtgcagcacgaccccaccagacaccagaacggcggcaacttccccagaagccagatcagcgtgctgtag

SEQ ID NO: 273430 - protein, 497 aa, Artificial Sequence
  derived and/or modified sequence
MGRKKIQITRIMDERNRQVTFTKRKFGLMKKAYELSVLCDCEIALIIFNSSNKLFQYASTDMDKVLLKYTEYNEPHESRTNSDIVETLRKKGLNGCESPDADDYFEHSPLSEDRFSKLNEDSDFIFKRGPPGLPPQNFSMSVTVPVTSPNALSYTNPGSSLVSPSLAASSTLTDSSMLSPPQTTLHRNVSPGAPQRPPSTGNAGGMLSTTDLTVPNGAGSSPVGNGFVNSRASPNLIGATGANSLGKVMPTKSPPPPGGGNLGMNSRKPDLRVVIPPSSKGMMPPLNTQRISSSQATQPLATPVVSVTTPSLPPQGLVYSAMPTAYNTDYSLTSADLSALQGFNSPGMLSLGQVSAWQQHHLGQAALSSLVAGGQLSQGSNLSINTNQNISIKSEPISPPRDRMTPSGFQQQQQQQQQQQPPPPPQPQPQPPQPQPRQEMGRSPVDSLSSSSSSYDGSDREDPRGDFHSPIVLGRPPNTEDRESPSVKRMRMDAWVT

SEQ ID NO: 273431 - DNA, 1494 bp, Artificial Sequence
  derived and/or modified sequence
atggggagaaagaagatccagatcacgaggattatggatgagcgcaatcggcaggtgacattcactaagcggaaattcggtttgatgaagaaagcctacgagctgagcgtactgtgcgattgtgagatcgctttgattatattcaattcaagcaataagttattccagtacgccagcaccgacatggataaggttctcctgaagtacactgaatataacgagccgcacgagtcccgtactaactcagatatcgtcgagactttgagaaagaaaggcctgaacggctgcgagtccccagacgccgacgattactttgagcatagcccactctcagaagaccggttctctaagcttaacgaagacagtgacttcatttttaaacgcggacctcctgggctaccaccccagaacttcagcatgtcagtgacagtgcctgtgactagtcccaacgccctgtcatatacaaatcccggatcaagccttgtgagcccgagcttagccgctagctccactctcaccgactcttcaatgctgagcccacctcagacgactctccatagaaatgtaagtcccggcgctccccagagacctcctagtactggcaatgcaggcggaatgctttcaacgacggacctgaccgttcctaatggcgccgggtcatctcccgtggggaatggatttgtcaactctcgtgcctcacctaatctgattggtgcaacaggagccaattccctggggaaggtgatgcctaccaagtctccccctcctccagggggcgggaatttggggatgaatagccgcaagcctgacctccgcgtggttatacccccctcctccaaggggatgatgccacctctgaacacccagcggatatcaagctcgcaagcaacacagcccttagctacaccggttgtttcggtgactaccccttcgctgcctccccagggcctggtctatagcgctatgcctaccgcatacaataccgattacagccttacctcagcagatctctcagcgctgcaggggttcaattcaccaggaatgctgagcctcggccaagtctccgcttggcagcagcaccacttaggccaagctgcgctcagcagccttgtggcagggggccagctttcccagggttctaacctgagcatcaatacaaatcagaatatatcgataaagagcgagccgatttcaccacctcgcgatcgcatgacaccctctggtttccagcaacagcagcagcaacagcagcagcaacagcccccacctccaccccagccacaaccccaacccccacagccgcagccaagacaagagatgggccgatcccccgtggatagcctgagcagcagttccagttcttatgatggtagcgaccgggaagatcccaggggggacttccacagcccgatcgttctgggccgccccccaaacacggaggatagagagtctccctcggtcaagagaatgagaatggacgcgtgggtcacttag

SEQ ID NO: 273432 - DNA, 1494 bp, Artificial Sequence
  derived and/or modified sequence
atggggagaaaaaagatacagatcactcggatcatggacgaacgcaaccggcaagtgacgttcaccaagcgcaagttcggcctgatgaaaaaagcatatgagcttagcgtgctttgtgactgcgagatagccttgattattttcaattcatcaaataagcttttccaatacgcttccacggatatggataaagtactgctcaagtatactgagtacaacgagccccacgaatctaggacaaattcagatatcgttgagacccttagaaagaaaggcttgaatggctgtgaatcccctgacgccgacgactacttcgagcacagccccttgagtgaagatagattctctaagttgaatgaagattccgactttatctttaaacgtggtccgcctggactgccacctcagaacttctcaatgagcgtcactgtgcctgttacatcccctaatgccctgagctacaccaaccccggatcctccctggtgagcccatccctggcggccagcagtaccttaacagactcatctatgctgagtccaccccagacgacgctccaccgaaatgtgtcaccaggagcaccgcagagacctccaagcaccggaaacgctgggggcatgctctccacaacagacctaacagtgcctaacggcgcaggtagcagcccagtcgggaatggcttcgtgaattctcgagcatcacccaatcttatcggagccactggtgccaattccctgggcaaggtgatgcctaccaagtcccctcccccacccggcggcggtaatctggggatgaactcgcgcaagccagacctgcgggtagtcatccccccctcgtcaaaagggatgatgccccccctcaatacccaacgtatatctagtagccaggccacacagcctctggcaaccccagttgtgagcgtaactacaccaagtcttcctcctcaggggttggtgtatagcgctatgcccacagcttataacaccgactactctctaacctctgctgacctctctgccttgcagggatttaattcccccggcatgctctccttgggacaggtctccgcctggcagcagcaccacctcgggcaggctgccttatcatctttagtagccggcggccagctgtcccagggatctaacctctccataaatacgaatcagaatatcagcatcaagagcgaacccatttccccaccacgcgaccgcatgacaccaagtggcttccagcagcagcagcagcagcaacagcagcagcagccaccccctccccctcaaccccaaccgcagccgccacaaccccagccccggcaggagatggggcgatcacctgtcgattcactgtctagcagctccagctcctacgatggatctgacagggaagacccgcggggggacttccatagccccatcgtgcttgggaggccacccaataccgaagaccgcgaatctccaagcgtgaaacggatgagaatggacgcctgggtcacctag

SEQ ID NO: 273433 - DNA, 1494 bp, Artificial Sequence
  derived and/or modified sequence
atgggcaggaagaagatccagatcacccgcatcatggatgaaagaaaccggcaggtgaccttcaccaagaggaagtttggcctgatgaagaaggcctatgagctgtctgtgctgtgtgactgtgaaattgccctgatcatcttcaacagcagcaacaagctgttccagtatgccagcacagacatggacaaggtgctgctgaagtacacagagtacaatgagccccatgagagcaggaccaacagcgacatcgtggagaccctgaggaagaagggcctgaatggctgtgagagcccagatgctgatgactactttgagcacagccccctgtctgaggaccgcttcagcaagctgaatgaagacagcgacttcatcttcaagaggggccccccaggcctgcccccccagaacttctccatgtctgtgacagtgcctgtgaccagccccaatgccctgagctacaccaaccctggcagcagcctggtgagccccagcctggccgccagcagcaccctgacagacagctccatgctgagccccccccagaccaccctgcacagaaatgtgtcccctggggccccccagaggcctcccagcactggaaatgccggcggcatgctgagcaccacagacctgactgtgcccaacggggccggcagcagccctgtgggcaatggatttgtgaacagccgggccagccccaacctgattggagccaccggggccaacagcctgggcaaggtgatgcccaccaagagccccccacctcctgggggcggcaacctgggcatgaacagcaggaagccagacctgcgggtggtgatcccccccagcagcaagggcatgatgccacccctgaacacccagaggatcagcagcagccaggccacccagcccctggccacccctgtggtgtctgtgaccacccccagcctgcccccccagggcctggtgtacagcgccatgcccacagcctacaacacagactacagcctgaccagcgctgacctgagcgccctgcagggcttcaacagccctggcatgctgagcctgggccaggtgtctgcctggcagcagcaccacctgggccaggccgccctgagcagcctggtggccggcggccagctgagccagggcagcaacctgagcatcaacaccaaccagaacatcagcatcaagtctgagcccatcagccccccccgggacaggatgaccccatctggcttccagcagcagcagcagcagcagcagcagcagcagcccccacctccaccccagccccagccccagcccccccagccccagccccggcaggagatgggccgcagccctgtggacagcctgagcagcagcagcagcagctatgatggcagtgaccgggaggaccccaggggggacttccacagccccatcgtgctgggccggccccccaacacagaggaccgggagagccccagcgtgaagaggatgaggatggatgcctgggtgacctag

SEQ ID NO: 273434 - DNA, 5365 bp, Artificial Sequence
  derived and/or modified sequence
gccatgagtgccttggcaaggctttaaatactttgagggctctcaccagaggcctaattgctaccctttggagctcagatcttgtagaaaatttcagctgtagcccttggactagaagctgaaataacagaagctgtgtacgatgcattagggtattgaagaaaattaacttttgaattaaatatttggaatataaggaaataaggaaagttgactgaaaatggggcggaagaaaatacaaatcacacgcataatggatgaaaggaaccgacaggtcacttttacaaagagaaagtttggattaatgaagaaagcctatgaacttagtgtgctctgtgactgtgaaatagcactcatcattttcaacagctctaacaaactgtttcaatatgctagcactgatatggacaaagttcttctcaagtatacagaatataatgaacctcatgaaagcagaaccaactcggatattgttgagactttaagaaagaaaggccttaatggttgtgagagccctgatgctgacgattactttgagcacagtccactctcggaggacagattcagcaaactaaatgaagatagtgattttattttcaaacgaggccctcctggtctgccacctcagaacttttcaatgtctgtcacagttccagtgaccagccccaatgctttgtcctacactaacccagggagttcactggtgtccccatctttggcagccagctcaacgttaacagattcaagcatgctctctccacctcaaaccacattacatagaaatgtgtctcctggagctcctcagagaccaccaagtactggcaatgcaggtgggatgttgagcactacagacctcacagtgccaaatggagctggaagcagtccagtggggaatggatttgtaaactcaagagcttctccaaatttgattggagctactggtgcaaatagcttaggcaaagtcatgcctacaaagtctccccctccaccaggtggtggtaatcttggaatgaacagtaggaaaccagatcttcgagttgtcatccccccttcaagcaagggcatgatgcctccactaaatacccagaggatcagtagttctcaagccactcaacctcttgctaccccagtcgtgtctgtgacaaccccaagcttgcctccgcaaggacttgtgtactcagcaatgccgactgcctacaacactgattattcactgaccagcgctgacctgtcagcccttcaaggcttcaactcgccaggaatgctgtcgctgggacaggtgtcggcctggcagcagcaccacctaggacaagcagccctcagctctcttgttgctggagggcagttatctcagggttccaatttatccattaataccaaccaaaacatcagcatcaagtccgaaccgatttcacctcctcgggatcgtatgaccccatcgggcttccagcagcagcagcagcagcagcagcagcagcagccgccgccaccaccgcagccccagccacaacccccgcagccccagccccgacaggaaatggggcgctcccctgtggacagtctgagcagctctagtagctcctatgatggcagtgatcgggaggatccacggggcgacttccattctccaattgtgcttggccgacccccaaacactgaggacagagaaagcccttctgtaaagcgaatgaggatggacgcgtgggtgacctaaggcttccaagctgatgtttgtacttttgtgttactgcagtgacctgccctacatatctaaatcggtaaataaggacatgagttaaatatatttatatgtacatacatatatatatccctttacatatatatgtatgtgggtgtgagtgtgtatgtgtgggtgtgtgttacatacacagaatcaggcacttacctgcaaactccttgtaggtctgcagatgtgtgtcccatggcagacaaagcaccctgtaggcacagacaagtctggcacttccttggactacttgtttcgtaaagataaccagtttttgcagagaaacgtgtacccatatataattctcccacactagcttgcagaaacctagagggccccctacttgttttatttaactgtgcagtgactgtagttacttaagagaaaatgctttgtagaacagagcagtagaaaagcaggaaccaagaaagcaatactgtacataaaatgtcatttatattttccaacctggcatgggtgtctgttgcaaaggggtgcatgggaaagggctgttgatattaaaaacaaacaaaacaaaaaagccccacacataactgttttgcacgtgcaaaaatgtattgggtcaagaagtgatctttagctaataaagaaagagaatagaaaacacgcatgagatattcagaaaatactagcctagaaatatagagcattaacaaagtaaaattaatatattaagttataattggaatatgtcagaagtttctttttacattcatatcttaaaaattaaagaaactgattttagctcatgtatattttatatgaaagaaaacacccttatgaattgatgactatatataaaattatattcactacttttgaacacattctgctatgaattatttatataagccaaagctatatgttgtaacttttttttagagaatagctttatcttggtttaactctttagttttattttaagaggggaaaacaaaaatatcttgcaagcagaaccttggaaaaaaaaagccatgaacacttattctaaatgtaaattaaaagttgagccaaactctttgtgtatatagcatcttaaatatattatcacctttgatgtaagtacctatgtattgtatggtcaccagattaaaaagtatatttttgtggattgccgccaatctggggggaaaaggcgaggtcctttattaagtattcactgtttaatatttactattttgttaaatatactgtactttggattttaattattagcccagttttttcagaggattgtataaaggggtttctcccctcactggtggtgaatgtgtgatgttacattgtaatctttgtgctgtatgggttgagcatcattatatattttgtatgtgtacataaatagcaaagtggcaaaaaaaattggtgttaagttcatcctgcataagtataaaatgtgttgtaacagattttgtaaggcattatttaaaacttgccttttgtgaggaaaaaatgtagtagaaaaagctgacctaatttaattaatattagagaaaatggcaaaatagtagatgagcacaaaggttttataagtggtaaatgattaggggaaaataatcatggggaaagggatcttttttccttgaccctctgaaaacagaacgatgcagctggttacaaaatcctaccgttatcagctcttctgcacattgcagtgatgctttggtatgcggggagaaacactcttagggtgctggtccttggcatgactcttgccattctaattggaattagtgccaccctcagcttggattttgaacaaggccttattctttcaggaagacaactaatggatgatagcaagttcatccacttactgggcttgtgccatgagcaaaattcaaagtcctgtatatctttcattgtagatttttaaatactccttttcctaaaaaactcaagggtttaaaaattgctattttatattttaaatgatattgagcagctacctacaatttctatgtacattttgttcccccccccccaccccccccccaaattacgttccttttgacattttcctcatctgctgtttgtgacaagtcatcagccagatttcctgactgacacataggtatgatcagtgcaggagagacctgcgcaccacaggctgcaaactggaggttctgttctcatggcagtttgggcagtaacttttgagagaggccaaaaaaaggaggatgacatgctgtctcctctcttcagtatagacattaggctcttattcagaaaggatttttctttaaaaatgtacttactttactgaactacttacaggcacatttcttcataaggccacacctaatccaaacaagacagtctcccaacactgaagttccaaaataatccttaccactttgtaaaccatttatagctttgaaagtgttaagtgattccttcgttattatttatgcatgttcatgaacttctgctgtacattggaataggagttaacacattcacatttactgtctattttcttgtgtgccttatgagatggcttttctgactgtatctcaatagtctttctttctatgcaggtttataatcagtacaactactgttttctaaaatactactactcaaggctcggagtttgtatttaaattacactgaccaagtaacaatgtattccatttcaggaactgaatatttgactgttaacctttttcccatacgtccagtgtggcatggagcatatggacttgacagacatctctcacccagacgcccacgtgtgaacacacccacatccacatctctgggtggaaaccagcctagagaggggacgacgctaatggtgttgctttagaaccgtcttttcttacccttttagactcgtgttttgtatgagacaccattgcaagaaaattttatccctccagaagtattttattactaaagaacaaaagcaaaaaaagcttaaattgcactggttaaagtacagtttccaacagctgtccttcctcagtactctaatggccactccaccgcgagtggaagtcactgttgtgtgtacacaggtggtcccaatcaaaactccatcttttgagcccaattatgtccattttgttatagactaaatcaggggtttgttctacaagaacaatacatgttttaccctttcctttaactagaaggataactagtaatgcatcaacataatttctgtattaaccatcatgcgcacaagaaatacatagtaaataaggaagctgaaaactcctggcattggatcttaagctagatgattagaatgtgaaaaagattttacaaatgtaaaacttctatttctctgtagaaactttcttcactttgctgtgcaagaagacactgctttgctatatttaaaatggcttttttaaaagagatttatgtatttggtaaatgtttgtagtcaacagttcacacaagaagctgtacacggtttgatcatgtaaaaccgtttggcggcacaagctggactttgttgccatccttgagatgaaccttttaagaaaaataagttaatctcaatttttccctgaatgtgttgtttttcttcattatacaataaatataatagtgaactttttatcaaatggtgaagacaatgct

SEQ ID NO: 273435 - DNA, 2854 bp, Artificial Sequence
  derived and/or modified sequence
ggggatccgtgcgcggatgtcccggcgagtcccgggctgaaagaggcggctccgggcggcgcgaagcgctggtggcgggcccgggctgcggcgtgtgcgcgcccgccagctgctccggagatacggaattgcattttgtgaaaaaagaacaagaattttctgcaaggatcatatctaagtgcactttttgctgatacttcatttctaatcttgtagaaaatttcagctgtagcccttggactagaagctgaaataacagaagctgtgtacgatgcattagggtattgaagaaaattaacttttgaattaaatatttggaatataaggaaataaggaaagttgactgaaaatggggcggaagaaaatacaaatcacacgcataatggatgaaaggaaccgacaggtcacttttacaaagagaaagtttggattaatgaagaaagcctatgaacttagtgtgctctgtgactgtgaaatagcactcatcattttcaacagctctaacaaactgtttcaatatgctagcactgatatggacaaagttcttctcaagtatacagaatataatgaacctcatgaaagcagaaccaactcggatattgttgagactttaagaaagaaaggccttaatggttgtgagagccctgatgctgacgattactttgagcacagtccactctcggaggacagattcagcaaactaaatgaagatagtgattttattttcaaacgaggccctcctggtctgccacctcagaacttttcaatgtctgtcacagttccagtgaccagccccaatgctttgtcctacactaacccagggagttcactggtgtccccatctttggcagccagctcaacgttaacagattcaagcatgctctctccacctcaaaccacattacatagaaatgtgtctcctggagctcctcagagaccaccaagtactggcaatgcaggtgggatgttgagcactacagacctcacagtgccaaatggagctggaagcagtccagtggggaatggatttgtaaactcaagagcttctccaaatttgattggagctactggtgcaaatagcttaggcaaagtcatgcctacaaagtctccccctccaccaggtggtggtaatcttggaatgaacagtaggaaaccagatcttcgagttgtcatccccccttcaagcaagggcatgatgcctccactaaatacccagaggatcagtagttctcaagccactcaacctcttgctaccccagtcgtgtctgtgacaaccccaagcttgcctccgcaaggacttgtgtactcagcaatgccgactgcctacaacactgattattcactgaccagcgctgacctgtcagcccttcaaggcttcaactcgccaggaatgctgtcgctgggacaggtgtcggcctggcagcagcaccacctaggacaagcagccctcagctctcttgttgctggagggcagttatctcagggttccaatttatccattaataccaaccaaaacatcagcatcaagtccgaaccgatttcacctcctcgggatcgtatgaccccatcgggcttccagcagcagcagcagcagcagcagcagcagcagccgccgccaccaccgcagccccagccacaacccccgcagccccagccccgacaggaaatggggcgctcccctgtggacagtctgagcagctctagtagctcctatgatggcagtgatcgggaggatccacggggcgacttccattctccaattgtgcttggccgacccccaaacactgaggacagagaaagcccttctgtaaagcgaatgaggatggacgcgtgggtgacctaaggcttccaagctgatgtttgtacttttgtgttactgcagtgacctgccctacatatctaaatcggtaaataaggacatgagttaaatatatttatatgtacatacatatatatatccctttacatatatatgtatgtgggtgtgagtgtgtatgtgtgggtgtgtgttacatacacagaatcaggcacttacctgcaaactccttgtaggtctgcagatgtgtgtcccatggcagacaaagcaccctgtaggcacagacaagtctggcacttccttggactacttgtttcgtaaagataaccagtttttgcagagaaacgtgtacccatatataattctcccacactagcttgcagaaacctagagggccccctacttgttttatttaactgtgcagtgactgtagttacttaagagaaaatgctttgtagaacagagcagtagaaaagcaggaaccaagaaagcaatactgtacataaaatgtcatttatattttccaacctggcatgggtgtctgttgcaaaggggtgcatgggaaagggctgttgatattaaaaacaaacaaaacaaaaaagccccacacataactgttttgcacgtgcaaaaatgtattgggtcaagaagtgatctttagctaataaagaaagagaatagaaaacacgcatgagatattcagaaaatactagcctagaaatatagagcattaacaaagtaaaattaatatattaagttataattggaatatgtcagaagtttctttttacattcatatcttaaaaattaaagaaactgattttagctcatgtatattttatatgaaagaaaacacccttatgaattgatgactatatataaaattatattcactacttttgaacacattctgctatgaattatttatataagccaaagctatatgttgtaacttttttttagagaatagctttatcttggtttaactctttagttttattttaagaggggaaaacaaaaatatcttgcaagcagaac

SEQ ID NO: 273436 - DNA, 1494 bp, Artificial Sequence
  derived and/or modified sequence
atgggccggaagaagatccagatcacccggatcatggacgagcggaataggcaggtgacgtttactaaacgcaaattcgggctgatgaaaaaggcctacgaactgagcgttttgtgcgattgcgagatcgctctaatcatctttaattcctctaacaagctgttccagtacgccagcacagacatggacaaagtcctgctgaagtacacagaatacaacgaaccccacgaatctcgaaccaacagcgacatcgtcgagaccctgagaaagaagggcttgaatggatgcgagtcccccgacgctgatgactatttcgaacattcgcccctgagcgaggacaggttcagcaagctcaacgaggattcagacttcatattcaaacgtggtccccctggactgccaccacagaacttttcaatgtctgtcacggttcccgtgacaagtcccaacgctttgtcctatacaaacccaggcagctctctagtgagtccttctctggcagcgtcatccaccctcacagattcatcgatgctctcacctcctcaaacaacactgcaccggaacgtttcacctggggctcctcagcgcccaccctctacgggtaatgcgggcggaatgctgagtaccacggatttaacagttccaaacggggccggaagctcacccgtgggaaacgggtttgttaattcacgggcgagccccaacctgattggggccacgggagccaactccttagggaaagtgatgcccacaaagtccccccccccacctggtgggggtaacctcggaatgaactcacgtaagcctgaccttcgggtcgtcatccctccttcctcaaaaggaatgatgccccctttgaatacccagcgcatctccagttctcaagctacccagcctctggccactcccgtagtcagcgtgaccacgccgagcttaccaccccagggactggtttattctgccatgccaaccgcatataacacagattatagtctgaccagcgctgacctctccgcattgcagggatttaactcccctggcatgttaagcctgggccaggtgtccgcctggcaacagcatcatctgggccaggctgccctctcttctctggtcgccggaggccagctgtcccaggggtcaaacctgtcaattaatactaatcagaacatcagcatcaagagtgagcctatcagtccacctcgtgatagaatgacaccttctgggttccagcagcaacagcaacaacagcaacaacagcaacccccccctccaccacagcctcagccccaaccgccgcaaccacagccacggcaagaaatgggaaggagtcccgtcgattctttgtcgagctcatcctccagctacgatggtagcgatcgcgaagaccctcgcggagactttcattctcccatcgtgctgggaagacccccgaacaccgaggaccgtgaaagcccatcagtcaaaaggatgcgaatggatgcttgggtgacctag

SEQ ID NO: 273437 - DNA, 1494 bp, Artificial Sequence
  derived and/or modified sequence
atgggccggaagaagatccagatcacccggatcatggacgagcggaatagacaggtcacgtttactaaacgcaagtttggtctgatgaagaaagcatatgaactgagcgtcttgtgcgactgcgaaattgctctcattatcttcaactcctctaacaaactgttccagtacgcgtcaacagacatggataaggtcctgttgaaatacacagaatacaatgagccacatgaaagtcggacaaatagtgacatcgtggagaccctgagaaagaaaggcctcaatggatgcgaatcacctgatgccgatgactacttcgaacactcccccttgagtgaggacagattctccaaactgaatgaagatagcgactttattttcaaacgtggaccgccagggctcccgccccagaactttagcatgtctgttactgtgcccgtgactagccccaacgccctctcgtacaccaaccctggcagctccctggtgagccccagtctggctgcttcgtcaaccctgacggattcctccatgttgtcaccaccccagactactttgcataggaatgtttcccccggtgcaccacagcgtccgcctagcaccggtaatgcagggggaatgttgagcaccaccgatcttacagtgcccaatggggccggaagtagtcctgtgggtaatggcttcgttaacagccgagcttctccgaacctgataggcgctaccggggccaacagccttggcaaggtcatgccaaccaagtccccgccacctcccggaggaggaaacctgggtatgaactctaggaagcctgatttgcgggttgttataccgccgtccagtaagggaatgatgcccccactgaatacacaacggatcagttcctcacaggcgacccagcccctggccactccggttgtgtctgttacaaccccaagccttcccccacagggactggtttattcagctatgccaactgcatacaatactgattattccttgacgagtgctgatctgtcagctttgcaaggcttcaacagtcccggcatgctttcgctgggccaagtgtcagcgtggcagcaacatcacctgggacaagctgccctctccagtttagtggcaggcggccagctgtcccaggggagtaatctctccattaacaccaatcagaacatatcaatcaaaagcgaacccatctcccctccaagagaccgtatgacaccatccggttttcaacagcagcagcaacagcaacagcaacagcagccccccccacctccacagccccagccccagccacctcaacctcagccgagacaggagatgggacggtcccccgtggactccttgtctagtagcagcagtagctacgacggatcggatcgcgaggatcctcgcggggactttcattcccccatcgtgttggggcgcccaccaaacacagaagacagagagtcccctagcgtaaagcgcatgcgcatggatgcttgggtcacttag

SEQ ID NO: 273438 - DNA, 1494 bp, Artificial Sequence
  derived and/or modified sequence
atgggcagaaaaaaaattcagatcactcggattatggacgagcgcaatcgccaggtgactttcacgaaaaggaaattcggactaatgaagaaggcctatgagctgtcagtactctgcgattgtgaaatcgcacttatcatatttaactcttcgaataaattattccagtatgctagcactgatatggacaaggttctcctgaagtataccgagtataatgagccgcacgagtctaggaccaattccgacattgtcgaaactctgaggaagaagggtttgaatggctgcgaatccccagatgccgatgattattttgaacactctccccttagcgaggacagatttagtaaactaaacgaagatagcgattttatttttaagcgaggccctccaggcctgccccctcaaaacttcagcatgtccgtcaccgtcccggtaacctctccaaacgcgctgagctacacgaatccaggatcttctctggtatcaccatctctggccgcatcatcaacccttactgactcatcaatgctgtctcccccacagacaacgctgcaccgtaacgtgtctcccggagcccctcagagacctccaagcaccggcaatgcgggaggcatgctctccaccacagatcttacagttcctaatggggcagggtccagcccagtggggaatggctttgtgaactcccgagctagccccaacctcattggtgcaacaggggctaattctctgggcaaggtgatgcccaccaaaagtccccctccgcctgggggtgggaacctcggcatgaactcacgcaagcccgaccttagggttgtaattccacctagtagcaaaggcatgatgcccccactaaatacgcaacgcatcagttcctcacaggccacccaacctctggcaacaccagtggttagtgttacgactccctcactgcctcctcagggcctggtctatagtgctatgcctacagcctacaacactgattatagcctgacaagcgccgatctgtctgccctccaaggcttcaactcccccggaatgctttctctgggacaggtgtccgcatggcagcagcaccacctgggacaggccgcactgtccagtctggtcgctggagggcaattgtcacaggggtcaaatctctcaatcaacacaaaccagaacatttcaatcaagtctgaaccaatctctccccctagagacaggatgactccgtctgggtttcagcaacagcaacagcagcagcagcagcagcagccccctccccctccacagccccagccacaacctccccaaccccaaccccgtcaagaaatggggagatcaccggttgactctttatcttcaagtagctccagctacgatggctctgacagggaagatcccagaggtgattttcacagcccaattgttttggggagacctccaaatacagaggatagagaatcaccgtcagtgaagagaatgaggatggacgcctgggtaacatag

SEQ ID NO: 273439 - DNA, 1494 bp, Artificial Sequence
  derived and/or modified sequence
atgggtcggaaaaagattcagattactcgcattatggatgaaaggaaccgccaggtgacattcacaaaacgcaagttcggcctcatgaagaaggcctacgaactctccgtgctgtgcgattgcgaaattgcgctcatcatctttaactcatcgaataaactgttccagtacgcttcaacggacatggataaggtattactgaagtacacagaatataacgaaccccacgagagccgtactaactctgatattgttgagactctcaggaagaagggtctgaacggctgcgagtcccctgatgccgatgactactttgaacactcgcctctgtccgaggaccgtttcagcaagttgaatgaggatagcgactttatcttcaagcggggaccacctggattgcccccacaaaacttcagcatgagtgttactgttcccgtgacaagtccaaacgccctctcgtacaccaaccccggtagttcattggtgagcccaagcctcgccgcttcaagcaccctgacagactcctcaatgctctccccgccacagaccacactccatcgtaacgtctcccccggtgctccccagcgccctccctcaaccggtaatgctggaggcatgctcagtaccacagatctcacagtcccaaatggggctggctcctcaccagttggtaatggcttcgtcaattccagggcctccccaaatttaataggcgcaactggagcgaatagcctcgggaaggtcatgcctactaaatccccgcctcccccaggcggaggaaatctgggtatgaactcacggaaacctgacctgcgagtggtcatccccccatctagcaaaggcatgatgcccccattgaatacccagcgtatttcctcctcacaggctactcaacccttagctacacccgtagtgagcgtgacaaccccctccctgcccccacaggggttggtatattcagctatgcccactgcttataacacagattattctctgacttctgctgatctgagcgcccttcagggctttaactccccgggaatgctgtctctcgggcaggtgagtgcctggcaacagcaccacctcgggcaggccgctctgagttctctggttgccggtggccagctgtcccagggttcaaatctgtccattaacaccaaccagaacataagcatcaagagcgagccgatatccccaccacgcgacagaatgacaccttccgggttccaacagcagcagcagcagcaacagcagcaacagccgccacctccacctcagccccagccccagccaccgcagccacagccacgccaagagatggggaggtcgcccgtggattcactatcaagttcatcaagcagttacgatggctccgaccgcgaagaccctcgcggtgattttcattcccccatcgtgctagggcgaccccctaacactgaagacagggaatccccctccgtgaaacggatgaggatggacgcttgggtaacttag

SEQ ID NO: 273440 - DNA, 1494 bp, Artificial Sequence
  derived and/or modified sequence
atgggcagaaagaagatccagatcaccagaatcatggacgagagaaacagacaggtgaccttcaccaagagaaagttcggcctgatgaagaaggcctacgagctgagcgtgctgtgcgactgcgagatcgccctgatcatcttcaacagcagcaacaagctgttccagtacgccagcaccgacatggacaaggtgctgctgaagtacaccgagtacaacgagccccacgagagcagaaccaacagcgacatcgtggagaccctgagaaagaagggcctgaacggctgcgagagccccgacgccgacgactacttcgagcacagccccctgagcgaggacagattcagcaagctgaacgaggacagcgacttcatcttcaagagaggcccccccggcctgcccccccagaacttcagcatgagcgtgaccgtgcccgtgaccagccccaacgccctgagctacaccaaccccggcagcagcctggtgagccccagcctggccgccagcagcaccctgaccgacagcagcatgctgagccccccccagaccaccctgcacagaaacgtgagccccggcgccccccagagaccccccagcaccggcaacgccggcggcatgctgagcaccaccgacctgaccgtgcccaacggcgccggcagcagccccgtgggcaacggcttcgtgaacagcagagccagccccaacctgatcggcgccaccggcgccaacagcctgggcaaggtgatgcccaccaagagcccccccccccccggcggcggcaacctgggcatgaacagcagaaagcccgacctgagagtggtgatcccccccagcagcaagggcatgatgccccccctgaacacccagagaatcagcagcagccaggccacccagcccctggccacccccgtggtgagcgtgaccacccccagcctgcccccccagggcctggtgtacagcgccatgcccaccgcctacaacaccgactacagcctgaccagcgccgacctgagcgccctgcagggcttcaacagccccggcatgctgagcctgggccaggtgagcgcctggcagcagcaccacctgggccaggccgccctgagcagcctggtggccggcggccagctgagccagggcagcaacctgagcatcaacaccaaccagaacatcagcatcaagagcgagcccatcagcccccccagagacagaatgacccccagcggcttccagcagcagcagcagcagcagcagcagcagcagccccccccccccccccagccccagccccagcccccccagccccagcccagacaggagatgggcagaagccccgtggacagcctgagcagcagcagcagcagctacgacggcagcgacagagaggaccccagaggcgacttccacagccccatcgtgctgggcagaccccccaacaccgaggacagagagagccccagcgtgaagagaatgagaatggacgcctgggtgacctag

SEQ ID NO: 273441 - DNA, 117 bp, Artificial Sequence
  derived and/or modified sequence
atgggacgaaagaaaatccagatcacgagaatcatggatgaacgcaacagacaggtgacctttactaaacggaagttcggcctaatgaagaaggcctacgagctctcagtactgtag

SEQ ID NO: 273442 - DNA, 234 bp, Artificial Sequence
  derived and/or modified sequence
atgggtcgcaagaaaattcagatcacgaggatcatggacgagcgtaatcgacaggtcacctttaccaagagaaaatttggcctcatgaagaaggcttatgaactgagcgttctgtgtgactgtgaaatcgccctgatcatctttaattcttccaacaagctgttccagtatgcctccacagatatggacaaagtacttctgaaatatactgagtacaatgaaccccacgaatag

SEQ ID NO: 273443 - DNA, 258 bp, Artificial Sequence
  derived and/or modified sequence
atgggccgcaagaagattcaaattactagaataatggatgagcgcaatagacaggtcacctttactaagcgaaaattcggtcttatgaaaaaggcctatgaactgtccgtactgtgtgactgcgaaatcgccctgatcatttttaattcttctaacaaactgttccaatacgcctcgacagacatggacaaagtgctcctcaagtacactgagtacaacgagccacacgagtcacgcacaaattcggatatcgtgtag

SEQ ID NO: 273444 - DNA, 264 bp, Artificial Sequence
  derived and/or modified sequence
atgggccgtaagaaaatccagataaccagaattatggacgagcgtaacagacaggtaacctttaccaagcgtaagtttggcctcatgaagaaagcatatgaactgtcagtcctgtgcgattgcgagatcgcgctgatcatctttaattcaacgaacaagctgttccagtatgcctccactgacatggacaaagtcctgctgaaatatacagagtataacgagcctcatgaatctagaactaactcggacatagtagagacctag

SEQ ID NO: 273445 - DNA, 87 bp, Artificial Sequence
  derived and/or modified sequence
atggggcgcaagaagatacagatcacgcgcataatggacgagaggaataggcaggtaacatttacaaaacggaaattcggtctgtag

SEQ ID NO: 273446 - DNA, 117 bp, Artificial Sequence
  derived and/or modified sequence
atgggcaggaagaagatccagatcacccgcatcatggatgaaagaaaccggcaggtgaccttcaccaagaggaagtttggcctgatgaagaaggcctatgagctgtctgtgctgtag

SEQ ID NO: 273447 - DNA, 234 bp, Artificial Sequence
  derived and/or modified sequence
atgggcaggaagaagatccagatcacccgcatcatggatgaaagaaaccggcaggtgaccttcaccaagaggaagtttggcctgatgaagaaggcctatgagctgtctgtgctgtgtgactgtgaaattgccctgatcatcttcaacagcagcaacaagctgttccagtatgccagcacagacatggacaaggtgctgctgaagtacacagagtacaatgagccccatgaatag

SEQ ID NO: 273448 - DNA, 258 bp, Artificial Sequence
  derived and/or modified sequence
atgggcaggaagaagatccagatcacccgcatcatggatgaaagaaaccggcaggtgaccttcaccaagaggaagtttggcctgatgaagaaggcctatgagctgtctgtgctgtgtgactgtgaaattgccctgatcatcttcaacagcagcaacaagctgttccagtatgccagcacagacatggacaaggtgctgctgaagtacacagagtacaatgagccccatgagagcaggaccaacagcgacatcgtgtag

SEQ ID NO: 273449 - DNA, 264 bp, Artificial Sequence
  derived and/or modified sequence
atgggcaggaagaagatccagatcacccgcatcatggatgaaagaaaccggcaggtgaccttcaccaagaggaagtttggcctgatgaagaaggcctatgagctgtctgtgctgtgtgactgtgaaattgccctgatcatcttcaacagcaccaacaagctgttccagtatgccagcacagacatggacaaggtgctgctgaagtacacagagtacaatgagccccatgagagcaggaccaacagcgacatcgtggagacctag

SEQ ID NO: 273450 - DNA, 87 bp, Artificial Sequence
  derived and/or modified sequence
atgggcaggaagaagatccagatcacccgcatcatggatgaaagaaaccggcaggtgaccttcaccaagaggaagtttggcctgtag

SEQ ID NO: 273451 - DNA, 574 bp, Artificial Sequence
  derived and/or modified sequence
agtcgcgcgggctggtggcgagcagcctccccgggcgcgcaccccttggggccggggggcggtggtggacgtcgcctccttgaaagttgaaggagttctcgggagaccccggagaaggaattgcattttgtgaaaaaagaacaagaattttctgcaaggatcatatctaagtgcactttttgctgatacttcatttctaatcttgtagaaaatttcagctgtagcccttggactagaagctgaaataacagaagctgtgtacgatgcattagggtattgaagaaaattaacttttgaattaaatatttggaatataaggaaataaggaaagttgactgaaaatggggcggaagaaaatacaaatcacacgcataatggatgaaaggaaccgacaggtcacttttacaaagagaaagtttggattaatgaagaaagcctatgaacttagtgtgctctgtgactgtgaaatagcactcatcattttcaacagctctaacaaactgtttcaatatgctagcactgatatggacaaagttcttctcaagtatacagaatataatgaacctcatgaaag

SEQ ID NO: 273452 - DNA, 732 bp, Artificial Sequence
  derived and/or modified sequence
gatttgccacgcgccgcgtcaccgggccgctcccggcctgggctcccgggggctggtcagggaggtggcggcggctgagcggcggagcgggggcggcagggcgcgacgccgccgggccgccccgccctgggaggcgcccgggccctcatcaagtgaccagtatcccttccaggggaacacggtccttcagaggaaagcgagctccaacccgcggccccggcgccaagccgccgtcatcttcttcctgtgccaggaattgcattttgtgaaaaaagaacaagaattttctgcaaggatcatatctaagtgcactttttgctgatacttcatttctaatcttgtagaaaatttcagctgtagcccttggactagaagctgaaataacagaagctgtgtacgatgcattagggtattgaagaaaattaacttttgaattaaatatttggaatataaggaaataaggaaagttgactgaaaatggggcggaagaaaatacaaatcacacgcataatggatgaaaggaaccgacaggtcacttttacaaagagaaagtttggattaatgaagaaagcctatgaacttagtgtgctctgtgactgtgaaatagcactcatcattttcaacagctctaacaaactgtttcaatatgctagcactgatatggacaaagttcttctcaagtatacagaatataatgaacctcatgaaagcagaaccaactcggatattgtt

SEQ ID NO: 273453 - DNA, 773 bp, Artificial Sequence
  derived and/or modified sequence
cacacacgcacacatcgtctccagctctctgctcgctctgctcgcagtcacagacacttgagcacacgcgtacacccagacatcttcgggctgctattggattgactttgaaggttctgtgtgggtcgccgtggctgcatgtttgaatcaggtggagaagcacttcaacgctggacgaagtaaagattattgttgttattttttttttctctctctctctctcttaagaaaggaaaatatcccaaggactaatctgatcgggtcttccttcatacttcttaggaaaggcagcattttacttcattcattaattgcaccatttacgtcctgattgctgtgcatgtggaatatattgaaagataatattaaagtgaacgaatgcaggaatttgggaactgagctgtgcaagtgctgaagaaggagatttgtttggaggaaacaggaaagagaaagaaaaggaaggaaaaaatacataatttcagggacgagagagagaagaaaaacggggactatggggagaaaaaagattcagattacgaggattatggatgaacgtaacagacaggtgacatttacaaagaggaaatttgggttgatgaagaaggcttatgagctgagcgtgctgtgtgactgtgagattgcgctgatcatcttcaacagcaccaacaagctgttccagtatgccagcaccgacatggacaaagtgcttctcaagtacacggagtacaacgagccgcatgagagccggacaaactcagacatcgtggagacgt

SEQ ID NO: 273454 - DNA, 573 bp, Artificial Sequence
  derived and/or modified sequence
aatttttcataacgggtgaaattgtcacctaatttcattaaaaagattaggaaactttttacaaaaaaaaatacatttcaagtgttagtctttaaaaaagcatagtttgcatcatttaaatgacttgttaaattacttatgagatcattttaattgttaaaaaataaaactacttgatctgctcctgtctgtgatataccatatatttttaacaaaaaagttatttttattcattttattgctttagctccatatagtttatttccttgataaaattagaatatgatagttcttatgaaactgacttgctgttagagtggtatttaatttttcttttttgttcagcaggaacgaatgcaggaatttgggaactgagctgtgcaagtgctgaagaaggagatttgtttggaggaaacaggaaagagaaagaaaaggaaggaaaaaatacataatttcagggacgagagagagaagaaaaacggggactatggggagaaaaaagattcagattacgaggattatggatgaacgtaacagacaggtgacatttacaaagaggaaatttgggttgat

SEQ ID NO: 273455 - DNA, 117 bp, Artificial Sequence
  derived and/or modified sequence
atgggccggaagaagatccagatcacccggatcatggacgagcggaatcgccaggtgaccttcacaaagaggaaattcggattgatgaagaaggcttatgaactcagcgtgttgtag

SEQ ID NO: 273456 - DNA, 234 bp, Artificial Sequence
  derived and/or modified sequence
atgggccggaagaagatccagatcacccggatcatggacgagcggaatcggcaggtaaccttcaccaagaggaagttcggtctcatgaagaaggcgtatgaattgtcggtgctatgcgattgcgagatcgcattaattattttcaatagtagcaacaagttgttccagtacgcctccacagatatggacaaggtgctgctgaagtatacagagtacaatgaaccgcatgagtag

SEQ ID NO: 273457 - DNA, 258 bp, Artificial Sequence
  derived and/or modified sequence
atgggccggaagaagatccagatcacccggatcatggacgagcggaacagacaggtcacttttaccaagcgtaagtttggtcttatgaaaaaggcgtatgagttatctgtgctctgcgattgcgaaattgcactgatcatattcaactcaagtaataaacttttccagtacgctagtacagatatggataaggtcctgctcaagtacacggaatataatgaaccccacgagtcaagaactaactcggatattgtgtag

SEQ ID NO: 273458 - DNA, 264 bp, Artificial Sequence
  derived and/or modified sequence
atgggccggaagaagatccagatcacccggatcatggacgagcggaaccgacaggtgactttcacaaaacggaagtttggattgatgaagaaggcgtacgagttgtctgtgctgtgtgattgcgaaatcgcgctcattatcttcaacagcacaaataagctgttccaatatgcatcaacagatatggacaaggtgcttctaaagtataccgaatataatgagcctcacgagagccggactaattccgatatcgtggagacctag

SEQ ID NO: 273459 - DNA, 87 bp, Artificial Sequence
  derived and/or modified sequence
atgggccggaagaagatccagatcacccggatcatggacgagcggaatcgtcaggtaacattcactaaaagaaaatttggtctgtag

SEQ ID NO: 273460 - DNA, 117 bp, Artificial Sequence
  derived and/or modified sequence
atgggaagaaagaaaattcagattacgcgcattatggatgagagaaaccggcaggtgacatttacaaaacgaaaatttggacttatgaaaaaagcatacgagctcagcgttctctag

SEQ ID NO: 273461 - DNA, 234 bp, Artificial Sequence
  derived and/or modified sequence
atgggtcgaaaaaagattcagataacaagaattatggatgaacggaataggcaggtgacatttacgaaacggaaatttggtcttatgaaaaaagcctacgaactaagtgttttgtgcgattgcgagatcgcattaattattttcaattctagcaataagctgtttcagtatgcttcaactgacatggataaggttctgttaaaatacacggagtacaatgagccccacgaatag

SEQ ID NO: 273462 - DNA, 258 bp, Artificial Sequence
  derived and/or modified sequence
atgggtagaaaaaagatacagattacccgcataatggatgaacgtaatcgacaggtaacctttactaagaggaagtttggcttgatgaagaaggcctacgaactatccgtgctctgcgattgcgagatcgccttaatcattttcaacagcagcaacaagctgttccagtacgcctcaacagacatggataaagtgctacttaagtacaccgaatacaatgaaccacacgaatcccgcaccaacagcgacatcgtatag

SEQ ID NO: 273463 - DNA, 264 bp, Artificial Sequence
  derived and/or modified sequence
atgggacgcaaaaagattcagatcactcgtattatggatgagaggaacagacaggtgacatttactaagcgaaaatttggcctcatgaaaaaggcctatgagttgtcagtgctgtgtgactgcgagatcgccttgattatttttaatagcacaaataaactgttccagtatgcaagcacagacatggacaaagtgttgttgaaatataccgaatacaatgaacctcatgaaagccgaacgaattctgatatagtggagacctag

SEQ ID NO: 273464 - DNA, 87 bp, Artificial Sequence
  derived and/or modified sequence
atgggtcgcaaaaagattcagatcaccaggattatggacgagcgcaatagacaggtgacattcactaagagaaaatttggattgtag

SEQ ID NO: 273465 - DNA, 117 bp, Artificial Sequence
  derived and/or modified sequence
atgggcagaaagaagatccagatcaccagaatcatggacgagagaaacagacaggtgaccttcaccaagagaaagttcggcctgatgaagaaggcctacgagctgagcgtgctgtag

SEQ ID NO: 273466 - DNA, 234 bp, Artificial Sequence
  derived and/or modified sequence
atgggcagaaagaagatccagatcaccagaatcatggacgagagaaacagacaggtgaccttcaccaagagaaagttcggcctgatgaagaaggcctacgagctgagcgtgctgtgcgactgcgagatcgccctgatcatcttcaacagcagcaacaagctgttccagtacgccagcaccgacatggacaaggtgctgctgaagtacaccgagtacaacgagccccacgagtag

SEQ ID NO: 273467 - DNA, 258 bp, Artificial Sequence
  derived and/or modified sequence
atgggcagaaagaagatccagatcaccagaatcatggacgagagaaacagacaggtgaccttcaccaagagaaagttcggcctgatgaagaaggcctacgagctgagcgtgctgtgcgactgcgagatcgccctgatcatcttcaacagcagcaacaagctgttccagtacgccagcaccgacatggacaaggtgctgctgaagtacaccgagtacaacgagccccacgagagcagaaccaacagcgacatcgtgtag

SEQ ID NO: 273468 - DNA, 264 bp, Artificial Sequence
  derived and/or modified sequence
atgggcagaaagaagatccagatcaccagaatcatggacgagagaaacagacaggtgaccttcaccaagagaaagttcggcctgatgaagaaggcctacgagctgagcgtgctgtgcgactgcgagatcgccctgatcatcttcaacagcaccaacaagctgttccagtacgccagcaccgacatggacaaggtgctgctgaagtacaccgagtacaacgagccccacgagagcagaaccaacagcgacatcgtggagacctag

SEQ ID NO: 273469 - DNA, 87 bp, Artificial Sequence
  derived and/or modified sequence
atgggcagaaagaagatccagatcaccagaatcatggacgagagaaacagacaggtgaccttcaccaagagaaagttcggcctgtag

SEQ ID NO: 273470 - protein, 1276 aa, Artificial Sequence
  derived and/or modified sequence
MTWPVKDFNYSDPVNDNDILYLRIPQNKLITTPVKAFMITQNIWVIPERFSSDTNPSLSKPPRPTSKYQSYYDPSYLSTDEQKDTFLKGIIKLFKRINERDIGKKLINYLVVGSPFMGDSSTPEDTFDFTRHTTNIAVEKFENGSWKVTNIITPSVLIFGPLPNILDYTASLTLQGQQSNPSFEGFGTLSILKVAPEFLLTFSDVTSNQSSAVLGKSIFCMDPVIALMHELTHSLHQLYGINIPSDKRIRPQVSEGFFSQDGPNVQFEELYTFGGLDVEIIPQIERSQLREKALGHYKDIAKRLNNINKTIPSSWISNIDKYKKIFSEKYNFDKDNTGNFVVNIDKFNSLYSDLTNVMSEVVYSSQYNVKNRTHYFSRHYLPVFANILDDNIYTIRDGFNLTNKGFNIENSGQNIERNPALQKLSSESVVDLFTKVCLRLTKNSRDDSTCIKVKNNRLPYVADKDSISQEIFENKIITDETNVQNYSDNFSLDESILDGQVPINPEIVDPLLPNVNMEPLNLPGEEIVFYDDITKYVDYLNSYYYLESQKLSNNVENITLTTSVEEALGYSNKIYTFLPSLAEKVNKGVQAGLFLNWANEVVEDFTTNIMKKDTLDKISDVSVIIPYIGPALNIGNSALRGNFKQAFATAGVAFLLEGFPEFTIPALGVFTFYSSIQEREKIIKTIENCLEQRVKRWKDSYQWMVSNWLSRITTQFNHINYQMYDSLSYQADAIKAKIDLEYKKYSGSDKENIKSQVENLKNSLDVKISEAMNNINKFIRECSVTYLFKNMLPKVIDELNKFDLRTKTELINLIDSHNIILVGEVDRLKAKVNESFENTMPFNIFSYTNNSLLKDIINEYFNSINDSKILSLQNKKNALVDTSGYNAEVRVGDNVQLNTIYTNDFKLSSSGDKIIVNLNNNILYSAIYENSSVSFWIKISKDLTNSHNEYTIINSIEQNSGWKLCIRNGNIEWILQDVNRKYKSLIFDYSESLSHTGYTNKWFFVTITNNIMGYMKLYINGELKQSQKIEDLDEVKLDKTIVFGIDENIDENQMLWIRDFNIFSKELSNEDINIVYEGQILRNVIKDYWGNPLKFDTEYYIINDNYIDRYIAPESNVLVLVRYPDRSKLYTGNPITIKSVSDKNPYSRILNGDNIILHMLYNSRKYMIIRDTDTIYATQGGECSQNCVYALKLQSNLGNYGIGIFSIKNIVSKNKYCSQIFSSFRENTMLLADIYKPWRFSFKNAYTPVAVTNYETKLLSTSSFWKFISRDPGWVE

SEQ ID NO: 273471 - protein, 522 aa, Artificial Sequence
  derived and/or modified sequence
MAVNKGLTLLDGDLPEQENVLQRVLQLPVVSGTCECFQKTYTSTKEAHPLVASVCNAYEKGVQSASSLAAWSMEPVVRRLSTQFTAANELACRGLDHLEEKIPALQYPPEKIASELKDTISTRLRSARNSISVPIASTSDKVLGAALAGCELAWGVARDTAEFAANTRAGRLASGGADLALGSIEKVVEYLLPPDKEESAPAPGHQQAQKSPKAKPSLLSRVGALTNTLSRYTVQTMARALEQGHTVAMWIPGVVPLSSLAQWGASVAMQAVSRRRSEVRVPWLHSLAAAQEEDHEDQTDTEGEDTEEEEELETEENKFSEVAALPGPRGLLGGVAHTLQKTLQTTISAVTWAPAAVLGMAGRVLHLTPAPAVSSTKGRAMSLSDALKGVTDNVVDTVVHYVPLPRLSLMEPESEFRDIDNPPAEVERREAERRASGAPSAGPEPAPRLAQPRRSLRSAQSPGAPPGPGLEDEVATPAAPRPGFPAVPREKPKRRVSDSFFRPSVMEPILGRTHYSQLRKKS

SEQ ID NO: 273472 - DNA, 3876 bp, Artificial Sequence
  derived and/or modified sequence
atgccaataacaattaacaactttaattattcagatcctgttgataataaaaatattttatatttagatactcatttaaatacactagctaatgagcctgaaaaagcctttcgcattacaggaaatatatgggtaatacctgatagattttcaagaaattctaatccaaatttaaataaacctcctcgagttacaagccctaaaagtggttattatgatcctaattatttgagtactgattctgacaaagatacatttttaaaagaaattataaagttatttaaaagaattaattctagagaaataggagaagaattaatatatagactttcgacagatataccctttcctgggaataacaatactccaattaatacttttgattttgatgtagattttaacagtgttgatgttaaaactagacaaggtaacaactgggttaaaactggtagcataaatcctagtgttataataactggacctagagaaaacattatagatccagaaacttctacgtttaaattaactaacaatacttttgcggcacaagaaggatttggtgctttatcaataatttcaatatcacctagatttatgctaacatatagtaatgcaactaatgatgtaggagagggtagattttctaagtctgaattttgcatggatccaatactaattttaatgcatgaacttaatcatgcaatgcataatttatatggaatagctataccaaatgatcaaacaatttcatctgtaactagtaatattttttattctcaatataatgtgaaattagagtatgcagaaatatatgcatttggaggtccaactatagaccttattcctaaaagtgcaaggaaatattttgaggaaaaggcattggattattatagatctatagctaaaagacttaatagtataactactgcaaatccttcaagctttaataaatatataggggaatataaacagaaacttattagaaagtatagattcgtagtagaatcttcaggtgaagttacagtaaatcgtaataagtttgttgagttatataatgaacttacacaaatatttacagaatttaactacgctaaaatatataatgtacaaaataggaaaatatatctttcaaatgtatatactccggttacggcgaatatattagacgataatgtttatgatatacaaaatggatttaatatacctaaaagtaatttaaatgtactatttatgggtcaaaatttatctcgaaatccagcattaagaaaagtcaatcctgaaaatatgctttatttatttacaaaattttgtcataaagcaatagatggtagatcattatataataaaacattagattgtagagagcttttagttaaaaatactgacttaccctttataggtgatattagtgatgttaaaactgatatatttttaagaaaagatattaatgaagaaactgaagttatatactatccggacaatgtttcagtagatcaagttattctcagtaagaatacctcagaacatggacaactagatttattataccctagtattgacagtgagagtgaaatattaccaggggagaatcaagtcttttatgataatagaactcaaaatgttgattatttgaattcttattattacctagaatctcaaaaactaagtgataatgttgaagattttacttttacgagatcaattgaggaggctttggataatagtgcaaaagtatatacttactttcctacactagctaataaagtaaatgcgggtgttcaaggtggtttatttttaatgtgggcaaatgatgtagttgaagattttactacaaatattctaagaaaagatacattagataaaatatcagatgtatcagctattattccctatataggacccgcattaaatataagtaattctgtaagaagaggaaattttactgaagcatttgcagttactggtgtaactattttattagaagcatttcctgaatttacaatacctgcacttggtgcatttgtgatttatagtaaggttcaagaaagaaacgagattattaaaactatagataattgtttagaacaaaggattaagagatggaaagattcatatgaatggatgatgggaacgtggttatccaggattattactcaatttaataatataagttatcaaatgtatgattctttaaattatcaggcaggtgcaatcaaagctaaaatagatttagaatataaaaaatattcaggaagtgataaagaaaatataaaaagtcaagttgaaaatttaaaaaatagtttagatgtaaaaatttcggaagcaatgaataatataaataaatttatacgagaatgttccgtaacatatttatttaaaaatatgttacctaaagtaattgatgaattaaatgagtttgatcgaaatactaaagcaaaattaattaatcttatagatagtcataatattattctagttggtgaagtagataaattaaaagcaaaagtaaataatagctttcaaaatacaataccctttaatattttttcatatactaataattctttattaaaagatataattaatgaatatttcaataatattaatgattcaaaaattttgagcctacaaaacagaaaaaatactttagtggatacatcaggatataatgcagaagtgagtgaagaaggcgatgttcagcttaatccaatatttccatttgactttaaattaggtagttcaggggaggatagaggtaaagttatagtaacccagaatgaaaatattgtatataattctatgtatgaaagttttagcattagtttttggattagaataaataaatgggtaagtaatttacctggatatactataattgatagtgttaaaaataactcaggttggagtataggtattattagtaattttttagtatttactttaaaacaaaatgaagatagtgaacaaagtataaattttagttatgatatatcaaataatgctcctggatacaataaatggttttttgtaactgttactaacaatatgatgggaaatatgaagatttatataaatggaaaattaatagatactataaaagttaaagaactaactggaattaattttagcaaaactataacatttgaaataaataaaattccagataccggtttgattacttcagattctgataacatcaatatgtggataagagatttttatatatttgctaaagaattagatggtaaagatattaatatattatttaatagcttgcaatatactaatgttgtaaaagattattggggaaatgatttaagatataataaagaatattatatggttaatatagattatttaaatagatatatgtatgcgaactcacgacaaattgtttttaatacacgtagaaataataatgacttcaatgaaggatataaaattataataaaaagaatcagaggaaatacaaatgatactagagtacgaggaggagatattttatattttgatatgacaattaataacaaagcatataatttgtttatgaagaatgaaactatgtatgcagataatcatagtactgaagatatatatgctataggtttaagagaacaaacaaaggatataaatgataatattatatttcaaatacaaccaatgaataatacttattattacgcatctcaaatatttaaatcaaattttaatggagaaaatatttctggaatatgttcaataggtacttatcgttttagacttggaggtgattggtatagacacaattatttggtgcctactgtgaagcaaggaaattatgcttcattattagaatcaacatcaactcattggggttttgtacctgtaagtgaataa

SEQ ID NO: 273473 - DNA, 1569 bp, Artificial Sequence
  derived and/or modified sequence
atggccgtaaacaagggactgaccctgctcgacggagacctgcctgaacaggaaaatgtgctgcaaagagtgctacagctgccagtggtttcaggaacctgtgagtgcttccagaagacatacacctcaactaaagaggctcatccactggtggctagcgtctgtaacgcttatgagaagggcgttcaaagcgcctccagcctggccgcctggtcgatggagcctgttgttcggaggctgagcacccagttcacggctgcgaatgaactggcctgcagagggctcgaccaccttgaggaaaaaataccagctctccagtatccacccgaaaagattgccagtgagcttaaagatacaatctctacgagactgcgctccgcgagaaacagtattagcgtgcccattgcttctacaagcgacaaggtgctgggggccgcactggccggctgcgaacttgcctggggagtggccagagacacggcagaattcgctgcaaatacacgggcaggccgtcttgcctccggcggtgccgatctggcactcggatctattgagaaggttgtggagtacctcctgcctccggataaggaggaaagcgctcctgcccccgggcaccaacaggcgcaaaagagtcctaaagccaagcctagtctgctttcacgagttggagccctgacaaacaccctatcgcgatacaccgttcagaccatggccagggctctggagcagggtcacacagtcgcgatgtggatccccggtgttgtacccctgagtagcctggcacaatggggagcctccgtagcaatgcaggcagtgtcccgtaggagatccgaagttagggtgccgtggctgcacagcctcgcggcagcccaagaggaagatcacgaagaccagactgatacagagggggaggacaccgaggaggaggaggagcttgagactgaagaaaataagttctctgaagtcgctgctcttcctggcccgcggggtctccttggcggagtcgcccacacactccagaagaccttacagaccaccatttctgccgttacctgggccccagccgcagtgctgggcatggctggcagggtgctgcatcttacacccgcgcctgctgtctcttctaccaaagggcgggccatgtctctgtccgacgccctgaagggcgtgactgataacgtcgttgacaccgtcgtgcattacgtccccctcccgcgcctgtccctaatggagccagaaagcgagtttcgcgatattgacaatccgcccgcagaggtcgaaaggcgggaggcagaaagaagggcctccggcgcaccctccgctggacccgagccagcaccgaggctggcccagcccaggcggtccttgcgaagtgctcaaagcccaggagctccccctggacccggccttgaggacgaagtggcaactccagcagcgccccgaccagggttccccgccgtgccacgtgagaaacccaaacggagggtgagtgattcgttcttcaggccatcggtgatggaaccaatcctggggcgcacccattacagtcagctgaggaaaaaatcttag

SEQ ID NO: 273474 - DNA, 1569 bp, Artificial Sequence
  derived and/or modified sequence
atggctgtgaataaaggattgacgctactggacggcgaccttccagaacaggagaatgtgctgcaacgggttctgcagctgcctgtggtgagtggaacctgcgagtgtttccagaagacctacacttctactaaagaggcgcaccccctagtggctagcgtctgtaacgcttatgaaaagggagtgcagtcagcctcctcactggccgcttggagcatggagcccgtggtcaggaggctgtccacccagttcaccgccgcgaatgaactcgcatgccggggactcgatcatctggaagagaagattcccgccttgcagtatcctcctgaaaagatcgcctcagagctgaaggatacgatttctaccaggctgcggtcagcacgaaattcaatatccgttcccatagcgtctacatctgataaggtcttaggtgccgcccttgccgggtgcgagctggcctggggagtggcccgagacactgccgaattcgcagctaacacccgcgccggacggctagcgagcggaggagcagacctggcgcttggcagtatcgagaaagtggttgaatacctgctcccaccggacaaggaggaatcagccccggcccctggccaccagcaggcacagaagtcaccaaaagctaagccgagcctcctttcaagagtgggagctcttaccaacactctgtccaggtacaccgtgcagaccatggcacgcgctcttgagcaaggacatactgttgctatgtggattcccggtgtcgtccccttgagctcattggcacagtggggcgcttcagttgctatgcaggccgtgtctagacgcagatccgaggttcgggttccctggctgcatagtttggccgcagcccaggaggaggaccacgaggaccagacagacaccgagggcgaagatacagaggaagaggaggaattggagactgaggagaacaaatttagtgaagtcgccgccctgccaggcccacgcggcctgcttggtggggtcgcacacactctgcagaagacccttcagacgacaatcagcgctgttacctgggccccagctgccgtgctgggcatggctggccgggtgttgcatctaacacccgctccagctgtgagttccaccaaaggcagggccatgagtctttctgacgcccttaagggcgtgacagataatgtggtagacacagtggtgcactatgtgccgttaccccggttgtccttaatggaacccgagtccgagttccgggacatcgacaatccacccgcggaggtcgagcgaagagaggcggagcggagagccagtggggccccgagtgctggccctgaacctgcacccaggctggctcaacccagacgcagcttacggtccgcccaaagccctggggcgcctcccggtccagggctggaagatgaggtggccaccccggctgccccacggcctggattcccggccgtcccccgagagaaaccaaaaagaagggtgtccgactctttctttcggccctccgtaatggagcctatactgggcaggactcactattctcagctgcgcaagaaatcctag

SEQ ID NO: 273475 - DNA, 1569 bp, Artificial Sequence
  derived and/or modified sequence
atggctgtgaacaagggcctgaccctgctggatggagacctgcctgagcaggagaatgtgctgcagagggtgctgcagctgcctgtggtgtctggcacctgtgagtgcttccagaagacctacaccagcaccaaggaggcccaccccctggtggcctctgtgtgcaatgcctatgagaagggcgtgcagagcgccagcagcctggccgcctggagcatggagcctgtggtgcggcggctgagcacccagttcaccgctgccaatgagctggcctgccggggcctggaccacctggaggagaagatcccagccctgcagtacccacctgagaagatcgccagcgagctgaaggacaccatcagcacccggctgcggagcgccaggaacagcatctctgtgcccatcgccagcaccagtgacaaggtgctgggcgccgccctggccggctgtgagctggcctggggcgtggcccgggacacagctgagtttgctgccaacaccagggctggccgcctggccagcggcggcgctgacctggccctgggcagcattgagaaggtggtggagtacctgctgcccccagacaaggaggagagcgccccagcccctggccaccagcaggcccagaagagccccaaggccaagcccagcctgctgagccgggtgggcgccctgaccaacaccctgagccgctacacagtgcagaccatggcccgggccctggagcagggccacacagtggccatgtggatccctggggtggtgcccctgagcagcctggcccagtggggcgcctctgtggccatgcaggccgtgtccagaagaagaagtgaggtgcgggtgccctggctgcacagcctggccgccgcccaggaggaggaccacgaggaccagacagacacagaaggagaggacacagaggaggaggaggagctggagacagaggagaacaagttcagcgaggtggccgccctgcccggcccccggggcctgctgggcggcgtggcccacaccctgcagaagaccctgcagaccaccatctctgctgtgacctgggccccagctgctgtgctgggcatggccggccgggtgctgcacctgaccccagccccagctgtgagcagcaccaagggccgggccatgagcctgagtgatgccctgaagggcgtgacagacaacgtggtggacacagtggtgcactacgtgcccctgccccggctgagcctgatggagcctgagagcgagttccgggacatcgacaaccccccagctgaggtggagcggcgggaggccgagcggcgggccagcggggcccccagcgctggccctgagcccgccccccggctggcccagcccaggaggagcctgcggagcgcccagagccctggggcccctcctggccctggcctggaggatgaggtggccaccccagctgccccccggcccggcttccctgctgtgccccgggagaagcccaagagaagagtgtctgacagcttcttccggcccagcgtgatggagcccatcctgggccgcacccactacagccagctgaggaagaagagctag

SEQ ID NO: 273476 - DNA, 1569 bp, Artificial Sequence
  derived and/or modified sequence
atggccgtgaacaagggcctgaccctgctggacggcgacctgcccgagcaagaaaatgtattacagagagttctccagctgcccgtagtttccggaacttgtgagtgctttcagaagacatatacgtctactaaggaggctcatcctctcgtggcatccgtctgcaatgcctacgagaagggagtgcagtccgccagcagtctcgcagcgtggagcatggaaccagtggtgagacgcctctccacgcaattcacagcagcaaatgaactcgcctgccgcggtttggaccaccttgaagaaaagattcccgctctgcagtatccccctgagaaaatagcttctgaattaaaggacaccatttccacccgtctgagaagcgcccgaaatagcatatctgtccctattgctagcactagcgacaaagtgttaggagcagctctcgcaggatgtgaacttgcctggggagtcgcccgtgacactgccgagttcgccgctaacacacgtgccgggcgcctagcctccggcggtgccgaccttgctctaggatcaatcgagaaggtggtggaatacctcctgccacctgacaaggaagagagcgctccagctcccggacatcaacaagcccagaagtcacccaaggccaagccaagcctcctgagtagagtgggcgccctgactaacactctgagtaggtatacagtgcagactatggcaagggccctggagcaagggcacacggttgcgatgtggatccctggggtcgtgccactctctagtctggcccaatggggcgcgtccgtggccatgcaggcagtgtctagaagaagaagcgaagtgcgtgtgccttggctacactcgctcgcggccgcgcaagaagaagatcacgaagaccaaacagatacagagggtgaagacactgaggaagaggaagagctggaaaccgaagagaataagttctcagaggtagccgctctccctggtcctaggggtctgctgggcggcgtggctcacaccctacagaagacactgcagaccactattagcgctgtgacctgggcacccgcagccgtgctaggaatggccggtagagtgctgcacctcactccagccccggccgtctctagtacgaaaggacgggccatgtccctgagcgacgccctcaagggggtaacagacaacgttgtagatactgttgttcattatgtgcccctcccgagactgtcgctcatggagccagagagcgagttccgtgatattgacaatccgcctgcagaagtggaaaggagagaagcggagcggagagcaagtggagccccatctgcgggaccagaacccgccccccggcttgcacagccccgtcgctctctgcgtagcgcacagtcgcccggagccccaccaggccccgggctcgaagacgaagtcgccacccccgctgcacccagaccaggattccctgccgtgccccgggagaaaccaaaaaggcgggtaagtgatagtttttttcgaccgtctgttatggagcccattctcggaagaactcactactcacagctgcggaaaaaatcttag

SEQ ID NO: 273477 - DNA, 1569 bp, Artificial Sequence
  derived and/or modified sequence
atggccgtgaacaagggcctgaccctgctggacggcgacctgcccgaacaggagaatgtgttacagcgcgtcctccagctgcccgtggtttcaggcacttgcgaatgcttccagaaaacttacaccagtaccaaagaggcccaccctctagtggccagcgtgtgcaacgcttatgagaagggggttcagtctgcatcttcacttgcggcctggtctatggagccagtggttcgcagactcagcacccagttcactgcggctaatgaactggcttgcaggggcctggaccacctcgaagaaaagattcccgctctccagtatccacctgagaaaatagcgtctgaactgaaagatactatctctacacggctgcgatcagctcgcaactccatttccgtccccattgcatctacatccgataaagtactgggcgcagctctggctggatgcgagctggcatggggagtagcccgcgacacagccgaatttgccgccaacacgagggccggcaggctggccagcgggggtgctgacctcgcgctgggaagcatcgaaaaggtcgtggagtatctgctgcctccagataaagaagaatctgcccccgcacctgggcatcagcaggcccagaagagtcctaaggcaaagcccagcctgctgagcagggttggggctctgaccaataccctgtccaggtatacagtgcagactatggctagagccttggaacaaggccacactgtcgccatgtggattcccggggttgttcccctgagctcattggcccagtggggcgctagtgtggccatgcaggcagtatctagacggcgctccgaggttcgtgtcccatggttgcatagcctggcagctgcacaggaggaagaccacgaggatcagactgacacggagggggaggatactgaagaagaggaagagctggagaccgaggaaaacaaattctcggaagttgcagccctgccagggcccaggggtttacttgggggcgtcgcccacaccctgcagaagaccctccagacaaccatctcagcggtcacttgggctcctgctgccgtactcggcatggcgggacgggtgctacacctgaccccggcaccagccgtcagctcaacaaaaggtagggcaatgtctctgtctgatgccctgaaaggagtcactgataacgttgttgacactgtggttcactacgtgcccttgccccgcctgagtctcatggagcctgaaagcgagtttagagatatcgacaaccctccagccgaagtggagcggcgggaggctgaaagacgtgcctctggagctccctctgctggaccagaacccgccccccgcctcgctcagccccgacggagccttcgctcagctcagtctccaggggcaccaccaggaccaggcttagaagacgaggtggccactcctgccgcgcctcgcccagggttccctgccgtcccacgggagaaaccgaagagaagagtaagcgactccttttttcgccctagcgtgatggaaccaattctgggcagaacccattactcccaactcaggaagaagtcttag

SEQ ID NO: 273478 - DNA, 2953 bp, Artificial Sequence
  derived and/or modified sequence
caggagtgacaggaattgtttctgcctgaggagacactctgcagcctgggctctgtgagactgaggtggcggtcagccggagtgagtgttggggtcctggggcacctgccttacatggcttgtttatgaacattaaagggaagaagttgaagcttgaggagcgaggatggcagtcaacaaaggcctcaccttgctggatggagacctccctgagcaggagaatgtgctgcagcgggtcctgcagctgccggtggtgagtggcacctgcgaatgcttccagaagacctacaccagcactaaggaagcccaccccctggtggcctctgtgtgcaatgcctatgagaagggcgtgcagagcgccagtagcttggctgcctggagcatggagccggtggtccgcaggctgtccacccagttcacagctgccaatgagctggcctgccgaggcttggaccacctggaggaaaagatccccgccctccagtacccccctgaaaagattgcttctgagctgaaggacaccatctccacccgcctccgcagtgccagaaacagcatcagcgttcccatcgcgagcacttcagacaaggtcctgggggccgctttggccgggtgcgagcttgcctggggggtggccagagacactgcggaatttgctgccaacactcgagctggccgactggcttctggaggggccgacttggccttgggcagcattgagaaggtggtggagtacctcctccctccagacaaggaagagtcagcccctgctcctggacaccagcaagcccagaagtctcccaaggccaagccaagcctcttgagcagggttggggctctgaccaacaccctctctcgatacaccgtgcagaccatggcccgggccctggagcagggccacaccgtggccatgtggatcccaggcgtggtgcccctgagcagcctggcccagtggggtgcctcagtggccatgcaggcggtgtcccggcggaggagcgaagtgcgggtaccctggctgcacagcctcgcagccgcccaggaggaggatcatgaggaccagacagacacggagggagaggacacggaggaggaggaagaattggagactgaggagaacaagttcagtgaggtagcagccctgccaggccctcgaggcctcctgggtggtgtggcacataccctgcagaagaccctccagaccaccatctcggctgtgacatgggcacctgcagctgtgctgggcatggcagggagggtgctgcacctcacaccagcccctgctgtctcctcaaccaaggggagggccatgtccctatcagatgccctgaagggcgttactgacaacgtggtggacacagtggtgcattacgtgccgctccccaggctgtcgctgatggagcccgagagcgaattccgggacatcgacaacccaccagccgaggtcgagcgccgggaggcggagcgcagagcgtctggggcgccgtccgccggcccggagcccgccccgcgtctcgcacagccccgccgcagcctgcgcagcgcgcagagccccggcgcgccccccggcccgggcctggaggacgaagtcgccacgcccgcagcgccgcgcccgggcttcccggccgtgccccgcgagaagccaaagcgcagggtcagcgacagcttcttccggcccagcgtcatggagcccatcctgggccgcacgcattacagccagctgcgcaagaagagctgagtcgccgcaccagccgccgcgccccgggccggcgggtttctctaacaaataaacagaacccgcactgcccaggcgagcgttgccactttcaaagtggtcccctggggagctcagcctcatcctgatgatgctgccaaggcgcactttttatttttattttatttttattttttttttagcatccttttggggcttcactctcagagccagtttttaagggacaccagagccgcagcctgctctgattctatggcttggttgttactataagagtaattgcctaacttgatttttcatctctttaaccaaacttgtggccaaaagatatttgaccgtttccaaaattcagattctgcctctgcggataaatatttgccacgaatgagtaactcctgtcaccactctgaaggtccagacagaaggttttgacacattcttagcactgaactcctctgtgatctaggatgatctgttccccctctgatgaacatcctctgatgatctaggctcccagcaggctactttgaagggaacaatcagatgcaaaagctcttgggtgtttatttaaaatactagtgtcactttctgagtacccgccgcttcacaggctgagtccaggcctgtgtgctttgtagagccagctgcttgctcacagccacatttccatttgcatcattactgccttcacctgcatagtcactcttttgatgctggggaaccaaaatggtgatgatatatagactttatgtatagccacagttcatccccaaccctagtcttcgaaatgttaatatttgataaatctagaaaatgcattcatacaattacagaattcaaatattgcaaaaggatgtgtgtctttctccccgagctcccctgttccccttcattgaaaaccaccacggtgccatctcttgtgtatgcagggctatgcacctgcaggcacgtgtgtatgcactccccgcttgtgtttacacaagctgtggggtgttacgcatgcctgcttttttcacttaataatacagcttggagagatttttgtatcacattataaatcccactcgctctttttgatggccacataataactactgcataatatggatacgccttatttgatttaactagttccctaatgatggacttttaagttgtttcctttttttttcttttttgctactgcaaacgatgctataataaatgtccttatcaaaaatg

SEQ ID NO: 273479 - DNA, 2900 bp, Artificial Sequence
  derived and/or modified sequence
tggaagcagcattgcccaagcctcccaggagtgacaggaattgtttctgcctgaggagacactctgcagcctgggctctgtgagactgaggtggcggtcagccggacttgaggagcgaggatggcagtcaacaaaggcctcaccttgctggatggagacctccctgagcaggagaatgtgctgcagcgggtcctgcagctgccggtggtgagtggcacctgcgaatgcttccagaagacctacaccagcactaaggaagcccaccccctggtggcctctgtgtgcaatgcctatgagaagggcgtgcagagcgccagtagcttggctgcctggagcatggagccggtggtccgcaggctgtccacccagttcacagctgccaatgagctggcctgccgaggcttggaccacctggaggaaaagatccccgccctccagtacccccctgaaaagattgcttctgagctgaaggacaccatctccacccgcctccgcagtgccagaaacagcatcagcgttcccatcgcgagcacttcagacaaggtcctgggggccgctttggccgggtgcgagcttgcctggggggtggccagagacactgcggaatttgctgccaacactcgagctggccgactggcttctggaggggccgacttggccttgggcagcattgagaaggtggtggagtacctcctccctccagacaaggaagagtcagcccctgctcctggacaccagcaagcccagaagtctcccaaggccaagccaagcctcttgagcagggttggggctctgaccaacaccctctctcgatacaccgtgcagaccatggcccgggccctggagcagggccacaccgtggccatgtggatcccaggcgtggtgcccctgagcagcctggcccagtggggtgcctcagtggccatgcaggcggtgtcccggcggaggagcgaagtgcgggtaccctggctgcacagcctcgcagccgcccaggaggaggatcatgaggaccagacagacacggagggagaggacacggaggaggaggaagaattggagactgaggagaacaagttcagtgaggtagcagccctgccaggccctcgaggcctcctgggtggtgtggcacataccctgcagaagaccctccagaccaccatctcggctgtgacatgggcacctgcagctgtgctgggcatggcagggagggtgctgcacctcacaccagcccctgctgtctcctcaaccaaggggagggccatgtccctatcagatgccctgaagggcgttactgacaacgtggtggacacagtggtgcattacgtgccgctccccaggctgtcgctgatggagcccgagagcgaattccgggacatcgacaacccaccagccgaggtcgagcgccgggaggcggagcgcagagcgtctggggcgccgtccgccggcccggagcccgccccgcgtctcgcacagccccgccgcagcctgcgcagcgcgcagagccccggcgcgccccccggcccgggcctggaggacgaagtcgccacgcccgcagcgccgcgcccgggcttcccggccgtgccccgcgagaagccaaagcgcagggtcagcgacagcttcttccggcccagcgtcatggagcccatcctgggccgcacgcattacagccagctgcgcaagaagagctgagtcgccgcaccagccgccgcgccccgggccggcgggtttctctaacaaataaacagaacccgcactgcccaggcgagcgttgccactttcaaagtggtcccctggggagctcagcctcatcctgatgatgctgccaaggcgcactttttatttttattttatttttattttttttttagcatccttttggggcttcactctcagagccagtttttaagggacaccagagccgcagcctgctctgattctatggcttggttgttactataagagtaattgcctaacttgatttttcatctctttaaccaaacttgtggccaaaagatatttgaccgtttccaaaattcagattctgcctctgcggataaatatttgccacgaatgagtaactcctgtcaccactctgaaggtccagacagaaggttttgacacattcttagcactgaactcctctgtgatctaggatgatctgttccccctctgatgaacatcctctgatgatctaggctcccagcaggctactttgaagggaacaatcagatgcaaaagctcttgggtgtttatttaaaatactagtgtcactttctgagtacccgccgcttcacaggctgagtccaggcctgtgtgctttgtagagccagctgcttgctcacagccacatttccatttgcatcattactgccttcacctgcatagtcactcttttgatgctggggaaccaaaatggtgatgatatatagactttatgtatagccacagttcatccccaaccctagtcttcgaaatgttaatatttgataaatctagaaaatgcattcatacaattacagaattcaaatattgcaaaaggatgtgtgtctttctccccgagctcccctgttccccttcattgaaaaccaccacggtgccatctcttgtgtatgcagggctatgcacctgcaggcacgtgtgtatgcactccccgcttgtgtttacacaagctgtggggtgttacgcatgcctgcttttttcacttaataatacagcttggagagatttttgtatcacattataaatcccactcgctctttttgatggccacataataactactgcataatatggatacgccttatttgatttaactagttccctaatgatggacttttaagttgtttcctttttttttcttttttgctactgcaaacgatgctataataaatgtccttatc

SEQ ID NO: 273480 - DNA, 1569 bp, Artificial Sequence
  derived and/or modified sequence
atggccgtgaacaagggcttgactctccttgatggtgacctccctgagcaagagaatgttctacagagggttctccagctgcctgttgtgtcaggcacgtgtgagtgttttcaaaaaacctatacctcaaccaaagaagcccacccactggttgcaagcgtttgcaatgcctacgagaagggagtccaaagtgctagctcccttgcggcttggagtatggagccggtggtccggcgtctgagcactcaatttaccgcagctaacgaactggcttgtaggggtctggatcacctcgaggagaagatcccggctctacagtatccccctgagaagattgcatctgagcttaaggacacaatcagcactcggctgaggagcgccagaaactccatttcggttcctatcgccagtacaagcgataaagttctgggcgcagctctagcgggatgcgagttagcctggggggtggccagagacaccgcggagttcgccgcaaacacccgtgcagggcgtctcgctagtggaggggctgacctggcgctgggctccattgaaaaggtcgtggagtacttattgccacctgacaaagaagagtcggctccggcacccggtcatcagcaagcccagaagtccccaaaagctaaaccttcactgctatcaagagtgggtgccctgacgaacacactctcaaggtacactgtccaaacgatggcccgtgccctagagcaggggcacacagtggcaatgtggatccctggcgtggtgccattgagttctcttgcacagtggggcgcatctgtagcaatgcaggcagtgtctcggagaagatcagaggtgcgcgtcccctggctacacagcttggccgcagcccaggaagaggatcacgaggatcagaccgatactgagggagaagataccgaagaggaggaggaactagaaaccgaagaaaataaatttagtgaggtggcagcacttcctggacccagggggttgctcgggggtgtcgcccacaccttacagaaaacactgcagacgactatctctgctgttacttgggcacccgctgcagtgctcggaatggcaggcagagtgcttcacctgactccagcaccagccgtgtcatccaccaagggacgcgctatgtccctgtccgatgccctgaagggtgtcaccgacaatgtcgtcgatactgtggtgcactacgtacctctccctcgactgtcactcatggaacccgaaagcgaattccgggacattgacaatccccctgccgaagtggaacgcagggaggcggaacggagagctagtggggctccctcagccggacccgaaccagctcccaggttagcacagccacgacgaagtctcagatccgcccaatctcccggagcgccaccgggacccggactggaggacgaagtggcaacccccgcagccccaaggcctggctttccagcggtgcctagggaaaaaccaaagagaagggtgtccgacagctttttcaggccgtctgtgatggagcctattcttggcaggactcattacagtcagctgagaaaaaaatcatag

SEQ ID NO: 273481 - DNA, 1569 bp, Artificial Sequence
  derived and/or modified sequence
atggcagtgaataaagggcttacactcctagacggcgatctccccgagcaggaaaatgttttgcagcgggttctgcagcttccagtggtgagcggaacgtgtgagtgttttcagaaaacctatacttctactaaggaggctcaccccctcgttgcgtctgtttgtaatgcctacgaaaaaggcgttcagagcgcctcaagtctggctgcttggtcaatggagcctgtcgtgagacgcctgagtacccagttcaccgctgccaatgaactcgcctgtcgtgggctggatcacctagaggaaaaaattcctgcacttcaataccccccagaaaagattgcaagcgaacttaaagacacaatcagcaccagactgcgcagtgctcggaatagcatttccgtccctatcgcaagcactagcgacaaggtccttggtgcggcactggccggatgtgaactcgcatggggagtcgctcgggatacagccgaattcgccgcaaacaccagagcaggcaggttagcttcgggcggtgctgacctcgctctgggcagtattgaaaaagtggtcgaatatcttctgccccctgataaggaggagtcggccccagccccaggacaccagcaggcacagaaatcacccaaggccaagcccagcttgctgagtcgtgtgggggcactaacaaacaccttgtcacgatataccgtgcagaccatggctagagctttggaacaggggcacaccgtcgccatgtggatacctggggtggtgcctctcagctctctggcccagtggggtgcttcggtggccatgcaggccgtgtctcgcaggcgaagtgaagttcgtgtcccttggctgcacagcctggcagccgctcaggaggaggaccatgaggaccagactgacacagagggagaggacacggaggaggaggaggaacttgagacggaggagaacaaattctcagaagtggccgcattaccaggacctagggggctgcttgggggagtcgcccacacactccaaaagactctccaaaccacgatctccgccgttacttgggccccagccgctgtgctaggcatggccggtcgtgttcttcaccttacccctgctcctgccgtatcatcaacaaaaggaagagcaatgtccctcagcgatgccctaaagggtgtaaccgacaatgtggtagacaccgtggtgcactacgtgcccctgccccgactgtctctcatggaacccgagtcagagtttcgggacatcgacaatcctcctgcagaagtggaaagaagagaagccgagcggcgtgctagcggcgctccatctgccggaccggagcccgctccgaggttagcacagcccaggcgctcccttaggtccgcacaatctcctggagccccacctgggcctggcctggaagacgaggtcgccaccccggctgctcctcgtccaggcttccctgcagtgccgagggaaaaacctaaacggagagtttcagacagtttttttcggccatctgtcatggaaccaattctgggcaggactcattactcacagctccggaagaaatcctag

SEQ ID NO: 273482 - DNA, 1569 bp, Artificial Sequence
  derived and/or modified sequence
atggccgtgaacaagggcctgaccctgctggacggcgacctgcccgagcaggagaacgtgctgcagagagtgctgcagctgcccgtggtgagcggcacctgcgagtgcttccagaagacctacaccagcaccaaggaggcccaccccctggtggccagcgtgtgcaacgcctacgagaagggcgtgcagagcgccagcagcctggccgcctggagcatggagcccgtggtgagaagactgagcacccagttcaccgccgccaacgagctggcctgcagaggcctggaccacctggaggagaagatccccgccctgcagtacccccccgagaagatcgccagcgagctgaaggacaccatcagcaccagactgagaagcgccagaaacagcatcagcgtgcccatcgccagcaccagcgacaaggtgctgggcgccgccctggccggctgcgagctggcctggggcgtggccagagacaccgccgagttcgccgccaacaccagagccggcagactggccagcggcggcgccgacctggccctgggcagcatcgagaaggtggtggagtacctgctgccccccgacaaggaggagagcgcccccgcccccggccaccagcaggcccagaagagccccaaggccaagcccagcctgctgagcagagtgggcgccctgaccaacaccctgagcagatacaccgtgcagaccatggccagagccctggagcagggccacaccgtggccatgtggatccccggcgtggtgcccctgagcagcctggcccagtggggcgccagcgtggccatgcaggccgtgagcagaagaagaagcgaggtgagagtgccctggctgcacagcctggccgccgcccaggaggaggaccacgaggaccagaccgacaccgagggcgaggacaccgaggaggaggaggagctggagaccgaggagaacaagttcagcgaggtggccgccctgcccggccccagaggcctgctgggcggcgtggcccacaccctgcagaagaccctgcagaccaccatcagcgccgtgacctgggcccccgccgccgtgctgggcatggccggcagagtgctgcacctgacccccgcccccgccgtgagcagcaccaagggcagagccatgagcctgagcgacgccctgaagggcgtgaccgacaacgtggtggacaccgtggtgcactacgtgcccctgcccagactgagcctgatggagcccgagagcgagttcagagacatcgacaacccccccgccgaggtggagagaagagaggccgagagaagagccagcggcgcccccagcgccggccccgagcccgcccccagactggcccagcccagaagaagcctgagaagcgcccagagccccggcgccccccccggccccggcctggaggacgaggtggccacccccgccgcccccagacccggcttccccgccgtgcccagagagaagcccaagagaagagtgagcgacagcttcttcagacccagcgtgatggagcccatcctgggcagaacccactacagccagctgagaaagaagagctag

SEQ ID NO: 273483 - protein, 757 aa, Artificial Sequence
  derived and/or modified sequence
MKVFCEVLEELYKKVLLGATLENDSHDYIFYLNPAVSDQDCSTATSLEWANTCGIQGRHQPISVGVAPIAVAPVCLKTNSQMSGSREVMLLQLTVIKVMTTRILSVKTEFHAKEQYRDVIKILLESAKVDSKLICMFQNSDKLLSHMAAQCLALLLYFQLREKITLSNSWIAFCQKNLSEYSESNKAIYCLWTLTAIIKEIFKDSCSQKTEILKQFLTHFDTIFEVFYNSLFSQHFENCRDTSKIVNILMCFLDLLELLIASRIHLKLHFTCQRILFLKPSCMLEVITWPIQAFVKRKVIIFLKKCLLCKVGEDLCRGSVPALMPPDHHVAVDMLALANAVLQAVNSGLLKTLSVYEKHSFFGGDEVQPECELITSPDHVILRAASLVIMKSLEIKFQNYSSASEVKVDLQRFMSELLTFLKPHLQPSLQLHNPCKWLSRVFIEQDDDMLEAAKASLGIYLTLTRGCEATESLTQGKEMWDHHTHENGYNPHCIFLFFLKNIGFDSTVLLDFLISSETCFLEYFVRYLKLLQKDWDNFFTICNNFDATESKYDISICGCVPSLVQDQSSNQTIPHRLTAPHSHRDVCARHSWASDAPSEPLKAVMSKGAHTMCASSLSSPRASQSLVDYDSSDDSDVESTEQCLANSKQTSLHQQATKEIQDAAGTSRDKKEFSLEPPSRPLVLKEFDTAFSFDCEVAPNDVVSEVGIFYRIVKCFQELQDAICRLQKKNLFPYNPTALLKLLKYIEVISNKTMNTL

SEQ ID NO: 273484 - DNA, 2274 bp, Artificial Sequence
  derived and/or modified sequence
atgaaggtgttctgcgaggtgctggaggagctgtacaagaaggtgctgctgggcgccaccctggagaacgacagccacgactacatcttctacctgaaccccgccgtgagcgaccaggactgcagcaccgccaccagcctggagtgggccaacacctgcggcatccagggcagacaccagcccatcagcgtgggcgtggcccccatcgccgtggcccccgtgtgcctgaagaccaacagccagatgagcggcagcagagaggtgatgctgctgcagctgaccgtgatcaaggtgatgaccaccagaatcctgagcgtgaagaccgagttccacgccaaggagcagtacagagacgtgatcaagatcctgctggagagcgccaaggtggacagcaagctgatctgcatgttccagaacagcgacaagctgctgagccacatggccgcccagtgcctggccctgctgctgtacttccagctgagagagaagatcaccctgagcaacagctggatcgccttctgccagaagaacctgagcgagtacagcgagagcaacaaggccatctactgcctgtggaccctgaccgccatcatcaaggagatcttcaaggacagctgcagccagaagaccgagatcctgaagcagttcctgacccacttcgacaccatcttcgaggtgttctacaacagcctgttcagccagcacttcgagaactgcagagacaccagcaagatcgtgaacatcctgatgtgcttcctggacctgctggagctgctgatcgccagcagaatccacctgaagctgcacttcacctgccagagaatcctgttcctgaagcccagctgcatgctggaggtgatcacctggcccatccaggccttcgtgaagagaaaggtgatcatcttcctgaagaagtgcctgctgtgcaaggtgggcgaggacctgtgcagaggcagcgtgcccgccctgatgccccccgaccaccacgtggccgtggacatgctggccctggccaacgccgtgctgcaggccgtgaacagcggcctgctgaagaccctgagcgtgtacgagaagcacagcttcttcggcggcgacgaggtgcagcccgagtgcgagctgatcaccagccccgaccacgtgatcctgagagccgccagcctggtgatcatgaagagcctggagatcaagttccagaactacagcagcgccagcgaggtgaaggtggacctgcagagattcatgagcgagctgctgaccttcctgaagccccacctgcagcccagcctgcagctgcacaacccctgcaagtggctgagcagagtgttcatcgagcaggacgacgacatgctggaggccgccaaggccagcctgggcatctacctgaccctgaccagaggctgcgaggccaccgagagcctgacccagggcaaggagatgtgggaccaccacacccacgagaacggctacaacccccactgcatcttcctgttcttcctgaagaacatcggcttcgacagcaccgtgctgctggacttcctgatcagcagcgagacctgcttcctggagtacttcgtgagatacctgaagctgctgcagaaggactgggacaacttcttcaccatctgcaacaacttcgacgccaccgagagcaagtacgacatcagcatctgcggctgcgtgcccagcctggtgcaggaccagagcagcaaccagaccatcccccacagactgaccgccccccacagccacagagacgtgtgcgccagacacagctgggccagcgacgcccccagcgagcccctgaaggccgtgatgagcaagggcgcccacaccatgtgcgccagcagcctgagcagccccagagccagccagagcctggtggactacgacagcagcgacgacagcgacgtggagagcaccgagcagtgcctggccaacagcaagcagaccagcctgcaccagcaggccaccaaggagatccaggacgccgccggcaccagcagagacaagaaggagttcagcctggagccccccagcagacccctggtgctgaaggagttcgacaccgccttcagcttcgactgcgaggtggcccccaacgacgtggtgagcgaggtgggcatcttctacagaatcgtgaagtgcttccaggagctgcaggacgccatctgcagactgcagaagaagaacctgttcccctacaaccccaccgccctgctgaagctgctgaagtacatcgaggtgatcagcaacaagaccatgaacaccctgtag

SEQ ID NO: 273485 - DNA, 2274 bp, Artificial Sequence
  derived and/or modified sequence
atgaaggtgttttgcgaagtgctggaagaactctacaagaaagtccttcttggtgccacccttgaaaacgactcccacgactacatcttctacctgaacccagctgtgagcgaccaggactgttccacggccaccagccttgaatgggccaacacctgcggaatccagggtcggcatcaacccatctccgtgggggtcgcacccatcgccgttgcccctgtgtgtctgaagacaaattcccagatgagtggttcccgagaggtcatgctccttcagttaactgtgattaaggtgatgacaactaggatactgagtgtcaagacagagtttcatgcgaaagagcagtaccgagatgtcattaaaattctcctggaatccgccaaagtggactctaaactcatctgcatgttccagaactcagataagctgctatcgcacatggctgcccagtgtctggccctgttactgtatttccagctcagggagaaaatcacactctccaattcctggattgccttttgtcaaaagaatctatcagaatacagtgaatccaacaaagccatttactgcctgtggacattaaccgccattatcaaggagatcttcaaggatagctgtagccagaagaccgagatattgaagcagtttttgacccactttgacacaatctttgaagtgttctataatagcctgtttagccagcatttcgagaactgcagagacaccagcaaaatagtgaacatccttatgtgcttcctggacctgttggagctgttgattgcgtctcgcattcatcttaagttgcactttacttgtcagcgaattcttttcctgaagcccagctgcatgctggaggttattacctggcctatacaggcttttgtcaagaggaaggtcataatcttcctgaagaagtgcctcctgtgtaaggtgggcgaagatctctgccgcggcagcgtaccggcccttatgcctccggatcaccatgtggccgttgatatgctggccctggccaatgccgttcttcaggccgttaatagcggcctcctcaaaactctgtctgtatatgaaaagcatagcttcttcgggggcgacgaggtgcagcctgagtgtgaactcatcacatctcccgaccacgttatcctgagggcggcctctttggtgatcatgaagagtctggaaatcaagttccaaaattattccagcgcctccgaagtgaaggtggaccttcaacggttcatgtcagaactgctcacattcctgaagccacacctgcaaccttctctccagctgcataacccttgtaagtggctgtccagagtattcatcgaacaggacgatgacatgctcgaggccgcaaaggcttctcttggcatttatcttaccctcacacggggctgtgaggctacagagtccctaacacaggggaaggagatgtgggatcatcatacccatgagaatggttacaatccccactgcatttttcttttttttctcaagaacatagggtttgacagtactgtactcttggactttttaatctcatctgagacttgctttcttgagtactttgtgagatacttgaaattgctgcagaaagactgggataatttctttactatatgtaacaacttcgatgctactgagtctaagtacgatatctcaatctgcggctgcgtgcccagcctggtgcaggaccaaagttctaatcagacaataccccataggttgacagctccgcacagccatagggatgtctgcgcaaggcactcctgggccagcgacgctccatcagaacctctgaaagccgttatgagcaaaggcgcccatactatgtgcgccagttctcttagttctccacgggcttcacaatctctagtagactatgactcttctgacgattctgacgtggagtccactgagcagtgtctcgccaactctaaacaaaccagtttgcatcagcaggctacaaaagaaatccaggacgccgcaggcacctccagagataagaaggaattctccctggagccaccgtcccgcccattagtgttgaaagaattcgatacagctttttcttttgattgcgaagttgcgccgaatgacgtagtgagtgaggtcgggattttctacagaattgtgaagtgttttcaggagctgcaagatgcaatatgtagactgcagaagaaaaatttgttcccctataatccgacagcacttctaaaacttctgaaatacatcgaggtcattagtaataaaaccatgaatacgctctag

SEQ ID NO: 273486 - DNA, 2274 bp, Artificial Sequence
  derived and/or modified sequence
atgaaggtgttctgtgaggtgctggaggagctgtacaagaaggtgctgctgggcgccaccctggagaatgacagccatgactacatcttctacctgaacccagctgtgtctgaccaggactgcagcacagccaccagcctggagtgggccaacacctgtggcatccagggccgccaccagcccatctctgtgggcgtggcccccatcgctgtggcccctgtgtgcctgaagaccaacagccagatgagcggcagccgggaggtgatgctgctgcagctgaccgtcatcaaggtgatgaccacccgcatcctgtctgtgaagacagagttccacgccaaggagcagtacagagatgtgatcaagatcctgctggagagcgccaaggtggacagcaagctgatctgcatgttccagaacagcgacaagctgctgagccacatggccgcccagtgcctggccctgctgctgtacttccagctgcgggagaagatcaccctgagcaacagctggatcgccttctgccagaagaacctgtctgagtacagcgagagcaacaaggccatctactgcctgtggaccctgacagccatcatcaaggagatcttcaaggacagctgcagccagaagacagagatcctgaagcagttcctgacccactttgacaccatctttgaggtgttctacaacagcctcttcagccagcactttgagaactgccgggacaccagcaagatcgtgaacatcctgatgtgcttcctggacctgctggagctgctgattgccagccgcatccacctgaagctgcacttcacctgccagaggatcctcttcctgaagcccagctgcatgctggaggtgatcacctggcccatccaggcctttgtgaagaggaaggtgatcatcttcctgaagaagtgcctgctgtgcaaggtgggggaggacctgtgccggggctctgtgcctgccctgatgcccccagaccaccacgtggccgtggacatgctggccctggccaatgctgtgctgcaggccgtgaacagcggcctgctgaagaccctgtctgtgtatgagaagcacagcttctttggaggagatgaggtgcagccagaatgtgagctgatcaccagcccagaccacgtgatcctgcgggccgccagcctggtgatcatgaagagcctggagatcaagttccagaactacagcagcgccagcgaggtgaaggtggacctgcagcgcttcatgtctgagctgctgaccttcctgaagccccacctgcagcccagcctgcagctgcacaacccctgcaagtggctgagcagggtcttcatcgagcaggatgatgacatgctggaggccgccaaggccagcctgggcatctacctgaccctgacccggggctgtgaggccacagagagcctgacccagggcaaggagatgtgggaccaccacacccatgaaaatggctacaacccccactgcatcttcctgttcttcctgaagaacatcggctttgacagcacagtgctgctggacttcctgatcagcagcgagacctgcttcctggagtactttgtgcgctacctgaagctgctgcagaaggactgggacaacttcttcaccatctgcaacaactttgatgccacagagagcaaatatgacatcagcatctgtggctgtgtgcccagcctggtgcaggaccagagcagcaaccagaccatcccccaccggctgacagccccccacagccacagagatgtgtgtgcccggcacagctgggccagtgatgcccccagcgagcccctgaaggctgtgatgagcaaaggagcccacaccatgtgtgccagcagcctgagcagcccccgggccagccagagcctggtggactatgacagcagtgatgacagtgatgtggagagcacagagcagtgcctggccaacagcaagcagaccagcctgcaccagcaggccaccaaggagatccaggatgctgctggcaccagccgggacaagaaggagttcagcctggagccccccagccggcccctggtgctgaaggagtttgacacagccttctcctttgactgtgaggtggccccaaatgatgtggtgtctgaggtgggcatcttctaccgcatcgtgaagtgcttccaggagctgcaggatgccatctgccgcctgcagaagaagaacctcttcccctacaaccccacagccctgctgaagctgctgaagtacatcgaggtgatcagcaacaagaccatgaacaccctgtag

SEQ ID NO: 273487 - DNA, 4821 bp, Artificial Sequence
  derived and/or modified sequence
ctctgcgcatgcgggaggaggtgccagcttgtactttctgtgaactacggtggcccagagcgggcatttgtgttccctcaaatggcggtgtgaagagagttcgcctgagccagatcccaggtttcactgaagaaacttcttagagattcattgcacttctgagatttaatgtttacaacttggagttgtcgaccttcttataagatacattttggaagtcaaaatgaaagttttctgtgaagttttagaagagttatacaagaaggtacttcttggagccacacttgaaaatgacagccatgattacatcttttatctcaacccagcagtttcagatcaagattgttctacagccacctccttagaatgggcaaacacctgtggtatccagggcaggcatcagcccatctctgttggtgtggctcccattgctgtagcacctgtgtgtttgaagaccaactctcagatgagcggttccagagaagtaatgctccttcagttaacagtgatcaaagtgatgacaacccggatattgtctgtcaaaaccgagttccatgcaaaggagcagtacagagatgtaattaaaattctcttagaatcagccaaagtcgattctaaattaatctgcatgttccaaaattcagataaattgttatctcacatggctgcacagtgccttgcattgcttctatatttccaattgagagaaaagataaccttaagtaattcctggattgctttttgccagaaaaatctttctgaatactctgagagtaataaagcaatatactgcctctggactcttacagcaataataaaagaaatctttaaagattcatgttcacagaaaacagaaattctaaagcagttcctgactcatttcgacaccatttttgaagtgttttacaattccttattctctcagcattttgaaaactgccgggatacttctaaaatagtaaacatcctgatgtgtttcctggatttgcttgagcttctcatcgcctccagaatccacctgaagttacatttcacttgccagaggattttatttttgaaaccatcttgcatgctagaagttattacctggcctattcaggcttttgttaaaaggaaggtcatcatattcctcaaaaagtgccttctctgtaaagtgggtgaagacctctgtcgtggatctgtgcctgccttaatgccgccagaccatcatgtagcggtggacatgctggctttagctaatgctgttttgcaagctgtgaattcggggttgttgaagacactgtctgtttatgaaaaacattccttttttggaggtgatgaagttcaacctgaatgtgaacttatcactagtccagatcatgtgatccttagagcagcaagcttagttataatgaaatccttagaaatcaagtttcaaaattattcttcagcaagtgaagtgaaagttgacttacagaggttcatgtctgagttactgaccttcttaaagcctcatcttcagccctctctgcaattacacaatccgtgcaaatggctgtctcgggttttcatagaacaagacgatgacatgctggaggctgccaaggcatcactgggcatctacttaacactgaccagaggatgtgaagccactgaaagcttgactcagggaaaagaaatgtgggaccatcacacacatgaaaatggctataatcctcactgtattttcttgttcttcttgaaaaatataggatttgattccacagttcttcttgactttttgatttcatcagaaacctgttttcttgaatattttgttagatatttaaaattactgcaaaaggactgggataattttttcaccatttgcaataactttgatgcaactgaatctaaatatgacataagtatttgtggctgtgtcccctcacttgtccaagaccaaagctccaaccaaacaataccccatcgtttgactgctcctcatagtcacagagatgtgtgtgctcggcactcctgggcttccgatgctccctctgaaccactgaaagctgtgatgtccaagggggctcacaccatgtgtgcttctagtctgtcttccccccgggcctctcaaagtctggtagattacgacagctctgacgattctgacgtggaatccacagagcagtgtttagctaacagtaaacagacatctttacaccagcaagcaactaaggagattcaggatgcagctgggacaagcagggataaaaaagaatttagccttgagcctccatcaaggcctctggttctgaaagaatttgatactgccttctcctttgattgtgaagtagccccaaatgatgtcgtctctgaagtgggaatattttacagaatagtaaaatgcttccaggaactacaagatgccatctgccgtttgcaaaagaaaaatcttttcccatataatccaactgcacttttgaagttgttaaaatacatagaggtgataagtaataaaactatgaacactttgtaaaacattgacattttattttccaggtattgtttttccttaatataaattatgtctcaatgaggtaatagtataaaatcatcaccataaaagggttttcttttttttttttttttttgagacagaatctcattctgtcgctcaggccggagtgcagtggcgtgactcgactcactgcaacctccacctcctgggttcaagcaattctcctgcctcagtctcccgagtagctggaattacaggtgcccgccaccacgcccagctaatttttgtatttttagtagagacgggggtttcaccatgttgccaggctggtctcaaactcctgacctcaagtgatccgcctgtccgccctcccgaagtgctgggattacaggcatgagccactgtgcccggctgggttttctagacaagttcttactttttgccttattggaagcaacctagtgactgaaaaagagacatcaagtgacaagtcactcattatagctatataccactggagatttatggcagttctaagtgacacaaaatcgggggtggtgattgcgttcctcagctagggctgccgtaacaacttgccacgtgtgccgcagcttcagacacctggaattatcctcatagttttggaggccagaatccaaactcaggcttcagcagggcaatgccctcagggtctggagaagaatcccaccctgcccctttctggcttctggtggcagccagccagccatggtgtcccttgtcttgtagtggcgtcactccagttcctgcctcacatggcattttcctgtgtctgtgtccagtttccctcctacaaggacatcggtcattggactaggacctaccctcatccagtatgatctcaacttgatgacagctgcaaagaccctaatcccagatatggccactttcatgtgtccttgatggacttgaatccaggagagtcactaaccaaatacagttactatttccttctggggtatttacacagaaagcgatatattacaaatgtaaaatcttagccgtttctttgagaagtgattatacctggcctactgtatgaacatgattctttctaaaaaaaaatttaatcactaattttcctatttaaaattgtgacatgaataattatgttccatattcttgaggggaagccgtaaattccattgtaatatgtttgtgtaataggagcaatagctatattgtgctgcgaagtctggcattaaggcagtctaaaatattgcctgtacatttttttttaatgatctctttgcagagaaacagaacaaagactaaacctaccgcacattaaaatatatattaaggctatggtattcgaaacagtttagtacttaattcaggtagacatggaaaaatcagtggagctaaatagaaggttgccgattaaaataacagcgaagtaccagtgttagccaaatagcaatgcaaaggtcaaaaggtttgcgttttaacatgctgtcggtgaggctatgcgttaaggcagtttctaccgtaattgaaaaagcacgtcaaagaatgtgtattcaaggatgccacatagtttgtaaaaaatgttaaggttttagagttttactagaaatacctggtaaagtaagtcagaatttgtatagtcagtggaatggtagatgcgttctatgcacgtttgtggatgtgaaacatctccagtaaaaaacaagtaaatacatggggcttgcaattatttagggaaagaagcagggcgggagtaatacacattcatatatatgcttttgtgcatgtataaaatatgtatgtaagactacataagaaagtcataatagtggttgccttgggagacaggtctgatgtggaagacaaagtctcatctttttgtactatttttagtgggatacatgcagcactgcattaggatgtttcaataacagaccacatagtacagtggtcccataagactatcaagccgttatttttactgtgactgtcctatgtttaggcatgtttagatacacgcatacttactattgtgttacagttgcctacagtattcagtacagtaacatgctgtgtacaggtttgtagcctaggagcaatgggctataccatatagcctaggtgtgtagtaggctatgccatctaggtttgttgagtatactctgtgacatacatgacatgacaacaaaattgccttacagctcatttctcagaacatgtccctgtcatgtgacacatggctgttttttgatggaaataactgggaaaaaaaaatcgactcttgttcctaagggtacataaatgttgaatgcattataactcatgcttatgca

SEQ ID NO: 273488 - DNA, 2274 bp, Artificial Sequence
  derived and/or modified sequence
atgaaggtgttctgcgaggtgctggaggagctgtacaagaaggtgctcttgggtgccacactggagaacgattctcacgactatattttttatctcaaccccgctgtgagcgaccaggactgcagtaccgcgacttcattagagtgggccaacacctgcggaattcagggccgacaccagccgattagcgtgggcgtggcaccaatagcggttgccccagtgtgtctcaagacaaattcccagatgagcggctcccgagaagtgatgctgctccaactgaccgttataaaggtgatgacaactaggatcctgtccgtcaaaacggaatttcacgccaaggaacagtacagagatgttatcaagatacttcttgaatcagccaaggtcgacagcaaactgatctgcatgttccagaacagcgacaagctattgtcgcacatggccgcacagtgcttggcacttctgctgtacttccagctccgtgagaaaatcaccctgtccaatagctggattgccttctgtcagaagaacctcagcgagtattctgaaagcaacaaggccatctattgtctgtggacactaactgcgatcataaaggagatatttaaagatagctgctcccagaaaacagagatcttgaagcagttcctgactcattttgacactatctttgaggtcttttacaacagtctgttctcacagcattttgaaaattgccgggatacctcaaaaatcgtaaacatccttatgtgttttctcgacctacttgaactgcttatcgcctcacgcatccatttgaagctgcactttacctgccaacgtatcctgtttctgaaaccaagttgcatgctggaagttattacctggccaatccaggcatttgtgaaacgcaaagtgatcatcttcctgaagaaatgtctcctctgtaaggtgggtgaggacctgtgtcgaggatcagtaccagccttgatgccaccagatcaccacgttgccgttgacatgttggctctggctaacgccgtgctgcaagcagtcaacagcggactgctcaaaacgctgtcggtgtacgagaagcattctttctttgggggcgatgaggtccagcccgaatgcgaactgatcaccagtccagaccatgtgatactgagggccgcctcattggttattatgaaaagtctggaaatcaagttccagaactactctagcgcatcagaagtgaaggtggatctgcagagattcatgagtgagttgcttaccttcttgaagccgcatctgcagccttccctgcagttacacaacccctgtaagtggctgtcgcgggtcttcatagaacaggacgacgacatgctcgaagctgccaaagcaagcctaggcatttacctgaccctgaccaggggatgcgaagccacagagtctcttacacagggcaaggagatgtgggaccaccacacacacgagaatggctacaaccctcactgcattttcctgttttttctgaagaacattggattcgactcaacggttctccttgatttccttattagttcggagacatgcttcctggaatatttcgtccggtacctcaaacttcttcagaaggattgggacaacttcttcactatttgtaacaacttcgatgccaccgaaagcaagtacgatatttctatctgtggctgtgttccctcattggtgcaagatcagtcatctaatcagaccatccctcacaggctgacagcaccacactcccatcgggacgtgtgcgcaagacattcctgggcgtctgatgcacctagtgaacccctaaaggccgtcatgagtaagggagcccatacgatgtgcgccagtagcctgagtagtcctcgcgcatcccaaagtttagtagattatgattcttcagatgattcagacgtagaatctacagaacagtgcctggcaaacagtaagcagacctcattgcaccaacaggcgactaaagaaatccaagacgctgctggaacaagcagagataaaaaggagttctctctggaacccccaagcaggcccctggtgcttaaggaattcgatacggctttcagctttgactgcgaggtagcccccaacgacgtagtctctgaggtcggcatcttctaccgaatcgtaaagtgcttccaggagctgcaggatgcaatttgtcggctacagaagaaaaatctgtttccctataatccaacggccctgttgaaactccttaagtacattgaagtgattagcaataaaaccatgaacacgctgtag

SEQ ID NO: 273489 - DNA, 2274 bp, Artificial Sequence
  derived and/or modified sequence
atgaaggtgttttgtgaggtcttggaggaactgtataaaaaggtgctgctgggggcaactctggagaacgatagccatgattacatattctacctgaaccccgctgtctctgaccaagactgcagcacagccacttcactggagtgggctaacacttgcggcatccaagggcgacaccagccaatatccgtaggcgtggcacctatcgccgtagcccctgtgtgcctcaagaccaactcccagatgtcagggagccgcgaggtcatgttattgcagctaacggtcattaaagtgatgacaacaaggatcctcagcgtgaagacagagtttcatgcaaaagagcagtatcgggacgtcatcaagatcttgttggaatctgcaaaggtggactcaaaattgatttgtatgttccagaatagcgacaaactcctaagccacatggccgctcaatgtttggctttactcctatactttcagctgcgtgagaagattacactctcaaatagttggatagctttctgtcagaaaaacctcagcgagtactcagaatctaacaaagcaatctactgcttgtggaccctgaccgctataataaaggagatttttaaggatagctgcagccagaaaacagagatcctgaaacagtttctgactcatttcgataccatctttgaggtcttctacaactcgcttttttctcaacattttgagaactgtcgcgacacaagcaagatcgtgaatatccttatgtgcttcctggatctgctcgagctgctcattgccagtagaattcatctgaaacttcactttacgtgtcagagaatcctcttcctgaaacccagctgcatgctggaggtgataacatggccaatccaggcattcgtgaagaggaaagtcattatcttcctaaagaagtgtttgctatgcaaggtgggcgaggacctctgcagagggagcgtaccagcactgatgccaccagatcatcatgtagctgtggacatgttggctctggctaatgccgtgctgcaagcagtaaatagtgggcttttgaaaacgctgagtgtctatgaaaagcactcattcttcggaggcgatgaagttcaacctgaatgcgaactcatcacttcccctgaccacgtcatcttgcgtgctgcctcccttgtgattatgaagtctttagagattaagtttcagaattacagttcggcatctgaagtgaaagtggacctgcagcgttttatgtctgagctgctgacatttctgaaaccacatctgcagcctagcctccagctgcacaatccctgtaagtggctgtcgcgagtgtttatcgagcaggacgatgatatgctcgaagccgctaaggcttcattgggaatttacctcactcttacccgcggttgcgaggctactgagagtctgactcaggggaaggagatgtgggaccaccacactcacgaaaacggatacaacccacattgcatatttctgtttttcttaaaaaatatcggcttcgattcgacagtactgttagactttctgatcagttctgagacctgcttcctggagtacttcgtccggtatttgaagctgctccagaaggattgggacaacttctttactatctgcaacaacttcgacgccaccgagtccaaatacgatatcagcatttgcgggtgcgtgccttcactggttcaggaccagtcatctaaccagacaattccgcaccggctgactgcccctcactcccacagagatgtgtgtgctcgccactcttgggcttcggacgcccctagcgaacctcttaaagctgtcatgagtaagggtgcccacaccatgtgcgcaagttcactaagtagccccagagcttctcaatctcttgtggattatgattcctcggatgattctgacgtcgaatcaacggagcagtgcctggcgaactccaaacagaccagcttgcaccagcaagcaaccaaggaaatccaggatgcagcagggacctcacgcgataaaaaagagtttagcttagaacctccctctcgccctctagtactgaaggagttcgacacagcctttagtttcgactgcgaagttgccccaaatgatgtggtttctgaggtagggattttctacaggatagtgaagtgttttcaggaacttcaggacgcaatctgtagactgcaaaagaaaaacttattcccctacaatccgacagctctgctgaagcttttaaagtatattgaggtcatatctaacaaaaccatgaacacattgtag

SEQ ID NO: 273490 - protein, 191 aa, Artificial Sequence
  derived and/or modified sequence
MKVFCEVLEELYKKVLLGATLENDSHDYIFYLNPAVSDQDCSTATSLEWANTCGIQGRHQPISVGVAPIAVAPVCLKTNSQMSGSREVMLLQLTVIKVMTTRILSVKTEFHAKEQYRDVIKILLESAKVDSKLICMFQNSDKLLSHMAAQCLALLLYFQLREKITLSNSWIAFCQKNLSEYSESNKAIYCL

SEQ ID NO: 273491 - protein, 198 aa, Artificial Sequence
  derived and/or modified sequence
MKVFCEVLEELYKKVLLGATLENDSHDYIFYLNPAVSDQDCSTATSLEWANTCGIQGRHQPISVGVAPIAVAPVCLKTNSQMSGSREVMLLQLTVIKVMTTRILSVKTEFHAKEQYRDVIKILLESAKVDSKLICMFQNSDKLLSHMAAQCLALLLYFQLREKITLSNSWIAFCQKNLSEYSESNKAIYCLWTLTAII

SEQ ID NO: 273492 - protein, 129 aa, Artificial Sequence
  derived and/or modified sequence
MKVFCEVLEELYKKVLLGATLENDSHDYIFYLNPAVSDQDCSTATSLEWANTCGIQGRHQPISVGVAPIAVAPVCLKTNSQMSGSREVMLLQLTVIKVMTTRILSVKTEFHAKEQYRDVIKILLESAKV

SEQ ID NO: 273493 - protein, 436 aa, Artificial Sequence
  derived and/or modified sequence
MKVFCEVLEELYKKVLLGATLENDSHDYIFYLNPAVSDQDCSTATSLEWANTCGIQGRHQPISVGVAPIAVAPVCLKTNSQMSGSREVMLLQLTVIKVMTTRILSVKTEFHAKEQYRDVIKILLESAKVDSKLICMFQNSDKLLSHMAAQCLALLLYFQLREKITLSNSWIAFCQKNLSEYSESNKAIYCLWTLTAIIKEIFKDSCSQKTEILKQFLTHFDTIFEVFYNSLFSQHFENCRDTSKIVNILMCFLDLLELLIASRIHLKLHFTCQRILFLKPSCMLEVITWPIQAFVKRKVIIFLKKCLLCKVGEDLCRGSVPALMPPDHHVAVDMLALANAVLQAVNSGLLKTLSVYEKHSFFGGDEVQPECELITSPDHVILRAASLVIMKSLEIKFQNYSSASEVKGNSPNSFCMQCVIIYLSTVIHNYQISGLV

SEQ ID NO: 273494 - DNA, 576 bp, Artificial Sequence
  derived and/or modified sequence
atgaaggtgttctgcgaggtgctggaggagctgtacaagaaggtgctgctgggcgccaccctggagaacgacagccacgactacatcttctacctgaaccccgccgtgagcgaccaggactgcagcaccgccaccagcctggagtgggccaacacctgcggcatccagggcagacaccagcccatcagcgtgggcgtggcccccatcgccgtggcccccgtgtgcctgaagaccaacagccagatgagcggcagcagagaggtgatgctgctgcagctgaccgtgatcaaggtgatgaccaccagaatcctgagcgtgaagaccgagttccacgccaaggagcagtacagagacgtgatcaagatcctgctggagagcgccaaggtggacagcaagctgatctgcatgttccagaacagcgacaagctgctgagccacatggccgcccagtgcctggccctgctgctgtacttccagctgagagagaagatcaccctgagcaacagctggatcgccttctgccagaagaacctgagcgagtacagcgagagcaacaaggccatctactgcctgtag

SEQ ID NO: 273495 - DNA, 597 bp, Artificial Sequence
  derived and/or modified sequence
atgaaggtgttctgcgaggtgctggaggagctgtacaagaaggtgctgctgggcgccaccctggagaacgacagccacgactacatcttctacctgaaccccgccgtgagcgaccaggactgcagcaccgccaccagcctggagtgggccaacacctgcggcatccagggcagacaccagcccatcagcgtgggcgtggcccccatcgccgtggcccccgtgtgcctgaagaccaacagccagatgagcggcagcagagaggtgatgctgctgcagctgaccgtgatcaaggtgatgaccaccagaatcctgagcgtgaagaccgagttccacgccaaggagcagtacagagacgtgatcaagatcctgctggagagcgccaaggtggacagcaagctgatctgcatgttccagaacagcgacaagctgctgagccacatggccgcccagtgcctggccctgctgctgtacttccagctgagagagaagatcaccctgagcaacagctggatcgccttctgccagaagaacctgagcgagtacagcgagagcaacaaggccatctactgcctgtggaccctgaccgccatcatctag

SEQ ID NO: 273496 - DNA, 390 bp, Artificial Sequence
  derived and/or modified sequence
atgaaggtgttctgcgaggtgctggaggagctgtacaagaaggtgctgctgggcgccaccctggagaacgacagccacgactacatcttctacctgaaccccgccgtgagcgaccaggactgcagcaccgccaccagcctggagtgggccaacacctgcggcatccagggcagacaccagcccatcagcgtgggcgtggcccccatcgccgtggcccccgtgtgcctgaagaccaacagccagatgagcggcagcagagaggtgatgctgctgcagctgaccgtgatcaaggtgatgaccaccagaatcctgagcgtgaagaccgagttccacgccaaggagcagtacagagacgtgatcaagatcctgctggagagcgccaaggtgtag

SEQ ID NO: 273497 - DNA, 435 bp, Artificial Sequence
  derived and/or modified sequence
atgaaggtgttctgcgaggtgctggaggagctgtacaagaaggtgctgctgggcgccaccctggagaacgacagccacgactacatcttctacctgaaccccgccgtgagcgaccaggactgcagcaccgccaccagcctggagtgggccaacacctgcggcatccagggcagacaccagcccatcagcgtgggcgtggcccccatcgccgtggcccccgtgtgcctgaagaccaacagccagatgagcggcagcagagaggtgatgctgctgcagctgaccgtgatcaaggtgatgaccaccagaatcctgagcgtgaagaccgagttccacgccaaggagcagtacagagacgtgatcaagatcctgctggagagcgccaaggtggacagcaagctgatctgcatgttccagaacagcgacaagctgctgtag

SEQ ID NO: 273498 - DNA, 1311 bp, Artificial Sequence
  derived and/or modified sequence
atgaaggtgttctgcgaggtgctggaggagctgtacaagaaggtgctgctgggcgccaccctggagaacgacagccacgactacatcttctacctgaaccccgccgtgagcgaccaggactgcagcaccgccaccagcctggagtgggccaacacctgcggcatccagggcagacaccagcccatcagcgtgggcgtggcccccatcgccgtggcccccgtgtgcctgaagaccaacagccagatgagcggcagcagagaggtgatgctgctgcagctgaccgtgatcaaggtgatgaccaccagaatcctgagcgtgaagaccgagttccacgccaaggagcagtacagagacgtgatcaagatcctgctggagagcgccaaggtggacagcaagctgatctgcatgttccagaacagcgacaagctgctgagccacatggccgcccagtgcctggccctgctgctgtacttccagctgagagagaagatcaccctgagcaacagctggatcgccttctgccagaagaacctgagcgagtacagcgagagcaacaaggccatctactgcctgtggaccctgaccgccatcatcaaggagatcttcaaggacagctgcagccagaagaccgagatcctgaagcagttcctgacccacttcgacaccatcttcgaggtgttctacaacagcctgttcagccagcacttcgagaactgcagagacaccagcaagatcgtgaacatcctgatgtgcttcctggacctgctggagctgctgatcgccagcagaatccacctgaagctgcacttcacctgccagagaatcctgttcctgaagcccagctgcatgctggaggtgatcacctggcccatccaggccttcgtgaagagaaaggtgatcatcttcctgaagaagtgcctgctgtgcaaggtgggcgaggacctgtgcagaggcagcgtgcccgccctgatgccccccgaccaccacgtggccgtggacatgctggccctggccaacgccgtgctgcaggccgtgaacagcggcctgctgaagaccctgagcgtgtacgagaagcacagcttcttcggcggcgacgaggtgcagcccgagtgcgagctgatcaccagccccgaccacgtgatcctgagagccgccagcctggtgatcatgaagagcctggagatcaagttccagaactacagcagcgccagcgaggtgaagggcaacagccccaacagcttctgcatgcagtgcgtgatcatctacctgagcaccgtgatccacaactaccagatcagcggcctggtgtag

SEQ ID NO: 273499 - DNA, 576 bp, Artificial Sequence
  derived and/or modified sequence
atgaaggtgttttgcgaagttctagaagagctctacaagaaagtcttgctaggcgccaccctggagaacgatagtcatgactatatcttttaccttaatccggcagttagtgatcaagactgtagtactgcaactagcttagagtgggcaaacacatgcggaattcagggcaggcaccagccaatcagtgttggggtagcccccatagccgtggcaccagtgtgcctgaaaactaattcccagatgtctggctcgcgggaagtgatgctgctccaacttaccgtcattaaggttatgacgacacgcatcctgagtgtgaagacggaattccacgccaaggagcaatacagagacgtgatcaaaatactgctcgaaagcgctaaggttgattctaaattgatatgcatgtttcaaaatagtgataagcttctcagccatatggccgctcagtgccttgccctgcttttatattttcagctccgggaaaagataaccctgtccaactcttggatagctttttgccagaagaatctatccgagtattcggaaagcaacaaagctatctactgtctctag

SEQ ID NO: 273500 - DNA, 597 bp, Artificial Sequence
  derived and/or modified sequence
atgaaggtgttttgcgaagtgctggaggaactttacaagaaggtactgcttggggccacacttgagaatgatagccacgactatatcttctatttaaatccggcagtctcggatcaagactgctcaacggctactagcctggagtgggccaacacctgtggaatccagggtcgccatcaaccaatctccgtgggggtcgcaccgatcgcagtggcaccagtctgcttgaagactaactcgcagatgtccggctcccgcgaggttatgctcctgcagctgacagtcatcaaggtgatgacgactaggattctgagtgtcaagactgagtttcatgccaaagagcaatacagagacgtgattaaaatcttactagagtccgccaaggtggacagcaagctgatctgcatgttccaaaatagcgataagctgctgtcccacatggccgcgcaatgcctcgccctcctgctgtatttccagttgagggaaaagatcacattaagcaacagttggattgcattctgtcagaaaaatctgtcagaatatagtgagtcaaacaaagcgatctactgtttgtggaccctgaccgcaatcatttag

SEQ ID NO: 273501 - DNA, 390 bp, Artificial Sequence
  derived and/or modified sequence
atgaaagtgttttgtgaagtcttggaggagttgtataaaaaagtgctactgggggctactcttgaaaatgacagtcacgattacatcttttacttgaaccccgctgtgagtgaccaggactgctctacggcgacttccttggaatgggcaaatacatgcgggatacaagggaggcatcagccaatctccgtcggcgtagccccaatagccgtggctcctgtgtgcctcaaaacgaactcacagatgagcggctctcgggaggtgatgctgctccagctgaccgtaatcaaggtaatgaccaccaggatattgagcgttaaaacagagttccacgccaaggaacaatatcgggatgtgattaagatcctgctggagtccgctaaggtctag

SEQ ID NO: 273502 - DNA, 435 bp, Artificial Sequence
  derived and/or modified sequence
atgaaagtcttctgcgaagtgctggaggaactctacaagaaagtgctgcttggggccacgctggagaatgattctcacgactacatcttctacttgaacccagccgtgtcagaccaggattgttccactgccacaagtctggagtgggccaatacttgtggcatccaagggcggcaccagcctatctcagtcggggttgcacccattgcagtggcgccagtatgtttaaaaaccaactcccagatgtctggctccagagaagtaatgctgcttcagctgacagtcataaaggtaatgaccacacggatcctttctgtcaagacagaattccatgccaaggagcagtatagagacgttatcaaaatcttgctcgagagtgcaaaggtggattctaagctcatctgtatgtttcaaaactctgacaagcttttatag

SEQ ID NO: 273503 - DNA, 1311 bp, Artificial Sequence
  derived and/or modified sequence
atgaaagtgttttgtgaagtgctggaggagctgtacaaaaaggtgctgctaggggcaaccttggagaacgacagccacgattacattttctatctgaaccccgctgttagcgaccaggattgctctacagcaaccagcttggaatgggcaaacacttgcggcattcaggggaggcaccagccaatcagcgtgggggtggcaccaatagcagtggcacccgtgtgtctgaagactaacagccaaatgtcgggctcccgcgaggtgatgttgctgcagcttaccgttataaaggttatgacaactaggatccttagtgtcaaaactgagttccatgccaaagagcagtaccgggatgttatcaagattctcctggaatccgccaaagtggactctaaacttatctgcatgttccagaatagtgacaagctactgtcacacatggctgctcagtgcttggcccttctcctgtactttcagcttagagaaaaaatcacgctatccaattcatggatcgcattctgtcagaaaaacctgtctgaatattcggagtcaaacaaggcaatatactgcttgtggacacttacggctatcataaaggaaatttttaaggatagctgtagtcagaaaaccgagattctgaaacaattcctgacgcactttgatacaatctttgaggtgttctacaactcactcttctctcagcattttgagaattgtagggacacctcaaagattgtgaatattctgatgtgttttctggacctgcttgagctgcttatagcctcccgcatccatcttaagttacactttacgtgccaacggattctattcttgaagccgtcctgcatgctagaggtgattacttggcccatacaggcctttgttaagaggaaggtgattatctttttaaagaagtgtctgctttgcaaagttggcgaagacctttgcaggggaagtgttcctgcactgatgccaccagatcaccatgtggccgtcgacatgttggccctagctaacgcagtgctccaagcagtcaatagcggcctgttaaagacactgagcgtttacgagaaacattctttctttggcggggacgaggtccaacccgagtgtgagctcattaccagccccgatcacgtaattctgcgtgcggcctcactagtgataatgaaaagtctcgagatcaagtttcaaaactacagcagcgccagtgaagtgaagggtaatagtccgaactccttttgcatgcagtgtgtgattatttatctctccactgtcattcacaactatcagatcagcggcctggtgtag

SEQ ID NO: 273504 - DNA, 576 bp, Artificial Sequence
  derived and/or modified sequence
atgaaggtgttctgtgaggtgctggaggagctgtacaagaaggtgctgctgggcgccaccctggagaatgacagccatgactacatcttctacctgaacccagctgtgtctgaccaggactgcagcacagccaccagcctggagtgggccaacacctgtggcatccagggccgccaccagcccatctctgtgggcgtggcccccatcgctgtggcccctgtgtgcctgaagaccaacagccagatgagcggcagccgggaggtgatgctgctgcagctgaccgtcatcaaggtgatgaccacccgcatcctgtctgtgaagacagagttccacgccaaggagcagtacagagatgtgatcaagatcctgctggagagcgccaaggtggacagcaagctgatctgcatgttccagaacagcgacaagctgctgagccacatggccgcccagtgcctggccctgctgctgtacttccagctgcgggagaagatcaccctgagcaacagctggatcgccttctgccagaagaacctgtctgagtacagcgagagcaacaaggccatctactgcctgtag

SEQ ID NO: 273505 - DNA, 597 bp, Artificial Sequence
  derived and/or modified sequence
atgaaggtgttctgtgaggtgctggaggagctgtacaagaaggtgctgctgggcgccaccctggagaatgacagccatgactacatcttctacctgaacccagctgtgtctgaccaggactgcagcacagccaccagcctggagtgggccaacacctgtggcatccagggccgccaccagcccatctctgtgggcgtggcccccatcgctgtggcccctgtgtgcctgaagaccaacagccagatgagcggcagccgggaggtgatgctgctgcagctgaccgtcatcaaggtgatgaccacccgcatcctgtctgtgaagacagagttccacgccaaggagcagtacagagatgtgatcaagatcctgctggagagcgccaaggtggacagcaagctgatctgcatgttccagaacagcgacaagctgctgagccacatggccgcccagtgcctggccctgctgctgtacttccagctgcgggagaagatcaccctgagcaacagctggatcgccttctgccagaagaacctgtctgagtacagcgagagcaacaaggccatctactgcctgtggaccctgacagccatcatctag

SEQ ID NO: 273506 - DNA, 390 bp, Artificial Sequence
  derived and/or modified sequence
atgaaggtgttctgtgaggtgctggaggagctgtacaagaaggtgctgctgggcgccaccctggagaatgacagccatgactacatcttctacctgaacccagctgtgtctgaccaggactgcagcacagccaccagcctggagtgggccaacacctgtggcatccagggccgccaccagcccatctctgtgggcgtggcccccatcgctgtggcccctgtgtgcctgaagaccaacagccagatgagcggcagccgggaggtgatgctgctgcagctgaccgtcatcaaggtgatgaccacccgcatcctgtctgtgaagacagagttccacgccaaggagcagtacagagatgtgatcaagatcctgctggagagcgccaaggtgtag

SEQ ID NO: 273507 - DNA, 435 bp, Artificial Sequence
  derived and/or modified sequence
atgaaggtgttctgtgaggtgctggaggagctgtacaagaaggtgctgctgggcgccaccctggagaatgacagccatgactacatcttctacctgaacccagctgtgtctgaccaggactgcagcacagccaccagcctggagtgggccaacacctgtggcatccagggccgccaccagcccatctctgtgggcgtggcccccatcgctgtggcccctgtgtgcctgaagaccaacagccagatgagcggcagccgggaggtgatgctgctgcagctgaccgtcatcaaggtgatgaccacccgcatcctgtctgtgaagacagagttccacgccaaggagcagtacagagatgtgatcaagatcctgctggagagcgccaaggtggacagcaagctgatctgcatgttccagaacagcgacaagctgctgtag

SEQ ID NO: 273508 - DNA, 1311 bp, Artificial Sequence
  derived and/or modified sequence
atgaaggtgttctgtgaggtgctggaggagctgtacaagaaggtgctgctgggcgccaccctggagaatgacagccatgactacatcttctacctgaacccagctgtgtctgaccaggactgcagcacagccaccagcctggagtgggccaacacctgtggcatccagggccgccaccagcccatctctgtgggcgtggcccccatcgctgtggcccctgtgtgcctgaagaccaacagccagatgagcggcagccgggaggtgatgctgctgcagctgaccgtcatcaaggtgatgaccacccgcatcctgtctgtgaagacagagttccacgccaaggagcagtacagagatgtgatcaagatcctgctggagagcgccaaggtggacagcaagctgatctgcatgttccagaacagcgacaagctgctgagccacatggccgcccagtgcctggccctgctgctgtacttccagctgcgggagaagatcaccctgagcaacagctggatcgccttctgccagaagaacctgtctgagtacagcgagagcaacaaggccatctactgcctgtggaccctgacagccatcatcaaggagatcttcaaggacagctgcagccagaagacagagatcctgaagcagttcctgacccactttgacaccatctttgaggtgttctacaacagcctcttcagccagcactttgagaactgccgggacaccagcaagatcgtgaacatcctgatgtgcttcctggacctgctggagctgctgattgccagccgcatccacctgaagctgcacttcacctgccagaggatcctcttcctgaagcccagctgcatgctggaggtgatcacctggcccatccaggcctttgtgaagaggaaggtgatcatcttcctgaagaagtgcctgctgtgcaaggtgggggaggacctgtgccggggctctgtgcctgccctgatgcccccagaccaccacgtggccgtggacatgctggccctggccaatgctgtgctgcaggccgtgaacagcggcctgctgaagaccctgtctgtgtatgagaagcacagcttctttggaggagatgaggtgcagccagaatgtgagctgatcaccagcccagaccacgtgatcctgcgggccgccagcctggtgatcatgaagagcctggagatcaagttccagaactacagcagcgccagcgaggtgaagggcaacagccccaacagcttctgcatgcagtgtgtgatcatctacctgagcaccgtcatccacaactaccagatcagcggcctggtgtag

SEQ ID NO: 273509 - DNA, 827 bp, Artificial Sequence
  derived and/or modified sequence
ggcggtgtgaagagagttcgcctgagccagatcccaggcagttttaacaagggaggcatgagacatcaatcaagatatgtaaaatgaacattggttcagtccagaaaggtgggacaactcttaagctgggagggggcttccaggtcacaggtttcactgaagaaacttcttagagattcattgcacttctgagatttaatgtttacaacttggagttgtcgaccttcttataagatacattttggaagtcaaaatgaaagttttctgtgaagttttagaagagttatacaagaaggtacttcttggagccacacttgaaaatgacagccatgattacatcttttatctcaacccagcagtttcagatcaagattgttctacagccacctccttagaatgggcaaacacctgtggtatccagggcaggcatcagcccatctctgttggtgtggctcccattgctgtagcacctgtgtgtttgaagaccaactctcagatgagcggttccagagaagtaatgctccttcagttaacagtgatcaaagtgatgacaacccggatattgtctgtcaaaaccgagttccatgcaaaggagcagtacagagatgtaattaaaattctcttagaatcagccaaagtcgattctaaattaatctgcatgttccaaaattcagataaattgttatctcacatggctgcacagtgccttgcattgcttctatatttccaattgagagaaaagataaccttaagtaattcctggattgctttttgccagaaaaatctttctgaatactctgagagtaataaagcaatatactgcctct

SEQ ID NO: 273510 - DNA, 872 bp, Artificial Sequence
  derived and/or modified sequence
agagcgggcatttgtgttccctcaaatggcggtgtgaagagagttcgcctgagccagatcccagttttaacaagggaggcatgagacatcaatcaagatatgtaaaatgaacattggttcagtccagaaaggtgggacaactcttaagctgggagggggcttccaggtcacaggtttcactgaagaaacttcttagagattcattgcacttctgagatttaatgtttacaacttggagttgtcgaccttcttataagatacattttggaagtcaaaatgaaagttttctgtgaagttttagaagagttatacaagaaggtacttcttggagccacacttgaaaatgacagccatgattacatcttttatctcaacccagcagtttcagatcaagattgttctacagccacctccttagaatgggcaaacacctgtggtatccagggcaggcatcagcccatctctgttggtgtggctcccattgctgtagcacctgtgtgtttgaagaccaactctcagatgagcggttccagagaagtaatgctccttcagttaacagtgatcaaagtgatgacaacccggatattgtctgtcaaaaccgagttccatgcaaaggagcagtacagagatgtaattaaaattctcttagaatcagccaaagtcgattctaaattaatctgcatgttccaaaattcagataaattgttatctcacatggctgcacagtgccttgcattgcttctatatttccaattgagagaaaagataaccttaagtaattcctggattgctttttgccagaaaaatctttctgaatactctgagagtaataaagcaatatactgcctctggactcttacagcaataataaa

SEQ ID NO: 273511 - DNA, 558 bp, Artificial Sequence
  derived and/or modified sequence
agagcgggcatttgtgttccctcaaatggcggtgtgaagagagttcgcctgagccagatcccaggcaggtttcactgaagaaacttcttagagattcattgcacttctgagatttaatgtttacaacttggagttgtcgaccttcttataagatacattttggaagtcaaaatgaaagttttctgtgaagttttagaagagttatacaagaaggtacttcttggagccacacttgaaaatgacagccatgattacatcttttatctcaacccagcagtttcagatcaagattgttctacagccacctccttagaatgggcaaacacctgtggtatccagggcaggcatcagcccatctctgttggtgtggctcccattgctgtagcacctgtgtgtttgaagaccaactctcagatgagcggttccagagaagtaatgctccttcagttaacagtgatcaaagtgatgacaacccggatattgtctgtcaaaaccgagttccatgcaaaggagcagtacagagatgtaattaaaattctcttagaatcagccaaagtc

SEQ ID NO: 273512 - DNA, 562 bp, Artificial Sequence
  derived and/or modified sequence
gttaatctggaactgccatagcttcaggtttcactgaagaaacttcttagagattcattgcacttctgagatttaatgtttacaacttggagttgtcgaccttcttataagatacattttggaagtcaaaatgaaagttttctgtgaagttttagaagagttatacaagaaggtacttcttggagccacacttgaaaatgacagccatgattacatcttttatctcaacccagcagtttcagatcaagattgttctacagccacctccttagaatgggcaaacacctgtggtatccagggcaggcatcagcccatctctgttggtgtggctcccattgctgtagcacctgtgtgtttgaagaccaactctcagatgagcggttccagagaagtaatgctccttcagttaacagtgatcaaagtgatgacaacccggatattgtctgtcaaaaccgagttccatgcaaaggagcagtacagagatgtaattaaaattctcttagaatcagccaaagtcgattctaaattaatctgcatgttccaaaattcagataaattgtta

SEQ ID NO: 273513 - DNA, 1612 bp, Artificial Sequence
  derived and/or modified sequence
gtgttccctcaaatggcggtgtgaagagagttcgcctgagccagatcccaggtttcactgaagaaacttcttagagattcattgcacttctgagatttaatgtttacaacttggagttgtcgaccttcttataagatacattttggaagtcaaaatgaaagttttctgtgaagttttagaagagttatacaagaaggtacttcttggagccacacttgaaaatgacagccatgattacatcttttatctcaacccagcagtttcagatcaagattgttctacagccacctccttagaatgggcaaacacctgtggtatccagggcaggcatcagcccatctctgttggtgtggctcccattgctgtagcacctgtgtgtttgaagaccaactctcagatgagcggttccagagaagtaatgctccttcagttaacagtgatcaaagtgatgacaacccggatattgtctgtcaaaaccgagttccatgcaaaggagcagtacagagatgtaattaaaattctcttagaatcagccaaagtcgattctaaattaatctgcatgttccaaaattcagataaattgttatctcacatggctgcacagtgccttgcattgcttctatatttccaattgagagaaaagataaccttaagtaattcctggattgctttttgccagaaaaatctttctgaatactctgagagtaataaagcaatatactgcctctggactcttacagcaataataaaagaaatctttaaagattcatgttcacagaaaacagaaattctaaagcagttcctgactcatttcgacaccatttttgaagtgttttacaattccttattctctcagcattttgaaaactgccgggatacttctaaaatagtaaacatcctgatgtgtttcctggatttgcttgagcttctcatcgcctccagaatccacctgaagttacatttcacttgccagaggattttatttttgaaaccatcttgcatgctagaagttattacctggcctattcaggcttttgttaaaaggaaggtcatcatattcctcaaaaagtgccttctctgtaaagtgggtgaagacctctgtcgtggatctgtgcctgccttaatgccgccagaccatcatgtagcggtggacatgctggctttagctaatgctgttttgcaagctgtgaattcggggttgttgaagacactgtctgtttatgaaaaacattccttttttggaggtgatgaagttcaacctgaatgtgaacttatcactagtccagatcatgtgatccttagagcagcaagcttagttataatgaaatccttagaaatcaagtttcaaaattattcttcagcaagtgaagtgaaaggtaattctccaaactccttttgtatgcagtgtgtaattatttacttaagtacagtaattcataattatcaaatctcaggactagtttaaattccagtaatttaagctgtatgttatcctatttgtaacttattacattttcaaaaaaaaaaaaaagaactggatttacctttaagaaacatgtcagctttttgtgcctacaatgaatttgtaaagcataaggaatgatttaggttt

SEQ ID NO: 273514 - DNA, 576 bp, Artificial Sequence
  derived and/or modified sequence
atgaaggtgttctgcgaggtgctggaggagctgtacaagaaggtgcttctgggggccactcttgagaatgatagtcacgactacatcttctacctgaaccccgccgtgagcgaccaggattgctcgactgctacctccttagaatgggctaatacgtgcggtatccaaggaagacaccagccaatctcagtgggagtggcacccatcgccgtggcccccgtctgtttgaagactaattcgcagatgagtggttccagggaggtcatgctgctgcagctaacggtgataaaagtgatgaccaccagaatactgtcggtgaagaccgagttccacgctaaagagcagtacagggacgtcatcaagatattgctggaatcagcaaaggtggactcaaaacttatctgtatgtttcagaactctgacaaactcctcagtcacatggcagctcagtgcctggcgctgctcctctactttcagctaagagagaaaattacactatctaactcttggattgctttttgtcagaagaatttgagcgaatattccgagagcaataaggccatctattgcctttag

SEQ ID NO: 273515 - DNA, 597 bp, Artificial Sequence
  derived and/or modified sequence
atgaaggtgttctgcgaggtgctggaggagctgtacaagaaggtgctcctaggagcaacacttgagaacgacagccacgactatattttctacctgaacccagccgtctccgaccaggattgctccaccgccacatccctggaatgggctaatacatgtgggatccagggacgccaccagccaatctcagtgggtgtggcgccgatagcagttgcacctgtgtgtttgaagactaatagccagatgagtggaagcagagaggtgatgctgttgcagctgactgtgatcaaagtaatgaccactcgtattttgagtgtgaagaccgaattccacgctaaggagcaatacagagacgtgattaagattcttcttgagagtgccaaggttgatagcaaactgatctgcatgtttcaaaattccgataaactgctgagtcacatggccgctcaatgtctcgctctcctcttatactttcagctgcgtgagaaaatcaccttatcgaatagctggatcgcattttgccagaaaaacctgtccgagtacagcgagtccaataaggcgatttattgcctctggactcttactgctattatctag

SEQ ID NO: 273516 - DNA, 390 bp, Artificial Sequence
  derived and/or modified sequence
atgaaggtgttctgcgaggtgctggaggagctgtacaagaaggtgttactgggagctactctcgagaacgactcccatgactacatcttttacttgaatcctgcggtgtcggaccaggattgttcaacagctacaagcctggagtgggcaaatacctgcgggatccagggtcgacaccagccaatttcagtcggcgtggcccccattgccgtggcaccagtctgcctgaaaacaaatagtcagatgtcagggtctagggaagtgatgttgttgcagttgacagtcatcaaggtgatgaccactagaatactgtccgttaagacagaatttcacgcaaaagagcagtaccgcgacgtaatcaagatactgctggagtccgcgaaggtatag

SEQ ID NO: 273517 - DNA, 435 bp, Artificial Sequence
  derived and/or modified sequence
atgaaggtgttctgcgaggtgctggaggagctgtacaagaaggtgctgctgggcgccaccttggagaatgatagccacgattacatcttctatctgaaccccgctgtgtccgaccaagattgttcaacagcaacttccctagaatgggccaacacctgcggcatccaagggcgtcaccagcccatatccgtcggtgttgctccgatcgctgtggctcctgtctgccttaaaactaatagtcagatgagtggcagccgagaggtgatgctgctacaactgacggtgatcaaggttatgactaccagaatcctgagtgtgaaaactgaattccacgctaaggaacagtaccgcgatgtcattaaaatcctcctcgagagcgcaaaggttgatagtaaactcatctgcatgtttcagaactcagataaattgctttag

SEQ ID NO: 273518 - DNA, 1311 bp, Artificial Sequence
  derived and/or modified sequence
atgaaggtgttctgcgaggtgctggaggagctgtacaagaaggtgttgctgggtgcaacactggagaacgatagccacgattacatcttttatttaaacccagctgtgagtgaccaggattgtagcacagccaccagccttgaatgggcaaacacctgcgggatccaaggtcggcaccagcccatcagcgttggcgtggcgccaattgccgtggcaccggtgtgtctcaagactaacagccagatgtctgggtcacgcgaagtgatgctgttacaactcacagtgattaaagtcatgacaactcggattctgtccgtcaaaacagagtttcatgcaaaggagcagtacagagacgttattaaaatcctactggagtctgcgaaggtggactctaagctgatatgcatgtttcagaattccgacaagctattaagtcatatggccgctcagtgcctggccctgctcctgtacttccagctgcgggagaagataacattgtctaacagctggatcgctttctgccagaagaacctgagtgagtactctgagtctaataaagccatctattgcctctggacactgaccgcaataattaaggaaattttcaaggatagctgctctcaaaagacggagatactgaaacagttcctgacacattttgataccattttcgaggtgttctacaattctctcttctcgcagcatttcgaaaactgtagagacactagcaagatcgtcaacatacttatgtgtttcctcgacttgttagaactgctcatcgccagtcggatccacttgaaactacacttcacatgtcagcgcattttgttccttaaaccttcttgcatgttagaagtgattacgtggcctatccaggcttttgtgaagcgaaaagtgataatttttctgaagaagtgccttctgtgcaaagttggcgaagatctatgcagagggagcgtgccagcactgatgcctcccgaccatcacgttgcagtagacatgctggcgctcgccaatgccgttctgcaagccgtgaattccggactgctcaaaaccctgtccgtgtacgagaagcatagctttttcggcggtgacgaagttcagccggagtgcgagctgatcacgtctccagaccacgtaatcctgcgggcagcctcattagttatcatgaagagtctggaaataaaattccagaactactctagcgctagcgaggtcaaaggaaactctccaaacagcttctgcatgcagtgtgtgattatttatctgtctaccgtaattcacaactatcagatatctggccttgtgtag

SEQ ID NO: 273519 - DNA, 576 bp, Artificial Sequence
  derived and/or modified sequence
atgaaagtgttctgcgaggtgttggaggaactatataagaaggtcttattgggcgcaactctcgaaaacgactcccatgactatattttttatctgaatccggcagtttctgatcaagactgctctaccgcaaccagtctcgaatgggctaacacctgcgggatccagggaagacatcaacctatctctgtgggagtggccccaatcgcagttgctcccgtttgccttaagacaaacagccaaatgtcagggagtcgagaggtgatgttactgcaactgaccgtaatcaaggtcatgactacgaggatccttagcgttaaaacggaattccacgccaaagagcaatatagagatgtcataaaaattttgctggaatccgcgaaggtggatagcaagctgatctgcatgtttcaaaactctgataagctcttaagtcacatggctgcacaatgtcttgcgttgctgttatacttccagctgagggagaagattactctatccaatagttggatagcattttgtcagaagaatctgtcagagtactcagagtcaaacaaagctatttactgcttatag

SEQ ID NO: 273520 - DNA, 597 bp, Artificial Sequence
  derived and/or modified sequence
atgaaggtcttctgcgaagtcctagaagagctgtataaaaaggtcctattaggagctaccttggagaacgacagccatgattacatattttatttaaacccagcagtttcagaccaggactgttctacagcaacctccctggaatgggcaaacacatgcggaattcagggaaggcatcagccaatttctgttggcgtggcccctatcgcagtggctcctgtgtgcctcaaaactaattcacagatgagcggcagtcgggaggtgatgctgttgcagctgacagtcatcaaagtaatgacgacccggatcctctcagttaagactgaattccacgccaaggagcagtaccgcgacgtgattaagatcttactggaatccgccaaggtcgattcaaaactcatctgcatgttccagaatagtgacaagcttttaagccacatggcagctcagtgcttggccctcctgctctatttccagcttagagagaagatcactcttagcaacagctggattgccttctgccagaaaaatcttagcgagtattctgagtccaacaaggcaatctattgcttatggacactaacagccataatctag

SEQ ID NO: 273521 - DNA, 390 bp, Artificial Sequence
  derived and/or modified sequence
atgaaggtcttttgcgaggtgctggaggagctgtataaaaaagtgctgttaggtgccaccctggagaacgactctcacgactacatattttacctgaaccctgcagtcagtgaccaggactgttctaccgccacctccctcgagtgggctaacacgtgcggaatccaaggccgacaccagcctatcagcgtcggtgtcgcccctattgccgtggccccagtttgtctaaaaactaacagtcagatgagtggctccagggaggtaatgctgctgcagctaacagtgataaaagttatgacaactaggatcctttcggttaagacagagttccatgccaaggagcagtatagagatgtcatcaaaatcttactggaatcagccaaagtttag

SEQ ID NO: 273522 - DNA, 435 bp, Artificial Sequence
  derived and/or modified sequence
atgaaagtgttctgcgaggtgctggaggaactgtacaaaaaagtgcttctcggggctactctggaaaacgacagtcatgattacattttttacctgaatcctgctgtatctgaccaagactgttctacagccactagcttggaatgggccaacacttgtgggatccagggacgccaccagcccatatctgtgggcgtcgcaccaatcgccgttgctccagtatgcctgaagacaaactcacagatgagcggttctcgtgaagtaatgctgctgcagcttacggttattaaggttatgaccactaggatcctcagcgtgaaaacggagttccatgcaaaagagcagtaccgcgacgtcatcaagattcttctggaaagcgccaaagttgattccaaactgatttgcatgttccagaatagtgataaactgctgtag

SEQ ID NO: 273523 - DNA, 1311 bp, Artificial Sequence
  derived and/or modified sequence
atgaaagtgttctgtgaggtgttggaggaactgtacaagaaggtgttgctcggagccaccctagaaaacgattcccacgattacatcttctacctgaatcctgccgtgagcgaccaagattgctctactgcaaccagcctggagtgggctaatacttgcgggatccaggggcgtcaccagcccatttctgtgggtgtggcaccaatagcagtggccccagtttgcctgaaaacaaacagtcaaatgtcgggttccagagaggtgatgctgctccaactgactgtgattaaggttatgaccactcggatcttgagcgtcaagaccgagttccatgcaaaggaacagtaccgcgatgtgatcaagattcttctggaaagcgctaaggtggattccaagctcatttgcatgttccaaaattctgataagctgctgagccacatggcagctcaatgccttgccctactactgtatttccagttgagagagaaaattacactgtcaaatagttggatcgcgttttgtcagaagaacttatctgagtacagcgagagcaataaagccatttactgcttgtggactcttaccgccatcatcaaggaaatctttaaggattcatgcagccagaagaccgaaattctgaaacagttcctcacgcatttcgatactatctttgaggtcttctacaactctctgtttagtcaacacttcgagaattgtcgcgacacatcaaaaatcgtgaacatactcatgtgtttcctggacctgctggagctcctgatcgcctcaaggattcacctgaaactgcatttcacgtgtcaacgaatcttattccttaaacctagctgcatgctggaggtgatcacctggccgatccaggcctttgtgaaacgcaaggtgatcattttcctaaaaaagtgcctgctgtgtaaggttggcgaagacctgtgcagaggttccgtgcctgccctcatgccaccagaccaccatgtggccgtagatatgctcgccctagccaacgcggttttacaggctgtgaattctggcctcctcaaaactctgtccgtctacgaaaaacactctttttttggaggggacgaagtacagcccgaatgcgaactgattacctctcctgatcacgttatcctgcgcgctgcaagcctggtcatcatgaagtcccttgagattaagtttcaaaattactcctctgcaagcgaggttaaagggaactcccccaactccttctgcatgcagtgtgtgataatttacttgagcactgtgatccataattatcagatttccggcctcgtctag

SEQ ID NO: 273524 - protein, 566 aa, Artificial Sequence
  derived and/or modified sequence
MRRSEVLAEESIVCLQKALNHLREIWELIGIPEDQRLQRTEVVKKHIKELLDMMIAEEESLKERLIKSISVCQKELNTLCSELHVEPFQEEGETTILQLEKDLRTQVELMRKQKKERKQELKLLQEQDQELCEILCMPHYDIDSASVPSLEELNQFRQHVTTLRETKASRREEFVSIKRQIILCMEALDHTPDTSFERDVVCEDEDAFCLSLENIATLQKLLRQLEMQKSQNEAVCEGLRTQIRELWDRLQIPEEEREAVATIMSGSKAKVRKALQLEVDRLEELKMQNMKKVIEAIRVELVQYWDQCFYSQEQRQAFAPFCAEDYTESLLQLHDAEIVRLKNYYEVHKELFEGVQKWEETWRLFLEFERKASDPNRFTNRGGNLLKEEKQRAKLQKMLPKLEEELKARIELWEQEHSKAFMVNGQKFMEYVAEQWEMHRLEKERAKQERQLKNKKQTETEMLYGSAPRTPSKRRGLAPNTPGKARKLNTTTMSNATANSSIRPIFGGTVYHSPVSRLPPSGSKPVAASTCSGKKTPRTGRHGANKENLELNGSILSARTFKGFQI

SEQ ID NO: 273525 - DNA, 1701 bp, Artificial Sequence
  derived and/or modified sequence
atgcggcggtctgaagtcctggccgaagaaagcattgtgtgtcttcagaaggcactgaaccacctgagagagatctgggaactcatagggatccctgaggaccaaaggctccaacgtactgaagttgttaaaaaacacatcaaggaactgctggacatgatgattgccgaagaggaatccctgaaagagcgcctcatcaagtccattagcgtatgccagaaggaacttaacacactttgttctgagctccacgttgaaccatttcaagaagaaggtgagacaacaatattgcagctggagaaggatctgcgcacccaggtcgaactcatgcggaaacaaaagaaggaacgaaagcaggagctcaaactgcttcaggagcaagatcaggagctttgtgaaatcttatgcatgcctcactatgacattgatagcgcatctgtaccctccctggaggaactcaaccagtttcggcagcacgtcaccacactgagggagaccaaggctagtcggagagaggagttcgtctcaattaagaggcaaatcatcctttgcatggaggcactggaccatacacccgacacgtcctttgaacgagacgtcgtttgcgaggatgaggatgctttttgcctctcgctcgagaatattgcgacactccagaaattactacggcagctggagatgcagaagtctcagaacgaggcggtgtgtgagggtttaaggacccagattcgggagctttgggacagattgcaaattcccgaggaagaacgcgaggcagtcgctacaatcatgtctggctcaaaagcaaaagtccgaaaggccctgcagctcgaagtcgatcgcctagaggagctcaaaatgcaaaatatgaaaaaagtgatcgaggctatccgggtggagttggtgcagtactgggaccagtgcttttatagtcaagaacagcgccaggccttcgctccattttgtgctgaggactacacagagagtttgttacagctccacgatgcagagattgttcggttaaagaactattacgaagtgcataaggagctattcgagggcgttcaaaaatgggaggaaacctggagactgtttctagagttcgagcgtaaagcttcagaccccaatcgtttcacgaatagaggaggaaacctgctgaaggaagagaaacagagggctaaactccaaaaaatgttgcccaagctggaggaagagctgaaagccaggatcgagctatgggagcaggagcactctaaggccttcatggtgaacgggcagaaatttatggaatatgtagctgagcagtgggagatgcaccggctggagaaggagcgagctaaacaagagagacagctcaaaaacaaaaaacagaccgagacagagatgctttacgggtctgcgccacggactccgagcaagaggcgagggctggccccaaacaccccaggtaaggcaaggaaactgaacactaccacaatgtccaatgcgacagccaactcctccatcaggccaattttcggaggaaccgtctatcactctcctgtgtcccggctgccgcctagtgggtccaagcctgtggccgccagcacatgttcaggcaagaaaactcccagaaccggaaggcatggagccaataaggaaaaccttgagctgaatggcagtatactctctgcgcgcaccttcaaaggattccaaatttag

SEQ ID NO: 273526 - DNA, 1701 bp, Artificial Sequence
  derived and/or modified sequence
atgagaagaagtgaggtgctggccgaggagagcatcgtgtgcctgcagaaggccctgaaccacctgcgggagatctgggagctgattggcatccctgaggaccagaggctgcagaggacagaggtggtgaagaagcacatcaaggagctgctggacatgatgattgctgaggaggagagcctgaaggagcggctcatcaagagcatctctgtgtgccagaaggagctgaacaccctgtgcagcgagctgcacgtggagcccttccaggaggagggggagaccaccatcctgcagctggagaaggacctgcggacccaggtggagctgatgaggaagcagaagaaggagaggaagcaggagctgaagctgctgcaggagcaggaccaggagctgtgtgagatcctgtgcatgccccactatgacatcgacagcgcctctgtgcccagcctggaggagctgaaccagttccggcagcacgtgaccaccctgcgggagaccaaggccagccggcgggaggagtttgtgtccatcaagaggcagatcatcctgtgcatggaggccctggaccacaccccagacaccagctttgaaagagatgtggtgtgtgaagatgaagatgccttctgcctgagcctggagaacatcgccaccctgcagaagctgctgcggcagctggagatgcagaagagccagaatgaggccgtgtgtgagggcctgcggacccagatccgggagctgtgggaccggctgcagatccctgaggaggagcgggaggccgtggccaccatcatgagcggcagcaaggccaaggtgaggaaggccctgcagctggaggtggaccggctggaggagctgaagatgcagaacatgaagaaggtgattgaggccatccgggtggagctggtgcagtactgggaccagtgcttctacagccaggagcagaggcaggcctttgcccccttctgtgccgaggactacacagagagcctgctgcagctgcatgatgctgagatcgtgcggctgaagaactactatgaggtgcacaaggagctgtttgagggcgtgcagaagtgggaggagacctggaggctcttcctggagtttgagaggaaggccagtgaccccaaccgcttcaccaacagaggaggcaacctgctgaaggaggagaagcagagggccaagctgcagaagatgctgcccaagctggaggaggagctgaaggcccgcatcgagctgtgggagcaggagcacagcaaggccttcatggtgaatggccagaagttcatggagtatgtggccgagcagtgggagatgcaccggctggagaaggagcgggccaagcaggagcggcagctgaagaacaagaagcagacagaaacagagatgctgtatggcagcgcccccaggacccccagcaagaggcggggcctggcccccaacacccctgggaaggccaggaagctgaacaccaccaccatgagcaatgccacagccaacagcagcatccggcccatctttggaggcaccgtgtaccacagccctgtgtcccggctgcccccatctggcagcaagcctgtggccgccagcacctgcagcggcaagaagacccccaggacaggccgccacggggccaacaaggagaacctggagctgaatggcagcatcctgagcgcccggaccttcaagggcttccagatctag

SEQ ID NO: 273527 - DNA, 1701 bp, Artificial Sequence
  derived and/or modified sequence
atgcggcggagcgaggtgctggccgaggagagcatcgtgtgcctgcaaaaggcacttaatcacttaagagaaatctgggaactcattgggatccccgaagaccagcgtctgcagcgaacagaagttgttaagaagcacatcaaggagctccttgatatgatgatcgctgaagaggagtccttgaaggagcgcttaattaagagtatcagcgtgtgccagaaggaacttaatacgctgtgcagcgaacttcacgtggagccttttcaggaagagggcgagactacaattctccagctggaaaaggacttaagaactcaggttgagctgatgagaaagcagaaaaaagagaggaaacaggagctcaaactcctccaggaacaggaccaagagctgtgcgagatcttatgcatgccacactacgatattgactcggcttcagttcccagcctggaggaactgaaccagtttcgtcagcatgtaacgacccttagggaaaccaaagcatccaggcgggaggagttcgtgagcataaagaggcagattattctatgcatggaagccctcgatcacacccccgacacctctttcgagcgggatgtagtgtgtgaggacgaagacgctttttgcttatctctggagaacattgctacactgcagaagctgctgcggcagctcgagatgcaaaaatcacaaaacgaggccgtgtgtgaagggttacgtacacagatcagagaactgtgggataggctgcaaatccccgaagaggaaagggaggctgtagccactatcatgtccggcagtaaagccaaggtccggaaggcgctgcagctggaggtggaccgtcttgaagagttaaagatgcagaatatgaaaaaggtgattgaagctatccgcgtggaattggtgcagtactgggatcaatgcttctacagtcaggagcagagacaggcctttgcccctttttgtgccgaggactataccgaatcattgttgcagctgcacgatgcagagattgtccgcttgaagaattactacgaagtccacaaagagcttttcgaaggtgtgcagaagtgggaggagacctggaggctcttcctcgagttcgagcggaaggcaagcgatcctaaccgctttacaaacagggggggaaatctcctaaaggaagagaaacagagggcaaagctgcagaagatgctccccaagttggaggaggagctgaaagccaggattgagctgtgggagcaggaacattctaaagcttttatggtgaacggtcaaaagttcatggaatatgtggctgagcagtgggagatgcatcgactggagaaagagagggccaagcaggagagacagctgaagaataaaaagcagaccgagacagaaatgctctatggttctgcccccagaacacccagtaaaaggagaggtctcgctcctaatacccccggtaaggcacggaagttgaacacaactactatgagcaatgcaacggcgaattcttccattcggcctatttttgggggcactgtgtatcatagccccgtctctcggcttcccccgagcggatcgaagcccgtggcagcatcaacgtgctccgggaagaagacacctcgcacgggaagacacggcgcaaacaaagagaaccttgaactgaacggcagcatcttaagtgctagaacctttaagggctttcaaatttag

SEQ ID NO: 273528 - DNA, 1701 bp, Artificial Sequence
  derived and/or modified sequence
atgcgtagatctgaagtgctggctgaggaaagcatcgtgtgtcttcaaaaggcccttaaccatttaagggagatctgggagctgatcggtattccagaggaccagaggttacaacggactgaagtggtgaaaaagcacatcaaggagctgctagacatgatgatcgctgaagaagagtccctgaaagaaaggcttatcaagtccatctcggtgtgccagaaggaattgaacacactctgttcggagttgcacgtcgagccctttcaggaagaaggggaaacaactatactgcagctcgaaaaggatttgagaacacaggttgaactgatgcgaaaacagaaaaaagagcggaaacaggagctcaagctgctgcaagagcaagaccaggaactgtgcgaaatcctgtgtatgcctcattacgacatcgacagcgctagcgtgccatccctggaagagctcaaccagttcaggcagcatgtcacgactctcagagagaccaaggcctcccgtagagaggagtttgtgtcgatcaagcgacagatcatcctgtgcatggaagcattggatcatacccccgacacaagtttcgagagggatgtagtgtgcgaggatgaagatgccttttgcttgtcattggagaacatcgccaccctgcagaagctacttcgtcagcttgaaatgcagaaatctcagaacgaagcggtgtgcgagggcctccggactcaaataagagagctgtgggaccggctacagattccggaggaggagagggaagcagtcgctacgatcatgtctggatcaaaggccaaagtgaggaaggccctccagttagaggtcgatagactggaagagttaaaaatgcaaaatatgaagaaggttattgaggctatccgagtcgagctcgttcaatactgggaccagtgcttttacagccaggagcaacggcaggcttttgcgccattttgcgccgaggactatacagaatcactcctccagcttcatgatgctgaaattgtgagacttaagaattattacgaggtacacaaggaacttttcgagggcgtccaaaaatgggaggagacatggcgcttatttctggagtttgagcggaaggcaagcgatccaaaccgcttcaccaatcgtggagggaatctgcttaaggaggagaaacagcgggcaaaacttcagaaaatgctccccaaacttgaggaggagttgaaggccaggattgaattatgggaacaggagcactcaaaagcctttatggtgaacggacagaagttcatggagtacgtggcagagcagtgggagatgcacagactggagaaagagagggccaaacaggaaagacagctcaaaaacaagaagcagacagagacagagatgctgtatggctccgctcctcgtaccccttcgaaaaggcggggactggctccaaataccccaggcaaggcccgtaagttgaatactacaaccatgtctaatgctaccgccaattcttcaattcgtcctatctttgggggaacagtttatcatagtcctgtgtcccgactgccgccttctggaagtaagcccgttgcggcttccacatgtagcggaaagaagacaccacgcaccggtagacatggggcaaataaggagaatctcgagctcaatggatccattctatcggcacgcacctttaaagggttccagatttag

SEQ ID NO: 273529 - DNA, 2987 bp, Artificial Sequence
  derived and/or modified sequence
gcttcgccccgtggcgcggtttgaaattttgcggggctcaacggctcgcggagcggctacgcggagtgacatcgccggtgtttgcgggtggttgttgctctcggggccgtgtggagtaggtctggacctggactcacggctgcttggagcgtccgccatgaggagaagtgaggtgctggcggaggagtccatagtatgtctgcagaaagccctaaatcaccttcgggaaatatgggagctaattgggattccagaggaccagcggttacaaagaactgaggtggtaaagaagcatatcaaggaactcctggatatgatgattgctgaagaggaaagcctgaaggaaagactcatcaaaagcatatccgtctgtcagaaagagctgaacactctgtgcagcgagttacatgttgagccatttcaggaagaaggagagacgaccatcttgcaactagaaaaagatttgcgcacccaagtggaattgatgcgaaaacagaaaaaggagagaaaacaggaactgaagctacttcaagagcaagatcaagaactgtgcgaaattctttgtatgccccactatgatattgacagtgcctcagtgcccagcttagaagagctgaaccagttcaggcaacatgtgacaactttgagggaaacaaaggcttctaggcgtgaggagtttgtcagtataaagagacagatcatactgtgtatggaagcattagaccacaccccagacacaagctttgaaagagatgtggtgtgtgaagacgaagatgccttttgtttgtctttggagaatattgcaacactacaaaagttgctacggcagctggaaatgcagaaatcacaaaatgaagcagtgtgtgaggggctgcgtactcaaatccgagagctctgggacaggttgcaaatacctgaagaagaaagagaagctgtggccaccattatgtctgggtcaaaggccaaggtccggaaagcgctgcaattagaagtggatcggttggaagaactgaaaatgcaaaacatgaagaaagtgattgaggcaattcgagtggagctggttcagtactgggaccagtgcttttatagccaggagcagagacaagcttttgcccctttctgtgctgaggactacacagaaagtctgctccagctccacgatgctgagattgtgcggttaaaaaactactatgaagttcacaaggaactctttgaaggtgtccagaagtgggaagaaacctggaggcttttcttagagtttgagagaaaagcttcagatccaaatcgatttacaaaccgaggaggaaatcttctaaaagaagaaaaacaacgagccaagctccagaaaatgctgcccaagctggaagaagagttgaaggcacgaattgaattgtgggaacaggaacattcaaaggcatttatggtgaatgggcagaaattcatggagtatgtggcagaacaatgggagatgcatcgattggagaaagagagagccaagcaggaaagacaactgaagaacaaaaaacagacagagacagagatgctgtatggcagcgctcctcgaacacctagcaagcggcgaggactggctcccaatacaccgggcaaagcacgtaagctgaacactaccaccatgtccaatgctacggccaatagtagcattcggcctatctttggagggacagtctaccactcccccgtgtctcgacttcctccttctggcagcaagccagtcgctgcttccacctgttcagggaagaaaacaccccgtactggcaggcatggagccaacaaggagaacctggagctcaacggcagcatcctgagtgcgagaactttcaaaggcttccaaatctgatgctacttctggaatcctcaattcaaccaacatccagtcctgagaagccctgatcagtcaaccagctgtggcttcctgtgcctagactggacctaattatatgggggtgactttagtttttcttcagcttaggcgtgcttgaaaccttggccaggttccatgaccatgggcctaacttaaagatgtgaatgagtgttacagttgaaagcccatcataggtttagtggtcctaggagacttggttttgacttatatacatgaaaagtttatggcaagaagtgcaaattttagcatatggggcctgacttctctaccacataattctacttgctgaagcatgatcaaagcttgttttatttcaccactgtaggaaaatgattgactatgcccatccctgggggtaattttggcatgtatacctgtaactagtaattaacatcttttttgtttaggcatgttcaattaatgctgtagctatcatagctttgctcttacctgaagccttgtccccaccacacaggacagccttcctcctgaagagaatgtctttgtgtgtccgaagttgagatggcctgccctactgccaaagaggtgacaggaaggctgggagcagctttgttaaattgtgttcagttctgttacacagtgcattgccctttgttgggggtatgcatgtatgaacacacatgcttgtcggaacgctttctcggcgtttgtcccttggctctcatctcccccattcctgtgcctactttgcctgagttcttctacccccgcagttgccagccacattgggagtctgtttgttccaatgggttgagctgtctttgtcgtggagatctggaactttgcacatgtcactactggggaggtgttcctgctctagcttccacgatgaggcgccctctttacctatcctctcaatcactactcttcttgaagcactattatttattcttccgctgtctgcctgcagcagtactactgtcaacatagtgtaaatggttctcaaaagcttaccagtgtggacttggtgttagccacgctgtttactcatacagtacgtgtcctgtttttaaaatatacaattattcttaaaaataaattaaaatctgtatacttacatttc

SEQ ID NO: 273530 - DNA, 1701 bp, Artificial Sequence
  derived and/or modified sequence
atgagaagaagcgaggtgctggccgaggagagcatcgtgtgcctgcagaaggccctgaaccacctgagagagatctgggagctgatcggcatccccgaggaccagagactgcagagaaccgaggtggtgaagaagcacatcaaggagctgctggacatgatgatcgccgaggaggagagcctgaaggagagactgatcaagagcatcagcgtgtgccagaaggagctgaacaccctgtgcagcgagctgcacgtggagcccttccaggaggagggcgagaccaccatcctgcagctggagaaggacctgagaacccaggtggagctgatgagaaagcagaagaaggagagaaagcaggagctgaagctgctgcaggagcaggaccaggagctgtgcgagatcctgtgcatgccccactacgacatcgacagcgccagcgtgcccagcctggaggagctgaaccagttcagacagcacgtgaccaccctgagagagaccaaggccagcagaagagaggagttcgtgagcatcaagagacagatcatcctgtgcatggaggccctggaccacacccccgacaccagcttcgagagagacgtggtgtgcgaggacgaggacgccttctgcctgagcctggagaacatcgccaccctgcagaagctgctgagacagctggagatgcagaagagccagaacgaggccgtgtgcgagggcctgagaacccagatcagagagctgtgggacagactgcagatccccgaggaggagagagaggccgtggccaccatcatgagcggcagcaaggccaaggtgagaaaggccctgcagctggaggtggacagactggaggagctgaagatgcagaacatgaagaaggtgatcgaggccatcagagtggagctggtgcagtactgggaccagtgcttctacagccaggagcagagacaggccttcgcccccttctgcgccgaggactacaccgagagcctgctgcagctgcacgacgccgagatcgtgagactgaagaactactacgaggtgcacaaggagctgttcgagggcgtgcagaagtgggaggagacctggagactgttcctggagttcgagagaaaggccagcgaccccaacagattcaccaacagaggcggcaacctgctgaaggaggagaagcagagagccaagctgcagaagatgctgcccaagctggaggaggagctgaaggccagaatcgagctgtgggagcaggagcacagcaaggccttcatggtgaacggccagaagttcatggagtacgtggccgagcagtgggagatgcacagactggagaaggagagagccaagcaggagagacagctgaagaacaagaagcagaccgagaccgagatgctgtacggcagcgcccccagaacccccagcaagagaagaggcctggcccccaacacccccggcaaggccagaaagctgaacaccaccaccatgagcaacgccaccgccaacagcagcatcagacccatcttcggcggcaccgtgtaccacagccccgtgagcagactgccccccagcggcagcaagcccgtggccgccagcacctgcagcggcaagaagacccccagaaccggcagacacggcgccaacaaggagaacctggagctgaacggcagcatcctgagcgccagaaccttcaagggcttccagatctag

SEQ ID NO: 273531 - DNA, 393 bp, Artificial Sequence
  derived and/or modified sequence
atggccactatagaggcactgcgtccataccagcccctgggcgcacttgttgtgactacaccccaggccgtctcagtgggagacgtaaggagagaacttacattctgtcgaaaaacaggacttcgcgtgatgggcatcgtcgagaatatgagcggattcacatgcccgcactgcacagaatgcacttccgtcttcagccgcggtgggggagaagaactggcccagctcgccggggtgccatttctcggcagtgttcctctcgaccccgcactcatgaggactctggaagagggacacgacttcattcaagaattccctggttcacccgcgttcgcagccctgacctcaatagcccagaaaatcctggacgctactccagcttgtctgccttag

SEQ ID NO: 273532 - DNA, 393 bp, Artificial Sequence
  derived and/or modified sequence
atggccaccatcgaggccctgcggccctaccagcccctgggcgccctggtggtgaccaccccccaggccgtgtctgtgggagatgtgcggcgggagctgaccttctgcaggaagacaggcctgcgggtgatgggcatcgtggagaacatgagcggcttcacctgcccccactgcacagagtgcacctctgtgttcagccggggcggcggggaggagctggcccagctggccggcgtgcccttcctgggctctgtgcccctggaccctgccctgatgaggaccctggaggagggccatgacttcatccaggagttccctggcagccctgcctttgctgccctgaccagcatcgcccagaagatcctggatgccaccccagcctgcctgccctag

SEQ ID NO: 273533 - DNA, 393 bp, Artificial Sequence
  derived and/or modified sequence
atggccaccatcgaggccctgcggccctaccagcccctgggcgccttggtggtgacgacgcctcaggccgtgagtgtgggggacgttcgcagggagctgacattctgcaggaagaccgggcttcgcgtgatggggatcgtagagaatatgtcagggtttacttgtccgcattgcacagaatgcactagtgtcttttcacggggtggcggagaggagctcgcccagttggccggggtgccattcttgggctcagtcccactcgacccggcactgatgaggaccctggaggaaggccatgactttattcaggagtttcctggatcaccggcatttgccgctctgacaagcatcgcacagaaaattctcgatgctacacccgcgtgtttgccttag

SEQ ID NO: 273534 - DNA, 393 bp, Artificial Sequence
  derived and/or modified sequence
atggctacgatcgaggcactgaggccctatcaaccactgggggcactcgtggtgaccaccccgcaagccgtctctgtaggcgacgtgcgccgagaactcacattttgccgtaagactggtctgagggttatgggtattgtcgaaaatatgtccggattcacttgtcctcactgtactgaatgtacctcagtcttcagtagaggaggcggagaagagcttgcacagctggccggtgtgccatttctgggtagcgtgccattggatccagctttgatgcgcactctcgaggaaggacacgacttcatccaggagttccccggtagtcctgcatttgccgctctgacgtctattgcccagaaaatcctggacgcaactcccgcttgcctcccatag

SEQ ID NO: 273535 - DNA, 393 bp, Artificial Sequence
  derived and/or modified sequence
atggccaccatcgaggccctgagaccctaccagcccctgggcgccctggtggtgaccaccccccaggccgtgagcgtgggcgacgtgagaagagagctgaccttctgcagaaagaccggcctgagagtgatgggcatcgtggagaacatgagcggcttcacctgcccccactgcaccgagtgcaccagcgtgttcagcagaggcggcggcgaggagctggcccagctggccggcgtgcccttcctgggcagcgtgcccctggaccccgccctgatgagaaccctggaggagggccacgacttcatccaggagttccccggcagccccgccttcgccgccctgaccagcatcgcccagaagatcctggacgccacccccgcctgcctgccctag

SEQ ID NO: 273536 - protein, 1053 aa, Artificial Sequence
  derived and/or modified sequence
MEVSGDPGIPALHRLCTRALSASPGPTALGPSTFLPWDVSARMTSARRRTDVGPRVAFTYPCTQLSPTRAHRHLPVHTVTYPCTQLSPTRAHSCHLPMHTVTYPCTPSPTRAHSCHLPVHTVTYTCTLSPTHACLHASTVSCLCCIPVHTVTYPCTLSPTCAHCHLHMRARTHPQPHACAVYLCILSPTRAHCHLHVHTVTYMCVPACTHSITPVHAPPDTSCAWAQAVHRWPVLWGSRSSSMSSGLKQTPMVGVTGPPWDPDAPAPAPAGTLTAHLIPGALQSSGLTLLLSLAAHCSGPQAKVLSPGGLDASGANLWASANCSLLQGFWCQPASQLPRDQLSALIQRLALLQVPLQAWQVSGKECRGAGTGGRGDDPTCGKRGREVGGDWGLRPPQRGRAPTGCHGESRVTRERRSAQLSCLANLASRCGLQDDFTLHPPNLLLFYNLSQVREADCRAFIRRAAQGDVELLSHLPDQRVALWRAAVACLVGAGWGWARCIGGSLPLGADLLALQGVARLRLSASDQQLLGALVCDMDASSIGAADPHMLENLRRCPRLTAAQRIALNSLLAGGKTSLGPPGSWTLEGLQALGPLATYISPHLWAQVQEAVGLGFFRSVVASCQVGRLGQREARCFVTSFLESKTKPVSSRPRLSTGNITAATLRDDLFLVHYDCAELESCLDGCILRTNLDTLLQHLLPTECQHVVKAKLAQIYPQGLPEDQLRLITSLVYLYSRTEIGQWSITSQDTVMALLASDVALENQTEAVLQKFLEHNGTVSGALLLAIGGTRLCWMSPHQIQTIHPQELRLAGALDLSSCPQSRKDVLYTKAHETFGSSGTLAAYYRLMRPYLGGSPGGAQPPSPVPPGGAPVEELRHLAHANISMDIDTFTSLNPLELQSLDVGNVTALLGHNVGDLQKARSHPTVRAWLRSLNSSTLGQLGLDASPTSPTGPAHGTRGPPSTTHQVLHLVHTSGLPTNDAQASTSGSLWAPLGYLPLAMALPCSLLCLLHWGTCILVSVDSVASGWLGSQGSGAGKTEVLDSAGRPLGLTGQL

SEQ ID NO: 273537 - DNA, 3162 bp, Artificial Sequence
  derived and/or modified sequence
atggaggtgagcggcgaccccggcatccccgccctgcacagactgtgcaccagagccctgagcgccagccccggccccaccgccctgggccccagcaccttcctgccctgggacgtgagcgccagaatgaccagcgccagaagaagaaccgacgtgggccccagagtggccttcacctacccctgcacccagctgagccccaccagagcccacagacacctgcccgtgcacaccgtgacctacccctgcacccagctgagccccaccagagcccacagctgccacctgcccatgcacaccgtgacctacccctgcacccccagccccaccagagcccacagctgccacctgcccgtgcacaccgtgacctacacctgcaccctgagccccacccacgcctgcctgcacgccagcaccgtgagctgcctgtgctgcatccccgtgcacaccgtgacctacccctgcaccctgagccccacctgcgcccactgccacctgcacatgagagccagaacccacccccagccccacgcctgcgccgtgtacctgtgcatcctgagccccaccagagcccactgccacctgcacgtgcacaccgtgacctacatgtgcgtgcccgcctgcacccacagcatcacccccgtgcacgccccccccgacaccagctgcgcctgggcccaggccgtgcacagatggcccgtgctgtggggcagcagaagcagcagcatgagcagcggcctgaagcagacccccatggtgggcgtgaccggccccccctgggaccccgacgcccccgcccccgcccccgccggcaccctgaccgcccacctgatccccggcgccctgcagagcagcggcctgaccctgctgctgagcctggccgcccactgcagcggcccccaggccaaggtgctgagccccggcggcctggacgccagcggcgccaacctgtgggccagcgccaactgcagcctgctgcagggcttctggtgccagcccgccagccagctgcccagagaccagctgagcgccctgatccagagactggccctgctgcaggtgcccctgcaggcctggcaggtgagcggcaaggagtgcagaggcgccggcaccggcggcagaggcgacgaccccacctgcggcaagagaggcagagaggtgggcggcgactggggcctgagacccccccagagaggcagagcccccaccggctgccacggcgagagcagagtgaccagagagagaagaagcgcccagctgagctgcctggccaacctggccagcagatgcggcctgcaggacgacttcaccctgcacccccccaacctgctgctgttctacaacctgagccaggtgagagaggccgactgcagagccttcatcagaagagccgcccagggcgacgtggagctgctgagccacctgcccgaccagagagtggccctgtggagagccgccgtggcctgcctggtgggcgccggctggggctgggccagatgcatcggcggcagcctgcccctgggcgccgacctgctggccctgcagggcgtggccagactgagactgagcgccagcgaccagcagctgctgggcgccctggtgtgcgacatggacgccagcagcatcggcgccgccgacccccacatgctggagaacctgagaagatgccccagactgaccgccgcccagagaatcgccctgaacagcctgctggccggcggcaagaccagcctgggcccccccggcagctggaccctggagggcctgcaggccctgggccccctggccacctacatcagcccccacctgtgggcccaggtgcaggaggccgtgggcctgggcttcttcagaagcgtggtggccagctgccaggtgggcagactgggccagagagaggccagatgcttcgtgaccagcttcctggagagcaagaccaagcccgtgagcagcagacccagactgagcaccggcaacatcaccgccgccaccctgagagacgacctgttcctggtgcactacgactgcgccgagctggagagctgcctggacggctgcatcctgagaaccaacctggacaccctgctgcagcacctgctgcccaccgagtgccagcacgtggtgaaggccaagctggcccagatctacccccagggcctgcccgaggaccagctgagactgatcaccagcctggtgtacctgtacagcagaaccgagatcggccagtggagcatcaccagccaggacaccgtgatggccctgctggccagcgacgtggccctggagaaccagaccgaggccgtgctgcagaagttcctggagcacaacggcaccgtgagcggcgccctgctgctggccatcggcggcaccagactgtgctggatgagcccccaccagatccagaccatccacccccaggagctgagactggccggcgccctggacctgagcagctgcccccagagcagaaaggacgtgctgtacaccaaggcccacgagaccttcggcagcagcggcaccctggccgcctactacagactgatgagaccctacctgggcggcagccccggcggcgcccagccccccagccccgtgccccccggcggcgcccccgtggaggagctgagacacctggcccacgccaacatcagcatggacatcgacaccttcaccagcctgaaccccctggagctgcagagcctggacgtgggcaacgtgaccgccctgctgggccacaacgtgggcgacctgcagaaggccagaagccaccccaccgtgagagcctggctgagaagcctgaacagcagcaccctgggccagctgggcctggacgccagccccaccagccccaccggccccgcccacggcaccagaggcccccccagcaccacccaccaggtgctgcacctggtgcacaccagcggcctgcccaccaacgacgcccaggccagcaccagcggcagcctgtgggcccccctgggctacctgcccctggccatggccctgccctgcagcctgctgtgcctgctgcactggggcacctgcatcctggtgagcgtggacagcgtggccagcggctggctgggcagccagggcagcggcgccggcaagaccgaggtgctggacagcgccggcagacccctgggcctgaccggccagctgtag

SEQ ID NO: 273538 - DNA, 2109 bp, Artificial Sequence
  derived and/or modified sequence
atggccgccgccgtgaccatccccggccccagaatcggcgccctgcagagcagcggcctgaccctgctgctgagcctggccgcccactgcagcggcccccaggccaaggtgctgagccccggcggcctggacgccagcggcgccaacctgtgggccagcgccaactgcagcctgctgcagggcttctggtgccagcccgccagccagctgcccagagaccagctgagcgccctgatccagagactggccctgctgcaggtgcccctgcaggcctggcagctgagctgcctggccaacctggccagcagatgcggcctgcaggacgacttcaccctgcacccccccaacctgctgctgttctacaacctgagccaggtgagagaggccgactgcagagccttcatcagaagagccgcccagggcgacgtggagctgctgagccacctgcccgaccagagagtggccctgtggagagccgccgtggcctgcctggtgggcgccggcctgagactgagcgccagcgaccagcagctgctgggcgccctggtgtgcgacatggacgccagcagcatcggcgccgccgacccccacatgctggagaacctgagaagatgccccagactgaccgccgcccagagaatcgccctgaacagcctgctggccggcggcaagaccagcctgggcccccccggcagctggaccctggagggcctgcaggccctgggccccctggccacctacatcagcccccacctgtgggcccaggtgcaggaggccgtgggcctgggcttcttcagaagcgtggtggccagctgccaggtgggcagactgggccagagagaggccagatgcttcgtgaccagcttcctggagagcaagaccaagcccgtgagcagcagacccagactgagcaccggcaacatcaccgccgccaccctgagagacgacctgttcctggtgcactacgactgcgccgagctggagagctgcctggacggctgcatcctgagaaccaacctggacaccctgctgcagcacctgctgcccaccgagtgccagcacgtggtgaaggccaagctggcccagatctacccccagggcctgcccgaggaccagctgagactgatcaccagcctggtgtacctgtacagcagaaccgagatcggccagtggagcatcaccagccaggacaccgtgatggccctgctggccagcgacgtggccctggagaaccagaccgaggccgtgctgcagaagttcctggagcacaacggcaccgtgagcggcgccctgctgctggccatcggcggcaccagactgtgctggatgagcccccaccagatccagaccatccacccccaggagctgagactggccggcgccctggacctgagcagctgcccccagagcagaaaggacgtgctgtacaccaaggcccacgagaccttcggcagcagcggcaccctggccgcctactacagactgatgagaccctacctgggcggcagccccggcggcgcccagccccccagccccgtgccccccggcggcgcccccgtggaggagctgagacacctggcccacgccaacatcagcatggacatcgacaccttcaccagcctgaaccccctggagctgcagagcctggacgtgggcaacgtgaccgccctgctgggccacaacgtgggcgacctgcagaaggccagaagccaccccaccgtgagagcctggctgagaagcctgaacagcagcaccctgggccagctgggcctggacgccagccccaccagccccaccggccccgcccacggcaccagaggcccccccagcaccacccaccaggtgctgcacctggtgcacaccagcggcctgcccaccaacgacgcccaggccagcaccagcggcagcctgtgggcccccctgggctacctgcccctggccatggccctgccctgcagcctgctgtgcctgctgcactggggcacctgcatcctggtgagcgtggacagcgtggccagcggctggctgggcagccagggcagcggcgccggcaagaccgaggtgctggacagcgccggcagacccctgggcctgaccggccagctgtag

SEQ ID NO: 273539 - DNA, 3162 bp, Artificial Sequence
  derived and/or modified sequence
atggaagttagtggggatcctgggatccctgctctgcaccgcctgtgtacaagagccctgagcgcaagccccggccccacagccctcgggccgagtacattcttaccctgggatgtgtcggcccgcatgacgtccgcaagacgtaggacagacgtcgggcccagggttgcctttacttatccctgcactcagctgtctccaacgagagcccatcgccatctccccgtccacactgtcacttacccttgtacccaacttagccctacacgggctcatagttgccaccttcctatgcatactgtgacctacccttgtacccccagtcccacccgggcccatagctgccacttaccagtgcataccgtcacttatacatgtacgctgtcaccgactcatgcttgtctccacgcaagtacagtgagctgcctgtgctgcattccagtgcacacagtcacatatccttgtaccttgagtcccacgtgtgcccattgccatctgcatatgcgagcccggacgcaccctcaaccacatgcatgcgccgtgtatctgtgcattctctcaccgactagggcgcattgccatctgcacgttcataccgtgacttacatgtgcgtgccagcctgtacccactctattaccccagtgcatgcaccccccgatactagctgcgcctgggctcaggccgtgcatcgctggcccgtcctctggggttcccggtcttcttctatgtcttccggcctcaagcagacgcccatggtgggcgtcactggtcctccttgggatcccgacgcccctgcgccagcccctgcggggaccctcaccgcacacctcatccctggggcactacagtcttctggcctgacactgctgttgagtctggcggcacactgcagcggccctcaagcaaaagtgctgtccccaggggggctggatgccagcggggctaacctctgggctagtgccaactgttcactcctgcaggggttttggtgccaacctgcctcccagcttccgcgcgatcaactgtcagctctgattcagcggctggctcttcttcaggtacctttgcaggcgtggcaggtatcagggaaggagtgtcggggcgctggtactgggggccgaggcgatgaccctacctgcggaaagagggggagggaagtgggcggggattgggggttacggcccccacaaagaggtcgcgccccaactggttgccatggggagtccagagtgacccgcgagagaagaagcgcccagctctcttgtttagctaatctagcgtcgcgctgtggcctgcaagatgatttcacactgcaccccccaaacctgttgttgttctacaatttaagtcaggtgcgagaagcagactgcagggccttcattcggagggctgcccagggtgacgttgagctgttatcccacctgcccgatcagagggtcgcactgtggcgcgcagctgtagcatgcctggtaggcgctgggtggggatgggctcgttgcatcggtggtagtctcccgctaggcgctgaccttttggcgctgcagggtgtggcccgcctgaggttgagcgcatcggaccaacagctgctgggcgctttagtgtgcgatatggacgcatcaagcattggcgcagcagacccacacatgcttgaaaacttgaggcgctgcccaaggctgaccgcagcccagcggattgccttaaattcactactggcaggcgggaagacgtccctgggcccccccggttcttggacactggagggcctgcaagctcttggaccgttggcaacatatatctcaccgcatttgtgggcccaagtgcaagaggccgtggggctgggtttctttcgcagtgtcgtggctagctgccaggtcgggcggcttgggcagcgggaagcccgatgctttgtcacatccttccttgaatccaaaacaaaacctgtgagcagccgccctaggcttagcaccggcaatatcacagctgcaacattacgggacgatctgttccttgttcattatgattgcgccgaactggaatcctgccttgatggatgcattctccgcaccaatctggacacactgcttcagcacctgctccccaccgagtgccaacacgttgtgaaggccaaactagcccagatctatccacaagggctgcccgaggatcaactccggctcatcaccagcttagtttacctgtattctcggaccgaaattggccagtggtctatcaccagccaagacacagtgatggccctgctggcctccgacgtggctctggagaatcagactgaggcggtgctacagaagttcttagagcataacggcactgtgagtggcgcgctgctcctcgccattgggggcacaagattatgctggatgtccccccatcagattcagacgatccatccgcaggaactgaggctcgccggagcactggatctgtcctcatgcccccaatcaaggaaagacgtcctctacacaaaggctcacgaaacatttggatctagcggtactctcgccgcttattatagattaatgaggccgtatctaggcgggtccccagggggggcacagcctccgagcccagtgccccccggcggtgcacccgtagaggagctgaggcaccttgcccacgcaaacatttccatggatatcgatacatttacatctctgaaccctctggagctgcagagcctcgacgttggaaatgtgacagctctgttgggacacaacgtgggcgacctccagaaggctcgatcccatcccacggtccgagcctggctacggagtctcaattcctctaccctggggcagttaggtctggatgcatctcctacctcgcccaccggccccgcccacgggacacgcggtccaccatccaccacccaccaggtgttgcacttggtccatactagtggtctccccaccaatgatgctcaagcaagtacgtcaggttccctgtgggctccgcttggctacctgcctttggccatggccctcccatgctccctgctgtgtctgcttcattggggaacctgtattttagtgtcggtcgattccgtcgcttctgggtggctagggagtcagggctccggcgcaggaaagaccgaggtgctggactctgccggcagacctctgggtctgactggtcaactgtag

SEQ ID NO: 273540 - DNA, 2109 bp, Artificial Sequence
  derived and/or modified sequence
atggcggcggctgtgacaattcctggtccacgcatcggggccctgcagtcttctggcctcaccttgctgctttccctggctgcccattgcagcggcccgcaagctaaggtgctctccccaggtgggttggatgcctccggcgcaaatctgtgggcatccgcaaactgctccctgctccaaggcttttggtgccagcccgctagtcagctcccacgagatcagcttagcgctctgatacaacgactggctttgcttcaggtgcctctgcaagcatggcagttaagctgtctggctaatctggcctcacgatgtgggctgcaggacgactttactctgcaccctcctaatctcctgctgttctataacttgagccaggtccgcgaggccgactgcagggcctttattcgaagagccgctcagggtgacgtcgagctactcagccatcttcctgatcagcgggtcgctctttggagggctgccgtagcgtgcctggtcggggcgggtctccgcctgtctgcttctgaccagcaactgctgggtgccttagtgtgcgatatggatgctagctctattggggctgcggacccccacatgctagaaaaccttcgcaggtgcccaaggctgacggccgctcagcggatagcccttaacagtctactcgctgggggcaagacatcattggggccaccgggttcctggactctggagggcctgcaagccctcggcccgctggccacttacattagcccacatctgtgggctcaagtgcaggaagctgtcggcctgggcttcttccgatctgtggtagcatcatgtcaggttggtcggttgggccagagagaagcccgttgctttgtgaccagtttcctggaaagcaaaactaaacccgtcagcagtagacctagactgtctactggtaacataacagccgccaccctacgcgacgatctgttcctggtccattacgactgtgccgaacttgagtcatgccttgatggatgcattttgcgaaccaatctggacactctcctgcagcatctgctgccaacagaatgccaacatgtcgtgaaggcaaagctggcgcagatttaccctcagggactgcctgaggatcagctcaggttaatcacatcgctggtctatctatactctcggactgaaattgggcagtggagcataacatcccaggatacagtgatggcactattagctagcgacgtggctctggagaaccagaccgaggccgtcctacaaaaatttctcgagcataacgggactgtaagtggggctctgctcctggccatcgggggcactcggctctgctggatgtctccacaccagatccagactatccatccgcaggagctgcgattggctggcgcactggatctatctagctgcccccagtcgcgaaaagacgtgctgtacactaaggcccatgaaacgttcggatcatcaggaacactcgcagcctactaccgcctgatgaggccatacctcggaggaagccccggcggcgctcagcctcctagccccgtccctccaggcggtgccccagtcgaggaactgagacatctcgctcacgcaaatattagcatggatatcgacactttcacttcccttaatccactggagctgcagtctctggacgtgggaaacgtgactgccctactgggccacaatgtcggagacttgcagaaagcgcgtagccatccaacggttcgggcctggctcaggtcactcaattcatccaccctcgggcagctcgggctcgacgcctcaccaacatcccccacaggcccagcccacggcacaagaggtcctcctagcacaacccatcaggttctccatctggtccacactagcgggctcccaactaacgatgcgcaagctagcacttctggatctctatgggctccactcggttacctgcctttggcaatggcattgccttgcagcctgctgtgtttacttcattggggaacttgcatccttgtgtctgttgacagcgtggcctctgggtggctggggagccaaggatctggcgcaggaaaaactgaagtcctcgactcagcaggacggccgctgggactgaccggccaactctag

SEQ ID NO: 273541 - DNA, 3162 bp, Artificial Sequence
  derived and/or modified sequence
atggaggtgtctggggaccccggcatcccagccctgcaccggctgtgcacccgggccctgagcgccagccctggccccacagccctgggccccagcaccttcctgccctgggatgtgtctgccaggatgaccagcgcccggcggaggacagatgtgggcccccgggtggccttcacctacccctgcacccagctgagccccacccgggcccaccgccacctgcctgtgcacacagtgacctacccctgcacccagctgagccccacccgggcccacagctgccacctgcccatgcacacagtgacctacccctgcacccccagccccacccgggcccacagctgccacctgcctgtgcacacagtgacctacacctgcaccctgagccccacccacgcctgcctgcacgccagcacagtgtcctgcctgtgctgcatccctgtgcacacagtgacctacccctgcaccctgagccccacctgtgcccactgccacctgcacatgagggcccggacccacccccagccccacgcctgtgctgtgtacctgtgcatcctgagccccacccgggcccactgccacctgcacgtgcacacagtgacctacatgtgtgtgcctgcctgcacccacagcatcacccctgtgcacgcccccccagacaccagctgtgcctgggcccaggccgtgcaccgctggcctgtgctgtggggcagccgcagcagctccatgagcagcggcctgaagcagacccccatggtgggcgtgacaggccccccctgggaccctgatgccccagccccagccccagctggcaccctgacagcccacctgatccctggggccctgcagagcagcggcctgaccctgctgctgagcctggccgcccactgcagcggcccccaggccaaggtgctgagccctgggggcctggatgccagcggggccaacctgtgggccagcgccaactgcagcctgctgcagggcttctggtgccagcctgccagccagctgccccgggaccagctgagcgccctgatccagaggctggccctgctgcaggtgcccctgcaggcctggcaggtgtctgggaaggaatgtagaggagctggcactggaggaagaggagatgaccccacctgtgggaagaggggccgggaggtgggcggggactggggcctgcggcccccccagaggggccgggcccccaccggctgccacggggagagccgggtgacccgggagaggagaagtgcccagctgagctgcctggccaacctggccagccgctgtggcctgcaggatgacttcaccctgcacccccccaacctgctgctcttctacaacctgagccaggtgcgggaggccgactgccgggccttcatccggcgggccgcccagggagatgtggagctgctgagccacctgcctgaccagagggtggccctgtggagggctgctgtggcctgcctggtgggcgccggctggggctgggcccgctgcattggaggcagcctgcccctgggcgctgacctgctggccctgcagggcgtggcccggctgcggctgagcgccagtgaccagcagctgctgggcgccctggtgtgtgacatggatgccagcagcatcggggctgctgacccccacatgctggagaacctgcggcgctgcccccggctgacagctgcccagagaattgccctgaacagcctgctggccggcggcaagaccagcctgggccccccaggctcctggaccctggagggcctgcaggccctgggccccctggccacctacatcagcccccacctgtgggcccaggtgcaggaggccgtgggcctgggcttcttccgctctgtggtggccagctgccaggtgggccgcctgggccagcgggaggcccgctgctttgtgaccagcttcctggagagcaagaccaagcctgtgagcagccggccccggctgagcacaggcaacatcacagctgccaccctgagagatgacctcttcctggtgcactatgactgtgccgagctggagagctgcctggatggctgcatcctgcggaccaacctggacaccctgctgcagcacctgctgcccacagagtgccagcacgtggtgaaggccaagctggcccagatctacccccagggcctgcctgaggaccagctgcggctcatcaccagcctggtgtacctgtacagcaggacagaaattggccagtggagcatcaccagccaggacacagtgatggccctgctggccagtgatgtggccctggagaaccagacagaggccgtgctgcagaagttcctggagcacaatggaacagtgtctggggccctgctgctggccatcggcggcacccggctgtgctggatgagcccccaccagatccagaccatccacccccaggagctgcggctggccggggccctggacctgagcagctgcccccagagcaggaaggatgtgctgtacaccaaggcccacgagaccttcggcagcagcggcaccctggccgcctactaccgcctgatgaggccctacctgggcggcagccctggaggagcccagccccccagccctgtgcccccaggaggagcccctgtggaggagctgcggcacctggcccacgccaacatctccatggacatcgacaccttcaccagcctgaaccccctggagctgcagagcctggatgtgggcaatgtgacagccctgctgggccacaacgtgggggacctgcagaaggcccggagccaccccaccgtgcgggcctggctgcggagcctgaacagcagcaccctgggccagctgggcctggatgccagccccaccagccccaccggccctgcccacggcacccggggcccccccagcaccacccaccaggtgctgcacctggtgcacaccagcggcctgcccaccaatgatgcccaggccagcaccagcggcagcctgtgggcccccctgggctacctgcccctggccatggccctgccctgcagcctgctgtgcctgctgcactggggcacctgcatcctggtgtctgtggacagcgtggccagcggctggctgggcagccagggcagcggggccggcaagacagaggtgctggacagcgctggccggcccctgggcctgaccggccagctgtag

SEQ ID NO: 273542 - DNA, 2109 bp, Artificial Sequence
  derived and/or modified sequence
atggctgctgctgtgaccatccctggcccccgcatcggggccctgcagagcagcggcctgaccctgctgctgagcctggccgcccactgcagcggcccccaggccaaggtgctgagccctgggggcctggatgccagcggggccaacctgtgggccagcgccaactgcagcctgctgcagggcttctggtgccagcctgccagccagctgccccgggaccagctgagcgccctgatccagaggctggccctgctgcaggtgcccctgcaggcctggcagctgagctgcctggccaacctggccagccgctgtggcctgcaggatgacttcaccctgcacccccccaacctgctgctcttctacaacctgagccaggtgcgggaggccgactgccgggccttcatccggcgggccgcccagggagatgtggagctgctgagccacctgcctgaccagagggtggccctgtggagggctgctgtggcctgcctggtgggcgccggcctgcggctgagcgccagtgaccagcagctgctgggcgccctggtgtgtgacatggatgccagcagcattggagctgctgacccccacatgctggagaacctgcggcgctgcccccggctgacagctgcccagagaattgccctgaacagcctgctggccggcggcaagaccagcctgggccccccaggctcctggaccctggagggcctgcaggccctgggccccctggccacctacatcagcccccacctgtgggcccaggtgcaggaggccgtgggcctgggcttcttccgctctgtggtggccagctgccaggtgggccgcctgggccagcgggaggcccgctgctttgtgaccagcttcctggagagcaagaccaagcctgtgagcagccggccccggctgagcactggaaacatcacagctgccaccctgagagatgacctcttcctggtgcactatgactgtgccgagctggagagctgcctggatggctgcatcctgcggaccaacctggacaccctgctgcagcacctgctgcccacagagtgccagcacgtggtgaaggccaagctggcccagatctacccccagggcctgcctgaggaccagctgcggctcatcaccagcctggtgtacctgtacagcaggacagagatcggccagtggagcatcaccagccaggacacagtgatggccctgctggccagtgatgtggccctggagaaccagacagaagctgtgctgcagaagttcctggagcacaacggcaccgtgtctggggccctgctgctggccatcggcggcacccggctgtgctggatgagcccccaccagatccagaccatccacccccaggagctgcggctggccggggccctggacctgagcagctgcccccagagcaggaaggatgtgctgtacaccaaggcccacgagaccttcggcagcagcggcaccctggccgcctactaccgcctgatgaggccctacctgggcggcagccctgggggcgcccagccccccagccctgtgcccccaggaggagcccctgtggaggagctgcggcacctggcccacgccaacatctccatggacatcgacaccttcaccagcctgaaccccctggagctgcagagcctggatgtgggcaatgtgacagccctgctgggccacaacgtgggggacctgcagaaggcccggagccaccccaccgtgcgggcctggctgcggagcctgaacagcagcaccctgggccagctgggcctggatgccagccccaccagccccactggacctgcccacggcacccggggcccccccagcaccacccaccaggtgctgcacctggtgcacaccagcggcctgcccaccaatgatgcccaggccagcaccagcggcagcctgtgggcccccctgggctacctgcccctggccatggccctgccctgcagcctgctgtgcctgctgcactggggcacctgcatcctggtgtctgtggacagcgtggccagcggctggctgggcagccagggcagcggggccggcaagacagaggtgctggacagcgctggccggcccctgggcctgaccggccagctgtag

SEQ ID NO: 273543 - DNA, 3162 bp, Artificial Sequence
  derived and/or modified sequence
atggaggtgagcggggaccccggcatccccgccctgcaccgcctctgcacccgggcgctcagtgctagtcctggacccactgcccttggccccagcaccttcctgccctgggacgtctcagccaggatgaccagtgcacgccgccgcacagacgtgggccccagagtggctttcacctacccgtgcacacagctgtcacctacccgtgcacaccgtcacctacccgtgcacaccgtcacctacccgtgcacacagctgtcacctacccgtgcacacagctgtcacctacccatgcacactgtaacctacccgtgcacaccatcacctacacgtgcacacagctgtcacctacctgtgcacactgtcacctacacgtgcacactgtcacctacacatgcgtgcctgcacgcatccacagtctcatgcctgtgctgtatacccgtgcacactgtcacctacccgtgcacactgtcacctacatgtgcacactgtcacctacacatgcgtgcccgcacgcatccacagcctcatgcctgtgctgtatacctgtgcatactgtcacctacccgtgcacactgtcacttacacgtgcacactgtcacctacatgtgcgtgcctgcatgcacccacagcatcacgcctgtgcatgctccaccagacacgtcctgcgcttgggcccaggctgtgcacaggtggccagtgctgtggggctccagaagttcctccatgtcctctggcctcaagcagacccccatggtgggggtcacaggtccaccctgggacccggatgccccggcccctgctcccgccgggaccctcacagcccaccttattccaggtgccctgcagagctcaggcctcaccctcctgctgtcccttgctgcccactgctctgggccccaggccaaggttctttccccaggagggctggatgccagcggggccaacctgtgggccagtgccaactgctccctgctgcaaggcttctggtgccagccggccagccagctgccccgggaccagctctcagccctaatccagaggctggccttgctgcaggtccccctccaggcctggcaggtgagcgggaaggagtgcagaggggcaggcacgggtggccgtggggatgacccgacatgtgggaaacggggccgagaagtgggtggggactggggcctgaggcctccgcagaggggaagggcgcccacgggctgccacggcgagtccagagtcacgagggagcgccgttctgcccagctcagctgcttggccaacctggcgtcacggtgcggcctccaggacgacttcacgctccacccacccaacctgctgctcttctacaacctgagccaggtgcgggaagccgactgccgggccttcatccgccgtgccgcccagggggacgtggagctgctgagccatctacccgaccagagggtcgccctgtggcgtgcggctgtggcctgcctggtgggcgctgggtggggatgggcccggtgcattggaggcagcctcccgctgggcgccgacctgctggccctgcagggggtggcccgcctgcgactcagcgcctccgaccagcaactgctcggggccctggtgtgtgacatggacgcgtccagcatcggtgccgcagacccccacatgctggagaacctgcggcgctgcccccggctgaccgctgcccagcgcattgcccttaactcactgctggccggtgggaagacctcgctcgggccccctggctcctggacactggaggggctacaggccctggggcccctggccacatacatcagccctcacctgtgggcgcaggtgcaggaggccgtgggcctgggcttcttccgcagcgtggtggcttcgtgccaggtgggaaggctcggccagcgcgaggccaggtgcttcgtcaccagcttcctggagtccaagaccaaaccagtgtcctccaggcccaggctcagcacaggcaacatcacggccgccacgctgcgggacgacctcttcctggtgcactacgactgtgcagagcttgagtcctgcctggatggctgcatcctcagaaccaacctggacaccctgttgcagcacctgctgcccactgagtgccagcatgtggtcaaggccaagctcgcacagatctacccacaaggcctcccggaggatcagctgcggctcatcacctcgctggtctacctctactcccgcaccgagatcggccagtggagcatcacctcccaggacacggtcatggctctgctggcctccgacgtggccctggagaaccagacagaggctgtgctgcagaagtttctggagcacaatggcacagtctccggtgccctgctgctggccatcgggggcacccgcctgtgctggatgagtcctcaccagatccagaccatccatccccaggagctccggctggccggggccctggacctctcctcctgcccccagagccggaaggacgtgctctacaccaaggcccatgagaccttcggcagcagcgggaccctagctgcctactaccgcctcatgcgcccctacctcggcggctcccctggtggagcccagcccccctcacccgtccccccaggcggcgccccggtggaggagctgcggcacctggcccacgccaacatctccatggacatcgacaccttcaccagcctgaaccccctcgagctgcagagcctggatgttggcaacgtgactgcgctgctgggccacaacgtgggagaccttcagaaggcccgcagccaccccaccgtcagggcctggctgcgcagcctcaacagctccaccctgggccagctcggcctggacgccagccccaccagccccactggcccagcccacggcaccagggggccccccagcaccacccaccaagtgctccatctggtccacacctcgggcctgcccacgaacgatgcccaggcctccacctcaggcagcctgtgggcccccctggggtacctgcccctggcgatggccctgccttgcagcctcctgtgcctgctgcactgggggacttgcatcctggtttctgtggacagcgttgcctcagggtggctgggttcacaggggtcaggtgcaggaaaaacagaggtgttagattcagctggacgcccacttgggctgacgggccagctctag

SEQ ID NO: 273544 - DNA, 2109 bp, Artificial Sequence
  derived and/or modified sequence
atggccgcagccgtcaccattcctggcccccgcattggtgccctgcagagctcaggcctcaccctcctgctgtcccttgctgcccactgctctgggccccaggccaaggttctttccccaggagggctggatgccagcggggccaacctgtgggccagtgccaactgctccctgctgcaaggcttctggtgccagccggccagccagctgccccgggaccagctctcagccctaatccagaggctggccttgctgcaggtccccctccaggcctggcagctcagctgcttggccaacctggcgtcacggtgcggcctccaggacgacttcacgctccacccacccaacctgctgctcttctacaacctgagccaggtgcgggaagccgactgccgggccttcatccgccgtgccgcccagggggacgtggagctgctgagccatctacccgaccagagggtcgccctgtggcgtgcggctgtggcctgcctggtgggcgctggcctgcgactcagcgcctccgaccagcaactgctcggggccctggtgtgtgacatggacgcgtccagcatcggtgccgcagacccccacatgctggagaacctgcggcgctgcccccggctgaccgctgcccagcgcattgcccttaactcactgctggccggtgggaagacctcgctcgggccccctggctcctggacactggaggggctacaggccctggggcccctggccacatacatcagccctcacctgtgggcgcaggtgcaggaggccgtgggcctgggcttcttccgcagcgtggtggcttcgtgccaggtgggaaggctcggccagcgcgaggccaggtgcttcgtcaccagcttcctggagtccaagaccaaaccagtgtcctccaggcccaggctcagcacaggcaacatcacggccgccacgctgcgggacgacctcttcctggtgcactacgactgtgcagagcttgagtcctgcctggatggctgcatcctcagaaccaacctggacaccctgttgcagcacctgctgcccactgagtgccagcatgtggtcaaggccaagctcgcacagatctacccacaaggcctcccggaggatcagctgcggctcatcacctcgctggtctacctctactcccgcaccgagatcggccagtggagcatcacctcccaggacacggtcatggctctgctggcctccgacgtggccctggagaaccagacagaggctgtgctgcagaagtttctggagcacaatggcacagtctccggtgccctgctgctggccatcgggggcacccgcctgtgctggatgagtcctcaccagatccagaccatccatccccaggagctccggctggccggggccctggacctctcctcctgcccccagagccggaaggacgtgctctacaccaaggcccatgagaccttcggcagcagcgggaccctagctgcctactaccgcctcatgcgcccctacctcggcggctcccctggtggagcccagcccccctcacccgtccccccaggcggcgccccggtggaggagctgcggcacctggcccacgccaacatctccatggacatcgacaccttcaccagcctgaaccccctcgagctgcagagcctggatgttggcaacgtgactgcgctgctgggccacaacgtgggagaccttcagaaggcccgcagccaccccaccgtcagggcctggctgcgcagcctcaacagctccaccctgggccagctcggcctggacgccagccccaccagccccactggcccagcccacggcaccagggggccccccagcaccacccaccaagtgctccatctggtccacacctcgggcctgcccacgaacgatgcccaggcctccacctcaggcagcctgtgggcccccctggggtacctgcccctggcgatggccctgccttgcagcctcctgtgcctgctgcactgggggacttgcatcctggtttctgtggacagcgttgcctcagggtggctgggttcacaggggtcaggtgcaggaaaaacagaggtgttagattcagctggacgcccacttgggctgacgggccagctctag

SEQ ID NO: 273545 - DNA, 3162 bp, Artificial Sequence
  derived and/or modified sequence
atggaggtgagcggcgaccccggcatccccgccctgcaccggctgtgcacgcgagccctctctgcatcacctggtcctaccgccctagggcccagcacttttcttccatgggacgtctccgctaggatgacgtctgcaagaagacgcaccgacgtggggccgcgagtggccttcacttacccatgtacccaactaagccctaccagagcccaccggcatcttcccgtgcacacagtgacttatccatgcacacaactgtcacctacacgggctcactcatgccatttaccaatgcacacagtcacatacccctgtacgccctcaccaactagagcccatagttgccacctccctgtgcataccgtgacctatacttgcaccctaagtcccacccacgcgtgcctccatgcctctaccgtgtcctgtctgtgttgtatacccgtccataccgtaacatatccctgtaccctttcgcccacctgtgctcactgccacctccacatgcgggccaggacgcatccacagccacacgcctgcgccgtttacctttgtatcctgtcaccaacccgagcacattgccacttgcacgtgcatactgtgacttacatgtgtgtgcccgcatgtacacacagcattacccctgtccatgcacctcctgacactagctgtgcatgggcccaggccgtgcatcgctggccggtgctttggggtagtcgcagcagtagcatgagctccggcctgaagcagaccccgatggtcggcgtgacaggtcctccttgggatcccgacgcccctgctccggctccggctgggaccttgacagcccatctgatcccaggggccttgcagagcagcggcctcacgttgctcctatcacttgccgcacattgcagtggcccacaggccaaggttctatctcccggcggtctcgacgcgtcgggggccaatctttgggcaagtgccaattgctctcttttacagggtttctggtgccagccagcatcacagctgccccgcgatcagctgtctgctctgatccagcgactggctctcctgcaggtcccactgcaggcatggcaggtgagcggaaaagaatgtcggggcgccggtacaggagggcgaggagacgatccaacttgtggaaaacggggccgcgaggtggggggtgactgggggctgcgcccaccacagaggggccgggcaccgacaggttgccacggggagagcagggtcacaagagaaagacgatccgcccagctgtcatgtctggcgaatttggcgtctagatgtggattgcaagatgattttaccctccatcctccgaatctcttgctgttctataatctcagtcaggttcgggaagccgactgcagggcatttatccgacgtgctgcccaaggtgatgttgagttgctgagtcaccttcccgaccagcgggtggccttgtggcgcgcagctgtcgcgtgcctcgtgggggcaggctggggctgggcccgatgcatcggtggctctttgcccttgggggcagatttgttggccctccagggcgtcgcacgtctcaggctgagcgcttctgaccagcagctgcttggcgccctggtctgcgatatggacgctagcagcatcggagcagccgacccacatatgctggagaacctcagacggtgtccccggctgacagctgcccagcgtattgcccttaattccctgctcgccggggggaagacaagtttgggtcccccaggttcatggacacttgaggggcttcaagccttaggaccactggcaacttacatctctccacacctgtgggcacaggtgcaggaagcagtggggcttggctttttccgtagtgtcgtggcgagctgccaggtgggtcgactggggcagagggaggcccgctgttttgtgacctctttcctggagagtaagacaaagccagtgagctcccgccccaggctgagcacaggaaacataacagccgccacccttcgcgacgacctctttctggtccattacgattgtgccgagctcgagagctgtctcgacggatgtattcttcgtaccaatctagacaccctcctgcagcatcttctccctacagaatgccagcacgtggttaaggccaaattagcgcagatttacccacaaggtttgcctgaagatcaattaaggttaatcacttcactggtctacctttactcaagaactgagatcggccagtggtctataacatctcaggacactgtgatggcacttctggcttcagacgtggccctggaaaaccagacggaggcagttttacagaagtttctggagcacaatggcaccgtgtccggtgcccttcttttggccattggcggcacccgcctctgttggatgagcccgcatcagatccagacaatacaccctcaggaactaagattagctggtgcactcgacttgagttcctgcccccagtcacgcaaggacgtgctctacacaaaggctcacgaaaccttcgggtcctccggcaccttggccgcctattacagactgatgcgtccctacttgggaggttctcccggtggcgcgcagccacccagccctgttcctccagggggagcacctgtggaagagcttagacatttggcacacgccaacatatccatggacatcgacacgtttacaagcctcaatccattggaattgcagagcctggatgtgggtaatgtgacggctctcctgggccataacgtgggggatcttcagaaagccagatcacaccccacagtgcgggcgtggctacgttctttgaattccagcactctggggcagctaggcttggacgcttccccaacttcgcccacgggtccggctcatggtacgcgcggtccgccatccacaacacaccaggttctccacctcgtgcacacttcagggctccccacaaatgatgcccaggcctcgacaagcggctcattatgggctccactggggtatctccctctagccatggcccttccttgcagcctactgtgtcttctgcattggggcacttgcattttggtttccgtagattctgtagcaagcggttggctcgggtcccaggggtcaggggcgggtaagacagaggtgctggatagcgccggaaggcccttggggctcacaggacagctgtag

SEQ ID NO: 273546 - DNA, 2109 bp, Artificial Sequence
  derived and/or modified sequence
atggccgccgccgtgaccatccccggcccccggatcggcgccctgcagtcgagcgggctgaccctcctattgagcttggccgcccactgtagcggtccacaggctaaagtactgagtccgggaggtcttgacgcttccggcgctaatctgtgggcgagcgcaaattgcagtctgctgcaaggcttctggtgccaaccagcctcgcagctgcccagagatcagctgagtgccctgattcagaggttggccctcctccaggtccctctccaagcgtggcagctatcgtgtctggcgaaccttgctagtcgttgtggtctgcaggacgacttcaccctgcacccaccaaatctgcttcttttttacaacctctcccaggtaagggaagccgactgccgggcctttattaggagggctgcccagggcgatgtggagttactcagccatcttcccgaccagagagttgccctgtggagagcagcagtcgcttgcctggttggggctggattgaggctgtcggcctctgatcagcagctgctaggcgctttagtgtgtgacatggatgcttcctccattggtgctgctgatccccacatgcttgaaaaccttaggagatgcccacgccttaccgctgcacaacggatagccttaaattcccttctggctggcgggaagacgagccttgggcccccgggctcctggaccctagaagggctccaggccttggggccactcgccacctacatttcaccccatctgtgggcccaagtgcaggaagctgtggggctcggtttcttccgaagtgtggtagctagctgtcaagtgggaagactcggccaacgtgaggcccgttgcttcgtgaccagtttccttgaaagtaagaccaagccggtcagctctcggccgagattaagtactggtaacattaccgccgccacccttcgggacgatctgttcctcgtacactatgactgcgcagaacttgaatcctgtctcgatggctgcattcttagaacaaatctggacacactgctccagcaccttctccctacagagtgtcagcatgttgtgaaagccaagctggcccagatctatccacaaggcttgcctgaggatcaacttcggctgattactagccttgtttacctgtacagtcgcacagagattggtcaatggtcaatcacatcgcaggataccgtaatggctctgttggcgagtgatgtggctttggaaaaccagacagaggcagtattacagaagtttctggagcataatggcaccgtcagtggcgccctcctgttggccattggtgggacccgcttatgctggatgtcaccccatcagatccagaccatacatccccaggagctgcgacttgcgggagcattggatctttcatcgtgcccacagagccgcaaagatgttctgtacactaaggcgcacgagacattcggtagctccggaaccttagccgcctactaccgcctaatgagaccatatttaggagggagccctggcggcgcgcagcctccctcgcctgtgccccccggaggtgcaccagttgaagagctaaggcatttggcccatgctaacattagcatggacatcgatactttcaccagtcttaatccgctcgagctgcagtctctggatgtggggaacgtgaccgccctgctggggcacaatgttggggacctgcagaaagccaggtcgcacccgaccgtgagagcctggctgcggtctctgaactcaagcacgttgggccagcttggactcgacgcgtcgcctacctctccgacagggcccgcccatggcacaaggggaccgcccagtaccacacaccaggtcttgcatctggtgcacacatctgggcttccaacaaatgatgcccaggcttccacaagcgggagtctttgggcccctttgggctatttgcctctcgctatggctctcccttgctctctgctctgcctgctgcactggggcacgtgcatcctggtgtctgttgattccgtcgctagtggatggctgggcagccaaggatctggtgcgggcaagactgaggtgctcgactctgctggccgcccccttggtctgactgggcagttgtag

SEQ ID NO: 273547 - DNA, 3162 bp, Artificial Sequence
  derived and/or modified sequence
atggaggtctctggggaccccggtatcccagcattacaccgtctgtgtactagagccttaagtgcaagccctggcccaacagcgctcgggccaagtacatttctgccctgggatgtaagtgcccgtatgactagcgccaggcgtaggaccgatgttggccctcgggtcgcattcacatatccatgtacccagctgtccccaacccgggctcatagacacctgcccgtccataccgttacctatccttgtactcagctttctcctacaagagcacattcatgccaccttcctatgcacacggtcacttatccatgtacaccttcacctacccgcgctcattcatgccacctcccggtgcacacagttacttatacttgtaccctgtcaccaacacatgcctgtctgcacgcaagtaccgtatcatgtctgtgctgcattccagtccacactgtgacctatccttgtaccctttcccccacatgcgcacattgccatctgcacatgcgggcacgcacacatccacagccacatgcctgcgccgtatatctgtgcatcctgagcccaacgcgtgctcattgtcatttacacgttcatacagtgacttatatgtgtgtgccagcctgtacacattccattacgcccgttcatgcacctccagacacgagctgtgcatgggcccaagcggtgcatagatggccagtgctgtggggcagccgatcctcctcaatgagtagcggtcttaagcaaactcctatggtgggtgtgaccggcccaccctgggaccccgacgcacctgccccagctcccgcaggcacattaaccgcccacctgattcctggcgcactgcagagtagtgggctgaccctgcttctgagtcttgcagcccactgttctggtcctcaggcaaaagtgttgagccctgggggtcttgatgcatccggcgcaaacctgtgggcttccgccaattgttctcttcttcaggggttctggtgtcagccggcaagccagctcccacgggatcagctctcagctttgattcaacgcttagccctgctccaggtgcctctgcaggcatggcaagtgtctggaaaagagtgccggggtgccggtacaggcggaaggggagacgacccaacctgcggcaaacgaggaagagaagtgggcggagactggggtctgcgccctccacagaggggccgtgcgccaaccgggtgccacggagagagccgtgtaacacgcgagagacggagcgcacagctgagctgcctggccaatctcgcatctcgttgcgggctgcaggatgacttcacacttcatcccccaaacctgctgctgttctacaatctgtcccaggtccgcgaagctgattgtagagcttttatcaggcgggctgcgcagggtgacgtggaactgctttcgcacctgccggatcagcgggtggcactgtggcgggcagcagtggcctgcctggttggagcaggctggggttgggccagatgtatcgggggatccctgcccctcggtgcagacctcctcgctcttcagggcgtcgctcgactgaggctgagcgcctcagatcaacagctcctgggggctcttgtctgtgatatggatgctagctcaatcggtgcggcagatcctcatatgctcgaaaacctgcgaagatgtccaaggctgaccgcagcccagcggatcgcacttaactctctactggccggaggcaagacctctctcgggcctccaggctcatggacactggaaggcctccaggctctggggcctctggctacatatatttccccccatctgtgggcacaagttcaagaggctgtgggactgggatttttcagaagcgtggtggcgtcttgccaggtgggcagactgggtcagagagaagccagatgcttcgttacgtcttttttggaatcgaagaccaaacccgtgtccagcaggcctaggcttagcaccggaaacatcaccgcagccactctgcgcgatgacctgttcttagtgcattatgactgtgctgagctggagtcttgcctcgatgggtgcatccttcgaacgaaccttgacacacttttacaacacctgctgccaactgaatgccagcacgttgtgaaagcgaagctcgcgcagatctatccccaagggctccctgaggatcagcttcgcctgatcacatcactggtgtatctgtactcacggacagagataggtcagtggagtatcacaagccaggacacagtgatggcactgctcgctagcgatgttgcactggaaaatcagaccgaagccgtcttgcagaagttcctcgagcacaatgggaccgtgagtggcgctctccttctggccatcggtggtacaaggttgtgttggatgagcccacaccaaatccagacaattcatccccaggaactccggctggcaggggctcttgatttatcttcttgcccacagtcacgcaaagatgtcctgtatacaaaagctcatgaaacgtttgggtccagcggtacactggcagcttactatcggctgatgaggccgtatctgggcggatcaccgggaggagctcagccgcctagcccggtgcctcccggaggcgcaccggtagaagaactgagacatctcgcacacgctaatatctccatggacattgacacattcactagtctaaaccctctggaactccagagcctggatgtgggaaatgtgactgctctcttggggcataatgtgggtgaccttcagaaggccaggagccaccctactgttagagcttggctgagatccctgaattcaagcactttaggccaactgggtctggacgccagcccaacatcacccaccggtcctgcacatgggacacgaggccctccgagcacaacacaccaggtgttgcacctggtgcatacatccggtctgcccactaacgacgctcaggccagcacatctggatcactgtgggcacccctgggctatctccccctggctatggcgcttccttgcagtcttctctgcctcctgcactgggggacatgtattctggtctccgtggactccgtcgcgtccggatggctgggaagtcagggttcgggggctggcaagaccgaggtgctggactcagcaggaagaccactaggcctgaccggtcagctttag

SEQ ID NO: 273548 - DNA, 2109 bp, Artificial Sequence
  derived and/or modified sequence
atggccgcagctgttactatacctggccctcggataggagcgctgcagtccagcggcttgactctgctgttgagcctggctgcgcactgctcaggaccccaggcaaaagtgttgagccctgggggattagacgctagtggtgcgaatctgtgggctagcgcgaactgcagcctactccaggggttctggtgccaacccgcatcccagctgccacgcgatcaactgtccgcacttatacaacgcctcgctctgttacaagtcccactgcaggcttggcagctctcctgtctggcaaatctggcctccagatgcggccttcaggacgacttcaccttacaccccccaaatctccttctgttctacaatctgtcccaggtcagggaggccgattgtcgggctttcattcgtagggccgcacagggcgatgtcgagcttcttagccacctgcccgaccagcgcgttgcactgtggcgggctgcagtcgcgtgtctggtgggcgcaggcctgcgacttagcgcttcagaccagcaactcctcggggctctcgtttgcgatatggatgcgtccagtatcggtgcagctgatccacacatgttagaaaatctgcggagatgtcctagattgacagctgctcaacggatcgctttgaattcactcctcgctgggggtaaaacctctcttggaccacccggttcgtggacgcttgagggcttgcaggcattaggacccctcgcaacttacatcagcccgcacttatgggcccaagtgcaagaggcagtaggcttgggcttctttcgctcggtagtggcctcatgccaggtgggcaggcttggccaaagagaggccaggtgcttcgtgacttcctttctagaatcaaagacaaagccggtgtcctccaggccacggctgtctaccggtaacattacagccgctaccctgagagacgacctgtttttggtgcactatgactgtgcagagctggaaagttgtctagacggatgcatactcagaacaaatctggataccctgctccagcacctactacctacagaatgccagcacgttgtgaaagcgaagctcgctcaaatttaccctcagggacttccagaggatcagctgcgcctgatcacctcccttgtgtacctgtactctagaaccgaaatagggcaatggtccatcaccagccaggatacggtaatggcacttctcgcctcggatgttgccctcgagaaccagactgaagcagtgttacagaaatttcttgaacacaacggaactgtcagtggggctctgctgctcgctatcggcggaaccagattatgctggatgagtccgcaccagatccaaaccattcacccgcaggaacttcgactcgcaggtgcactggacctctcgagttgtccccagtcaagaaaggatgtcctgtacaccaaggctcacgagacatttggatcaagcgggacacttgccgcttactacaggctcatgagaccatatctggggggatccccgggaggcgcacagcctccatcccccgtcccacccggtggagccccagttgaggagctgcgacatctcgcccacgcaaatatatcaatggatattgacaccttcacctctttgaaccccctggagttgcagtcattagacgtgggtaatgtgaccgctctgctcggccataacgttggggacctccagaaagcacgttcccaccctaccgtacgcgcttggttgagaagcctgaacagttcaacgctgggccagttgggattagatgcttctcctacctcacctactggcccagctcacggcacacgcggacccccaagcaccacacaccaggtgctacatttggtgcacacctccggcctccctacgaatgatgcccaagcatcgacttcaggtagcctctgggctcctcttggttacctgccactcgccatggccctcccgtgtagtctgctgtgcctgctgcactggggtacatgtattctggtgtcagtcgacagcgtggccagcgggtggctcggaagccagggttcaggtgccggaaagaccgaggtactcgactcggctggacgacctctcggcttgacgggccagctgtag

SEQ ID NO: 273549 - protein, 305 aa, Artificial Sequence
  derived and/or modified sequence
MDLSGVKKKSLLGVKENNKKSSTRAPSPTKRKDRSDEKSKDRSKDKGATKESSEKDRGRDKTRKRRSASSGSSSTRSRSSSTSSSGSSTSTGSSSGSSSSSASSRSGSSSTSRSSSSSSSSGSPSPSRRRHDNRRRSRSKSKPPKRDEKERKRRSPSPKPTKVHIGRLTRNVTKDHIMEIFSTYGKIKMIDMPVERMHPHLSKGYAYVEFENPDEAEKALKHMDGGQIDGQEITATAVLAPWPRPPPRRFSPPRRMLPPPPMWRRSPPRMRRRSRSPRRRSPVRRRSRSPGRRRHRSRSSSNSSR

SEQ ID NO: 273550 - protein, 228 aa, Artificial Sequence [sequence omitted]

SEQ ID NO: 273551 - protein, 577 aa, Artificial Sequence
  derived and/or modified sequence
MQWLMRFRTLWGIHKSFHNIHPAPSQLRCRSLSEFGAPRWNDYEVPEEFNFASYVLDYWAQKEKEGKRGPNPAFWWVNGQGDEVKWSFREMGDLTRRVANVFTQTCGLQQGDHLALMLPRVPEWWLVAVGCMRTGIIFIPATILLKAKDILYRLQLSKAKGIVTIDALASEVDSIASQCPSLKTKLLVSDHSREGWLDFRSLVKSASPEHTCVKSKTLDPMVIFFTSGTTGFPKMAKHSHGLALQPSFPGSRKLRSLKTSDVSWCLSDSGWIVATIWTLVEPWTAGCTVFIHHLPQFDTKVIIQTLLKYPINHFWGVSSIYRMILQQDFTSIRFPALEHCYTGGEVVLPKDQEEWKRRTGLLLYENYGQSETGLICATYWGMKIKPGFMGKATPPYDVQVIDDKGSILPPNTEGNIGIRIKPVRPVSLFMCYEGDPEKTAKVECGDFYNTGDRGKMDEEGYICFLGRSDDIINASGYRIGPAEVESALVEHPAVAESAVVGSPDPIRGEVVKAFIVLTPQFLSHDKDQLTKELQQHVKSVTAPYKYPRKVEFVSELPKTITGKIERKELRKKETGQM

SEQ ID NO: 273552 - DNA, 1734 bp, Artificial Sequence
  derived and/or modified sequence
atgcagtggttgatgcgctttaggaccctgtggggaattcataaatcttttcacaatattcacccagcgccatcccagctcaggtgcagatccttaagtgaattcggggctccgagatggaacgattatgaagtgcctgaggaatttaattttgcctcctacgtgttggattactgggcacagaaggagaaggaagggaagcgaggtccgaaccccgcattctggtgggtgaacggacaaggggatgaggtcaaatggtcattccgcgagatgggggacttgactcggagagtcgcaaatgtcttcactcaaacctgtgggctgcaacagggagatcacttggctctgatgctccctagagtgccagagtggtggttggtggccgtggggtgcatgagaacaggaattattttcattcccgccactatcctgctgaaggcaaaagacattctgtaccgtcttcagctgagcaaggcaaaaggcatcgtcactatcgatgcgctggcttccgaggtggactccatcgcctcccaatgcccatctttgaagaccaagcttctcgtatcggaccattctcgggaggggtggctggacttcagaagcttggttaagtccgcttcccctgaacatacctgtgtgaagtctaagacccttgatcctatggttatcttctttacatccggtactacaggctttccaaaaatggccaaacactcccacggattagcactgcagccctcatttccgggatcccgtaagctgcggtcactgaagacaagcgacgtgagctggtgcctgtctgactcagggtggatcgtggcaactatatggacccttgtggagccatggacagctggttgcaccgtttttatccatcatctgcctcagttcgacaccaaggtgattatacagacactgctaaagtacccaataaatcacttttggggcgtctcttcaatttatcgcatgattctccagcaggatttcacttccatccggttcccagcactcgagcattgctatacagggggtgaggtcgtattacctaaggaccaggaggaatggaaacgccgcacagggcttctgctgtatgaaaattacggccagagtgagacgggcctcatctgtgccacgtactggggtatgaagatcaaaccgggcttcatggggaaggctactcctccatatgatgtccaggtgattgacgacaagggcagtatcctgcccccgaatacggaaggtaacatcggaattcggatcaagcccgtgcgtcccgtgtccttgtttatgtgctacgaaggtgaccctgagaaaaccgcaaaggtggagtgcggagacttctataataccggagaccgagggaagatggatgaggagggatacatttgttttcttggcaggtccgatgatattatcaacgcaagtggctacaggattggaccagctgaggtcgagtcagcactggtcgagcatcctgccgtggccgagtccgccgtggtggggagtccagaccctattcgcggggaagttgttaaagcattcatcgtcttgactccacaattcctgtctcatgataaggatcaactcaccaaggaactacaacaacacgtgaaaagcgtcactgcaccctataagtacccacgaaaggtggagtttgtatccgaactgccaaagacaattacgggaaagattgaacggaaagagctgcggaaaaaagaaaccggacagatgtag

SEQ ID NO: 273553 - DNA, 1734 bp, Artificial Sequence
  derived and/or modified sequence
atgcagtggctgatgcgattccggaccttgtggggcattcacaaatcatttcataatattcacccggccccctctcagctgcggtgtaggtctttatctgaatttggtgctcctcgctggaacgactatgaggttcccgaagaatttaacttcgcttcatatgtactggactattgggcccagaaagaaaaagaaggcaagcgaggtcccaatcctgctttctggtgggtaaacgggcagggcgacgaggttaagtggagcttccgggaaatgggtgacctcacgcgacgcgtcgcaaacgtctttacccagacgtgcggcctgcagcagggcgatcatcttgcactcatgctccctcgagttcccgagtggtggctcgtggcggtgggctgtatgcgcacagggattatcttcattcccgctaccattctgctgaaggcaaaagatatactgtaccgtctacagttatcaaaggccaaggggatcgtgacgatcgacgctctggcctcagaggtcgattctattgcctctcagtgcccttctttaaaaacaaagctgctcgtgtccgatcattcgagagaaggctggttggattttcgcagcctggtgaagtccgcaagtccagaacatacctgcgtgaaatccaaaacactggatcccatggtgatcttctttacatcaggaacaactgggtttccaaaaatggccaaacacagtcatggactcgcccttcaacccagcttccccgggtctaggaaactgaggagtctgaagacctctgacgtgagttggtgccttagcgactcggggtggattgtggccaccatctggaccctggttgagccttggacggcgggctgcacggtgtttatacaccacttacctcagttcgacaccaaggtgattatccaaacactgctcaagtatcctatcaaccacttttggggagtttcaagtatctaccggatgattctgcagcaggactttactagcatacggttccccgctctcgagcactgctacaccggcggagaggtggtgttgcctaaggaccaggaagagtggaagaggcgaaccggactccttctttatgaaaattacggacaatccgagaccgggttgatttgtgcgacttactgggggatgaaaattaaaccagggttcatgggcaaggcaacccctccatatgatgtgcaggtgatagatgataaggggagcatcctgccaccaaatactgaaggcaacatcggcattcgcattaaacccgtgcgcccagtgagtctgtttatgtgttacgaaggagacccagagaaaacggccaaagtagagtgtggagatttttataacaccggcgaccgcggaaagatggacgaggaggggtatatctgtttccttggacgttccgatgatattattaatgcaagtggatacagaattggtcccgctgaggtggaaagcgccctggtggagcatcccgctgtcgctgagagtgcagtcgtcggtagtccagatcccatcagaggggaagtggtcaaggctttcattgtactgacgccacagttcttaagccacgataaggaccagcttacaaaagagcttcagcagcatgtgaagagcgtgacggccccttataaataccctaggaaggttgagttcgtctccgaactgcctaagacaatcactggaaagattgagcgaaaggagttacgaaaaaaagagaccggccagatgtag

SEQ ID NO: 273554 - DNA, 1734 bp, Artificial Sequence
  derived and/or modified sequence
atgcagtggctgatgaggttccgcaccctgtggggcatccacaagagcttccacaacatccacccagcccccagccagctgcgctgccgcagcctgtctgaatttggagccccccgctggaatgactatgaggtgcctgaggagttcaactttgccagctatgtgctggactactgggcccagaaggagaaggagggcaagaggggccccaacccagccttctggtgggtgaatggccagggagatgaggtgaagtggagcttccgggagatgggagacctgacccggcgggtggccaacgtgttcacccagacctgtggcctgcagcagggcgaccacctggccctgatgctgccccgggtgcctgagtggtggctggtggccgtgggctgcatgaggacaggcatcatcttcatcccagccaccatcctgctgaaggccaaggacatcctgtaccgcctgcagctgagcaaggccaagggcatcgtgaccattgatgccctggccagcgaggtggacagcatcgccagccagtgccccagcctgaagaccaagctgctggtgtctgaccacagccgggagggctggctggacttccgcagcctggtgaagagcgccagccctgagcacacctgtgtgaagagcaagaccctggaccccatggtgatcttcttcaccagcggcaccaccggcttccccaagatggccaagcacagccacggcctggccctgcagcccagcttccctggcagcaggaagctgcggagcctgaagaccagtgatgtgtcctggtgcctgagtgacagcggctggatcgtggccaccatctggaccctggtggagccctggacagctggctgcaccgtcttcatccaccacctgccccagtttgacaccaaggtgatcatccagaccctgctgaagtaccccatcaaccacttctggggcgtgagcagcatctacaggatgatcctgcagcaggacttcaccagcatccgcttccctgccctggagcactgctacacaggaggagaggtggtgctgcccaaggaccaggaggagtggaagagaagaacaggcctgctgctgtatgaaaattatggccagagcgagaccggcctcatctgtgccacctactggggcatgaagatcaagccaggcttcatgggcaaggccaccccaccctatgatgtgcaggtgattgatgacaagggcagcatcctgccccccaacacagagggcaacatcggcatccgcatcaagcctgtgcggcctgtgtccctcttcatgtgctatgaaggagaccctgagaagacagccaaggtggagtgtggggacttctacaacacaggagaccggggcaagatggatgaggagggctacatctgcttcctgggccgcagtgatgacatcatcaatgccagcggctacagaattggccctgctgaggtggagagcgccctggtggagcaccctgctgtggccgagagcgctgtggtgggcagcccagaccccatccggggggaggtggtgaaggccttcatcgtgctgaccccccagttcctgagccatgacaaggaccagctgaccaaggagctgcagcagcacgtgaagtctgtgacagccccctacaagtaccccaggaaggtggagtttgtgtctgagctgcccaagaccatcaccgggaagattgaaaggaaggagctgaggaagaaggagaccggccagatgtag

SEQ ID NO: 273555 - DNA, 1734 bp, Artificial Sequence
  derived and/or modified sequence
atgcagtggctgatgcggttccggaccctgtggggcatccacaagtcattccacaacattcatcccgcaccgtctcaactgcgatgtaggtctttatcagagtttggcgcccctcgctggaatgactatgaggttcccgaggaatttaactttgcgtcttatgttttggactattgggcccagaaggagaaggagggtaaaagagggccaaatcctgcattctggtgggtgaatggacagggggacgaggtaaagtggagctttcgagagatgggtgatcttactcgcagggtggccaatgtgttcactcaaacctgcggcctgcagcagggcgaccacttggctctgatgctgccccgcgtccctgagtggtggctcgtcgccgtcggatgtatgcgtacaggcatcatttttatcccagctacaatcctgttaaaggcaaaggatatattgtacagactgcagctaagcaaggccaaaggcatcgtgactattgacgctcttgcttccgaagtcgatagcattgcctctcagtgtccttcactcaaaacgaagttgcttgtttccgaccatagcagagaggggtggctggacttccgatctctggtcaagagtgcctcaccggagcatacctgcgtgaaatccaaaaccttggatccaatggtcattttttttacctcgggaactaccggattcccaaagatggctaaacactcacatggactcgccctacagcccagctttccagggagcaggaagcttcgtagcctaaagacatcagacgtttcctggtgcctctccgattccggctggattgttgccacaatctggactttggttgagccatggaccgctggctgcacggtgtttattcaccacctgccgcagtttgatacaaaagtaataatccagactctgctaaaataccccattaatcacttttggggcgtttctagtatttatcgcatgatacttcagcaggacttcacttcaatacgcttccctgctctggagcactgctacacagggggagaggtggtgctcccaaaggatcaagaggagtggaaacgccggacggggttactactgtacgagaattatgggcaaagcgagactggactgatttgcgctacgtattggggcatgaaaattaagcctggcttcatgggcaaggctacacccccttatgatgtacaagttatagacgataaaggatccattctacctccaaataccgagggtaatattggaatcaggatcaaacccgtacgccccgtgagcctgtttatgtgttatgagggcgaccccgagaaaaccgccaaggtggagtgcggcgatttttataataccggtgaccgaggtaagatggacgaagaaggatacatctgctttctcggccggagtgatgacattattaacgcttctggataccgtattggtcctgctgaagtggaatccgcattggtggagcatccagccgtggccgaatccgctgttgtcggatctcctgatccgatccgtggagaagtggtgaaggcatttatagtcctcaccccacagtttttatcccatgataaggatcagctgactaaagaattacagcagcatgtgaaaagcgtgactgcaccttacaagtatcccaggaaggtggagttcgtctccgagctgccaaaaacaatcacaggtaaaattgaacgaaaggaactgaggaagaaggagaccgggcagatgtag

SEQ ID NO: 273556 - DNA, 1734 bp, Artificial Sequence
  derived and/or modified sequence
atgcagtggctgatgcggttccggaccctgtggggcatccacaagagctttcacaatatacaccctgcaccaagtcagctacggtgtcggagcctgagcgaattcggggcacctcggtggaacgattatgaagtgcccgaagaatttaactttgccagctatgttctggattactgggcccaaaaagagaaggagggcaaaagaggacctaaccccgccttctggtgggtcaatggacagggggatgaggtcaaatggtcatttagagagatgggagaccttactcgacgggtggctaatgtgttcactcaaacctgtggcttgcagcaaggtgaccacttggcactcatgctgccacgagtgccggagtggtggctggtcgccgtcggctgtatgcgcactggcatcatcttcatcccggccaccatcttattgaaagctaaggacatcctgtacagactgcagctctccaaagctaaaggaattgtgacaatcgatgctctggccagcgaggttgattccatcgcctctcagtgcccctccctcaaaacgaaactcctggtgtcggatcacagtcgtgaaggatggctcgacttcagatctctcgtgaaaagtgccagccccgaacacacatgtgtaaagagtaagacacttgatcctatggttatcttctttacatccgggacaaccggatttcccaaaatggctaaacacagccacggattagccttgcagccctctttccctggctccaggaaacttcgatcactcaagacaagcgatgtcagttggtgcctgagcgactccggctggatagtggcaaccatatggactctcgtagagccatggacggctggctgtacagtattcattcatcacctgccccaatttgatactaaggtcatcattcaaacgctgctcaagtacccaatcaaccacttttggggcgtgtcctccatttaccgcatgatcctgcaacaggattttacatccatccggtttccggccctcgagcactgctacactgggggagaagtggtgctccctaaagaccaagaggaatggaagcgccgcactgggctgctgttgtacgaaaattacggacagtccgaaacaggcctgatttgtgctacttattggggtatgaaaattaagcccggatttatgggcaaggcaacacccccttacgatgtccaagttatcgatgataaggggtctatactgccccctaacacggagggaaacataggcatacgaatcaagccggtgagaccagttagcctctttatgtgctacgagggagatccagaaaagactgcaaaggtcgagtgcggagatttttacaacaccggagatcgcggaaaaatggatgaggagggttacatctgctttttgggtcgctcagacgacattatcaatgcttctggctataggatcggacccgcagaggtcgagagcgcactcgttgagcacccagctgtggcggagtccgccgtggttgggtctcccgatccgatcagaggagaggttgttaaggcttttattgtcttgaccccgcagttcctgagccatgataaggatcagctgaccaaagagctacagcagcatgtaaagagcgtaacagccccttataagtatccccgcaaagtggagttcgtgtccgagctgcccaaaactattaccggcaaaattgagcgcaaagaactacgcaagaaagaaaccggtcagatgtag

SEQ ID NO: 273557 - DNA, 1734 bp, Artificial Sequence
  derived and/or modified sequence
atgcagtggctaatgaggtttaggaccttgtggggcattcataagtcttttcacaacattcaccccgctccatcacagcttagatgtaggtcactgagtgagtttggcgctccgaggtggaatgactatgaggtgcccgaggaatttaactttgcctcttacgtcctcgattactgggcccagaaagagaaagagggaaaaagaggacccaacccagccttctggtgggtaaacggacagggagacgaagttaaatggagcttccgggaaatgggggatcttacacgcagagtcgcgaatgtcttcacacaaacctgcggactgcagcagggcgatcacctggccctgatgctgccgagggtgcctgaatggtggctggtggctgtggggtgcatgagaaccggcataatattcatcccggctactatcctgctgaaggctaaggacattctgtatagattgcagctgagcaaggcaaaaggaatcgtgactattgacgcccttgccagcgaagtggactcaattgctagccagtgcccttctctgaaaacgaagctgctcgtgagcgaccacagtcgggaagggtggcttgattttcgcagtctggtgaagtccgcatcaccggagcacacatgtgtgaaatcaaagacactcgacccaatggtgatcttctttacatccgggacaaccggattccctaagatggctaagcatagtcatgggctcgccctccagccatcattcccgggttctcgaaagctccgtagcctgaagaccagtgatgtgtcctggtgtctcagtgacagcggatggattgtggctaccatctggacactggtggaaccctggaccgccggttgtactgtctttattcaccatcttccacagttcgatacaaaggtgatcattcagaccttgctgaagtatccaatcaatcacttttggggcgtgtccagcatttacagaatgattcttcagcaagacttcacctctattcgcttcccagccctcgagcactgctataccggcggagaagtcgtcctcccaaaagaccaggaagaatggaagagaagaaccggtctgctgctctacgaaaactatggtcagagcgagaccggcctaatctgcgctacttactggggtatgaagatcaagccaggcttcatgggaaaagccacacccccttacgatgtgcaggtgattgatgataagggaagcatcctgcctcctaatactgaagggaacatcggaattcggattaaacctgtgcgaccggtctccctctttatgtgttacgaaggggaccccgagaaaactgccaaggtcgaatgcggcgatttttacaacacaggcgataggggaaaaatggacgaagaaggctatatctgttttctcggtcgatctgatgacattattaacgcctcaggctatcgaataggccctgcggaggttgaatctgccctggtcgaacacccagcagttgcagagagcgcagtggttgggtctcccgatcctatccgaggggaggtcgtcaaggccttcattgtgctgaccccacagttccttagccacgataaggaccaattgacaaaggagctacagcaacacgtgaaatcagtgaccgcaccatataagtatcccaggaaagtggagtttgttagtgagcttcctaagactatcactggaaaaattgaaagaaaagagctgagaaagaaggaaaccggacagatgtag

SEQ ID NO: 273558 - DNA, 1734 bp, Artificial Sequence
  derived and/or modified sequence
atgcagtggttgatgaggttcagaacactgtggggaattcataagagctttcacaacatccatcctgccccatcacagctgaggtgtcggtctctgtccgaattcggtgcaccacgttggaatgactatgaggtgcccgaagagttcaactttgcatcttatgtgttagactactgggcgcagaaggagaaagaagggaaaagagggccaaaccctgccttctggtgggtgaacggccagggcgacgaggtgaaatggtcgttcagagagatgggagatctcacgaggcgggtggcgaacgtgtttacccaaacctgtgggctccagcagggagatcacctcgccctgatgctaccaagagtcccggaatggtggttggtcgcagtgggatgcatgaggacaggcatcatctttattcctgccactatcttgctcaaggctaaggacatattgtacagactacagctttctaaggctaagggcatcgtcactatcgacgccctggcctccgaagtagactctatcgcttcacagtgccccagtttgaagacaaaactgttggtctcagaccactcacgggagggttggctcgactttaggagcctcgtcaagtctgcctcacctgaacacacttgtgtgaagagtaaaaccctggaccccatggtcatcttctttacaagcgggactactggatttcctaaaatggccaagcactcccacggactggcattgcagccatcattccccggtagcagaaagttgaggtccctgaagaccagtgacgtcagctggtgtctctccgatagcggctggatcgtggccacaatttggactctggtggagccctggaccgcaggctgtacagtcttcattcaccatctcccccagttcgacaccaaagtgatcatccagactttactgaaataccctattaaccatttctggggcgtgtccagcatttaccgtatgattctacagcaggacttcacttccatcagatttccagctttagagcattgctacactggcggagaagtggtactgcctaaggaccaggaggaatggaaaaggcgcactggacttctactgtacgagaactatgggcaaagcgaaacaggtctgatctgcgccacgtactggggaatgaagataaagcctggcttcatgggcaaagcgactcccccatacgatgtccaggtgatagacgataaaggtagtattttgcctcccaatacagaagggaatatagggatcagaatcaaaccagtccgtcctgtctcccttttcatgtgttacgagggcgaccccgagaagacagcaaaggtagagtgtggagatttctacaacaccggggaccgcggtaagatggacgaggaaggatatatatgctttctgggccgttcagacgacatcatcaacgcttctggatatcggattgggccagcagaggttgagtctgccttagtggagcatcctgcggtcgcagagtctgccgtcgttggaagcccggaccctatccggggagaggtggtgaaggcttttatcgtgttaacccctcaatttctaagccacgataaggatcagctgaccaaagagttacagcagcacgttaagtccgtaaccgccccttataagtatcctcggaaggtcgaattcgtgtctgaactaccaaaaacgatcaccggcaagatagagaggaaggagctgcgaaagaaagaaactggacagatgtag

SEQ ID NO: 273559 - DNA, 1734 bp, Artificial Sequence
  derived and/or modified sequence
atgcagtggctgatgagattcagaaccctgtggggcatccacaagagcttccacaacatccaccccgcccccagccagctgagatgcagaagcctgagcgagttcggcgcccccagatggaacgactacgaggtgcccgaggagttcaacttcgccagctacgtgctggactactgggcccagaaggagaaggagggcaagagaggccccaaccccgccttctggtgggtgaacggccagggcgacgaggtgaagtggagcttcagagagatgggcgacctgaccagaagagtggccaacgtgttcacccagacctgcggcctgcagcagggcgaccacctggccctgatgctgcccagagtgcccgagtggtggctggtggccgtgggctgcatgagaaccggcatcatcttcatccccgccaccatcctgctgaaggccaaggacatcctgtacagactgcagctgagcaaggccaagggcatcgtgaccatcgacgccctggccagcgaggtggacagcatcgccagccagtgccccagcctgaagaccaagctgctggtgagcgaccacagcagagagggctggctggacttcagaagcctggtgaagagcgccagccccgagcacacctgcgtgaagagcaagaccctggaccccatggtgatcttcttcaccagcggcaccaccggcttccccaagatggccaagcacagccacggcctggccctgcagcccagcttccccggcagcagaaagctgagaagcctgaagaccagcgacgtgagctggtgcctgagcgacagcggctggatcgtggccaccatctggaccctggtggagccctggaccgccggctgcaccgtgttcatccaccacctgccccagttcgacaccaaggtgatcatccagaccctgctgaagtaccccatcaaccacttctggggcgtgagcagcatctacagaatgatcctgcagcaggacttcaccagcatcagattccccgccctggagcactgctacaccggcggcgaggtggtgctgcccaaggaccaggaggagtggaagagaagaaccggcctgctgctgtacgagaactacggccagagcgagaccggcctgatctgcgccacctactggggcatgaagatcaagcccggcttcatgggcaaggccacccccccctacgacgtgcaggtgatcgacgacaagggcagcatcctgccccccaacaccgagggcaacatcggcatcagaatcaagcccgtgagacccgtgagcctgttcatgtgctacgagggcgaccccgagaagaccgccaaggtggagtgcggcgacttctacaacaccggcgacagaggcaagatggacgaggagggctacatctgcttcctgggcagaagcgacgacatcatcaacgccagcggctacagaatcggccccgccgaggtggagagcgccctggtggagcaccccgccgtggccgagagcgccgtggtgggcagccccgaccccatcagaggcgaggtggtgaaggccttcatcgtgctgaccccccagttcctgagccacgacaaggaccagctgaccaaggagctgcagcagcacgtgaagagcgtgaccgccccctacaagtaccccagaaaggtggagttcgtgagcgagctgcccaagaccatcaccggcaagatcgagagaaaggagctgagaaagaaggagaccggccagatgtag

SEQ ID NO: 273560 - DNA, 2147 bp, Artificial Sequence
  derived and/or modified sequence
agccatctcttcccaaggcaggtggtgacttgagaactctgtgcctggtttctgaggactgtttcaccatgcagtggctaatgaggttccggaccctctggggcatccacaaatccttccacaacatccaccctgccccttcacagctgcgctgccggtctttatcagaatttggagccccaagatggaatgactatgaagtaccggaggaatttaactttgcaagttatgtactggactactgggctcaaaaggagaaggagggcaagagaggtccaaatccagctttttggtgggtgaatggccaaggggatgaagtaaagtggagcttcagagagatgggagacctaacccgccgtgtagccaacgtcttcacacagacctgtggcctacaacagggagaccatctggccttgatgctgcctcgagttcctgagtggtggctggtggctgtgggctgcatgcgaacagggatcatcttcattcctgcgaccatcctgttgaaggccaaagacattctctatcgactacagttgtctaaagccaagggcattgtgaccatagatgcccttgcctcagaggtggactccatagcttctcagtgcccctctctgaaaaccaagctcctggtgtctgatcacagccgtgaagggtggctggacttccgatcgctggttaaatcagcatccccagaacacacctgtgttaagtcaaagaccttggacccaatggtcatcttcttcaccagtgggaccacaggcttccccaagatggcaaaacactcccatgggttggccttacaaccctccttcccaggaagtaggaaattacggagcctgaagacatctgatgtctcctggtgcctgtcggactcaggatggattgtggctaccatttggaccctggtagaaccatggacagcgggttgtacagtctttatccaccatctgccacagtttgacaccaaggtcatcatacagacattgttgaaataccccattaaccacttttggggggtatcatctatatatcgaatgattctgcagcaggatttcaccagcatcaggttccctgccctggagcactgctatactggcggggaggtcgtgttgcccaaggatcaggaggagtggaaaagacggacgggccttctgctctacgagaactatgggcagtcggaaacgggactaatttgtgccacctactggggaatgaagatcaagccgggtttcatggggaaggccactccaccctacgacgtccagtttcatatggaggcctcagttgaaaactgcattattgtgagcatgaacaccgctgaccctggcagccagggcatcacacacagcctcttgctacaggtcattgatgacaagggcagcatcctgccacctaacacagaaggaaacattggcatcagaatcaaacctgtcaggcctgtgagcctcttcatgtgctatgagggtgacccagagaagacagctaaagtggaatgtggggacttctacaacactggggacagaggtaagatggatgaagagggctacatttgtttcctggggaggagtgatgacatcattaatgcctctgggtatcgcatcgggcctgcagaggttgaaagcgctttggtggagcacccagcggtggcggagtcagccgtggtgggcagcccagacccgattcgaggggaggtggtgaaggcctttattgtcctgaccccacagttcctgtcccatgacaaggatcagctgaccaaggaactgcagcagcatgtcaagtcagtgacagccccatacaagtacccaaggaaggtggagtttgtctcagagctgccaaaaaccatcactggcaagattgaacggaaggaacttcggaaaaaggagactggtcagatgtaatcggcagtgaactcagaacgcactgcacacctaaggcaaatccctggccactttagtctccccactatggtgaggacgagggtggggcattgagagtgttgatttgggaaagtatcaggagtgccatgattccaatgttttccttcttttaaattaaattcagttgctctgcttcctccaagtcctctgtatctttagaatttcccaggtgagcactcataacgcaagtaataaaatactgatatcaac

SEQ ID NO: 273561 - DNA, 2051 bp, Artificial Sequence
  derived and/or modified sequence
agccatctcttcccaaggcaggtggtgacttgagaactctgtgcctggtttctgaggactgtttcaccatgcagtggctaatgaggttccggaccctctggggcatccacaaatccttccacaacatccaccctgccccttcacagctgcgctgccggtctttatcagaatttggagccccaagatggaatgactatgaagtaccggaggaatttaactttgcaagttatgtactggactactgggctcaaaaggagaaggagggcaagagaggtccaaatccagctttttggtgggtgaatggccaaggggatgaagtaaagtggagcttcagagagatgggagacctaacccgccgtgtagccaacgtcttcacacagacctgtggcctacaacagggagaccatctggccttgatgctgcctcgagttcctgagtggtggctggtggctgtgggctgcatgcgaacagggatcatcttcattcctgcgaccatcctgttgaaggccaaagacattctctatcgactacagttgtctaaagccaagggcattgtgaccatagatgcccttgcctcagaggtggactccatagcttctcagtgcccctctctgaaaaccaagctcctggtgtctgatcacagccgtgaagggtggctggacttccgatcgctggttaaatcagcatccccagaacacacctgtgttaagtcaaagaccttggacccaatggtcatcttcttcaccagtgggaccacaggcttccccaagatggcaaaacactcccatgggttggccttacaaccctccttcccaggaagtaggaaattacggagcctgaagacatctgatgtctcctggtgcctgtcggactcaggatggattgtggctaccatttggaccctggtagaaccatggacagcgggttgtacagtctttatccaccatctgccacagtttgacaccaaggtcatcatacagacattgttgaaataccccattaaccacttttggggggtatcatctatatatcgaatgattctgcagcaggatttcaccagcatcaggttccctgccctggagcactgctatactggcggggaggtcgtgttgcccaaggatcaggaggagtggaaaagacggacgggccttctgctctacgagaactatgggcagtcggaaacgggactaatttgtgccacctactggggaatgaagatcaagccgggtttcatggggaaggccactccaccctacgacgtccaggtcattgatgacaagggcagcatcctgccacctaacacagaaggaaacattggcatcagaatcaaacctgtcaggcctgtgagcctcttcatgtgctatgagggtgacccagagaagacagctaaagtggaatgtggggacttctacaacactggggacagaggtaagatggatgaagagggctacatttgtttcctggggaggagtgatgacatcattaatgcctctgggtatcgcatcgggcctgcagaggttgaaagcgctttggtggagcacccagcggtggcggagtcagccgtggtgggcagcccagacccgattcgaggggaggtggtgaaggcctttattgtcctgaccccacagttcctgtcccatgacaaggatcagctgaccaaggaactgcagcagcatgtcaagtcagtgacagccccatacaagtacccaaggaaggtggagtttgtctcagagctgccaaaaaccatcactggcaagattgaacggaaggaacttcggaaaaaggagactggtcagatgtaatcggcagtgaactcagaacgcactgcacacctaaggcaaatccctggccactttagtctccccactatggtgaggacgagggtggggcattgagagtgttgatttgggaaagtatcaggagtgccatgattccaatgttttccttcttttaaattaaattcagttgctctgcttcctccaagtcctctgtatctttagaatttcccaggtgagcactcataacgcaagtaataaaatactgatatcaac

SEQ ID NO: 273562 - DNA, 1894 bp, Artificial Sequence
  derived and/or modified sequence
aatcctgcggatcacctgatcagagagaactgaacctacaaaagagagctcaacctccttttccatacctaccagggacctagttcagctacgtcctaaacagtaccaggcaggtggtgacttgagaactctgtgcctggtttctgaggactgtttcaccatgcagtggctaatgaggttccggaccctctggggcatccacaaatccttccacaacatccaccctgccccttcacagctgcgctgccggtctttatcagaatttggagccccaagatggaatgactatgaagtaccggaggaatttaactttgcaagttatgtactggactactgggctcaaaaggagaaggagggcaagagaggtccaaatccagctttttggtgggtgaatggccaaggggatgaagtaaagtggagcttcagagagatgggagacctaacccgccgtgtagccaacgtcttcacacagacctgtggcctacaacagggagaccatctggccttgatgctgcctcgagttcctgagtggtggctggtggctgtgggctgcatgcgaacagggatcatcttcattcctgcgaccatcctgttgaaggccaaagacattctctatcgactacagttgtctaaagccaagggcattgtgaccatagatgcccttgcctcagaggtggactccatagcttctcagtgcccctctctgaaaaccaagctcctggtgtctgatcacagccgtgaagggtggctggacttccgatcgctggttaaatcagcatccccagaacacacctgtgttaagtcaaagaccttggacccaatggtcatcttcttcaccagtgggaccacaggcttccccaagatggcaaaacactcccatgggttggccttacaaccctccttcccaggaagtaggaaattacggagcctgaagacatctgatgtctcctggtgcctgtcggactcaggatggattgtggctaccatttggaccctggtagaaccatggacagcgggttgtacagtctttatccaccatctgccacagtttgacaccaaggtcatcatacagacattgttgaaataccccattaaccacttttggggggtatcatctatatatcgaatgattctgcagcaggatttcaccagcatcaggttccctgccctggagcactgctatactggcggggaggtcgtgttgcccaaggatcaggaggagtggaaaagacggacgggccttctgctctacgagaactatgggcagtcggaaacgggactaatttgtgccacctactggggaatgaagatcaagccgggtttcatggggaaggccactccaccctacgacgtccaggtcattgatgacaagggcagcatcctgccacctaacacagaaggaaacattggcatcagaatcaaacctgtcaggcctgtgagcctcttcatgtgctatgagggtgacccagagaagacagctaaagtggaatgtggggacttctacaacactggggacagaggtaagatggatgaagagggctacatttgtttcctggggaggagtgatgacatcattaatgcctctgggtatcgcatcgggcctgcagaggttgaaagcgctttggtggagcacccagcggtggcggagtcagccgtggtgggcagcccagacccgattcgaggggaggtggtgaaggcctttattgtcctgaccccacagttcctgtcccatgacaaggatcagctgaccaaggaactgcagcagcatgtcaagtcagtgacagccccatacaagtacccaaggaaggtggagtttgtctcagagctgccaaaaaccatcactggcaagattgaacggaaggaacttcggaaaaaggagactggtcagatgtaa

SEQ ID NO: 273563 - protein, 376 aa, Artificial Sequence
  derived and/or modified sequence
MAGPRYPVSVQGAALVQIKRLQTFAFSVRWSDGSDTFVRRSWDEFRQLKKTLKETFPVEAGLLRRSDRVLPKLLGQASLDAPLLGRVGRTSRGLARLQLLETYSRRLLATAERVARSPTITGFFAPQPLDLEPALPPGSRVILPTPEEQPLSRAAGRLSIHSLEAQSLRCLQPFCTQDTRDRPFQAQAQESLDVLLRHPSGWWLVENEDRQTAWFPAPYLEEAAPGQGREGGPSLGSSGPQFCASRAYESSRADELSVPAGARVRVLETSDRGWWLCRYGDRAGLLPAVLLRPEGLGALLSGTGFRGGDDPAGEARGFPEPSQATAPPPTVPTRPSPGAIQSRCCTVTRRALERRPRRQGRPRGCVDSVPHPTTEQ

SEQ ID NO: 273564 - DNA, 1131 bp, Artificial Sequence
  derived and/or modified sequence
atggccggccccagataccccgtgagcgtgcagggcgccgccctggtgcagatcaagagactgcagaccttcgccttcagcgtgagatggagcgacggcagcgacaccttcgtgagaagaagctgggacgagttcagacagctgaagaagaccctgaaggagaccttccccgtggaggccggcctgctgagaagaagcgacagagtgctgcccaagctgctgggccaggccagcctggacgcccccctgctgggcagagtgggcagaaccagcagaggcctggccagactgcagctgctggagacctacagcagaagactgctggccaccgccgagagagtggccagaagccccaccatcaccggcttcttcgccccccagcccctggacctggagcccgccctgccccccggcagcagagtgatcctgcccacccccgaggagcagcccctgagcagagccgccggcagactgagcatccacagcctggaggcccagagcctgagatgcctgcagcccttctgcacccaggacaccagagacagacccttccaggcccaggcccaggagagcctggacgtgctgctgagacaccccagcggctggtggctggtggagaacgaggacagacagaccgcctggttccccgccccctacctggaggaggccgcccccggccagggcagagagggcggccccagcctgggcagcagcggcccccagttctgcgccagcagagcctacgagagcagcagagccgacgagctgagcgtgcccgccggcgccagagtgagagtgctggagaccagcgacagaggctggtggctgtgcagatacggcgacagagccggcctgctgcccgccgtgctgctgagacccgagggcctgggcgccctgctgagcggcaccggcttcagaggcggcgacgaccccgccggcgaggccagaggcttccccgagcccagccaggccaccgcccccccccccaccgtgcccaccagacccagccccggcgccatccagagcagatgctgcaccgtgaccagaagagccctggagagaagacccagaagacagggcagacccagaggctgcgtggacagcgtgccccaccccaccaccgagcagtag

SEQ ID NO: 273565 - DNA, 1131 bp, Artificial Sequence
  derived and/or modified sequence
atggccggaccgagataccccgtgtccgtacagggggccgccctagttcagattaaaagactccagacatttgcttttagtgtgaggtggtctgatggttcagacacattcgttagacgctcctgggacgaatttcgacagcttaagaagacactcaaggagacctttcccgtagaagctggcctcctaagaagaagcgaccgtgtcctccccaagctgctgggtcaggcaagcctggacgcccccctactcgggagagtggggaggacaagccggggcctggccaggcttcagctgttggagacctacagtagacgtctgctggctaccgcagagcgggtcgccaggtctcctacaattacagggttcttcgccccccagccgctggacctggagccagccctgccccctggtagtcgcgtcatcctacccacaccggaagagcagcccctttctcgcgccgctggcagattgtctatccatagtcttgaagcccagagtctgcgttgcctgcagccattttgcactcaggacactagggaccggccatttcaggctcaggcacaggaaagcctggatgtgttgctgcggcatccttccggatggtggcttgtggaaaatgaggatcggcagaccgcttggttccctgctccctacctggaggaggctgctccaggacaaggaagggagggcgggccatctttgggctcttctggacctcagttttgtgccagccgcgcctacgagtcatcccgcgccgacgagttgagcgtcccggccggtgcccgggtgagggtgctggagacttctgatagggggtggtggttatgtcgctacggcgatcgagccgggctgttgccagcagtgctcttgcgcccggagggattaggggccctgctgtctggaaccggttttcgggggggcgatgatccagcaggggaggccagggggttcccggagccatcccaggctaccgctcctcctcccactgttcccacccggccatctcctggcgcaattcagtctcggtgctgtacggtcactcgtagggcactggaaaggcgtccacggagacagggccgaccgcgcggttgtgtggacagtgtgcctcacccgacaactgagcagtag

SEQ ID NO: 273566 - DNA, 1131 bp, Artificial Sequence
  derived and/or modified sequence
atggccggcccccgctaccctgtgtctgtgcagggcgccgccctggtgcagatcaagaggctgcagacctttgccttctctgtgcgctggagcgatggcagtgacacctttgtgagaagatcctgggatgagttccggcagctgaagaagaccctgaaggagaccttccctgtggaggccggcctgctgcggcggagtgacagagtgctgcccaagctgctgggccaggccagcctggatgcccccctgctgggccgggtgggccgcaccagccggggcctggcccggctgcagctgctggagacctacagccggcggctgctggccacagctgagcgggtggcccggagccccaccatcaccggcttctttgccccccagcccctggacctggagcccgccctgcccccaggcagcagggtcatcctgcccaccccagaggagcagcccctgagcagagctgctggccgcctgagcatccacagcctggaggcccagagcctgcgctgcctgcagcccttctgcacccaggacacccgggaccggcccttccaggcccaggcccaggagagcctggatgtgctgctgcggcaccccagcggctggtggctggtggagaatgaagatcggcagacagcctggttccctgccccctacctggaggaggccgcccctggccagggccgggagggcggccccagcctgggcagcagcggcccccagttctgtgccagccgggcctatgagagcagcagagcagatgagctgtctgtgcctgctggggcccgggtgcgggtgctggagaccagtgaccggggctggtggctgtgccgctatggagacagagctggcctgctgcctgctgtgctgctgcggcctgagggcctgggcgccctgctgtctggaacaggcttcagaggaggagatgatcctgctggggaggcccggggcttccctgagcccagccaggccacagcccccccacccaccgtgcccacccggcccagccctggggccatccagagccgctgctgcaccgtgacccggcgggccctggagcggcggccccggcggcagggccggccccggggctgtgtggacagcgtgccccaccccaccacagagcagtag

SEQ ID NO: 273567 - DNA, 1270 bp, Artificial Sequence
  derived and/or modified sequence
agccatggcaggcccccgatacccagtttcagtgcaaggggcagccctggtgcagatcaagaggctccaaacgtttgccttctctgtgcgctggtcagacggcagcgacaccttcgtgcgcaggagttgggacgaattcaggcagctcaagaagaccctcaaggagaccttcccggtggaggcgggcctgctgcggagatctgaccgcgttctcccaaagcttctcggtcaggccagcctggatgcaccactgttgggacgcgtggggcgcacgagccgcggcctggcgcgcctgcagctgttggaaacctattctcggaggctgctggcgactgcagagcgcgtggcacggagcccgacgatcactggcttcttcgcaccgcaacccctggacctggagcccgcgctgccacccggcagccgggtgatcctgcccaccccagaggagcagcctctttctcgcgctgcgggccgcctctccatccacagtctggaggctcagagcctgcgctgcctgcagcccttctgtacccaggacacgcgggataggccttttcaggcgcaggcccaggagagcctggacgtgctgctgcggcacccctcaggctggtggctggtggagaacgaagaccggcagaccgcctggtttccagcgccctacctggaggaggcggccccgggccaaggccgggagggaggcccgtccctagggagcagcggtccccagttctgtgcttcccgcgcctacgagagcagccgcgcagatgagctgtccgtgcccgcgggggcgcgcgtgcgcgtgttggaaacgtcagaccgcggctggtggctatgcaggtacggcgaccgggcgggcctactccccgcggtgctgctgcggccggaagggctgggcgctctcctgagcgggacggggttccgtggaggagacgacccggcgggtgaggcccggggcttccctgaaccctcccaggccaccgcccctccccccaccgtgcccacccgaccttcgccgggcgccatccagagccgctgctgcaccgtcacacgcagggccctggagcggcgcccacggcgccagggccgccctcgagggtgcgtggactctgtgccgcaccccacgacggagcagtgagcgcgaggatcccgatgaggggatggaccgcgccatcccagggctggggaggagcggggagggcggatctccctggccagcagggatgggagggggccatttgctgttcctctgagtaaagcttgttctgcatga

SEQ ID NO: 273568 - DNA, 1131 bp, Artificial Sequence
  derived and/or modified sequence
atggccggcccccggtaccccgtgagcgtgcagggcgccgccctggtccagataaaacgcctccaaacgtttgccttttccgtgcgttggtccgacggttctgacaccttcgtaaggcggtcatgggacgagtttagacagctcaaaaagactctaaaggagacgttccccgtggaggctggactgttgcgccggagtgacagggttctgccgaagttgcttggacaagccagtttggacgcccccctcctaggcagagtgggtagaacatcccgaggattggcccggctccagctgctagaaacctacagccgcaggctcctggccacagccgaacgagtggccagatctcccactatcacagggtttttcgccccacagccactcgaccttgaaccggcccttcccccgggctccagagttattctccctacccccgaagaacagcccctctctcgggctgccgggagactcagcatccactcgttggaggctcagagtcttcgatgtctccagcccttctgcacccaagatactcgagaccgccctttccaggctcaggctcaagaatcactggacgtgctgcttcgccatcctagcgggtggtggctagttgagaacgaggatcggcagacggcctggttccctgccccatatcttgaggaggccgctcctgggcagggaagagaaggcgggccctccctgggctcctccgggcctcagttttgtgcatctagggcctacgagtcgagtagagctgacgaattatcagttcctgctggcgccagagttcgagtgcttgaaaccagtgataggggctggtggctgtgtagatatggggacagggcaggcttgcttcccgctgtactgctccggcccgaagggcttggagctctcttgtcgggaactgggttccgaggtggtgacgaccctgcaggggaggctagaggctttcctgagcccagccaagccaccgcaccccccccgacggtgcctactcgcccctcgccgggcgcaatccaatctcggtgttgcaccgtgactcgcagagccctcgaacggcggccacggcgtcaaggccgacctagagggtgcgttgattccgtgcctcaccctacgacagagcagtag

SEQ ID NO: 273569 - DNA, 1131 bp, Artificial Sequence
  derived and/or modified sequence
atggcaggccctcggtatcccgtttccgtccagggcgcagccctggtgcagatcaagaggctgcaaacctttgccttctcagtccggtggtccgatggatctgacaccttcgtgagacgcagctgggacgaatttcggcaactgaaaaagactctcaaggagacattccctgttgaggccggtttgcttcggcgttccgaccgggtgcttccaaaactgcttgggcaggcttcgctggacgcaccgctgcttgggagagttggccgtacaagccgcggactggccaggctgcagcttctggagacatactcacgcaggctactggcaaccgccgagcgcgtggccagatccccgactattactggattctttgcaccccagcccttggatctagagcccgctttgcctcccggatctcgcgtgatcctgccaacccctgaagagcaaccactgtcccgcgcagcaggcagactgagcattcactcactcgaggcccaatcgctgcggtgtctacagccgttctgcacgcaggacacgcgggaccggccatttcaggcccaggcccaggaaagcttagacgtgctgctgaggcacccttccggatggtggctggtggaaaacgaggaccggcagactgcctggttcccggctccttacttagaagaggccgcaccaggccagggcagagagggaggcccttccctgggcagttcagggcctcagttctgtgcttccagggcttacgaaagcagcagggccgatgagctgagcgtgccagccggtgctagggtacgcgttctagagacgagcgaccgcggatggtggctgtgtcggtacggagacagagccggacttctccccgcagtattattaagacctgagggcctcggggctcttctttccgggactgggtttcgtggcggagatgatcccgcaggggaggcaaggggcttccccgagcctagtcaggctaccgctcctccacccaccgtccctactcggccttcgcctggggctatacagagccggtgttgtacggttaccaggcgggctcttgagcgaagaccaagacgccaggggaggccgcgagggtgtgttgactcagtgccacatcccactacagagcagtag

SEQ ID NO: 273570 - DNA, 3051 bp, Artificial Sequence
  derived and/or modified sequence
agtggcagcagcagccatggggaagccgggcgtggaggcagcaccgggctcggagctggccagggttccctagcctatggagcacgcagccaccacaggccccaggcctggacctccctctcggcgggtggagaatgttgtgctacgagccaaggactggctgccaggagctcctgggggcaccgcagtgtgggccaccagcttggaagcagaggtcccaccagatctagcgctcaataaggagcagcagctgcagatctccaaggagctggtcgacattcagatcacaacccaccacctacatgagcagcatgaggctgaaatcttccagctgaagagtgaggtgcagcccaagaacaccatgaaccccgagaatgagcagcacaggctggggagcggcgtgagtgtgcagccacctagctcaggggagagggcagcaccagagaccccaagcctagggtctcatccagccagccctgtgtgccccacagctgcagggggaagtgaagtgggcgctggagcatcaggaggcccggcagcaggcactggtgacgcgtgtgtgagtggccatctcacctggggccccatcctggagcagagagaacccctgatcgtgggcctgctgagcctcacccccgtgtcttcagggcaaccctgggccggcagctgcagggagcccgagaggaggccagggcagccgggcagcgactggccacacaggctgtggtgaggctctgccctgactgcttggagacctggagggtgggggccccagaagctcagccggggtccactctcagggcacaggtggagggctgcttccaccccaggtgctgtgcagctgccaaggccagctccgtcaggcagaggctgaaaatgcccggctgcagctgcagctcaagaaactgaaggatgagtacgtcctacggctgcaacactgcgcctggcaggcagtggtgagccctgcaggagcaccctgaggcctagggagcccaagcctggcctgggtgtgctggatagcttcagggagaccccagggccccggcactgctcagcctgctggggtggggggatggttggaaaagatggggggtgggccccatgcggacccagcccgccgcctccaggagcacgcagatggtgcaggccaagcgccagccaccacggccctccggacattcctggaggcgactctggaggacatccgggcagcgcaccgcagccgtgagcagcagctggcccgggctgcccgcagctaccacaagaggctggtggatctgagccgcaggcatgaagagctactggttgcctacaggtgggccccgctgggatgggaggtgtcaggcatctgtgggtctctaagcctctgtgcctcaaaggcttggtgtgcagcaggagtggccccagacagacactagcctaccctgacagggcacctgggaacccccaagctatttttgacatagccagcttggacctggaaccattgcccgtgcccctggtcactgacttcagccatcgggaggaccaggtgaggctagagacccccagaagctccaggcccgggtgccccccacccacccactgccccacactggccccaggcctcatcctgggctcaacagagacctcagccccgggcctctgaggggcttgccttgttcagccaactgaaacgtccccaccacaaacctctgtagcacggcgggcctggggcactgctctcatccccaaaaaagagacccggtggagcctcccaggggggaacatcagagccacagtgagtgccctcatgggtgtgggggaggcctgtgggggatgagcagagagcacaacgcctgcaccctggggcccccagttgctccaccaagcccccgccagacagggtctggtcacagcaatgcactcagtggcacatccccaccctggggtccctccgtgggtcccggcgacactgataatcacaggaaagagaagaggggctgctgcaggtggagctggccttgaacacggaggatcagggagagcacacctgagggaggtttccgctgagacctggaggacgcgaggggtgggagcagggcgcctggtgaccgggccagcccttgcctctgggcctccatgttcccagctgtacaatgggcagggctccccaaggaccatttcctggggtttagggcacacccgtgtgggggtggcatccctgttgatgctggagtcactgtctgggctggccttgtggtttagccctcccccagcagccagcagaccccctgggcccgggctgtccctatacacggatggctccaaggcctggggggcgccacaggagcacgggggggcccatgcctccctcactcactcccaggtgtcccctcccggctctgggaacctgactcagcacggtcacgtctgtccctgtgtcaccatgccagctctcaaaaccactcctcctttcctctcccctcacaggggcctggacgctgcatcctgggcccagatccaccagaagctccgggacttctcccgcagcacccaggtaggaggcaagggctggcccaggcccatcctcacgccatgccccagctcatggcttacatccccatgccaggcagagctggaacgggagcgggcacagctgctggtccgggccacgatggctgaagagcaactttctgagctacaggagtacgtggaccagcacctgggcaggtgggcagagggagctgggtgtgaccccagggccctggtctggttggaatgaaggatgatggctgcctcaggcgctaaaagcagacctgtccacagctgggcaagtcacttaagcatggttcctctgagcaggtacaagcacgaaatcctgaggctgaggaagctggcaggtgcaggggacccctggaaagtgggggctgtgcctccagccaagccccagcatccaaggaccggcagccactaggccgtctcccaaggagcagagcagagcagagctcctcagccagcacagaaccctcccacccagccccccataaaacatgagtcaggatagaaccc

SEQ ID NO: 273571 - protein, 977 aa, Artificial Sequence
  derived and/or modified sequence
MHVQEYGSDCPPPNTRRVYISYLDSIHFFRPRCLRTAVYHEILIGYLEYVKKLGYVTGHIWACPPSEGDDYIFHCHPPDQKIPKPKRLQEWYKKMLDKAFAERIIHDYKDIFKQATEDRLTSAKELPYFEGDFWPNVLEESIKELEQEEEERKKEESTAASETTEVFFVIHLHAGPVINTLPPIVDPDPLLSCDLMDGRDAFLTLARDKHWEFSSLRRSKWSTLCMLVELHTQGQDRFVYTCNECKHHVETRWHCTVCEDYDLCINCYNTKSHAHKMVKWGLGLDDEGSSQGEPQSKSPQESRRLSIQRCIQSLVHACQCRNANCSLPSCQKMKRVVQHTKGCKRKTNGGCPVCKQLIALCCYHAKHCQENKCPVPFCLNIKHKLRQQQIQHRLQQAQLMRRRMATMNTRNVPQQSLPSPTSAPPGTPTQQPSTPQTPQPPAQPQPSPVSMSPAGFPSVARTQPPTTVSTGKPTSQVPAPPPPAQPPPAAVEAARQIEREAQQQQHLYRVNINNSMPPGRTGMGTPGSQMAPVSLNVPRPNQVSGPVMPSMPPGQWQQAPLPQQQPMPGLPRPVISMQAQAAVAGPRMPSVQPPRSISPSALQDLLRTLKSPSSPQQQQQVLNILKSNPQLMAAFIKQRTAKYVANQPGMQPQPGLQSQPGMQPQPGMHQQPSLQNLNAMQAGVPRPGVPPQQQAMGGLNPQGQALNIMNPGHNPNMASMNPQYREMLRRQLLQQQQQQQQQQQQQQQQQQGSAGMAGGMAGHGQFQQPQGPGGYPPAMQQQQRMQQHLPLQGSSMGQMAAQMGQLGQMGQPGLGADSTPNIQQALQQRILQQQQMKQQIGSPGQPNPMSPQQHMLSGQPQASHLPGQQIATSLSNQVRSPAPVQSPRPQSQPPHSSPSPRIQPQPSPHHVSPQTGSPHPGLAVTMASSIDQGHLGNPEQSAMLPQLNTPSRSALSSELSLVGDTTGDTLEKFVEGL

SEQ ID NO: 273572 - protein, 141 aa, Artificial Sequence
  derived and/or modified sequence
MLHSMRFLRTDSASADPGNLKYSSSRDRGGSSSYGLQPSNSAVVSRQRHDDTRVHADIQNDEKGGYSVNGGSGENTYGRKSLGQELRVNNVTSPEFTSVQHGSRALATKDMRKSQERSMSYCDESRLSNLLRRITREDDRD

SEQ ID NO: 273573 - DNA, 426 bp, Artificial Sequence
  derived and/or modified sequence
atgctgcacagcatgagattcctgagaaccgacagcgccagcgccgaccccggcaacctgaagtacagcagcagcagagacagaggcggcagcagcagctacggcctgcagcccagcaacagcgccgtggtgagcagacagagacacgacgacaccagagtgcacgccgacatccagaacgacgagaagggcggctacagcgtgaacggcggcagcggcgagaacacctacggcagaaagagcctgggccaggagctgagagtgaacaacgtgaccagccccgagttcaccagcgtgcagcacggcagcagagccctggccaccaaggacatgagaaagagccaggagagaagcatgagctactgcgacgagagcagactgagcaacctgctgagaagaatcaccagagaggacgacagagactag

SEQ ID NO: 273574 - DNA, 426 bp, Artificial Sequence
  derived and/or modified sequence
atgctgcacagcatgcggttcctgaggactgattctgcctccgccgatccaggaaatcttaagtattcttcatcccgggacagaggcgggagcagttcctacggtctgcagccttccaattcagctgtggtaagtcgacaaagacacgacgatacgagggtgcatgcagacattcaaaacgatgagaaaggtggctattcagtgaatggcggtagtggtgagaacacctatgggcgtaagtccctcggccaggaactgagagtgaacaatgtgacaagtcccgagtttacatcggtgcagcacggtagcagagccctcgccaccaaggatatgcgcaagtcccaagagaggagtatgtcctactgcgacgaatccaggctgagcaatctgctccggcgtatcactcgagaggatgacagggactag

SEQ ID NO: 273575 - DNA, 426 bp, Artificial Sequence
  derived and/or modified sequence
atgctgcacagcatgaggttcctgaggacagacagcgccagcgctgaccccggcaacctgaagtacagcagcagccgggacagaggaggcagcagcagctatggcctgcagcccagcaacagcgctgtggtgtcccggcagagacatgatgacaccagggtgcacgccgacatccagaatgatgagaagggcggctacagcgtgaatggaggcagcggggagaacacctacggcaggaagagcctgggccaggagctgcgggtgaacaacgtgaccagccctgagttcacctctgtgcagcacggcagccgggccctggccaccaaggacatgaggaagagccaggagaggtccatgagctactgtgatgagagccggctgagcaacctgctgcggcgcatcaccagagaagatgaccgggactag

SEQ ID NO: 273576 - DNA, 426 bp, Artificial Sequence
  derived and/or modified sequence
atgctgcacagcatgcggttcctgcggaccgacagcgccagcgccgaccctggcaaccttaaatatagtagcagtagagatcggggaggttcctcctcttacggcttgcaaccatccaacagtgccgtggtatcaaggcagcggcacgatgacacccgtgtgcatgcggacatccagaacgacgagaagggaggttactcggtgaatggaggttctggcgaaaacacttacggccggaagagtttgggacaggagctcagagtgaacaacgttaccagtccagaatttacatcggtgcagcatggatcacgggccctagctacaaaggatatgaggaaaagtcaggaaaggtctatgtcctactgtgacgagagccgcctatcaaacctcctccgccgcattacgcgggaggacgacagggactag

SEQ ID NO: 273577 - DNA, 426 bp, Artificial Sequence
  derived and/or modified sequence
atgctccacagcatgaggttcttaagaactgatagtgcgtccgcagaccctggaaatttaaagtatagctcctcccgtgaccgtggcggttctagctcatacggactgcagccttccaattcagccgtcgttagcaggcagcgtcacgacgacacacgggtgcatgccgacattcaaaacgatgagaagggcggatacagcgtgaatggtggatccggagaaaacacttatgggagaaagtccctgggccaagaactcagagtcaataacgtgacatcaccggagttcacctcagtccagcatggtagtcgagcactggccacaaaggacatgcggaaatctcaggagcggtccatgtcctactgtgatgaatctcggctgagtaacctgctgcgtcggatcacaagggaggatgatagggactag

SEQ ID NO: 273578 - DNA, 1238 bp, Artificial Sequence
  derived and/or modified sequence
ttcctcctcagccccgggccggagcggggtgtcggcagcggccggttcgggcggcgactcgcgcttctctgggcggcggcgcttggccatgtcgtgtcggggaaggtaatgagccgcagagccccggggtctcggctgagcagcggcggcaccaactattcgcggagctggaatgactggcaacccagattgacttgatgcaaaacatcacaaaggctccatgttacacagtatgcgatttttgagaactgatagtgcatcagctgacccaggtaatttaaaatattcttcatccagagatagaggtggttcttcctcttacggactgcaaccttcaaattcagctgtggtgtctcggcaaaggcacgatgataccagagtccacgctgacatacagaatgacgaaaagggtggctacagtgtcaatggaggatctggggaaaatacttatggtcggaagtcgttggggcaagagctgagggttaacaatgtgaccagccctgagttcaccagtgttcagcatggcagtcgtgctttagccaccaaagacatgaggaaatcacaggagagatcgatgtcttattgtgatgagtctcgactgtcaaatcttcttcggaggatcacccgggaagacgacagagactgaagattggtcactgtaaagcagttgaaagaatttattcagcaaccagaaaataagctggtactagttaaacaattggataatatcttggctgctgcacatgatgtgcttaatgaaagtagcaaattgcttcaggagttgagacaggagggagcttgctgtcttggccttctttgtgcttctctgagctatgaggctgagaagatcttcaagtggatttttagcaaatttagctcatctgcaaaagatgaagttaaactcctctacttatgtgccacctacaaagcactagagactgtaggagaaaagaaagccttttcatctgtaatgcagcttgtaatgaccagcctgcagtcaattcttgaaaatgtggatacaccagaattgctttgcaaatgtgttaagtgcattcttttggtggctcgatgttaccctcatattttcagcgctaattttagggatacagttgatatattagttggatggcatagagatcatactcagaaaccttcgctcacgcagcaggtatctgggtggttgcagagtttggagccattttgggtagctgatcttgcatttcctacgactcttcttg

SEQ ID NO: 273579 - protein, 531 aa, Artificial Sequence
  derived and/or modified sequence
MGSILSRRIAGVEDIDIQANSAYRYPPKSGNYFASHFFMGGEKFDTPHPEGYLFGENMDLNFLGSRPVQFPYVTPAPHEPVKTLRSLVNIRKDSLRLVRYKDDADSPTEDGDKPRVLYSLEFTFDADARVAITIYCQASEEFLNGRAVYSPKSPSLQSETVHYKRGVSQQFSLPSFKIDFSEWKDDELNFDLDRGVFPVVIQAVVDEGDAVVEVTGHAHVLLAAFEKHMDGSFSVKPLKQKQIVDRVSYLLQEIYGIENKNNQETKPSDDENSDNSNECVVCLSDLRDTLILPCRHLCLCTSCADTLRYQANNCPICRLPFRALLQIRAVRKKPGALSPVSFSPVLAQSLEHDEHSNSDSVPPGYEPISLLEALNGLRAVSPAIPSAPLYEEITYSGISDGLSQASCPLAAIDHILDSSRQKGRPQSKAPDSTLRSPSSPIHEEDEEKLSEDVDAPPPLGGAELALRESSSPESFITEEVDESSSPQQGTRAASIENVLQDSSPEHCGRGPPADIYLPALGPDSCSVGIDE

SEQ ID NO: 273580 - protein, 165 aa, Artificial Sequence
  derived and/or modified sequence
MDAEGLALLLPPVTLAALVDSWLREDCPGLNYAALVSGAGPSQAALWAKSPGVLAGQPFFDAIFTQLNCQVSWFLPEGSKLVPVARVAEVRGPAHCLLLGERVALNTLARCSGIASAAAAAVEAARGAGWTGHVAGTRKTTPGFRLVEKYGLLVGGAASHRYDLG

SEQ ID NO: 273581 - DNA, 610 bp, Artificial Sequence
  derived and/or modified sequence
gacctggccccagtgctgcgtccttatcagccgagccgtcccacccccagcctggggcctctgggagccttggtcctgagcagccaacacaccagcccagacagctgcaagtcaccatggacgctgaaggcctggcgctgctgctgccgcccgtcaccctggcagccctggtggacagctggctccgagaggactgcccagggctcaactacgcagccttggtcagcggggcaggcccctcgcaggcggcgctgtgggccaaatcccctggggtactggcagggcagcctttcttcgatgccatatttacccaactcaactgccaagtctcctggttcctccccgagggatcgaagctggtgccggtggccagagtggccgaggtccggggccctgcccactgcctgctgctgggggaacgggtggccctcaacacgctggcccgctgcagtggcattgccagtgctgccgccgctgcagtggaggccgccaggggggccggctggactgggcacgtggcaggcacgaggaagaccacgccaggcttccggctggtggagaagtatgggctcctggtgggcggggccgcctcgcaccgctacgacctggg

SEQ ID NO: 273582 - protein, 233 aa, Artificial Sequence
  derived and/or modified sequence
MISFPSLQRTELEEMDLILQQEGWQLDLKRNSLGWKDLQRSSHPSPCLQAGRPLPQPTCTHRGLPKLRLSEEGDYPASASTPEPRGLIPPSGTFLRFNLDPLCCGPQPVASVSRGWVSSHHCSPENCWLTWLGELPAPFSGTPPPTAVPPGQGSRSRSPRKPIDSLRDSRSLSYSPVERRRPSPQPSPRDQQSSSSERGSRRGQRGDSRSPSHKRRRETPSPRPMRHRSSRSP

SEQ ID NO: 273583 - protein, 311 aa, Artificial Sequence
  derived and/or modified sequence
MLLEKDVNPGGKEETPGQRPAVTETHQLAELNEKKNERLRAAFGISDSYVDGSSFDPQRRAREAKQPAPEPPKPYSLVRESSSSRSPTPKQKKKKKKKDRGRRSESSSPRRERKKSSKKKKHRSESESKKRKHRSPTPKSKRKSKDKKRKRSRSTTPAPKSRRAHRSTSADSASSSDTSRSRSRSAAAKTHTTALAGRSPSPASGRRGEGDAPFSEPGTTSTQRPSSPETATKQPSSPYEDKDKDKKEKSATRPSPSPERSSTGPEPPAPTPLLAERHGGSPQPLATTPLSQEPVNPSPQLFMFLKGILVF

SEQ ID NO: 273584 - DNA, 542 bp, Artificial Sequence
  derived and/or modified sequence
atttctccccgagatggcgggtctgacggcggcggccccgcggcccggagtcctcctgctcctgctgtccatcctccacccctctcggcctggaggggtccctggggccattcctggtggagttcctggaggagtcttttatccaggggctggtctcggagcccttggaggaggagcgctggggcctggaggcaaacctcttaagccagttcccggagggcttgcgggtgctggccttggggcagggctcggcgccttccccgcagttacctttccgggggctctggtgcctggtggagtggctgacgctgctgcagcctataaagctgctaaggctggcgctgggcttggtggtgtcccaggagttggtggcttaggagtgtctgcaggtgcggtggttcctcagcctggagccggagtgaagcctgggaaagtgccgggtgtaggtggagcttttgctggaatcccaggagttggaccctttgggggaccgcaacctggagtcccactggggtatcccatcaaggcccccaagctgcctg

SEQ ID NO: 273585 - protein, 2334 aa, Artificial Sequence
  derived and/or modified sequence
MYNGIGLPTPRGSGTNGYVQRNLSLVRGRRGERPDYKGEEELRRLEAALVKRPNPDILDHERKRRVELRCLELEEMMEEQGYEEQQIQEKVATFRLMLLEKDVNPGGKEETPGQRPAVTETHQLAELNEKKNERLRAAFGISDSYVDGSSFDPQRRAREAKQPAPEPPKPYSLVRESSSSRSPTPKQKKKKKKKDRGRRSESSSPRRERKKSSKKKKHRSESESKKRKHRSPTPKSKRKSKDKKRKRSRSTTPAPKSRRAHRSTSADSASSSDTSRSRSRSAAAKTHTTALAGRSPSPASGRRGEGDAPFSEPGTTSTQRPSSPETATKQPSSPYEDKDKDKKEKSATRPSPSPERSSTGPEPPAPTPLLAERHGGSPQPLATTPLSQEPVNPPSEASPTRDRSPPKSPEKLPQSSSSESSPPSPQPTKVSRHASSSPESPKPAPAPGSHREISSSPTSKNRSHGRAKRDKSHSHTPSRRMGRSRSPATAKRGRSRSRTPTKRGHSRSRSPQWRRSRSAQRWGRSRSPQRRGRSRSPQRPGWSRSRNTQRRGRSRSARRGRSHSRSPATRGRSRSRTPARRGRSRSRTPARRRSRSRTPTRRRSRSRTPARRGRSRSRTPARRRSRTRSPVRRRSRSRSPARRSGRSRSRTPARRGRSRSRTPARRGRSRSRTPARRSGRSRSRTPARRGRSRSRTPRRGRSRSRSLVRRGRSHSRTPQRRGRSGSSSERKNKSRTSQRRSRSNSSPEMKKSRISSRRSRSLSSPRSKAKSRLSLRRSLSGSSPCPKQKSQTPPRRSRSGSSQPKAKSRTPPRRSRSSSSPPPKQKSKTPSRQSHSSSSPHPKVKSGTPPRQGSITSPQANEQSVTPQRRSCFESSPDPELKSRTPSRHSCSGSSPPRVKSSTPPRQSPSRSSSPQPKVKAIISPRQRSHSGSSSPSPSRVTSRTTPRRSRSVSPCSNVESRLLPRYSHSGSSSPDTKVKPETPPRQSHSGSISPYPKVKAQTPPGPSLSGSKSPCPQEKSKDSLVQSCPGSLSLCAGVKSSTPPGESYFGVSSLQLKGQSQTSPDHRSDTSSPEVRQSHSESPSLQSKSQTSPKGGRSRSSSPVTELASRSPIRQDRGEFSASPMLKSGMSPEQSRFQSDSSSYPTVDSNSLLGQSRLETAESKEKMALPPQEDATASPPRQKDKFSPFPVQDRPESSLVFKDTLRTPPRERSGAGSSPETKEQNSALPTSSQDEELMEVVEKSEEPAGQILSHLSSELKEMSTSNFESSPEVEERPAVSLTLDQSQSQASLEAVEVPSMASSWGGPHFSPEHKELSNSPLRENSFGSPLEFRNSGPLGTEMNTGFSSEVKEDLNGPFLNQLETDPSLDMKEQSTRSSGHSSSELSPDAVEKAGMSSNQSISSPVLDAVPRTPSRERSSSASSPEMKDGLPRTPSRRSRSGSSPGLRDGSGTPSRHSLSGSSPGMKDIPRTPSRGRSECDSSPEPKALPQTPRPRSRSPSSPELNNKCLTPQRERSGSESSVDQKTVARTPLGQRSRSGSSQELDVKPSASPQERSESDSSPDSKAKTRTPLRQRSRSGSSPEVDSKSRLSPRRSRSGSSPEVKDKPRAAPRAQSGSDSSPEPKAPAPRALPRRSRSGSSSKGRGPSPEGSSSTESSPEHPPKSRTARRGSRSSPEPKTKSRTPPRRRSSRSSPELTRKARLSRRSRSASSSPETRSRTPPRHRRSPSVSSPEPAEKSRSSRRRRSASSPRTKTTSRRGRSPSPKPRGLQRSRSRSRREKTRTTRRRDRSGSSQSTSRRRQRSRSRSRVTRRRRGGSGYHSRSPARQESSRTSSRRRRGRSRTPPTSRKRSRSRTSPAPWKRSRSRASPATHRRSRSRTPLISRRRSRSRTSPVSRRRSRSRTSVTRRRSRSRASPVSRRRSRSRTPPVTRRRSRSRTPTTRRRSRSRTPPVTRRRSRSRTPPVTRRRSRSRTSPITRRRSRSRTSPVTRRRSRSRTSPVTRRRSRSRTSPVTRRRSRSRTPPAQDQPRSPVPSAFSDQSRCLIAQTTPVAGSQSLSSGAVATTTSSAGDHNGMLSVPAPGVPHSDVGEPPASTGAQQPSALAALQPAKERRSSSSSSSSSSSSSSSSSSSSSSSSSGSSSSDSEGSSLPVQPEVALKRVPSPTPAPKEAVREGRPPEPTPAKRKRRSSSSSSSSSSSSSSSSSSSSSSSSSSSSSSSSSSSSSSSSSSPSPAKPGPQALPKPASPKKPPPGERRSRSPRKPIDSLRDSRSLSYSPVERRRPSPQPSPRDQQSSSSERGSRRGQRGDSRSPSHKRRRETPSPRPMRHRSSRSP

SEQ ID NO: 273586 - protein, 956 aa, Artificial Sequence
  derived and/or modified sequence
RRRRLRRADRRGEAAAPGPRDSGARAAAAARPLPLGGGGRRRRVRGYEEQQIQEKVATFRLMLLEKDVNPGGKEETPGQRPAVTETHQLAELNEKKNERLRAAFGISDSYVDGSSFDPQRRAREAKQPAPEPPKPYSLVRESSSSRSPTPKQKKKKKKKDRGRRSESSSPRRERKKSSKKKKHRSESESKKRKHRSPTPKSKRKSKDKKRKRSRSTTPAPKSRRAHRSTSADSASSSDTSRSRSRSAAAKTHTTALAGRSPSPASGRRGEGDAPFSEPGTTSTQRPSSPETATKQPSSPYEDKDKDKKEKSATRPSPSPERSSTGPEPPAPTPLLAERHGGSPQPLATTPLSQEPVNPPSEASPTRDRSPPKSPEKLPQSSSSESSPPSPQPTKVSRHASSSPESPKPAPAPGSHREISSSPTSKNRSHGRAKRDKSHSHTPSRRMGRSRSPATAKRGRSRSRTPTKRGHSRSRSPQWRRSRSAQRWGRSRSPQRRGRSRSPQRPGWSRSRNTQRRGRSRSARRGRSHSRSPATRGRSRSRTPARRGRSRSRTPARRRSRSRTPTRRRSRSRTPARRGRSRSRTPARRRSRTRSPVRRRSRSRSPARRSGRSRSRTPARRGRSRSRTPARRGRSRSRTPARRSGRSRSRTPARRGRSRSRTPRRGRSRSRSLVRRGRSHSRTPQRRGRSGSSSERKNKSRTSQRRSRSNSSPEMKKSRISSRRSRSLSSPRSKAKSRLSLRRSLSGSSPCPKQKSQTPPRRSRSGSSQPKAKSRTPPRRSRSSSSPPPKQKSKTPSRQSHSSSSPHPKVKSGTPPRQGSITSPQANEQSVTPQRRSCFESSPDPELKSRTPSRHSCSGSSPPRVKSSTPPRQSPSRSSSPQPKVKAIISPRQRSHSGSSSPSPSRVTSRTTPRRSRSVSPCSNVESRLLPRYSHSGSSSPDTKVKPETPPRQSHSG

SEQ ID NO: 273587 - protein, 2011 aa, Artificial Sequence
  derived and/or modified sequence
MKKSRISSRRSRSLSSPRSKAKSRLSLRRSLSGSSPCPKQKSQTPPRRSRSGSSQPKAKSRTPPRRSRSSSSPPPKQKSKTPSRQSHSSSSPHPKVKSGTPPRQGSITSPQANEQSVTPQRRSCFESSPDPELKSRTPSRHSCSGSSPPRVKSSTPPRQSPSRSSSPQPKVKAIISPRQRSHSGSSSPSPSRVTSRTTPRRSRSVSPCSNVESRLLPRYSHSGSSSPDTKVKPETPPRQSHSGSISPYPKVKAQTPPGPSLSGSKSPCPQEKSKDSLVQSCPGSLSLCAGVKSSTPPGESYFGVSSLQLKGQSQTSPDHRSDTSSPEVRQSHSESPSLQSKSQTSPKGGRSRSSSPVTELASRSPIRQDRGEFSASPMLKSGMSPEQSRFQSDSSSYPTVDSNSLLGQSRLETAESKEKMALPPQEDATASPPRQKDKFSPFPVQDRPESSLVFKDTLRTPPRERSGAGSSPETKEQNSALPTSSQDEELMEVVEKSEEPAGQILSHLSSELKEMSTSNFESSPEVEERPAVSLTLDQSQSQASLEAVEVPSMASSWGGPHFSPEHKELSNSPLRENSFGSPLEFRNSGPLGTEMNTGFSSEVKEDLNGPFLNQLETDPSLDMKEQSTRSSGHSSSELSPDAVEKAGMSSNQSISSPVLDAVPRTPSRERSSSASSPEMKDGLPRTPSRRSRSGSSPGLRDGSGTPSRHSLSGSSPGMKDIPRTPSRGRSECDSSPEPKALPQTPRPRSRSPSSPELNNKCLTPQRERSGSESSVDQKTVARTPLGQRSRSGSSQELDVKPSASPQERSESDSSPDSKAKTRTPLRQRSRSGSSPEVDSKSRLSPRRSRSGSSPEVKDKPRAAPRAQSGSDSSPEPKAPAPRALPRRSRSGSSSKGRGPSPEGSSSTESSPEHPPKSRTARRGSRSSPEPKTKSRTPPRRRSSRSSPELTRKARLSRRSRSASSSPETRSRTPPRHRRSPSVSSPEPAEKSRSSRRRRSASSPRTKTTSRRGRSPSPKPRGLQRSRSRSRREKTRTTRRRDRSGSSQSTSRRRQRSRSRSRVTRRRRGGSGYHSRSPARQESSRTSSRRRRGRSRTPPTSRKRSRSRTSPAPWKRSRSRASPATHRRSRSRTPLISRRRSRSRTSPVSRRRSRSRTSVTRRRSRSRASPVSRRRSRSRTPPVTRRRSRSRTPTTRRRSRSRTPPVTRRRSRSRTPPVTRRRSRSRTSPITRRRSRSRTSPVTRRRSRSRTSPVTRRRSRSRTSPVTRRRSRSRTPPAIRRRSRSRTPLLPRKRSRSRSPLAIRRRSRSRTPRTARGKRSLTRSPPAIRRRSASGSSSDRSRSATPPATRNHSGSRTPPVALNSSRMSCFSRPSMSPTPLDRCRSPGMLEPLGSSRTPMSVLQQAGGSMMDGPGPRIPDHQRTSVPENHAQSRIALALTAISLGTARPPPSMSAAGLAARMSQVPAPVPLMSLRTAPAANLASRIPAASAAAMNLASARTPAIPTAVNLADSRTPAAAAAMNLASPRTAVAPSAVNLADPRTPTAPAVNLAGARTPAALAALSLTGSGTPPTAANYPSSSRTPQAPASANLVGPRSAHATAPVNIAGSRTAAALAPASLTSARMAPALSGANLTSPRVPLSAYERVSGRTSPPLLDRARSRTPPSAPSQSRMTSERAPSPSSRMGQAPSQSLLPPAQDQPRSPVPSAFSDQSRCLIAQTTPVAGSQSLSSGAVATTTSSAGDHNGMLSVPAPGVPHSDVGEPPASTGAQQPSALAALQPAKERRSSSSSSSSSSSSSSSSSSSSSSSSSGSSSSDSEGSSLPVQPEVALKRVPSPTPAPKEAVREGRPPEPTPAKRKRRSSSSSSSSSSSSSSSSSSSSSSSSSSSSSSSSSSSSSSSSSSPSPAKPGPQALPKPASPKKPPPGERSLLPVSPSPRHSLPHVARGTFLKRTSGYFPPLHKSFGTPCGLQDKAPPLREWRVRLFTNGPCPPCVLLLPAPTHALCSSHTQRLAV

SEQ ID NO: 273588 - DNA, 216 bp, Artificial Sequence
  derived and/or modified sequence
atgtgcggcagctactacggaaattattacggcactcctggatacggattctgtgggtacgggggactagggtacggatacggcggcctggggtgtggttacggctcgtgctgtggatgtgggtttcgacgactgggatgcggctatggatacgggagccggtccttatgcggatatggatacggctgtgggtctggaagcggctactattattag

SEQ ID NO: 273589 - DNA, 198 bp, Artificial Sequence
  derived and/or modified sequence
atgtgctactacagcaactactacggcggcctgcggtacggctacggagtgctaggcggcggatacggctgtgggtgcgggtacgggcatggttacggcggcctggggtgtgggtacgggaggggctatggcggatacggctacggttgctgtagaccgtcctgctacggcaggtactggtcctgtgggttttattag

SEQ ID NO: 273590 - DNA, 609 bp, Artificial Sequence
  derived and/or modified sequence
atgggctgttgtgggtgcagcggtggctgcgggtcaggttgcgggggttgcggatccggttgcggcggttgtgggagcgggtgcggcggttacggtagcggctgcggcggatgcggatcatcctgttgtgtacccgtttgttgttgcaaaccggtttgctgttgcgttcccgcttgttcctgcagtagctgtggctcttgcggcggatcgaaaggggattgtggcagctgtgggggatcgaagggagggtgtggaagctgtggcggatcaaagggcggatgcggctcatgtggaggttcaaagggcggatgcggttcatgcggaggttcgaagggcggatgcggaagctgcggtgggtcaaagggcggatgcggttcttgtggtgggtccaaggggggatgtggttcctgcggatgctcacagtgcaactgttgcaagccctgctgctgttcaagcgggtgtggcagttgttgtcagtctagctgctgtaacccttgctgttgccaatccagctgctgcgtcccagtgtgttgtcagtccagctgttgcaagccttgctgctgccagtcttcctgttgcgtaccagtatgttgtcaatgtaaaatttag

SEQ ID NO: 273591 - DNA, 563 bp, Artificial Sequence
  derived and/or modified sequence
actaacgctggactccatttgactcttttgcaggctacgtgtgccgcctggccattcaaactgtcaattttaggtccagaagtgtccaaaccacaagttctcaaaactctctgaaaaatggctccctccgagttaagcaattctgaaaggcattctctgggaaaagtctgtggaggagagagggatcttcttgcaaataatgtggtctcaggcaaggacacagcatcttggctgtctgctaaaaaaaaaaaatgcctagactctcagtggaaattgagtgtcaagctgcaaaatctcaaatggcagactatcatcatttaagagcgcctggacaccggaaaaggcgattccctgagcgcctggagttggagacaattcctggttcagaatttaaacatctttctaggtctgcgcggggcggccattggcggcggagtgtcacgtgaccgcgggggcgtgccaatgtgcgccctcacgggtgtcaaacccctgtcagagtgtgcgatcaagatcgtgaaacaacgcgatgcaaaaagcgacctactacgacagctcggcgatct

SEQ ID NO: 273592 - DNA, 465 bp, Artificial Sequence
  derived and/or modified sequence
atgctgcccggctacgccctgcaccccgtggccgccgccagacccagactgcacctgagaagagccctgccccacgccgccgacgacgtgagacccagagccagaccccccggcgccagaagccacgacagagccagacacagaagaagacccagactgctgcacctgagaccccccacccccctgagcgccctgccccacagcggcacctggagcggcccccccggcccctggcccccccagagaagaaccgccagcagagaggcccacctgggcacccccgacctgaaccccgagagccccagcgacaccctgacctacagcgtgcccccctaccccgacctgaagagccagaccccccccagaggcttcgacaagagctggctgagactgcccaccagccccagaacccccagcagagtgcccaccagactgcccagaagcagcagccccccccacccctag

SEQ ID NO: 273593 - DNA, 465 bp, Artificial Sequence
  derived and/or modified sequence
atgctgcccggctacgccctgcaccctgtggccgccgcccggccccggctgcacctgcggcgggccctgccccacgccgcagatgatgtgcggccccgggcccggcccccaggggcccggagccatgaccgggcccggcacagaagaagaccccggctgctgcacctgcggccccccacccccctgagcgccctgccccacagcggcacctggagcggccccccaggcccctggccaccccagaggagaacagccagccgggaggcccacctgggcaccccagacctgaaccctgagagccccagcgacaccctgacctacagcgtgcccccctacccagacctgaagagccagaccccaccccggggctttgacaagtcctggctgcggctgcccaccagccccaggacccccagccgggtgcccacccggctgcccaggagcagcagccccccccacccctag

SEQ ID NO: 273594 - DNA, 378 bp, Artificial Sequence
  derived and/or modified sequence
atgcagccagtgatttcagcactgaacattcagacacagacagtgcaaactcacccggcaccacgcaatacttccgagcattgtacactccccgcttgcgacgctcaagaggaacatagagatacagtggatggctccatcgcgaggaccgagagcgcatcaggagaaatatggcggcaaactcacatggatggtgagcaccacgtgaacaccaaggcagaaatctcagtcatgagtgcaaaccagggtgctcctcgcataaccagcaagcctccagaggccagaagagaagctagggaccggagcctgcccagtgccttttccttgagggggctgactgatactctgatcctcggattttgtcctccagaactctag

SEQ ID NO: 273595 - DNA, 837 bp, Artificial Sequence
  derived and/or modified sequence
atgggctgctgtggatgtagtgggggttgcggttccagctgcgggggttgcggctcgggatgcggcggatgtgggtctgggtgtggaggctgcgggtctggatgtggtggttccggctccagttgttgtgtcccagtctgctgttgtaagcctgtgtgttgtagagtacctacatgtagctgctcatcgtgcgggaagggcggttgcggctcatccggtggatctaaaggcggatgcgggagttgcggagggtgcaaaggcggttgcggatcttgcggtggaagcaaagggggatgcgggagctgtggcggcagtaaaggcggctgcggctcatgcgggggcagtaagggcggctgcgggtcaggttgtggcggctgcgggtcctcatgctgcgtgcctgtatgctgctgtaaacccatgtgttgctgtgtgccggcctgttcttgctcatcttgcgggaaaggaggttgcggaagttgtggctgttccaaaggagcctgcggcagctgcggcgggtccaaaggcggttgcggcagctgtggagggtgcaagggggggtgtggttcatgcggtggaagtaaaggaggttgcggatcaggctgcggaggttgtgggtccggctgcggggttccagtttgttgctgtagttgctcatcttgtggtagctgtgcaggctcaaagggcggctgcggctcttcctgctcccagtgttcttgctgcaaaccttgctgttgcagcagcggatgcgggtcatcatgctgccagagttcctgctgtaaaccgtgctgtagccaaagctcatgctgcgtacctgtttgttgccagtgcaaaatatag

SEQ ID NO: 273596 - DNA, 936 bp, Artificial Sequence
  derived and/or modified sequence
atgttactggagaaggacgttaaccctggaggaaaagaagagacaccagggcagcggcccgcagtgaccgaaacacaccagttagccgaactcaacgaaaaaaagaatgagcgcttaagggctgcatttggcatcagcgattcctatgtagatggctcttcctttgatccccagcgcagggcgcgggaggcaaaacaacccgccccggagccgcctaaaccttattccctggttcgggagagctcaagctccagatctcccacccccaagcagaaaaaaaaaaagaaaaaaaaagaccgcggaagaaggtctgagtcaagttctccccgacgcgaaaggaagaaatctagcaagaagaaaaagcaccggtctgagagcgagtccaagaaacggaaacacaggagtccaacaccaaaatcgaagcgcaagtcaaaagataaaaagagaaagcgaagcaggagtacaacaccagctccaaaaagtagaagagcccataggtcaacttctgcggactctgccagtagcagcgacacatcccgctcgcggagtcgctctgccgctgcgaaaacccacactaccgcccttgccggccggtctccctctccagcctcaggcagaagaggggagggtgacgccccgttcagtgagcccggtaccacctctacccagcggccctcttctcccgagactgccactaagcaaccgagcagcccttatgaagacaaggacaaagacaagaaggagaaatcagcaacgaggccgtctcctagtcctgagaggtccagtacgggccccgaaccgcctgcaccaacgcctctgttagccgagagacatggcggaagccctcagccactggccactacccctctcagccaggaacccgttaacccttctccacagcttttcatgtttcttaagggcatcctggtgttctag

SEQ ID NO: 273597 - DNA, 2871 bp, Artificial Sequence
  derived and/or modified sequence
cgccggagacgcctaagacgggctgaccgccgtggagaggcggcagctcccgggccacgcgatagcggggcacgagccgcggcggccgcacgcccactgccactgggtggagggggtcggcgaagacgcgtcaggggctatgaagaacagcaaatacaggagaaggtggccactttccggttgatgctactagagaaagatgtcaacccaggaggcaaggaagagacaccaggacagcggcctgctgtaaccgagacccatcagctggctgaacttaatgaaaagaagaatgagaggctccgcgccgcttttggcataagcgactcatacgtggatggatcttcttttgatcctcagaggcgagcgcgtgaagctaaacagcctgcccctgagccacccaagccatatagcctggtgcgggagtccagctctagcaggtccccaactccaaagcagaagaaaaagaaaaagaagaaagatcgcggcaggcgaagcgaatcctcaagccccaggcgggagcgcaagaagtccagtaagaagaagaagcatcgctctgagtcagagtcaaaaaaaagaaagcatcggagtccgactccgaaatcgaagcggaaatctaaggataagaaaaggaaacgtagcagatccacaactcctgcccccaagtccagacgggctcacagaagcacatctgccgactcggcttcctcctctgacacctctcgatcccgatctaggagcgccgctgctaagacacacaccaccgccctggcaggaaggtctccgtcacccgctagtggcaggaggggcgagggggatgcccctttctcggagcccggcacgacttccactcaaaggccctcctcccccgaaaccgctactaaacaaccaagctccccctatgaggacaaggacaaggacaaaaaagagaagtctgcaacacgaccttcaccttccccagaacgctcgagcacaggaccagaaccccctgcccctacccctctgcttgctgagcgacatggcgggtccccccagcccctggccacgaccccgctgtcacaagagccagtgaacccgcctagcgaagcctcacctactcgcgatcgctcccctcccaaatcccctgaaaagttgccccagagtagctctagcgagagctccccgccttcacctcagccaacaaaggtatcccggcatgcaagtagcagccccgagtctcctaagcctgcccccgcaccaggctctcacagggaaattagtagtagccccacatctaagaacagatcccacgggagggcgaagcgggacaagtctcattcgcacaccccctctcgcagaatgggcagatctagatcacctgcaactgccaaaagagggaggtctaggtccaggactccaaccaagcgcggccacagtaggagtcggtcaccgcagtggaggaggtcccgttcagcacaaagatggggacgcagccgcagtccgcagcggcggggccggagccgaagtcctcaaaggcccggatggtctcgtagccgcaacactcaaaggagaggacgatctaggagcgcacggaggggccggagccatagccgctcgcctgcgacccgaggaagaagtagaagccggactcccgcacggcgtgggcggtcccggagcaggacccccgcacggcggagatccaggagtcgaaccccaacgcggcgtcgctcacgcagtcgaacccccgcgcggcggggcagatcccgttctagaacgccagccagacggaggtcccggacccgttcacccgtcaggcggaggagccggtcaagatcaccagcccgccgttctggcaggtcccgcagtaggacacctgctcgaaggggccgctcgcgaagcaggacccctgcaaggaggggtcgctcccggagtagaacgccagcccgccgctctgggcgcagccgatctaggaccccagctagaaggggaaggtcgaggtcccgaactccgcgccggggcagatcccgttcacgttccctcgtgagaagggggaggtcgcatagtcggacgccacagcgacgcggaagaagtgggtcatcttccgagcgaaagaacaagagccggacgtcacaacggaggtccagatcgaacagcagccccgagatgaaaaagagcaggatctcatctcggaggtcccgctctttgagtagccctcggtcaaaggcaaagtctcggttgtctctgcggcgctctttaagtgggtcgagcccttgccctaagcagaagagtcagactccgccccgaaggagtaggtctggaagttctcagcccaaagctaagtcaagaacccccccaaggcggtcacgcagttcaagtagccctccacccaagcagaagtccaagactccaagcaggcagagtcattcaagttcttcgccgcacccaaaagttaagagtggcaccccgcccagacagggctccatcacttctccccaagccaatgaacagagtgtgacaccccaacgaaggtcttgctttgagagctccccggacccggagctcaagagtcggactccttcccgccattcttgttccggcagcagcccacctagagtcaagtccagtacaccaccccggcaaagtcccagtagatcctcctctccccaaccaaaggtgaaggccataatcagcccccggcagcgcagccactccggctcctccagtccgtctccaagtagggtcacatcgagaaccactccaagaagaagcaggtccgtgtctccatgcagcaacgtcgaaagccgcctgctgcctcgatactctcattcagggtcctcttcacccgatacaaaagtgaagccagaaactccacctcggcagtcccattccggttag

SEQ ID NO: 273598 - DNA, 270 bp, Artificial Sequence
  derived and/or modified sequence
ggcagacatcatcccggctcacaccagcagtgggatcagctgctgtgctggctccgaggattgctacatcctgggttgcatgggtgtcgggcaggacgggcccacctccagggtggcagggtaagggcaggccccggccttcatcgcctgcctgccggatgtcacgctgacgcatcagggcctactcttggctgccctgttttactgcacgcggtcgccgcatggagcaggcaacccggcgtcgaaggctttattaccgggcttctttag

SEQ ID NO: 273599 - DNA, 936 bp, Artificial Sequence
  derived and/or modified sequence
atgctgctggagaaggatgtgaaccctgggggcaaggaggagaccccaggccagaggcctgctgtgacagagacccaccagctggccgagctgaatgagaagaagaatgaaaggctgcgggccgccttcggcatcagtgacagctatgtggatggcagcagctttgacccccagaggcgggcccgggaggccaagcagcctgcccctgagccccccaagccctacagcctggtgcgggagagcagcagcagccgcagccccacccccaagcagaagaagaagaagaagaagaaggaccggggccgccgctctgagagcagcagcccccggcgggagaggaagaagagcagcaagaagaagaagcacaggtctgagagcgagagcaagaagaggaagcacaggagccccacccccaagagcaagaggaagagcaaggacaagaagaggaagaggagccgcagcaccaccccagcccccaagagccggcgggcccacaggagcaccagcgctgacagcgccagcagcagtgacaccagccgcagccgcagccgctctgctgctgccaagacccacaccacagccctggccggccgcagccccagccctgccagcggccggcggggggagggagatgcccccttcagcgagcccggcaccaccagcacccagaggcccagcagccctgagacagccaccaagcagcccagcagcccctatgaggacaaggacaaggacaagaaggagaagagcgccacccggcccagccccagccctgagaggagcagcactggacctgagcccccagcccccacccccctgctggccgagcggcacggcggcagcccccagcccctggccaccacccccctgagccaggagcctgtgaaccccagcccccagctgttcatgttcctgaagggcatcctggtgttctag

SEQ ID NO: 273600 - DNA, 2871 bp, Artificial Sequence
  derived and/or modified sequence
agaagaagaaggctgcggcgggctgaccggcggggggaggccgccgcccctggcccccgggacagcggggcccgggctgctgctgctgcccggcccctgcccctgggcggcggcggcagaagaagaagagtgcggggctatgaggagcagcagatccaggagaaggtggccaccttccggctgatgctgctggagaaggatgtgaaccctgggggcaaggaggagaccccaggccagaggcctgctgtgacagagacccaccagctggccgagctgaatgagaagaagaatgaaaggctgcgggccgccttcggcatcagtgacagctatgtggatggcagcagctttgacccccagaggcgggcccgggaggccaagcagcctgcccctgagccccccaagccctacagcctggtgcgggagagcagcagcagccgcagccccacccccaagcagaagaagaagaagaagaagaaggaccggggcagaagaagtgagagcagcagcccccggcgggagaggaagaagagcagcaagaagaagaagcacaggtctgagagcgagagcaagaagaggaagcacaggagccccacccccaagagcaagaggaagagcaaggacaagaagaggaagaggagccgcagcaccaccccagcccccaagagcagaagagcccacaggagcaccagcgctgacagcgccagcagcagtgacaccagccgcagccgcagccgctctgctgctgccaagacccacaccacagccctggccggccgcagccccagccctgccagcggcagaagaggagaaggagatgcccccttcagcgagcccggcaccaccagcacccagaggcccagcagccctgagacagccaccaagcagcccagcagcccctatgaggacaaggacaaggacaagaaggagaagagcgccacccggcccagccccagccctgagaggagcagcacaggccctgagcccccagcccccacccccctgctggccgagagacatggaggcagcccccagcccctggccaccacccccctgagccaggagcctgtgaacccccccagcgaggccagccccacccgggacaggagcccccccaagagccctgagaagctgccccagagcagcagcagcgagagcagcccccccagcccccagcccaccaaggtgtccagacatgccagcagcagccctgagagccccaagccagccccagcccctggcagccaccgggagatcagcagcagccccaccagcaagaacagaagccacggccgggccaagagggacaagagccacagccacacccccagcaggaggatgggccgcagccgcagccctgccacagccaagaggggccgcagccgcagcaggacccccaccaagaggggccacagccgcagccgcagcccccagtggaggaggagccgcagcgcccagcgctggggccgcagccgcagcccccagaggcggggccgcagccgcagcccccagaggcctggctggagccgcagcaggaacacccagaggcggggccgcagccgcagcgcccggcggggccgcagccacagccgcagccctgccacccggggccgcagccgcagcaggaccccagcccggcggggccgcagccgcagcaggaccccagccaggagaagaagccgcagcaggacccccaccaggagaagaagccgcagcaggaccccagcccggcggggccgcagccgcagcaggaccccagcccggcggcgcagcaggaccaggagccctgtgagaagaagaagccgcagccgcagccctgccaggagaagtggccgcagccgcagcaggaccccagcccggcggggccgcagccgcagcaggaccccagcccggcggggccgcagccgcagcaggaccccagccaggagaagtggccgcagccgcagcaggaccccagcccggcggggccgcagccgcagcaggaccccaagaagaggccgcagccgcagccgcagcctggtgcggcggggccgcagccacagcaggaccccccagaggcggggccgcagcggcagcagcagcgagaggaagaacaagagcaggaccagccagaggaggagccgcagcaacagcagccctgagatgaagaagagccgcatcagcagccgccgcagccgcagcctgagcagccccaggagcaaggccaagagccggctgagcctgcggcgcagcctgagcggcagcagcccctgccccaagcagaagagccagaccccaccccggcgcagccgcagcggcagcagccagcccaaggccaagagcaggaccccaccccggcgcagccgcagcagcagcagccccccacccaagcagaagagcaagacccccagccggcagagccacagcagcagcagcccccaccccaaggtgaagagcggcaccccaccccggcagggcagcatcaccagcccccaggccaatgagcagagcgtgaccccccagaggaggagctgctttgagagcagcccagaccctgagctgaagagcaggacccccagccgccacagctgcagcggcagcagccccccccgggtgaagagcagcaccccaccccggcagagccccagccgcagcagcagcccccagcccaaggtgaaggccatcatcagcccccggcagaggagccacagcggcagcagcagccccagccccagccgggtgaccagcaggaccaccccaagaagaagccgctctgtgagcccctgcagcaatgtggagagccggctgctgccccgctacagccacagcggcagcagcagcccagacaccaaggtgaagccagagaccccaccccggcagagccacagcggctag

SEQ ID NO: 273601 - DNA, 936 bp, Artificial Sequence
  derived and/or modified sequence
atgctgctggagaaggacgtgaaccccggcggcaaggaggagaccccagggcagcgacccgccgttacagaaacccaccagttagccgaactgaatgagaagaagaatgagcggctcagggcggcattcgggatttctgactcttacgttgacgggagctcctttgatccccaaagacgcgcaagagaagccaaacagccagccccagaaccacccaagccctattccttagtccgagaaagctccagcagccggtcccctacgccgaagcaaaagaagaagaaaaaaaaaaaggatcggggtcggaggtctgaaagttcatcaccccgtcgagagaggaagaagtcgtccaaaaagaaaaagcaccggtcagagtcggagagcaagaagcgcaaacatcgctcaccaacccccaagagcaaacgtaagtcgaaagacaaaaaaagaaagcgctcgcgaagtacaaccccagcccccaaaagccggcgtgctcacagaagcacctctgccgattctgcatcttcatccgatacctcccgtagccgatcccggtctgccgccgcaaagacccatacaactgccctcgcaggccgtagtccttctccagcctccggccgacggggtgaaggcgacgccccattttccgagcctggcacaacatccacccagcgccccagtagtcccgagaccgcaaccaagcagccatcctctccatacgaggataaagacaaggacaagaaggagaagtctgcgaccaggccttcccccagccccgaaaggagctcaactggccctgagccccccgcccctaccccgttgctcgctgagcgtcacggaggctcaccccagcccctggccacaacgccactgtcgcaggagccagtgaacccctcaccacagcttttcatgtttcttaaaggaatcttggtgttctag

SEQ ID NO: 273602 - DNA, 2871 bp, Artificial Sequence
  derived and/or modified sequence
cggcggcggcggctgcggcgggccgaccggcggggcgaggccgccgcaccaggcccaagagatagcggcgcgagggctgccgccgcagcaagacccctgccactcgggggcggcggccgacggcggagggtcaggggctatgaggaacagcagatccaggagaaagtggcgacctttcggctgatgttgctcgaaaaggatgttaaccccggcggaaaggaggagacacccggtcagcgaccagctgtcaccgagacccatcagctcgccgagctcaatgagaagaagaacgagcgactccgggccgcattcggcataagcgattcttacgtggatggatcttccttcgacccccagagacgcgcccgggaggctaagcagccggctcctgagccccccaagccctactcactcgtgcgggaatcatcctcttcccggagtcccacaccaaagcaaaaaaaaaaaaagaaaaagaaggaccgcgggcgtcgttctgagtcatcctcacctaggcgcgagagaaagaaaagctcgaagaagaaaaagcaccgatccgagtccgaatctaaaaaaaggaagcatcgctcacccacccctaaaagcaagaggaagtccaaggacaaaaagagaaagaggagccgaagtactactcctgctcccaagagccgtcgggcccatcggagcaccagtgccgatagtgcatcttcaagcgatacttcccgatcaaggtcccgttctgcagccgctaagacccacacgaccgctctcgctggcaggtctccgtcacccgccagtggcaggcgcggcgaaggagatgccccatttagtgaacctggaacaacatcgactcagcgaccctcaagccctgaaaccgccacgaagcaaccttcatccccttatgaggataaagacaaagataagaaggagaagagcgccacacgcccctctcctagccccgagcgaagtagtaccggcccagaacctcctgcacctacacccctcctggcagaacgtcatggcggcagtccccaacctctagctactacccctctgtctcaggaacctgtgaaccctccttctgaggcgagccctactcgcgatcggtcaccacctaaaagccccgagaaactgccccaaagctcatcctctgaatcttccccccccagcccacagcctacaaaggtcagccgccatgcatcctcctctccggaatctccgaagcccgcccccgcacccggttcccatcgggaaatcagttccagccccacgtcgaaaaatcgtagtcatggtagagccaagagagataaaagtcatagtcacacccccagccggcgcatggggcgtagtcgatccccagccacagccaagcggggccggtcacggtcacggaccccaaccaaaaggggtcattccaggtcacgcagcccccagtggaggcggtccaggtctgcgcagagatggggccgctccaggagccctcagcgcagaggccggtccaggtccccccaaagacctgggtggtctcggagcaggaatacacaacggcggggccgatcccgctctgctaggaggggtagaagccactctcggtcacctgccacgaggggccggtcaaggtctagaaccccagcccggagaggccgctccagatcccgcacacccgcacgacgccggagtagatcaagaacccctaccagaagaagatctagatccagaacacctgcccggagaggcagatcccgttctagaactcctgctagaaggaggagtcggaccagatccccagtaaggcggagaagccggtcacgctccccggctcggaggagcggcagatctaggtcacgtacccctgctaggagaggaaggtccagaagcaggactcccgcacgccgaggccgatcccggtctcggacacccgctagaagaagcgggcgaagcaggtctcgaactcctgcgcgcagaggacggagcaggtcacggaccccccgtcgcggcagatcaaggtccaggtccctcgtcaggcgtggacgcagccacagccgaacaccccagcgtagaggacgcagtggatcttctagcgaacgcaagaataaatcccgcacatctcagcgccggtccagaagtaactcttcaccagagatgaagaaatctcgtatctccagccgacgctctaggtctctgagttctccgcggtccaaggcgaagagccgtctcagtctacgcaggtcgttgtcaggctcctccccctgccctaaacaaaagagccaaacccccccccgccgctccaggtcaggctccagccagcccaaagctaagtcccggacacctccccgcaggtcacgatcttcttcctcccctccccccaaacagaagagtaagactccatcccgtcagagccactccagctcgagtccccatccgaaggtcaaatcgggcactccaccgagacaaggaagtattacttccccacaggcaaacgaacaaagcgtgaccccccagcggcgctcttgtttcgaaagtagtccggaccctgagctgaagtctcgcactccatccaggcatagttgctctggttcttcccctcctcgggttaaatcctcaactcccccccggcagtcaccaagcaggagcagtagcccacagccaaaggtgaaggccattattagccccagacagcgctctcatagtggcagttcatcaccctccccttcgagggtcactagtcgcaccaccccgcgacgaagtagatccgtctcaccttgttctaacgtggagtccagactccttccaaggtactcccacagtggctcttccagtccagataccaaggttaaacccgaaacccccccgcgacagagccacagcgggtag

SEQ ID NO: 273603 - DNA, 936 bp, Artificial Sequence
  derived and/or modified sequence
atgctgcttgaaaaggatgttaacccaggaggtaaagaagagacccccggacaacgacccgctgttacagaaacacatcagctagcagagttgaacgagaagaagaacgagcgcctgagagctgcgttcggcatctccgattcctatgtggatggtagtagcttcgatcctcagagaagggctcgcgaggccaaacagccagcccctgagccgcctaagccttacagtctagtacgagaaagtagctcgtctagatctcctacacctaagcagaagaagaagaaaaaaaaaaaggaccgcggacgccgaagtgagagttcatcccccagaagagagaggaagaaaagttccaagaaaaagaagcataggtctgaaagtgagtctaagaaacgaaaacacaggtccccaaccccaaaatctaaacggaaatccaaagacaaaaagcggaaaagatctcgctccaccacacctgcaccgaagagtcggagggcccaccgaagcacctccgcggactcagctagtagttcggataccagcagatcccggagccgctcagccgctgccaagacccacaccactgcgcttgcgggacggtctcccagtccggctagcgggaggcggggagaaggcgatgcaccgttttcggagccaggtacgacgagcacacagagacccagttctccagaaacagccaccaagcagccaagctccccatatgaggacaaagacaaggataaaaaggagaaatcggccactcggccttctcctagccccgaaaggtcctccaccggacccgagcccccagcgccaactcccctgctggccgagagacatggaggcagtccccagccgcttgctacaacgcctctttctcaggagcctgttaatccctccccacagttgtttatgtttttaaagggtattctggtgttttag

SEQ ID NO: 273604 - DNA, 2871 bp, Artificial Sequence
  derived and/or modified sequence
cgccgaaggcgactgaggagggccgataggagaggcgaggcagccgcaccgggtcccagagactcgggtgctagagcagctgctgccgcacgccctttacctcttgggggaggcggtcgcagacgcagagttcgaggctacgaggaacagcaaatccaggagaaagttgccacttttaggttgatgctgctggagaaggatgttaacccaggaggcaaagaggaaacgccgggtcagagacccgctgtgacagagactcatcagctcgccgagctgaatgaaaagaaaaatgaaagactgcgcgctgctttcggtatttctgactcatacgtggatggatcctcctttgatccacagcgccgagcgagggaggccaaacagccagcccctgagcctcccaaaccctactccctcgtgcgcgagtctagttcaagtcggtccccaaccccgaagcaaaagaagaagaagaagaaaaaagatcgtggcagacgaagcgaaagttcgagtccccgacgcgagcgcaagaaaagcagcaagaagaaaaaacatcgttcggaatccgaaagcaaaaagcggaaacacaggtctccgactccaaagagtaaaagaaagagtaaggacaagaaacgaaaacgttctcgtagcacgacgccggctcctaagagcaggagggcacatcgcagcacctccgccgactccgcttcatcttcggacacaagtaggagtcgatcccgtagcgccgctgcaaagacccatactacagcactcgccggtcgcagcccatctccagctagcggtcggcgaggtgagggcgatgctcccttttccgagcccggtaccaccagcactcagcgaccctctagtccagaaacggcgacgaagcagccaagctccccatatgaggacaaggataaggataaaaaagagaaatctgcaacccggccatcaccgagtcctgagcggtcttcaacgggtcccgaacctccagccccaaccccattgcttgctgagcgacacggaggcagcccccaacccttagcaactacacctctgtctcaggagccagtgaacccacctagcgaagctagccctactagagacaggtcacctcctaagtcgccagagaaactacctcaatcaagctcttctgagagttctcccccatccccacagccaacaaaagtttcccgtcacgcctcctcgagccccgagagccccaagcctgccccagctccagggtcccatagggagatcagttcatcccctacatccaaaaacagaagccacgggagagctaaacgtgataagagccattctcacaccccctctaggcggatgggcagatctaggagcccggctaccgcaaagagaggccgtagccggtctaggacacccactaaacgcggacactcgaggtcccgctcccctcagtggcggaggtccaggtctgcccagcgctggggccgatcacgtagcccgcagcgtagagggcgtagcagaagccctcagcggccaggctggagtaggtccaggaacacacaacgaagagggaggtcgaggagcgcacggagaggccgatcgcactcccggtcacctgccacccgagggagatcccgatcacggactcccgctagaaggggcaggagtcggtctaggactcctgccaggcgtcggagtaggtcccgaacaccaacacgcagaagaagcaggagccgcacccccgctagacgtgggcgaagccgctctaggactccggcacgtcggaggtcaagaacgcggagccctgtccgcaggcgctcccggtctcgaagccccgctaggcgctccggtagatctcgctctcgcactcctgcacgacggggtcggtctcgctccagaacaccagcaaggcgaggacggagccgatccaggactccagcgagacgctcgggaaggagcagatcgagaactcctgcccgtcggggacgtagtcggtcccgaacgccaagacggggtcgcagcagaagcagatcattagttcgcagaggcaggtctcatagtcggacacctcagcgaagaggacgaagtggatcttcctctgagcgaaagaacaagtccaggacatcccaacgcaggtccagaagtaattccagtcccgagatgaagaagtcccgaatatcaagcaggcggtcgagatccctgtcgtcacccagaagcaaagccaagagcaggttgtctctccgacgcagcctcagcgggtcttcgccttgtcccaagcagaaaagtcaaacacccccacggcgaagtcgatctgggtcttctcagccaaaggcaaagtctcggactcctccacggagatcaagaagcagtagttctcctcctcctaagcaaaagtctaaaacaccctcgaggcagtctcattctagctcatctcctcatcccaaagtcaagagcgggaccccacctaggcagggaagtataacgagcccccaggcgaatgaacagtctgtgacaccacaaagaaggtcgtgctttgaatcatccccggatcctgagctgaagagtcggacaccatcaaggcactcatgtagcgggagctctccacccagagtcaagagctccacacctccacgccaatccccgtccagaagtagcagccctcagcccaaggtcaaagcgattatctcccccaggcagcgatcccacagcggatcctcctcccctagcccaagtagagtgactagcagaacaacacctcgccgaagtaggtcagtttccccctgctctaacgtggagagcaggctgctgccccgatactcccacagcggatcctcatccccagatacgaaggtgaagccggagacacctcctcgacagtcccatagtggctag

SEQ ID NO: 273605 - DNA, 936 bp, Artificial Sequence
  derived and/or modified sequence
atgctgctggagaaggacgtgaaccccggcggcaaggaggagacccccggccagagacccgccgtgaccgagacccaccagctggccgagctgaacgagaagaagaacgagagactgagagccgccttcggcatcagcgacagctacgtggacggcagcagcttcgacccccagagaagagccagagaggccaagcagcccgcccccgagccccccaagccctacagcctggtgagagagagcagcagcagcagaagccccacccccaagcagaagaagaagaagaagaagaaggacagaggcagaagaagcgagagcagcagccccagaagagagagaaagaagagcagcaagaagaagaagcacagaagcgagagcgagagcaagaagagaaagcacagaagccccacccccaagagcaagagaaagagcaaggacaagaagagaaagagaagcagaagcaccacccccgcccccaagagcagaagagcccacagaagcaccagcgccgacagcgccagcagcagcgacaccagcagaagcagaagcagaagcgccgccgccaagacccacaccaccgccctggccggcagaagccccagccccgccagcggcagaagaggcgagggcgacgcccccttcagcgagcccggcaccaccagcacccagagacccagcagccccgagaccgccaccaagcagcccagcagcccctacgaggacaaggacaaggacaagaaggagaagagcgccaccagacccagccccagccccgagagaagcagcaccggccccgagccccccgcccccacccccctgctggccgagagacacggcggcagcccccagcccctggccaccacccccctgagccaggagcccgtgaaccccagcccccagctgttcatgttcctgaagggcatcctggtgttctag

SEQ ID NO: 273606 - DNA, 2871 bp, Artificial Sequence
  derived and/or modified sequence
agaagaagaagactgagaagagccgacagaagaggcgaggccgccgcccccggccccagagacagcggcgccagagccgccgccgccgccagacccctgcccctgggcggcggcggcagaagaagaagagtgagaggctacgaggagcagcagatccaggagaaggtggccaccttcagactgatgctgctggagaaggacgtgaaccccggcggcaaggaggagacccccggccagagacccgccgtgaccgagacccaccagctggccgagctgaacgagaagaagaacgagagactgagagccgccttcggcatcagcgacagctacgtggacggcagcagcttcgacccccagagaagagccagagaggccaagcagcccgcccccgagccccccaagccctacagcctggtgagagagagcagcagcagcagaagccccacccccaagcagaagaagaagaagaagaagaaggacagaggcagaagaagcgagagcagcagccccagaagagagagaaagaagagcagcaagaagaagaagcacagaagcgagagcgagagcaagaagagaaagcacagaagccccacccccaagagcaagagaaagagcaaggacaagaagagaaagagaagcagaagcaccacccccgcccccaagagcagaagagcccacagaagcaccagcgccgacagcgccagcagcagcgacaccagcagaagcagaagcagaagcgccgccgccaagacccacaccaccgccctggccggcagaagccccagccccgccagcggcagaagaggcgagggcgacgcccccttcagcgagcccggcaccaccagcacccagagacccagcagccccgagaccgccaccaagcagcccagcagcccctacgaggacaaggacaaggacaagaaggagaagagcgccaccagacccagccccagccccgagagaagcagcaccggccccgagccccccgcccccacccccctgctggccgagagacacggcggcagcccccagcccctggccaccacccccctgagccaggagcccgtgaacccccccagcgaggccagccccaccagagacagaagcccccccaagagccccgagaagctgccccagagcagcagcagcgagagcagcccccccagcccccagcccaccaaggtgagcagacacgccagcagcagccccgagagccccaagcccgcccccgcccccggcagccacagagagatcagcagcagccccaccagcaagaacagaagccacggcagagccaagagagacaagagccacagccacacccccagcagaagaatgggcagaagcagaagccccgccaccgccaagagaggcagaagcagaagcagaacccccaccaagagaggccacagcagaagcagaagcccccagtggagaagaagcagaagcgcccagagatggggcagaagcagaagcccccagagaagaggcagaagcagaagcccccagagacccggctggagcagaagcagaaacacccagagaagaggcagaagcagaagcgccagaagaggcagaagccacagcagaagccccgccaccagaggcagaagcagaagcagaacccccgccagaagaggcagaagcagaagcagaacccccgccagaagaagaagcagaagcagaacccccaccagaagaagaagcagaagcagaacccccgccagaagaggcagaagcagaagcagaacccccgccagaagaagaagcagaaccagaagccccgtgagaagaagaagcagaagcagaagccccgccagaagaagcggcagaagcagaagcagaacccccgccagaagaggcagaagcagaagcagaacccccgccagaagaggcagaagcagaagcagaacccccgccagaagaagcggcagaagcagaagcagaacccccgccagaagaggcagaagcagaagcagaacccccagaagaggcagaagcagaagcagaagcctggtgagaagaggcagaagccacagcagaaccccccagagaagaggcagaagcggcagcagcagcgagagaaagaacaagagcagaaccagccagagaagaagcagaagcaacagcagccccgagatgaagaagagcagaatcagcagcagaagaagcagaagcctgagcagccccagaagcaaggccaagagcagactgagcctgagaagaagcctgagcggcagcagcccctgccccaagcagaagagccagaccccccccagaagaagcagaagcggcagcagccagcccaaggccaagagcagaaccccccccagaagaagcagaagcagcagcagccccccccccaagcagaagagcaagacccccagcagacagagccacagcagcagcagcccccaccccaaggtgaagagcggcaccccccccagacagggcagcatcaccagcccccaggccaacgagcagagcgtgaccccccagagaagaagctgcttcgagagcagccccgaccccgagctgaagagcagaacccccagcagacacagctgcagcggcagcagcccccccagagtgaagagcagcaccccccccagacagagccccagcagaagcagcagcccccagcccaaggtgaaggccatcatcagccccagacagagaagccacagcggcagcagcagccccagccccagcagagtgaccagcagaaccacccccagaagaagcagaagcgtgagcccctgcagcaacgtggagagcagactgctgcccagatacagccacagcggcagcagcagccccgacaccaaggtgaagcccgagaccccccccagacagagccacagcggctag

SEQ ID NO: 273607 - DNA, 1323 bp, Artificial Sequence
  derived and/or modified sequence
atggacatgaacagcatcaaggagccccagagcagactgagaaagtggaccaccgtggacagcatcagcgtgaacaccagcctggaccagaacagcagcaagcacggcgccatcagcagcggcttcagactggaggagagccccttcgtgccctacgacttcatgaacagcagcaccagccccgccagcccccccggcagcatcggcgacggctggcccagagccaagagccccaacggcagcagcagcgtgaactggccccccgagttcagacccggcgagccctggaagggctaccccaacatcgaccccgagaccgacccctacgtgacccccggcagcgtgatcaacaacctgagcatcaacaccgtgagagaggtggaccacctgagagacagaaacagcggcagcagcagcagcctgaacaccaccctgcccagcaccagcgcctggagcagcatcagagccagcaactacaacgtgcccctgagcagcaccgcccagagcaccagcgccagaaacagcgacagcaagctgacctggagccccggcagcgtgaccaacaccagcctggcccacgagctgtggaaggtgcccctgccccccaagaacatcaccgcccccagcagacccccccccggcctgaccggccagaagccccccctgagcacctgggacaacagccccctgagaatcggcggcggctggggcaacagcgacgccagatacacccccggcagcagctggggcgagagcagcagcggcagaatcaccaactggctggtgctgaagaacctgaccccccagatcgacggcagcaccctgagaaccctgtgcatgcagcacggccccctgatcaccttccacctgaacctgccccacggcaacgccctggtgagatacagcagcaaggaggaggtggtgaaggcccagaagagcctgcacatgtgcgtgctgggcaacaccaccatcctggccgagttcgccagcgaggaggagatcagcagattcttcgcccagagccagagcctgacccccagccccggctggcagagcctgggcagcagccagagcagactgggcagcctggactgcagccacagcttcagcagcagaaccgacctgaaccactggaacggcgccggcctgagcggcaccaactgcggcgacctgcacggcaccagcctgtggggcaccccccactacagcaccagcctgtggggcccccccagcagcagcgaccccagaggcatcagcagccccagccccatcaacgccttcctgagcgtggaccacctgggcggcggcggcgagagcatgtag

SEQ ID NO: 273608 - DNA, 1323 bp, Artificial Sequence
  derived and/or modified sequence
atggacatgaactccatcaaagagccccagtccagactcaggaaatggaccaccgttgacagcatctcggtgaataccagccttgaccaaaactctagcaagcacggtgcgatctcaagtggtttcaggctggaagagagtcctttcgtcccatatgactttatgaattcgagcacttctccggcctcaccaccaggttccataggggatggctggcctcgcgccaaatcgccaaacggttcttccagcgtgaattggcctcctgagtttcggcccggtgagccttggaaaggctacccaaatatcgaccctgagaccgacccgtatgtgaccccagggtccgttattaataatctgtccattaataccgtgcgcgaagtggatcacctcagggacaggaactcaggcagctcatcatcacttaacactaccctccccagcacctctgcttggtcgagcattcgagcaagtaattacaatgtacctctttcaagtaccgcccagagcacttctgccaggaatagcgattctaaacttacatggtcacccggctctgtgacaaacacttcacttgcccatgagctgtggaaggtccctctgcctccgaagaacatcaccgccccctcacggccccctcctggtctgactggtcagaaaccacccctgtccacttgggataatagccccctcagaataggcggtggctggggcaacagtgatgcccgatacacgcccggcagcagctggggtgaatcttctagcggaagaattacaaattggctcgtcttgaagaatcttacccctcaaattgacggctccacattgcggactctatgcatgcagcatggccctttgattaccttccatctgaaccttccccacggtaatgccttggtgagatactcctcgaaggaggaggttgtcaaggcacagaagagtctgcacatgtgcgtgctggggaacacaacaattctggccgagttcgcttcagaggaagagatttctaggttcttcgcacaatcacagagcctcacaccatctccaggatggcaatctctgggtagctctcagtctcgccttgggtccctcgattgctcacactctttctctagtaggacggatctgaatcactggaatggcgccggtttatctggaacaaactgcggggatctgcatgggacctcgttatggggaacaccccattacagcacctcactttggggcccacccagttctagtgacccacggggcatctcatctccctctcccattaatgcattcttgtccgtcgatcatttgggggggggcggtgaatctatgtag

SEQ ID NO: 273609 - DNA, 1323 bp, Artificial Sequence
  derived and/or modified sequence
atggacatgaacagcatcaaggagccccagagccggctgaggaagtggaccaccgtggacagcatctctgtgaacaccagcctggaccagaacagcagcaagcatggagccatcagcagcggcttccggctggaggagagcccctttgtgccctatgacttcatgaacagcagcaccagccctgccagccccccaggcagcattggagatggctggccccgggccaagagccccaacggcagcagctctgtgaactggcccccagagttccggcctggagagccctggaagggctaccccaacatcgaccctgagacagacccctacgtgaccccaggcagcgtcatcaacaacctgagcatcaacacagtgcgggaggtggaccacctgcgggacagaaattctggcagcagcagcagcctgaacaccaccctgcccagcaccagcgcctggagcagcatccgggccagcaactacaacgtgcccctgagcagcacagcccagagcaccagcgccaggaacagcgacagcaagctgacctggagccctggctctgtgaccaacaccagcctggcccacgagctgtggaaggtgcccctgccccccaagaacatcacagcccccagcaggcctcctcctggcctgaccggccagaagccacccctgagcacctgggacaacagccccctgcgcatcggcggcggctggggcaacagtgatgcccgctacaccccaggcagctcctggggcgagagcagcagcggccgcatcaccaactggctggtgctgaagaacctgaccccccagattgatggcagcaccctgcggaccctgtgcatgcagcacggccccctcatcaccttccacctgaacctgccccacggcaatgccctggtgcgctacagcagcaaggaggaggtggtgaaggcccagaagagcctgcacatgtgtgtgctgggcaacaccaccatcctggccgagtttgccagcgaggaggagatcagccgcttctttgcccagagccagagcctgacccccagccctggctggcagagcctgggcagcagccagagccggctgggcagcctggactgcagccacagcttcagcagcaggacagacctgaaccactggaatggagctggcctgagcggcaccaactgtggggacctgcacggcaccagcctgtggggcaccccccactacagcaccagcctgtggggcccccccagcagcagtgacccccggggcatcagcagccccagccccatcaatgccttcctgtctgtggaccacctgggcggcggcggggagagcatgtag

SEQ ID NO: 273610 - DNA, 1323 bp, Artificial Sequence
  derived and/or modified sequence
atggacatgaacagcatcaaggagccccagagccggctgcggaagtggaccacagtggacagtatcagcgttaacacgtctttggatcagaactccagtaaacacggtgctatcagcagtggcttccggctggaggagtcaccctttgttccctatgacttcatgaactcgagcacttccccggccagtcctcctggaagcattggtgatggctggccccgcgccaagtctccaaacggatctagctctgtgaattggccacccgaattccgtccaggtgaaccgtggaagggctatccgaacatagaccccgaaacggatccatacgtgacccccggaagcgtgatcaacaatctgagtattaacaccgttagggaggtggaccacctccgcgatagaaacagtggatcttcctcgagcctgaatacaaccttaccatctacgtcagcgtggtctagcattcgtgcctctaactacaatgtgccgctctccagtaccgcacagagtactagcgctaggaatagcgactccaaacttacatggagcccaggatctgtgacaaatacatccctggcccatgagctgtggaaggtccccctcccacccaagaacataacggccccttcgaggccccctcctggattgaccggacaaaagcctcctctttctacgtgggataacagtccactccgtatcggaggtggctggggcaactctgacgcacgctacacaccaggttctagctggggggagtcctctagtggtaggatcaccaactggctcgttttgaagaacctgacccctcagattgacggatctacgctgaggacgttgtgcatgcagcacgggcccctgatcacattccacctaaatcttcctcacggaaacgcactggtgcgctatagctcgaaggaagaggtggtaaaggcacagaaatctcttcatatgtgtgtgctcgggaacacaaccatcctggccgagttcgctagtgaagaggagatctcaagatttttcgcccagtctcagtctctgacccctagtcctggctggcagtccctgggatcgtctcagtccaggctgggaagtttagattgttcccacagtttcagctctcggacagatctcaaccactggaatggggccggccttagcggtacaaactgcggggacctgcacggcaccagtttatgggggaccccccattatagcacaagtctgtggggcccgccctcaagcagcgacccaaggggcatttcgagccctagtccaatcaatgcctttctcagtgtggatcaccttgggggcggcggggaatcaatgtag

SEQ ID NO: 273611 - DNA, 1323 bp, Artificial Sequence
  derived and/or modified sequence
atggatatgaattccattaaggaacctcagagcaggctgcggaaatggaccactgtcgacagcataagcgtcaacacaagcctcgaccagaattcctctaagcacggcgctatctcatctgggttccggcttgaagagtcaccattcgtgccctatgatttcatgaattcaagtacttcccctgccagtccgccagggtccattggagatggatggccaagagctaagtcccccaacggatcatcatcagtaaactggcccccagaattcagaccaggggagccgtggaagggttaccccaatattgatccagaaaccgacccttatgtcacccctgggagcgtgattaacaacctgtctattaatacggtcagagaagtagatcacctgcgtgataggaatagcgggagcagcagcagtctaaataccacactgccatcaacatctgcttggtcctcaatccgggctagcaactacaacgtaccccttagtagtacagcccaatccacatcagccagaaatagtgacagtaagttaacttggagcccaggtagtgtgacgaatacttcgctggcacacgagctgtggaaggtccccctgccaccaaaaaacattaccgccccaagtcgccctcctccaggacttactgggcaaaaacccccactgtcgacatgggacaattccccactgcgaatcgggggaggatggggaaatagtgacgccagatacacccccggttctagttggggggaatctagctctggaagaattaccaattggctggtgttgaaaaatcttactccccagattgacggaagcactctgagaacactttgtatgcagcatggcccattgatcaccttccacttgaatctgccgcatgggaatgccctggtgcgatattcctcgaaagaggaggtcgtgaaggcccagaagtcactgcatatgtgcgtgctaggtaatactacaattttagccgaattcgcctctgaggaggagatcagtaggtttttcgcccagagccagtcacttaccccttcacccggttggcagtcattgggaagcagccagtccaggctggggtcactcgactgtagccatagtttcagctctagaacagacctcaatcattggaacggagcaggtttgtctggaacaaattgtggtgacctccacgggacctctctatggggaacgccccactatagcacttccttatggggtcctccatcctcttccgatccgagaggcatttcttcaccaagtccaattaatgctttcctatccgtagatcacctcgggggagggggtgagagcatgtag

SEQ ID NO: 273612 - DNA, 2398 bp, Artificial Sequence
  derived and/or modified sequence
taaatatggatatgaacagtattaaagagccacagtcaagactaaggaagtggacgacagtggacagcatttctgtgaacacatctttggatcaaaactccagcaaacatggtgctatttcaagtggtttcaggctggaagagtctccatttgttccctatgactttatgaacagcagtacttcaccagccagtcctccaggttcaataggagatggctggccacgtgccaaatcgcctaacggctctagcagtgttaattggccaccagaatttcgtcctggtgagccatggaaaggttatccaaacattgaccctgaaactgacccttacgtcactcctggcagtgtcataaacaatctttcaattaatactgtgcgggaagttgaccacctcagggacaggaacagtgggtcatcctcatccttgaacaccacgctgccttcaactagtgcctggtcatccattcgtgcctccaactacaacgttcccctcagcagtacagcacaaagcacttcagccagaaatagtgattccaaattgacatggtctcctggttcagttacaaacacctctctggctcatgagctgtggaaggtccctttgccacctaaaaacatcactgctccgtcccgcccacctccgggactgactggtcagaagccacccttgtctacgtgggataattctccccttcgtataggtggaggatggggaaattctgacgccagatataccccaggttccagctggggtgagagcagctcagggagaataacaaattggcttgttctaaaaaaccttacacctcagatcgatggctcaactctgcgcactctgtgcatgcagcacggcccgctgatcacattccacctgaacctccctcacggaaatgctctggtccgctacagttcaaaagaagaggtagtgaaggcacaaaagtctctgcacatgtgtgtactggggaacactactattcttgctgagtttgccagtgaagaggagatcagtcgtttctttgcacaaagccagtctctgaccccttctcccggctggcagtctctcgggtccagccagagccggctgggctccctcgactgttcccactcattctccagccggaccgatctcaatcactggaatggtgctgggctgtcgggaactaactgtggagaccttcacggcacttcactctgggggaccccgcattattccacaagcctgtggggtcccccaagcagcagcgacccccgaggaattagcagcccatctcccattaacgcttttctttctgttgaccacctgggtgggggtggagagtccatgtaacagtgtagatgcagactcaccgaccgggacctcagacgcgagggaaaggagcactaagtggggctcgccgcctgcagccaggggccgcctgtgggaacagctattctctgcactttgaataggctttccattttgttttggaggttctcactttgaaccttcttgtttacagatttttttgtttgttttttgagaaaaaaaaatgtttactcttccatcatttaaaaaaaatgtaaaagacaaaaaaaaaatggaggatgatttaaaagatgctttctatctctgggaaaaaggagcagcatttggccatgttcttttgtttttctattcctgtcccaaatcaaagagcatggttctcaggaaaaccagttccccagtttaaaaaaaaaaaaaaaaattccttgtagtttcttagaggaaaaaaagaaaaaccccaacttttagcactgatactacatattgctctgttaaagaattttctctgccaaaaaaaaagaaaaaacaaaaaaacgcttaaagctggagtttgacattctgctttcagatgctgtctttttattagtgagtgatgatggtttgctaataatcaataggtaataattttttgtaatcccatcaagtggctccatatgtttctgctctctcgtgactgtgttaatgtttaactgttgtaccttaaagccgaaatcagtaactatgcatactgtaaccaaggtattgggcttacagagttgtttgttgtataaagaaaattttaaatgttgttgcaaactaacgagttacaccattttaaactttctttcctcccccctttttttgcccacaaatggtattataatgcttgcttagtcaaagaagagagactaaacaagggtaaaaattttaacagtacagaatttgccatcatatcattgccttgattctaactgtttgtgtcctaagatgcaaaagaagtcagtggcttttaactgtttacaaatagaatgtgattgtaaaatgtacagtttggttgtgtttgaattatgaaatttcttcagatataataaaccatgactttttggctgctcaac

SEQ ID NO: 273613 - DNA, 755 bp, Artificial Sequence
  derived and/or modified sequence
ggagtgatagcccccaaaccccagtcccaccaggccctgagggcccctttgtcactggatctgataagaaacaccacccctgcagccccctcccctcacctgaccaatggccacagcctggctgggcccagctccctgtatataaggggaccctgggggctgagcactaccaaggccagtcctgagcaggcccaactccagtgcagctgcccaccctgccgccatgtctctgaccaagactgagaggaccatcattgtgtccatgtgggccaagatctccacgcaggccgacaccatcggcaccgagactctggagaggctcttcctcagccacccgcagaccaagacctacttcccgcacttcgacctgcacccggggtccgcgcagttgcgcgcgcacggctccaaggtggtggccgccgtgggcgacgcggtgaagagcatcgacgacatcggcggcgccctgtccaagctgagcgagctgcacgcctacatcctgcgcgtggacccggtcaacttcaagctcctgtcccactgcctgctggtcaccctggccgcgcgcttccccgccgacttcacggccgaggcccacgccgcctgggacaagttcctatcggtcgtatcctctgtcctgaccgagaagtaccgctgagcgccgcctccgggacccccaggacaggctgcggcccctcccccgtcctggaggttccccagccccacttaccgcgtaatgcgccaataaaccaatgaacgaa

SEQ ID NO: 273614 - DNA, 627 bp, Artificial Sequence
  derived and/or modified sequence
atgcactggctgaggaaggtgcagggcctttgtacactgtgggggacacaaatgagttcacggactctctacatcaacagtcgccaactcgtcagcctccagtggggacatcaggaagtgccggccaagttcaatttcgctagtgatgtcctcgatcattgggccgacatggaaaaagccggaaaacgtctgccatccccggccttgtggtgggtaaacgggaagggcaaggagcttatgtggaatttccgggagctcagtgagaacagccaacaggcagctaatgttctgtcaggagcgtgtgggcttcagagaggcgaccgggtagcagttgtgcttccacgggtgccggagtggtggctcgttattctcgggtgcatccgagcaggtctgatcttcatgcccgggactattcagatgaaaagcaccgacatcctctacagattgcagatgtccaaggcgaaagcgatagtcgctggagatgaagtcatccaggaagtcgatacagtagcaagcgagtgcccctcacttcggataaagcttttggtgtccgagaagtcctgcgacggatggcttaactttaaaaaactcctgaagtacaaagtaagacatcgggatgttaagtag

SEQ ID NO: 273615 - DNA, 627 bp, Artificial Sequence
  derived and/or modified sequence
atgcactggttgcgaaaggttcaagggttgtgcactctctggggaacccagatgtcttcacgaaccctgtacataaattcccgccagcttgtgtcacttcagtggggccatcaggaagttccagcaaagtttaactttgccagcgatgttcttgatcattgggcagacatggaaaaggccgggaagcggcttccgagtccagcactgtggtgggtaaacgggaaaggcaaagagctcatgtggaattttagagagctttccgaaaactcccagcaggcagccaacatcttgtccggtgcatgcggactgcagcgaggcgatcgggtcgccgtgatgctgccaagggtacctgagtggtggttagtgattctcggctgtattcgcgctggattgatttttatgccaggtacaatccagatgaagagcacagacattctctaccgactccagatgtccaaagccaaagccatagtggccggagacgaggtgatacaggaagtggacacagtggcttctgaatgccctagcttacggatcaaactgcttgtgtccgagaagagctgcgatggatggctgaactttaaaaaacttttgaagtacaaggtaagacaccgcgaggtcaaatag

SEQ ID NO: 273616 - DNA, 627 bp, Artificial Sequence
  derived and/or modified sequence
atgcactggctgaggaaggtgcagggcctgtgcaccctgtggggcacccagatgagcagcaggaccctgtacatcaacagccggcagctggtgtccctgcagtggggccaccaggaggtgcctgccaagttcaactttgccagtgatgtgctggaccactgggccgacatggagaaggccggcaagaggctgcccagccctgccctgtggtgggtgaatggcaagggcaaggagctgatgtggaacttccgggagctgtctgagaacagccagcaggccgccaacgtgctgagcggggcctgtggcctgcagagaggagacagagtggccgtggtgctgccccgggtgcctgagtggtggctggtgatcctgggctgcatccgggccggcctcatcttcatgcctggcaccatccagatgaagagcacagacatcctgtaccgcctgcagatgagcaaggccaaggccatcgtggccggagatgaagtcatccaggaggtggacacagtggcctctgaatgtcccagcctgcgcatcaagctgctggtgtctgagaagagctgtgatggctggctgaacttcaagaagctgctgaagtacaaggtgcgccacagagatgtgaagtag

SEQ ID NO: 273617 - DNA, 627 bp, Artificial Sequence
  derived and/or modified sequence
atgcactggctgaggaaggtgcagggcctgtgcaccctgtggggcacccagatgagcagcaggaccctgtacatcaacagccggcagctggtgtccctgcagtggggccaccaggaggtgcctgccaagttcaactttgccagtgatgtgctggaccactgggccgacatggagaaggccggcaagaggctgcccagccctgccctgtggtgggtgaatggcaagggcaaggagctgatgtggaacttccgggagctgtctgagaacagccagcaggccgccaacatcctgagcggggcctgtggcctgcagagaggagacagagtggccgtgatgctgccccgggtgcctgagtggtggctggtgatcctgggctgcatccgggccggcctcatcttcatgcctggcaccatccagatgaagagcacagacatcctgtaccgcctgcagatgagcaaggccaaggccatcgtggccggagatgaagtcatccaggaggtggacacagtggcctctgaatgtcccagcctgcgcatcaagctgctggtgtctgagaagagctgtgatggctggctgaacttcaagaagctgctgaagtacaaggtgcgccaccgggaggtgaagtag

SEQ ID NO: 273618 - DNA, 627 bp, Artificial Sequence
  derived and/or modified sequence
atgcactggctgcggaaggtgcagggcctgtgcaccctgtggggcactcagatgagtagccggaccctctacataaactccaggcaacttgtgtcattacagtggggccaccaggaggttcctgccaagtttaacttcgcgtcggacgtgctagaccactgggccgatatggaaaaagcaggcaaaaggcttccctctccagcattgtggtgggtgaatggaaagggaaaggaactcatgtggaattttcgtgagctgagtgagaattcccaacaagcggctaatgtgttgagcggggcatgtgggctacagaggggggatagggtcgccgtggtgctgccccgagtcccagagtggtggctcgttatacttggatgcatacgcgccggactgatattcatgcctggaacaatacaaatgaagtctaccgatatcctatacaggcttcagatgtctaaagctaaagcaatagtcgccggcgacgaggtcattcaggaggtggataccgtggcaagtgaatgcccatccctccggattaagctactcgtctcggagaagtcctgtgacggctggcttaacttcaaaaaactgctcaaatataaggttcgacatcgggacgttaagtag

SEQ ID NO: 273619 - DNA, 627 bp, Artificial Sequence
  derived and/or modified sequence
atgcactggctgcggaaggtgcagggcctgtgcaccctgtggggcacgcagatgagttctcgcacattatacatcaattctagacaactagtctctttacaatggggccaccaagaagtgcctgccaagtttaatttcgcctccgacgtgcttgaccattgggctgacatggagaaagcagggaaacgactgccatccccagccctgtggtgggtcaacggaaagggcaaagaattgatgtggaatttcagagagctatcagagaattctcaacaggcagccaacatcctgagtggtgcctgcggtctgcaacggggggatcgcgtcgcagtcatgctgcccagagtccccgagtggtggctggtgatccttggatgtattagggccggtctaatcttcatgccaggaacaattcagatgaagtcaactgatatcttgtaccgacttcagatgtccaaagccaaagcaattgttgcaggcgatgaggtgatccaggaagtggacaccgttgcaagcgaatgtccctcattgcgcatcaagttgctggtgtctgagaaaagttgtgatggctggctgaacttcaagaaactactgaagtataaggttagacaccgggaagtgaagtag

SEQ ID NO: 273620 - DNA, 627 bp, Artificial Sequence
  derived and/or modified sequence
atgcactggctgagaaaagtgcagggcctgtgcaccctttgggggacccaaatgtcgtccagaacgctctatattaattcaaggcagctagtctcccttcagtggggccatcaggaggtaccagctaagtttaatttcgcctccgatgtgctcgaccattgggccgacatggagaaggctggcaagagacttccaagtcccgctctctggtgggttaacgggaaaggcaaagagcttatgtggaattttagagaactcagcgaaaactcccagcaggccgctaatgtcctttccggagcttgcggtctgcagcgaggagatcgggtagctgtagtgctccccagggtccccgagtggtggctagtgattctgggttgtattagagccggactgatttttatgccagggaccatccaaatgaaatctacagatattctgtaccgcctgcagatgtccaaagccaaggccattgtggctggggacgaagtgattcaagaagtggatacagtggcaagcgaatgtccaagtctgaggatcaaactgttggtatcagagaagtcatgcgacggatggctcaattttaagaagttactgaagtataaagtccgacacagagacgtgaagtag

SEQ ID NO: 273621 - DNA, 627 bp, Artificial Sequence
  derived and/or modified sequence
atgcattggttgcgaaaggtgcagggcctttgtaccctttggggaacacagatgagttcacggactctgtacatcaacagccgacaactggtcagccttcaatggggacatcaggaggtgcccgctaagttcaacttcgcctcagacgtcctggaccactgggctgacatggaaaaggctggaaagagactcccttccccggcactgtggtgggtcaatgggaagggcaaagaactaatgtggaactttagggagctatccgagaactctcagcaggccgcaaatattctcagtggagcctgtggcctgcagaggggtgacagagtggccgtcatgctgcctagggtcccagagtggtggctggtgatcttaggatgtatacgggcaggtctgatctttatgccgggaactattcaaatgaagtccactgatatcctgtaccggcttcagatgtccaaagcgaaggctatagtggcaggtgacgaggtgatccaagaagtggatacagttgcgtccgaatgtccttccctgcgcatcaaactcctggtgagtgaaaaaagctgcgatggttggctcaatttcaagaaactacttaagtacaaggtgcggcatagggaggtgaagtag

SEQ ID NO: 273622 - DNA, 627 bp, Artificial Sequence
  derived and/or modified sequence
atgcactggctgagaaaggtgcagggcctgtgcaccctgtggggcacccagatgagcagcagaaccctgtacatcaacagcagacagctggtgagcctgcagtggggccaccaggaggtgcccgccaagttcaacttcgccagcgacgtgctggaccactgggccgacatggagaaggccggcaagagactgcccagccccgccctgtggtgggtgaacggcaagggcaaggagctgatgtggaacttcagagagctgagcgagaacagccagcaggccgccaacgtgctgagcggcgcctgcggcctgcagagaggcgacagagtggccgtggtgctgcccagagtgcccgagtggtggctggtgatcctgggctgcatcagagccggcctgatcttcatgcccggcaccatccagatgaagagcaccgacatcctgtacagactgcagatgagcaaggccaaggccatcgtggccggcgacgaggtgatccaggaggtggacaccgtggccagcgagtgccccagcctgagaatcaagctgctggtgagcgagaagagctgcgacggctggctgaacttcaagaagctgctgaagtacaaggtgagacacagagacgtgaagtag

SEQ ID NO: 273623 - DNA, 627 bp, Artificial Sequence
  derived and/or modified sequence
atgcactggctgagaaaggtgcagggcctgtgcaccctgtggggcacccagatgagcagcagaaccctgtacatcaacagcagacagctggtgagcctgcagtggggccaccaggaggtgcccgccaagttcaacttcgccagcgacgtgctggaccactgggccgacatggagaaggccggcaagagactgcccagccccgccctgtggtgggtgaacggcaagggcaaggagctgatgtggaacttcagagagctgagcgagaacagccagcaggccgccaacatcctgagcggcgcctgcggcctgcagagaggcgacagagtggccgtgatgctgcccagagtgcccgagtggtggctggtgatcctgggctgcatcagagccggcctgatcttcatgcccggcaccatccagatgaagagcaccgacatcctgtacagactgcagatgagcaaggccaaggccatcgtggccggcgacgaggtgatccaggaggtggacaccgtggccagcgagtgccccagcctgagaatcaagctgctggtgagcgagaagagctgcgacggctggctgaacttcaagaagctgctgaagtacaaggtgagacacagagaggtgaagtag

SEQ ID NO: 273624 - DNA, 741 bp, Artificial Sequence
  derived and/or modified sequence
gagttactgtgctctcttccaaggctgtaggagttctggagctgctggctggagaggagggtggacgaagctctctctagaaagacatcctgagaggacttggcaggcctgaatatgcattggctgcgaaaagttcagggactttgcaccctgtggggtactcagatgtccagccgcactctctacattaatagtaggcaactggtgtccctgcagtggggccaccaggaagtgccggccaagtttaactttgctagtgatgtgttggatcactgggctgacatggagaaggctggcaagcgactcccaagcccagccctgtggtgggtgaatgggaaggggaaggaattaatgtggaatttcagagaactgagtgaaaacagccagcaggcagccaacgtcctctcgggagcctgtggcctgcagcgtggggatcgtgtggcagtggtgctgccccgagtgcctgagtggtggctggtgatcctgggctgcattcgagcaggtctcatctttatgcctggaaccatccagatgaaatccactgacatactgtataggttgcagatgtctaaggccaaggctattgttgctggggatgaagtcatccaagaagtggacacagtggcatctgaatgtccttctctgagaattaagctactggtgtctgagaaaagctgtgatgggtggctgaacttcaagaaactactaaaatataaagtcagacacagagacgttaaataa

SEQ ID NO: 273625 - DNA, 802 bp, Artificial Sequence
  derived and/or modified sequence
actgtcaatgattagctgagctctctttccgacagtgcagggattctgaagctgtctgcttgagttactgtgctctcttccaaggctgtaggagttctggagctgctggctggagaggagggtggacgaagctctctccagaaagacatcctgagaggacttggcaggcctgaacatgcattggctgcgaaaagttcagggactttgcaccctgtggggtactcagatgtccagccgcactctctacattaatagtaggcaactggtgtccctgcagtggggccaccaggaagtgccggccaagtttaactttgctagtgatgtgttggatcactgggctgacatggagaaggctggcaagcgactcccaagcccagccctgtggtgggtgaatgggaaggggaaggaattaatgtggaatttcagagaactgagtgaaaacagccagcaggcagccaacatcctctcgggagcctgtggcctgcagcgtggggatcgtgtggcagtgatgctgccccgagtgcctgagtggtggctggtgatcctgggctgcattcgagcaggtctcatctttatgcctggaaccatccagatgaaatccactgacatactgtataggttgcagatgtctaaggccaaggctattgttgctggggatgaagtcatccaagaagtggacacagtggcatctgaatgtccttctctgagaattaagctactggtgtctgagaaaagctgcgatgggtggctgaacttcaagaaactactaaaatataaagtgagacacagagaagttaaataa

SEQ ID NO: 273626 - DNA, 489 bp, Artificial Sequence
  derived and/or modified sequence
atgaaagactcatgcattaccgtaatggcgatggcactgctcagtggtttcttcttcttcgcgcctgccagtagttacaacctcgacgtccggggcgcacgcagtttcagcccgccacgagccgggagacattttggttacagggttctgcaggtggggaacggcgttatcgtgggggccccaggcgaaggcaattccaccgggtcactctatcagtgccagagtggaaccgggcattgtctgccagtgactttgaggggtagtaactatacctccaagtacctgggaatgactctggccacagatcccaccgatggctctatactcgcctgtgatcctgggctttcacgcacgtgcgatcagaatacttacctgagcggactctgttatcttttcaggcagaacttacagggccccatgctgcaggggaggcctggatttcaggtgtgctgttgcagcgtgtttcacaagcttcaaaaccgcatctag

SEQ ID NO: 273627 - DNA, 489 bp, Artificial Sequence
  derived and/or modified sequence
atgaaggacagctgcatcaccgtgatggccatggccctgctgagcggcttcttcttctttgccccagccagcagctacaacctggatgtgcggggggcccgctccttcagcccccccagggctggccgccacttcggctacagagtgctgcaggtgggcaatggagtgattgtgggcgcccctggagagggcaacagcacaggcagcctgtaccagtgccagagcggcaccggccactgcctgcctgtgaccctgcggggcagcaactacaccagcaagtacctgggcatgaccctggccacagaccccacagatggcagcatcctggcctgtgaccccggcctgagcaggacctgtgaccagaacacctacctgagcggcctgtgctacctgttccggcagaacctgcagggccccatgctgcagggccggcccggcttccaggtgtgctgctgcagcgtcttccacaagctgcagaaccgcatctag

SEQ ID NO: 273628 - DNA, 489 bp, Artificial Sequence
  derived and/or modified sequence
atgaaggacagctgcatcaccgtgatggccatggccctgctgagcgggttcttcttctttgcgcctgcttcctcatataatctggacgtccggggcgctcggtcttttagtcctcccagggcaggtcggcattttggatatagggtgctgcaggtcggaaacggggttattgtgggggcaccgggagagggtaattcgacgggctctctataccagtgccagtctggaaccggacactgcctgccagtaacccttagggggagcaactacacctcaaaataccttggaatgactctggctaccgatcctaccgacggttccatcttagcatgcgacccaggcctcagtcggacctgcgaccagaatacctatctgagcggactgtgctatctgttcagacagaatctacaggggccaatgttacaaggcaggcccggcttccaggtttgttgttgcagtgtgtttcacaagctgcaaaatcggatatag

SEQ ID NO: 273629 - DNA, 489 bp, Artificial Sequence
  derived and/or modified sequence
atgaaggattcttgtatcaccgtaatggccatggccctgctctcggggttttttttcttcgcccctgcttcaagctataatctcgatgtcagaggcgctcggtcgttctctccacccagggccggaaggcactttggctaccgcgtcttacaggtggggaacggggtaattgtcggagccccaggtgaggggaattctaccggatctctgtaccaatgtcagagcggtactgggcactgcctgcctgtcacattgagagggtctaattatacatctaaatacttgggcatgaccctcgccacagatcctactgacgggagcatattggcatgtgaccccggtctcagccgtacatgcgaccaaaatacttatctatcaggcctctgttacctgttccgccagaacttgcaaggcccaatgctccagggtcgcccaggattccaggtctgctgctgcagtgtgtttcacaagctgcaaaatcgcatctag

SEQ ID NO: 273630 - DNA, 489 bp, Artificial Sequence
  derived and/or modified sequence
atgaaggacagctgcatcaccgtgatggccatggccctgctgagcggcttcttcttcttcgcccccgccagcagctacaacctggacgtgagaggcgccagaagcttcagcccccccagagccggcagacacttcggctacagagtgctgcaggtgggcaacggcgtgatcgtgggcgcccccggcgagggcaacagcaccggcagcctgtaccagtgccagagcggcaccggccactgcctgcccgtgaccctgagaggcagcaactacaccagcaagtacctgggcatgaccctggccaccgaccccaccgacggcagcatcctggcctgcgaccccggcctgagcagaacctgcgaccagaacacctacctgagcggcctgtgctacctgttcagacagaacctgcagggccccatgctgcagggcagacccggcttccaggtgtgctgctgcagcgtgttccacaagctgcagaacagaatctag

SEQ ID NO: 273631 - protein, 322 aa, Artificial Sequence
  derived and/or modified sequence
MVGIFKENRMSRMQRKMGRFPQSQYSPQVVLLVYHWSSRESEHDLLVHKAVAKWTAEEVVLWLEQLGPWASLYRERFLSERVNGRLLLTLTEEEFSKTPYTIENSSHRRAILMELERVKALGVKPPQNLWEYKAVNPGRSLFLLYALKSSPRLSLLYLYLFDYTDTFLPFIHTICPLQEDSSGEDIVTKLLDLKEPTWKQWREFLVKYSFLPYQLIAEFAWDWLEVHYWTSRFLIINAMLLSVLELFSFWRIWSRSELKTVPQRMWSHFWKVSTQGLFVAMFWPLIPQFVCNCLFYWALYFNPIINIDLVVKELRRLETQVL

SEQ ID NO: 273632 - DNA, 969 bp, Artificial Sequence
  derived and/or modified sequence
atggtcggtatattcaaggagaacaggatgtcgcgaatgcagaggaagatggggcgctttccgcaatctcaatatagcccccaggtggtgctcctggtttaccactggagcagtcgcgagagcgaacatgatctgctcgtacacaaggcagttgccaagtggacagcggaagaagtcgtcctttggcttgaacagctgggaccttgggcgagtctgtaccgggagcggtttctgtcagaacgagtcaacggccgcctcttgctcactctaaccgaagaggaattctcgaaaaccccatacactatcgagaactcctcccacagacgagctatcctcatggagctggagcgggtgaaagccctcggagtgaaacccccccagaacttgtgggaatacaaggccgtcaatccgggaagaagcctttttctgctttatgctctgaagagttctccacgtctaagtcttctatacctgtatttatttgactatacggatactttcctgcctttcatccataccatttgtcccctgcaggaggacagttccggggaggatatcgtgacaaaactgctggacctcaaggagcctacatggaagcaatggagggagttcctggtgaaatacagtttcctcccgtaccagttaatcgcagaatttgcttgggactggctggaagttcactactggacctcacggtttctgataataaacgctatgctgctcagtgtgctcgagttgtttagcttttggagaatctggtccaggtccgaacttaagaccgttcctcagagaatgtggagccatttttggaaagtctccacccaagggctgttcgtcgctatgttctggcccctcattccacagtttgtgtgcaattgcctgttctattgggcattgtattttaaccccatcattaatatagacctggtcgttaaggaattgaggcgcctggagacccaggtcctgtag

SEQ ID NO: 273633 - DNA, 969 bp, Artificial Sequence
  derived and/or modified sequence
atggtgggcatcttcaaggaaaataggatgagcaggatgcagaggaagatgggccgcttcccccagagccagtacagcccccaggtggtgctgctggtgtaccactggagcagccgggagagcgagcatgacctgctggtgcacaaggctgtggccaagtggacagctgaggaggtggtgctgtggctggagcagctgggcccctgggccagcctgtaccgggagcgcttcctgtctgagcgggtgaatggccgcctgctgctgaccctgacagaggaggagttcagcaagaccccctacaccatcgagaacagcagccaccggcgggccatcctgatggagctggagcgggtgaaggccctgggcgtgaagccaccccagaacctgtgggagtacaaggctgtgaaccctggccgcagcctcttcctgctgtatgccctgaagagcagcccccggctgagcctgctgtacctgtacctgtttgactacacagacaccttcctgcccttcatccacaccatctgccccctgcaggaggacagcagcggggaggacatcgtgaccaagctgctggacctgaaggagcccacctggaagcagtggagggagttcctggtgaagtacagcttcctgccctaccagctgattgctgagtttgcctgggactggctggaggtgcactactggaccagccgcttcctgatcatcaatgccatgctgctgtctgtgctggagctgttctccttctggaggatctggagccgctctgagctgaagacagtgccccagaggatgtggagccacttctggaaggtgtccacccagggcctgtttgtggccatgttctggcccctcatcccccagtttgtgtgcaactgcctcttctactgggccctgtacttcaaccccatcatcaacatcgacctggtggtgaaggagctgcggcggctggagacccaggtgctgtag

SEQ ID NO: 273634 - DNA, 969 bp, Artificial Sequence
  derived and/or modified sequence
atggtgggcatcttcaaggagaaccggatgagccggatgcagcggaaaatgggacggtttccgcagtcgcagtactccccacaagttgttttgctagtgtatcactggtcgagccgggagtccgaacacgacctccttgtgcacaaagccgtcgcaaaatggactgcagaagaagtggtgctgtggttagagcagctcggaccgtgggcctcactgtaccgtgagaggtttctctccgagcgagtgaatgggaggcttcttctcacactgaccgaggaggaattctctaagactccctacacgatcgagaactcctcccacagacgggccatcctgatggagcttgaacgcgtgaaggctttgggggtgaagccaccccagaacctttgggagtacaaggccgtcaaccctggtagaagcctgtttctgctttacgcactgaaatcttccccgcgtcttagtcttctctatctttatctatttgactataccgatacatttctgccattcattcacacgatctgcccccttcaggaagattcaagtggtgaggatatcgtcaccaaattgttggacctaaaggagcccacctggaaacaatggcgcgaatttctcgtgaagtattcctttctgccgtaccaactaattgctgagttcgcttgggactggcttgaggttcactattggacctcacgttttttgatcattaatgccatgctcctgtctgtcctggagctcttttccttttggcgaatctggtcccgatccgagcttaaaacagtccctcagaggatgtggagccacttttggaaagtcagcactcaggggctttttgtggcgatgttctggcctttgatccctcaatttgtgtgtaactgcttgttttattgggctctgtacttcaatccaatcatcaacattgacctcgtggtcaaagagctgagaaggctcgaaacccaggtgctgtag

SEQ ID NO: 273635 - DNA, 969 bp, Artificial Sequence
  derived and/or modified sequence
atggtgggaattttcaaggaaaacaggatgtctaggatgcagcggaaaatgggcagattcccccaatcccagtacagtccacaggtcgttctgcttgtttatcattggtctagtagagaatctgagcacgatctattggtgcacaaagctgtggccaaatggacggccgaggaagtcgtgctctggctagagcagttgggaccctgggccagcctgtatagggaaaggttccttagcgaaagggttaacggacgactgctgctcaccctcaccgaggaggagttcagcaagactccatacaccatcgaaaactctagtcacaggcgtgctatcttgatggagctcgagcgagtcaaagcccttggagtgaagccccctcagaatctgtgggagtacaaggccgtcaatcctgggcgttccctgttcctgctctacgccctgaagagttctcccaggttgtccctgctgtatctgtacctttttgattacaccgacacgtttctccccttcatccatactatatgcccactgcaggaggatagttcaggcgaggatattgtgactaaactgcttgaccttaaggagcccacatggaagcagtggagagagttcctcgtgaaatattcgttcctgccttatcagctcatcgccgaatttgcctgggattggctcgaggttcactattggaccagcaggttcctgatcattaatgcgatgctgctgtccgttctggagctattcagtttttggaggatctggtctaggagtgagctgaaaactgtgccccagagaatgtggagccatttctggaaggttagcacacaaggccttttcgttgctatgttctggcctctgattccacagtttgtctgcaactgcctcttctactgggcgctgtatttcaacccgatcattaatatcgaccttgtagttaaggagctacgcaggcttgaaactcaggtgttatag

SEQ ID NO: 273636 - DNA, 1448 bp, Artificial Sequence
  derived and/or modified sequence
gcagcagttttctacgtctgaaattttttatgtctctggaacccagaatttgctaagagatggaggaacctcagaaaagctatgtgaacacaatggaccttgagagagatgaacctctcaaaagcaccggccctcagatttctgttagtgaattttcttgccactgctgctacgacatcctggttaaccccaccaccttgaactgtgggcacagcttctgccgtcactgccttgctttatggtgggcatcttcaaagaaaacagaatgtccagaatgcagagaaaaatgggaaggtttccccaaagtcagtattctcctcaggtggtcctgctcgtctatcactggagcagcagggaatctgaacacgacctcctggtccacaaggctgtggccaaatggacggcggaagaagttgtcctctggctggagcagctgggcccttgggcatctctttacagggaaaggtttttatctgaacgagtaaatggaaggttgcttttaactttgacagaggaagaattttccaagacgccctataccatagaaaacagcagccacaggagagccatcctcatggagctagaacgtgtcaaagcattaggcgtgaagcccccccagaatctctgggaatataaggctgtgaacccaggcaggtccctgttcctgctatacgccctcaagagctcccccaggctgagtctgctctacctgtacctgtttgactacaccgacaccttcctacctttcatccacaccatctgccctctgcaagaagacagctctggggaggacatcgtcaccaagcttctggatcttaaggagcctacgtggaagcagtggagagagttcctggtcaaatactccttccttccataccagctgattgctgagtttgcttgggactggttggaggtccattactggacatcacggtttctcatcatcaatgctatgttactctcagttctggaattattctccttttggagaatctggtcgagaagtgaactgaagaccgtgcctcagaggatgtggagccatttctggaaagtatcaacgcaggggctttttgtggccatgttctggcccctcatccctcagtttgtttgcaactgtttgttttactgggccctgtactttaacccaattattaacattgatcttgtggtcaaggaactccggcggctggaaacccaggtgttgtgactggcactgcccaggctgagactcttcaagtcccgctgacgtctgagctttgatgcttaagaggggtgaggcagggagcggacttcctattttctaccctcagtaaaacaaggtgctgctttgtatatcaaaagctccaaccatgtcctctccccctcagcctgtgggtggcacgagcaaggactgacatccgcacagggaggattgtctgtttggctgacacagcagcagcccttcccac

SEQ ID NO: 273637 - DNA, 969 bp, Artificial Sequence
  derived and/or modified sequence
atggtgggcatcttcaaggagaacagaatgagcagaatgcagagaaagatgggcagattcccccagagccagtacagcccccaggtggtgctgctggtgtaccactggagcagcagagagagcgagcacgacctgctggtgcacaaggccgtggccaagtggaccgccgaggaggtggtgctgtggctggagcagctgggcccctgggccagcctgtacagagagagattcctgagcgagagagtgaacggcagactgctgctgaccctgaccgaggaggagttcagcaagaccccctacaccatcgagaacagcagccacagaagagccatcctgatggagctggagagagtgaaggccctgggcgtgaagcccccccagaacctgtgggagtacaaggccgtgaaccccggcagaagcctgttcctgctgtacgccctgaagagcagccccagactgagcctgctgtacctgtacctgttcgactacaccgacaccttcctgcccttcatccacaccatctgccccctgcaggaggacagcagcggcgaggacatcgtgaccaagctgctggacctgaaggagcccacctggaagcagtggagagagttcctggtgaagtacagcttcctgccctaccagctgatcgccgagttcgcctgggactggctggaggtgcactactggaccagcagattcctgatcatcaacgccatgctgctgagcgtgctggagctgttcagcttctggagaatctggagcagaagcgagctgaagaccgtgccccagagaatgtggagccacttctggaaggtgagcacccagggcctgttcgtggccatgttctggcccctgatcccccagttcgtgtgcaactgcctgttctactgggccctgtacttcaaccccatcatcaacatcgacctggtggtgaaggagctgagaagactggagacccaggtgctgtag

SEQ ID NO: 273638 - DNA, 2901 bp, Artificial Sequence
  derived and/or modified sequence
ctctgccctcatgcgcatcctcacgcgctcccgcgtgctcaacgaggagcccctgacactggcgggcgaggagatcgtggcccagggcaagcgctcggacccgcggagcctgctgtgctatggcggcgccccagggcctggctgccacttctccatcccctaggctttcagcagggccccggctaacctcagtgacgtggtgcagctcatctttctggtggactccaatccctttccctttggctatatcagcaactacaccgtctccaccaaggtggcctcgatggcgttccagacacaggccggcgcccagatccccatcgagcggctggcctcagagcgcgccatcaccgtgaaggtgcccaacaactcggactgggctgcccggggccaccgcagctctgccaactccgttgtggtccagccccaggcctccgtcggtgctgtggtcaccctggacagcagcaaccctgcggccgtgctgcatctgcagctcaactatacgctgctggacggccgctacctgtctgaggaacccgagccctacctggcagtctacctgcactcggagccccggcccaatgagcacaactgctcggctagcaggaggatccgcccagagtccctccagggtgccgaccaccggccctacaccttcttcatttccccggggaccagagacccagtggggagttaccgtctgaacctctccagccacttccgcctgtcggcgctggaggtgtccgtgggcctgtacacgtccctgtgccagtacttcagcgaggaggacgtggtgtggcggacagaggggctgctgcccctggaggagacctcgccccgccaggccgtctgcctcacccgccacctcaccgccttcggcgccagcctcttcgtgcccccaagccatgtacgctttgtgtttcctgagccgacagcggatgtaaactacatcgtcatgctgacatgtgctgtgtgcctggtgacctacatggtcatggccgccatcctgcacaagctggaccagttggatgccagccggggccgcgccatccccttctgtgggcagcggggccgcttcaagtacgagtcctcgtcaagacaggctggggccggggctcaggtaccacggcccacgtgggcatcatgctgtatggggtggacagccggagcggccaccggcacctggatggcgacagagccttccaccgcaacagcctggacatcttccggatcgccaccccgcacagcctgggtagcgtgtggaagatccgagtgtggcacgacaaagggctcagccctgcctggttcctgcagcacgtcatcatcagggacctgcagacggcacacagcaccttcttcctggtcaatgactggctttcggtggagacggaggccaacgggggcctggtggagaaggaggtgctggccgcgagtcacgcagccctgttgcgcttccggcgcctgctggtggctgagctgcagtgcggcttctttgacaagcacatctggctctccatatgggaccggccgcctcgtagctgtttcactcgcatccagagggccacctgctgcgttctcctcatctgcctcttcctgggcgccaacgccgtgtggtacggggctgttggtgactctgcctacagcacggggcatgtgtccaggctgagcccgctgagcgtcgacacagtcgctgttggcctggtgtccagcgtggttgtctatcccgtctacctggccatcctctttctcttctggatgtcccggagcaaggtggctgggagcccgagccccacacctgccgggcagcaggtgctggacatcgacagctgcctggactcgtccgtgctggacagctccttcctcacgttctcaggcctccacgctgaggttatcaatactctggctgaccatcgtcatcgtgggactgactttggtggaagtccttggttacttatcattactgtgtttctgagaagttataaatttgccatctccctctgcacaacttacctttgggttatcaatactctggctgaccatcgtcatcgtgggactgactttggtggaagtccttggttacttatcattactgtgtttctgagaagttataaatttgccatctccctctgcacaacttacctttgtgtgtctttcctgaagactatcttcccgtctcaaaatggacatgatggatccacggatgtacagcagagagccaggaggtccaaccgccgtagacaggaaggaattaaaattgtcctggaagacatctttactttatggagacaggtggaaaccaaggttcgagctaaaatccgtaagatgaaggtgacaacaaaagtcaaccgtcatgacaaaatcaatggaaagaggaagaccgccaaagaacatctgaggaaactaagcatgaaagaacgtgagcacggagaaaaggagaggcaggtgtcagaggcagaggaaaatgggaaattggatatgaaagaaatacacacctacatggaaatgtttcaacgtgcgcaagcgttgcggcggcgggcagaggactactacagatgcaaaatcaccccttctgcaagaaagcctctttgcaaccggggacaattccaaatgagggccttaaatgatgctcagctaagctggttcttgtgtggcctctgtaccttcaaaagctgccgagtcctatgattacacgcgatgggacttgtacacttgaagtgaaacacagttttaaaacttgctttgtttagaattcccacctcatttttccatggacaaaagtattctttatgtcctagtgcacttacaatttggtattacctgggagtgaaaagaaatattacagccatgcctaactgacttcttgaggtcagaatggcggcagcggagcatcgtcattcttca

SEQ ID NO: 273639 - DNA, 4540 bp, Artificial Sequence
  derived and/or modified sequence
cagggagtcccagtgaggtacagccccgtggtggaggccggctcggacatggtcttccggtggaccatcaacgacaagcagtccctgaccttccagaacgtggtcttcaatgtcatttatcagagcgcggcggtcttcaagctctcacccgaggacgctgccatggctgtgctgacggcctccaaccacgtgagcaacgtcaccgtgaactacaacatcaccgtggagcggatgaacaggatgcagggcctgcgggtctctacagtgccagccgtgctgtcccccaatgccacgctggcactgacggcgggcgtgctggtggactcggccgtggaggtggccttcctgtggacctttggggatggggagcaggccctccaccagttccagcctccgtacaacgagtccttcccggttccagacccctcggtggcccaggtgctggtggagcacaatgtcacccacacctacgctgccccaggtgctgatccgcagtggccgggtgcccattgtgtccttggagtgtgtgtcctgcaaggcacaggccgtgtacgaagtgagccgcagctcctacgtgtacctggagggccgctgcctcaattgcagcagcggctccaagcgagggcggtgggctgcacgtacgttcagcaacaagacgctggtgctggatgagaccaccacatccacgggcagcgcaggcatgtgactggtgctgcggcggggcgtgctgcgggacggcgagggatacaccttcacgctgacggtgctgggccgctctggcaaggaggagggctgcgcctccatccccctgtcccccaaccgcccgccgctggggggctcttgccgcctcttcccactgggcgctgtgcacgctctcaccaccaaggtgcacttcgaatgcatgggctggcatgacgcggaggatgctggcgccccgctggtgtacgccctgctgctgcagcgctgtcgccagggccactgcgaggagttctgtgtctacaagggcagcctctccggctacggagccgtgctgcccccgggtttcaggccacacttcgaggtgggcctggccgtggtggtgcaggaccagctgggagccgctgtggtcgccctcaacaggtctctggccatcaccctcccagagcccaacggcagcgcaatggggctcacagtctggctgcacgggctcaccgctagtgtgctcccggggctgctgcggcaggccgatccccagcacgtcatcgagtactcgctggccctggtcactgtgctgaacgagtacgagcgggccctggacgtggcggcagagcccaagcacgagcggcagcgccgagcccagatacgcaagaacatcacggagactctggtgtccctgagggtccacactgtggatgacatccagcagatcgctgctgcgctggcccagtgcatggggcccagcagggagctcgtatgccgctcgtgcctgaagcagacgctgcacaagctggaggccatgatgcgcatcctgcaggcagagaccaccgcgggcaccgtgacgcccaccgccatcggagacagcatcctcaacatcacaggagacctcatccacctggccagctcagacgtgcgggcaccgcagcgctcagagctgggagccgagtcaccattgcggatggtggcgtcccaggcctacaacctgacctctgccctcatgcgcatcctcacgcgctcccgcgtgctcaacgaggagcccgtgacgctggcgggcgaggagatcatggcccagggcaagcgctcggacccgcggagcctgctgtgctatggcggcgccccagggcctggctgccacctctccatcccctaggctttcagcagggcccccgccaacctcagtgacgtggtgcagctcgtctttctggtggactccaatccctttctctttggctatatcagcaactacaccgtctccaccaaggtggcctcgatggcgttccagacacaggccggcgcccagatccccatcgagcggctggcctcagagcgcgccatcaccgtgcaggccgctacctgtctgaggaacccgagccctacctggcagtctacctgcactcggagccccggcccaatgagcgcaactgctcggctagcaggaggatccgcccagagtccctccagggtgccgaccaccggccctacaccttcttcatttccccggggaccagagacccagtggggagttaccgtctgaacctctccagccacttccgctggtcggcgctggaggtgtccgtgggcttgtacacgtccctgtgccagtacttcagcgaggaggatgtggtgtggcggacagaggggctgctgcccctggaggagacctcgccccgccaggccgtctgcctcacccgccacctcaccgccttcggcgccagcctcttcatgcccccaagccatgtacgctttgtgtttcctgagccgacagcggatgtaaactacatcgtcatgctgacatgtgctgtgtgcctggtgacctacatggtcatggccgccatcctgcacaagctggaccagttggatgccagccggggctgcgccatccccttctgtgggcagcggggccgcttcaagtacgagatcctcgtcaagacaggctggggccggggctcaggtaccacggcccacgtgggcatcatgctgtatggggtggacagccggagcggccaccggcacctggacggcgacagagccttccaccgcaacagtctggacatcttccggatcgccaccccgcacagcctgggtagcgtgtggaagatccgagtgtggcacgacaacaaagggctcagccctgcctggttcctgcagcacatcatcgtcagggacctgcagacggcacgcagcaccttcttcctggtcaatgactggctttcggtggagacggaggccaacgggggcctggtggagaaggaggtgctggctgcgagtcacgcagccctgttgcgcttccggcgcctgctggtggctgagctgcagcgtggcttctttgacaagcacatctggctctccatatgggaccggccacctcgtagctgtttcactcgcatccagagggccacctgctgcgttctcctcatctgcctcttcctgggcgccaacgccgtgtggtacggggctgttggtgactctgcctacagcacggggcatgtgtccaggctgagcccgctgagcgtcgacacagtcgctgttggcctggtgtccagcgtggttgtctatcccgtctacctggccatcctctttctcttccggatgtcccggagcaaggtggctgggagcctgagccccacacctgccgggcagtaggtgctggacatcgacagctgcctggactcgtccgtgctggacagctccttcctcacgttctcaggcctccacgctgaggtgagggctctactgggggtcctgggctgggctgggggtcctgccgccttggcgcagcttggactccagacactgtgcacctctcagcaggcctttgctggacaggtgaagagtgacttgtttctggatgattctaagagtgaccttgaggaaccctgggagctcaggaaggaaggagcgcccagaagcagggacagggagctggttggggaggaccagaagtcaggttatcaatactctggctgaccatcgtcatcgtgggactgactttggtggaagtccttggttacttatcattactgtgtttctgagaagttataaatttgccatctccctctgcacaagttacctttgtgtgtctttcctgaagactatcttcccatctcaaaatggacatgatggatccacggatgtacagcagagagccaggaggtccaaccgccgtagacaggaaggaattaaaattgtcctggaagacatctttactttatggagacaggtggaaaccaaagttcgagctaaaatccgtaagatgaaggtgacaacaaaagtcaaccgtcatgacaaaatcaatggaaagaggaagaccgccaaagaacaatcaccccttctgcaagaaagcctctttgcaaccgggtcagaatggcggcagtggagcatcgtcattcttcaggattgccctactggccctacctcacagctgaaactttaaaaaacaggatgggccaccagccacctcctccaactcaacaacattctataattgataactccctgagcctcaagacaccttccgagtgtgtgctctatccccttccaccctcagcggatgataatctcaagacacctcccgagtgtctgctcactccccttccaccctcagctctaccctcagcggatgataatctcaagacacctgccgagtgcctgctctatccccttccaccctcagcggatgataatctcaagacacctcccgagtgtctgctcactccccttccaccctcagctccaccctcagcggatgataatctcaagacacctcctgagtgtgtctgctcactccccttccaccctcagcggatgataatctcaagaaactaaggaagaataaataaataat

SEQ ID NO: 273640 - DNA, 3693 bp, Artificial Sequence
  derived and/or modified sequence
atggtggccgccagtccaaacccagcggccgtgaatacatccgtcaccctctctgcagagctcgcaggtggcagcggagtggtatatacttggtcactggaggaggggctgtcgtgggagaccagcgaaccatttacgactcactctttcccgacaccaggactgcatctggttactatgaccgccgggaacccgctggggagcgccaacgctacagttgaggtcgatgtacaggtgcccgtgtctgggttatccatccgcgctagcgagccaggcggtagctttgtggctgcaggatccagtgtgcctttctgggggcagctggctacaggcactaatgtgtcatggtgctgggcagtacctggcggatcatctaaacgggggcctcacgtaacgatggtttttcccgatgcgggaaccttcagcatcagattgaacgcctccaacgccgtttcgtgggtatccgcaacttacaatctcaccgcggaagaaccaatcgtaggcctggtcttatgggcctcgagcaaagtggttgcccctggccaactcgtgcactttcagatcctgctggctgcaggctccgctgtgacctttcggctgcaagtgggcggggctaatcctgaggtcctgcccggaccacggttcagccactcttttccacgggtgggggatcatgttgtgagtgtacggggcaaaaaccacgtgtcttgggcacaggctcaagtgcgaatcgtcgtcttggaggccgtgagcgggctgcaggtccccaactgttgcgaacccggaatcgcaacaggtactgagaggaatttcacagctcgtgttcagcgcggctcccgggttgcatatgcttggtatttttccctccaaaaggtgcagggggacagtctggttatcctgtccggtagagacgtcacgtacactccagtagctgccggactgctggagatccaagtgagagcattcaacgccttgggttcggagaatagaacccttgtgctcgaggtacaagacgccgtccagtatgtggcactgcaaagcggtccttgtttcacaaacagatccgcgcaattcgaagcagcaactagcccctccccgaggcgggtagcctatcattgggattttggtgacgggtccccaggtcaagacacagacgaacccagggctgaacactcttatcttagaccaggtgactacagagtacaggttaacgcatcgaatctggtttcattctttgtggctcaggccacagtaacagttcaagtgctagcctgccgagagccagaggttgacgtggtgctcccccttcaggttctgatgcggcgcagccagaggaactacttggaagcccacgtggatctgcgcgactgcgtgacctaccagacagagtaccggtgggaagtatatagaaccgcctcgtgtcagaggcccggccgccccgcccgggttgctctccccggagtggacgtcagccggccacgactggttctccctaggctggcacttcctgttgggcattactgtttcgtctttgtagtgtcttttggcgacacccccctcacccagtccatccaggcaaacgtgactgtggctcctgagagattagtgcccattattgaaggcggcagctaccgcgtgtggtcagatactcgcgacctcgtgttagacggcagcgaatcgtatgatccaaatctagaagatggcgaccagacgcctctgtcttttcactgggcttgtgtggctagcactcagcgcgaggctggcggctgtgccttaaacttcggcccacggggatcctccaccgtgaccatacccagggagagactggccgccggagtggagtatacgtttagcctgaccgtgtggaaagcagggcgtaaggaagaagccacaaatcaaacagtgctgatcaggagcggacgcgtgcctatcgtttctcttgaatgtgtttcctgcaaggcacaagcagtgtatgaggtaagtcggagctcatacgtgtatcttgagggacggtgtttaaattgttctagcggctcaaagcgcggcaggtgggccgctcgcacattctctaataaaaccctcgtgttagatgagaccaccacatccacaggctccgccggaatgcggctggttctgcggaggggtgtgttaagagatggagaggggtacacctttactctgacagtgctgggtcggtcaggagaggaggaagggtgtgccagtatccgtctgagtcctaacagaccaccacttggagggtcttgccgattgttccctctgggagctgtgcatgctctcacaactaaagtgcacttcgagtgcaccggctggcacgatgcagaggacgccggtgctccgcttgtctatgccctccttctgaggagatgcagacaaggccattgcgaggaattctgcgtgtacaaaggttcactgtcttcctacggcgccgtgctccctcccggtttccgcccccattttgaggttggcctggcagtcgtggtgcaggaccaactgggcgctgctgtagtcgccttaaataggtctctggctatcaccttgcccgaaccaaatggaagtgcaactggcctgactgtctggctgcatggactgaccgccagtgtgcttcctgggctactgagacaggctgacccacagcacgttatcgaatactctctggccctggttacagtcctgaacgagtatgagagggcactcgatgtggctgccgaaccgaaacacgagcgccagcaccgcgcccagatacgcaagaatatcaccgaaactctcgtttccctgcgtgtgcatacggtcgatgacatccagcagattgccgctgccctagcacagtgtatgggcccctctagagagctggtgtgtagatcgtgcctcaagcagacacttcacaagctcgaggccatgatgctgatactccaggctgagaccacggccggaacagttacacccacagctatcggagactccatcctcaacataactggggatctgatccacctggcatcatcagatgtcagggcaccccaacccagtgaattgggggcagagagccccagtcgaatggtagcttctcaagcttacaatctaacctctgctttaatgaggatcctgatgaggtctagagtgctaaatgaagagcctctgacgctggcaggcgaggaaattgttgctcagggaaagcggtccgaccccaggagtttgttgtgctacgggggggcacccggccctggctgccacttctctatcccagaggctttcagcggtgcgctcgcaaatctctcggacgtggtgcagctgatatttctggtggattcaaatccttttcctttcggctatattagtaactatacagtctctaccaaggctcccccaaccccccctactcctctatggtccagcccaagaccccccagtgtcctgtggtcaccatggacggctgccactctccggcccggctgtatctgctcctccacaatccgctgctggacggcaaccacttgtctccgtaacctgtcaccaacctggcaatctacctatacccgctctcctgggccaatgagtaccactgctcgcctggccggcggatcagcccaatcccactctcgtgtgctgactactggcccgacgccgagttcattcccacgcggagctgaaacccagaggggagtcaccatctag

SEQ ID NO: 273641 - DNA, 3693 bp, Artificial Sequence
  derived and/or modified sequence
atggtggccgccagccccaacccagctgctgtgaacacctctgtgaccctgtctgctgagctggccggcggcagcggcgtggtgtacacctggagcctggaggagggcctgtcctgggagaccagcgagcccttcaccacccacagcttccccaccccaggcctgcacctggtgaccatgacagctggcaaccccctgggcagcgccaatgccaccgtggaggtggatgtgcaggtgcctgtgtctggcctgagcatccgggccagcgagcccggcggcagctttgtggccgccggcagctctgtgcccttctggggccagctggccaccggcaccaacgtgtcctggtgctgggccgtgcctgggggcagcagcaagaggggcccccacgtgaccatggtgtttcctgatgctggcaccttcagcatccggctgaatgccagcaatgctgtgtcctgggtgtctgccacctacaacctgacagctgaggagcccatcgtgggcctggtgctgtgggccagcagcaaggtggtggcccctggccagctggtgcacttccagatcctgctggccgccggcagcgctgtgaccttccggctgcaggtgggcggggccaaccctgaggtgctgcccggcccccgcttcagccacagcttcccccgggtgggggaccacgtggtgtctgtgcggggcaagaaccacgtgtcctgggcccaggcccaggtgcgcatcgtggtgctggaggccgtgtctggcctgcaggtgcccaactgctgtgagcccggcatcgccactggaacagaaagaaacttcaccgcccgggtgcagaggggcagccgggtggcctatgcctggtacttcagcctgcagaaggtgcagggcgacagcctggtgatcctgagcggcagagatgtgacctacacccctgtggccgccggcctgctggagatccaggtgcgggccttcaatgccctgggcagcgagaacagaaccctggtgctggaggtgcaggatgctgtgcagtatgtggccctgcagagcggcccctgcttcaccaacagaagtgcccagtttgaggccgccaccagccccagccccaggagagtggcctaccactgggactttggagatggcagccctggccaggacacagatgagcccagggctgagcacagctacctgcggcctggggactacagagtgcaggtgaatgccagcaacctggtgtccttctttgtggcccaggccaccgtgacagtgcaggtgctggcctgccgggagcctgaggtggatgtggtgctgcccctgcaggtgctgatgagaagaagccagaggaactacctggaggcccacgtggacctgcgggactgtgtgacctaccagacagagtaccgctgggaggtgtacagaacagccagctgccagaggcctggccggcctgcccgggtggccctgcccggggtggatgtgtcccggccccggctggtgctgccccggctggccctgcctgtgggccactactgctttgtgtttgtggtgtcctttggagacacccccctgacccagagcatccaggccaacgtgacagtggcccctgagcggctggtgcccatcattgaaggaggcagctacagagtgtggagcgacacccgggacctggtgctggatggcagcgagagctatgaccccaacctggaggatggagaccagacccccctgtccttccactgggcctgtgtggccagcacccagcgggaggccggcggctgtgccctgaactttggcccccggggcagcagcacagtgaccatcccccgggagcggctggccgccggcgtggagtacaccttcagcctgactgtgtggaaggccggcaggaaggaggaggccaccaaccagacagtgctgatccgcagcggccgggtgcccatcgtgtccctggagtgtgtgtcctgcaaggcccaggccgtgtatgaggtgagccgcagcagctatgtgtacctggagggccgctgcctgaactgcagcagcggcagcaagaggggccgctgggccgcccggaccttcagcaacaagaccctggtgctggatgagaccaccaccagcactggatctgctggcatgaggctggtgctgcggcggggcgtgctgagagatggagagggctacaccttcaccctgactgtgctgggccgctctggagaggaggagggctgtgccagcatccggctgagccccaacagaccacccctgggcggcagctgccgcctcttccccctgggcgctgtgcacgccctgaccaccaaggtgcactttgaatgtacaggctggcatgatgctgaagatgctggggcccccctggtgtatgccctgctgctgcggcgctgccggcagggccactgtgaggagttctgtgtgtacaagggcagcctgagcagctatggagctgtgctgcccccaggcttccggccccactttgaggtgggcctggccgtggtggtgcaggaccagctgggcgctgctgtggtggccctgaacagaagcctggccatcaccctgcctgagcccaatggaagtgccaccggcctgactgtgtggctgcacggcctgacagcctctgtgctgcccggcctgctgcggcaggccgacccccagcacgtgattgagtacagcctggccctggtgacagtgctgaatgaatatgagcgggccctggatgtggccgctgagcccaagcatgagcggcagcaccgggcccagatcaggaagaacatcacagagaccctggtgtccctgcgggtgcacacagtggatgacatccagcagattgctgctgccctggcccagtgcatgggccccagccgggagctggtgtgccgcagctgcctgaagcagaccctgcacaagctggaggccatgatgctgatcctgcaggccgagaccacagctggcaccgtgacccccacagccatcggggacagcatcctgaacatcactggagacctgatccacctggccagcagtgatgtgcgggccccccagcccagcgagctgggcgctgagagccccagcaggatggtggccagccaggcctacaacctgaccagcgccctgatgaggatcctgatgaggagccgggtgctgaatgaggagcccctgaccctggccggggaggagatcgtggcccagggcaagagaagtgaccccaggagcctgctgtgctatggaggagcccctggccctggctgccacttcagcatccctgaggccttcagcggggccctggccaacctgagtgatgtggtgcagctgatcttcctggtggacagcaaccccttccccttcggctacatcagcaactacacagtgtccaccaaggccccacccaccccacccacccccctgtggagcagccccaggcctccttctgtgctgtggagcccctggacagctgccaccctgcggcccggctgcatctgcagcagcaccatccgctgctggacagccaccacctgcctgaggaacctgagccccacctggcagagcacctacaccaggagccctggccccatgagcaccacagcccggctggccggcggcagcgcccagagccacagccgggtgctgaccaccggccccacccccagcagcttccccagaggagctgagacccagaggggcgtgaccatctag

SEQ ID NO: 273642 - DNA, 3693 bp, Artificial Sequence
  derived and/or modified sequence
atggtggccgccagccccaaccccgccgccgtgaacaccagcgtgaccctcagcgctgaacttgccggaggatcaggcgtggtttatacttggagcctggaggaggggctctcatgggagacgtctgagccctttactacgcactcttttccaacaccgggcctgcacctcgtcacgatgactgcagggaaccctctaggatcagcaaatgcaacagtggaagttgacgtccaggtcccagtcagtgggctctcaattagagcctccgaacccggggggagtttcgtggcggcaggttcctcagtgcccttttggggccagttggcgacagggacaaacgtgagctggtgttgggcggtgccggggggcagctcaaagcgaggaccacacgtgaccatggtgttcccggacgcaggcactttttcaattaggctgaatgcttcgaatgctgtttcttgggtgagtgctacctataacctgaccgctgaagaacctatcgtgggtctggtgctatgggcgtccagcaaagtggtggccccaggtcagctcgttcacttccagatactgctggccgccgggtccgccgtgacttttcgcttgcaggtgggcggagccaatccagaagttttgcccggcccacggttcagccactcattccctagggttggtgaccacgttgtgtcagtcaggggcaagaaccatgtgagctgggcccaggctcaggtccgcatcgtggtgctggaggctgtaagtggcctgcaggttccaaactgttgcgaaccaggaattgccacaggcacggaaaggaatttcaccgcacgagtgcaacgtggatctagggtcgcttacgcgtggtactttagcctgcaaaaggtacaaggcgattcactggttatcctttcgggaagggacgtgacttataccccggtggctgcaggactgctcgagatccaggtccgggcttttaacgctctgggatcagaaaaccggactctggttctggaagttcaggatgctgtccagtacgtggccctgcagtccggtccctgttttacaaaccgaagtgcgcagttcgaggcagccacatccccgagtcccagacgcgttgcataccattgggattttggagacgggtcacccggccaggacacagacgagccgcgggccgagcactcatacttgcgacccggagattatagggttcaagtcaacgcctcaaatttggtatcttttttcgtagcccaagctaccgtaaccgtgcaggtgctggcctgtcgtgagcctgaagtagacgtggtgttacctttgcaggtgctgatgcgtcgaagccagcgtaactacctggaggcacatgttgacctgagggattgtgtcacgtaccagacagagtatcgctgggaagtgtacaggacagcaagctgtcagcgtcctggaaggcccgcccgcgtcgccctgcccggagtggatgtctctaggccccgtctagttttaccccgacttgctctgcctgtgggtcattattgcttcgtcttcgtagtgtcttttggcgacacaccacttacacagagtatccaagcaaacgtgacggtggcccccgagaggctggtgccaatcatagagggggggtcctatcgggtttggagcgataccagggaccttgttctggacgggagcgaaagctacgacccgaatctggaagatggcgatcagactcccttatccttccactgggcttgtgtggcctcgacacagcgtgaggccggagggtgcgccctgaactttggacccagggggagctccacggtgactatccctagagagagactggcagcaggcgtggagtatacattctctctcactgtatggaaggccggtcgtaaagaagaggcgacaaatcagacagtcttgattagaagtggcagggtgcccatagtgtctctcgaatgcgtctcttgcaaagcccaggctgtctacgaggtttcgcgcagcagctatgtttatctggaaggtcggtgcctaaattgctccagcgggtcaaagcgtgggcgctgggccgctcgcacttttagtaataagacgttggtcttagatgagactaccacttccaccggctctgctggcatgcggttggttctgagacgcggcgtgctcagagacggagagggctacaccttcacactcacagttttagggaggagcggggaagaggagggctgcgcgtcaatcagattgtcccctaaccgtcctccactcggtggcagctgtaggctcttccctctgggcgccgttcatgctctgacgacgaaagtacacttcgaatgtacaggatggcacgatgcagaagacgccggagctccacttgtgtatgcccttttgcttcgacgctgtcgccagggccactgtgaagagttttgcgtgtacaagggtagcctatccagctacggcgcagttctgccccccggctttcgaccccacttcgaagtaggcttagccgtcgtcgtgcaggaccaactcggcgcagccgtggtcgctttaaatcgatccctggcaatcaccctgccggagccaaacggtagtgccaccggattgacagtctggctccatggactgacagcatctgtgttgcccggactgttgcggcaggccgacccacagcatgtgatcgagtactcgttggccttagtaacggttctgaacgagtatgagagggctcttgatgtcgccgccgagcctaagcatgagcggcaacaccgggcgcagatcaggaagaatattaccgagactttggtgagtttgagggtacacacagtggatgatatccagcaaattgcagcagcgctggcccagtgcatggggcctagccgggagctggtgtgccgcagctgtttgaagcaaacgctgcataagctcgaggccatgatgttgatcctccaagcggagaccaccgccgggacggtgaccccaactgcaataggggatagcattttgaatataacgggggatctgatccacctcgccagttctgacgttagagccccgcaacctagcgaattaggtgcagagtcaccgtctagaatggtcgcctctcaggcttataacctgacgtcggcgctgatgcggattctgatgcgtagtagagttctgaacgaggagcctttgacactggctggggaagagatcgtggcccagggaaagcggagcgacccccggtctcttctctgctacggaggcgcccctggtcccggatgtcacttcagtattccagaagccttttccggcgccctggctaacctctctgatgtcgtacaactaatttttcttgtggactccaacccttttccatttggatacatcagtaattacaccgtgagtacaaaagcgccgccaaccccccccacacctctgtggagctctccccgtccaccttctgtgctatggtcaccatggaccgccgcaacgctgagacccggctgcatctgttccagcacgatccgctgttggaccgccactacctgtttaagaaacctctcacctacctggcagagcacttacacacggtccccagggccaatgtccacaaccgcccgactcgccggcggcagcgcccagagtcactccagggttcttactactgggcctactccttcttcttttccacgaggcgcagaaacccagcggggagtcacaatttag

SEQ ID NO: 273643 - DNA, 3692 bp, Artificial Sequence
  derived and/or modified sequence
atggtggctgcatcccctaatccagccgcagtgaatacatccgtcaccctgagcgccgaacttgcagggggtagcggtgtagtgtatacatggtcccttgaggaggggttgagctgggagacatcggaaccttttaccacacacagttttcccacgcctggattgcacctggtgaccatgactgctggaaacccactgggtagtgccaacgctaccgtggaagtggacgttcaggtaccggtaagcgggttgtctatcagagcgagtgaacccggtgggtcatttgttgccgctggatctagtgtgccattctgggggcagctcgccacggggaccaacgtcagttggtgctgggccgtaccaggcggttcgtccaagaggggccctcacgtgacgatggtatttcccgacgcaggtacattcagtattcggttgaatgccagcaatgccgtgtcatgggtgtctgctacctataatctcacggctgaagaacccatcgtaggactagtactttgggcgagctccaaggtggtcgcccctggacagctggtgcatttccagatactgctggctgcgggtagtgccgttacatttcgactgcaggttgggggagccaatcctgaggtgctacccggaccacgtttcagccattctttcccaagagtgggcgatcacgtggtgtctgtgcgcggaaaaaaccacgtctcctgggcccaggctcaagtgcgaatagttgtgttagaggccgtttcagggctccaagttcctaattgctgcgaaccaggaatcgcaacgggaactgagcggaactttaccgccagagtccagcgtggttcgagagttgcatatgcatggtacttttcccttcagaaggtgcaaggtgattcattagttattttatccgggcgagatgttacctacaccccagtggccgctggcctgctagaaatccaggtgagagctttcaacgcgctgggttccgaaaaccggacactggtgctcgaggtccaggatgctgtgcagtatgtggcactccagtccggcccatgctttaccaaccgcagtgctcaatttgaagcagctacatcacccagtcccagacgagttgcttaccactgggatttcggagacggttcacccggtcaggatacagatgagccacgcgctgaacattcctacctcaggcccggagactatcgagtacaggtcaacgcatccaaccttgtatcattctttgtggcacaggcaactgtgaccgtccaagtcctcgcatgtcgcgagcctgaggtggacgttgttctacctctgcaggtgcttatgaggagaagccagcgaaattatctggaggctcatgttgacctccgagattgcgtcacatatcaaacagagtaccggtgggaagtgtatcgcactgcttcctgtcagaggcccggacggccagcaagagtcgcattgcctggagtggatgtctctaggcccaggttggtcctgccgaggcttgcactgccggtaggacattactgttttgtgtttgtagtgagctttggagatacccccctcacacaatctatccaggcaaacgtcacagtggcacccgaaagactggttcctattattgagggcggaagctaccgcgtgtggagtgacacaagggacttggtgctcgacggtagtgagtcatacgacccaaatctcgaagatggcgatcagactcctcttagttttcattgggcttgtgtcgcttctacgcagcgcgaggccggaggctgcgctttgaattttggcccacgcggttcaagcacggtgactatccccagggagcgcttggcagccggtgtggagtacacgttttctctgacagtctggaaagcgggacgaaaagaagaggccacaaaccaaactgtgctcatccgtagtggcagggtccccattgtttccttggagtgtgtctcctgtaaggcccaggcagtttacgaagtatccaggagctcatatgtgtaccttgaagggagatgtctgaactgttccagcggcagcaaaagaggacgatgggccgctaggacattttcaaataagacactagtgttggatgagactaccacttctactggaagtgcaggtatgaggttggtcctgcgacgaggcgtcttgagggatggagaaggctataccttcacgctaactgttctcggtcggagcggcgaggaagaaggatgtgcttcaatccggctttcccctaacaggcccccattgggaggaagttgccggctctttcccctcggagccgtgcacgccctcaccacaaaggtgcacttcgagtgcacggggtggcacgacgcagaagatgcaggcgctcctctggtctacgccctgctgctgcgcagatgtcgacaggggcactgcgaggaattctgcgtctacaaaggctcactgtcatcctatggcgctgttttaccccctggtttccgcccacatttcgaagtgggactggccgtggtcgtgcaggaccagctcggcgcagccgtggtggccctgaatagaagcctggcaataaccctgcctgagcctaacggttccgcaacagggctaacagtgtggctgcacggacttaccgcttctgttttaccgggtctcctgaggcaggccgacccacagcacgtaattgagtactcattggccttggtgactgtgttaaacgaatatgaaagggccctcgatgtggctgctgagccaaagcacgaaagacagcatagggcgcaaattcgcaaaaacataactgaaacactcgtgtcccttagggttcacactgtggatgatattcaacaaatagctgcagcgctcgcccaatgcatgggtccctcacgtgagttggtttgccgaagctgcttgaagcagacccttcataagttagaggcgatgatgctaattctgcaggcggaaaccactgcaggaacagtgacccctactgctatcggcgattcaatcctgaacattaccggggacctgattcaccttgcgagcagtgatgttagggctccgcagccaagcgagcttggcgctgaatcacccagtcgcatggtagctagtcaggcctacaacctaaccagcgctctgatgaggatcctgatgagatctagggtgcttaatgaggaacctttgactttggcgggagaggagatcgtagcccagggaaagagatcagacccaagatctctcctttgttatggaggcgctcctggccctggctgtcacttcagtatccccgaagcgttcagtggggctttagctaacctgagcgatgtggtgcagctaattttcttagttgattctaacccttttccattcggatacatctcaaattatactgtgagtactaaggcaccccctacacctcctacccccctgtggtccagtccaagaccgccttcagtcctttggagcccatggacagcagccactctacgcccaggctgcatctgctcatcaaccattcgctgctggactgctacaacctgcctgcgtaacttaagtccaacatggcaaagtacctatacacgatcacccggacccatgagcactactgccagactagctggaggctccgcacagagccattcccgagtgttgaccacagggcctacccccagtagttttcctagaggggctgaaacccagaggggtgtgacaattta

SEQ ID NO: 273644 - DNA, 3693 bp, Artificial Sequence
  derived and/or modified sequence
atggtggccgccagccccaaccccgccgccgtgaacaccagcgtgaccctgagcgccgagctggccggcggcagcggcgtggtgtacacctggagcctggaggagggcctgagctgggagaccagcgagcccttcaccacccacagcttccccacccccggcctgcacctggtgaccatgaccgccggcaaccccctgggcagcgccaacgccaccgtggaggtggacgtgcaggtgcccgtgagcggcctgagcatcagagccagcgagcccggcggcagcttcgtggccgccggcagcagcgtgcccttctggggccagctggccaccggcaccaacgtgagctggtgctgggccgtgcccggcggcagcagcaagagaggcccccacgtgaccatggtgttccccgacgccggcaccttcagcatcagactgaacgccagcaacgccgtgagctgggtgagcgccacctacaacctgaccgccgaggagcccatcgtgggcctggtgctgtgggccagcagcaaggtggtggcccccggccagctggtgcacttccagatcctgctggccgccggcagcgccgtgaccttcagactgcaggtgggcggcgccaaccccgaggtgctgcccggccccagattcagccacagcttccccagagtgggcgaccacgtggtgagcgtgagaggcaagaaccacgtgagctgggcccaggcccaggtgagaatcgtggtgctggaggccgtgagcggcctgcaggtgcccaactgctgcgagcccggcatcgccaccggcaccgagagaaacttcaccgccagagtgcagagaggcagcagagtggcctacgcctggtacttcagcctgcagaaggtgcagggcgacagcctggtgatcctgagcggcagagacgtgacctacacccccgtggccgccggcctgctggagatccaggtgagagccttcaacgccctgggcagcgagaacagaaccctggtgctggaggtgcaggacgccgtgcagtacgtggccctgcagagcggcccctgcttcaccaacagaagcgcccagttcgaggccgccaccagccccagccccagaagagtggcctaccactgggacttcggcgacggcagccccggccaggacaccgacgagcccagagccgagcacagctacctgagacccggcgactacagagtgcaggtgaacgccagcaacctggtgagcttcttcgtggcccaggccaccgtgaccgtgcaggtgctggcctgcagagagcccgaggtggacgtggtgctgcccctgcaggtgctgatgagaagaagccagagaaactacctggaggcccacgtggacctgagagactgcgtgacctaccagaccgagtacagatgggaggtgtacagaaccgccagctgccagagacccggcagacccgccagagtggccctgcccggcgtggacgtgagcagacccagactggtgctgcccagactggccctgcccgtgggccactactgcttcgtgttcgtggtgagcttcggcgacacccccctgacccagagcatccaggccaacgtgaccgtggcccccgagagactggtgcccatcatcgagggcggcagctacagagtgtggagcgacaccagagacctggtgctggacggcagcgagagctacgaccccaacctggaggacggcgaccagacccccctgagcttccactgggcctgcgtggccagcacccagagagaggccggcggctgcgccctgaacttcggccccagaggcagcagcaccgtgaccatccccagagagagactggccgccggcgtggagtacaccttcagcctgaccgtgtggaaggccggcagaaaggaggaggccaccaaccagaccgtgctgatcagaagcggcagagtgcccatcgtgagcctggagtgcgtgagctgcaaggcccaggccgtgtacgaggtgagcagaagcagctacgtgtacctggagggcagatgcctgaactgcagcagcggcagcaagagaggcagatgggccgccagaaccttcagcaacaagaccctggtgctggacgagaccaccaccagcaccggcagcgccggcatgagactggtgctgagaagaggcgtgctgagagacggcgagggctacaccttcaccctgaccgtgctgggcagaagcggcgaggaggagggctgcgccagcatcagactgagccccaacagaccccccctgggcggcagctgcagactgttccccctgggcgccgtgcacgccctgaccaccaaggtgcacttcgagtgcaccggctggcacgacgccgaggacgccggcgcccccctggtgtacgccctgctgctgagaagatgcagacagggccactgcgaggagttctgcgtgtacaagggcagcctgagcagctacggcgccgtgctgccccccggcttcagaccccacttcgaggtgggcctggccgtggtggtgcaggaccagctgggcgccgccgtggtggccctgaacagaagcctggccatcaccctgcccgagcccaacggcagcgccaccggcctgaccgtgtggctgcacggcctgaccgccagcgtgctgcccggcctgctgagacaggccgacccccagcacgtgatcgagtacagcctggccctggtgaccgtgctgaacgagtacgagagagccctggacgtggccgccgagcccaagcacgagagacagcacagagcccagatcagaaagaacatcaccgagaccctggtgagcctgagagtgcacaccgtggacgacatccagcagatcgccgccgccctggcccagtgcatgggccccagcagagagctggtgtgcagaagctgcctgaagcagaccctgcacaagctggaggccatgatgctgatcctgcaggccgagaccaccgccggcaccgtgacccccaccgccatcggcgacagcatcctgaacatcaccggcgacctgatccacctggccagcagcgacgtgagagccccccagcccagcgagctgggcgccgagagccccagcagaatggtggccagccaggcctacaacctgaccagcgccctgatgagaatcctgatgagaagcagagtgctgaacgaggagcccctgaccctggccggcgaggagatcgtggcccagggcaagagaagcgaccccagaagcctgctgtgctacggcggcgcccccggccccggctgccacttcagcatccccgaggccttcagcggcgccctggccaacctgagcgacgtggtgcagctgatcttcctggtggacagcaaccccttccccttcggctacatcagcaactacaccgtgagcaccaaggccccccccaccccccccacccccctgtggagcagccccagaccccccagcgtgctgtggagcccctggaccgccgccaccctgagacccggctgcatctgcagcagcaccatcagatgctggaccgccaccacctgcctgagaaacctgagccccacctggcagagcacctacaccagaagccccggccccatgagcaccaccgccagactggccggcggcagcgcccagagccacagcagagtgctgaccaccggccccacccccagcagcttccccagaggcgccgagacccagagaggcgtgaccatctag

SEQ ID NO: 273645 - protein, 163 aa, Artificial Sequence
  derived and/or modified sequence
MMNIQSHLGEALIQDLINYCLSYIAKIKLPKKRGTFIEFRNGMLNVSPIGRSCSQEERIEFYELDKKENIRQKFVADLRKEFAGKGLTFSIGGQISFDVFPDGWDKRYCLRHVENDGYKTIYFFGDKTMPGGNDHEIFTDPRTMGYSVTAPEDTRRICELLFS

SEQ ID NO: 273646 - DNA, 366 bp, Artificial Sequence
  derived and/or modified sequence
atgctcaatgttagtcccatcggacggtcgtgctcccaggaagagagaatcgagttttacgagctggataagaaggaaaacattcgacaaaagtttgtggccgatctgagaaaggaattcgcgggtaaaggtctaacattttcaattggtggtcagattagctttgacgtgttccccgatggatgggacaaaaggtactgtcttcgccacgtagagaatgacggttataagaccatctatttcttcggggataagaccatgccaggcgggaatgaccatgaaatcttcacagacccaaggactatggggtattccgttacggcaccagaagatacccgcagaatctgcgagttactgttttcctag

SEQ ID NO: 273647 - DNA, 492 bp, Artificial Sequence
  derived and/or modified sequence
atgatgaatattcagtctcaccttggagaagcccttatccaggatctcattaattattgtctgagctacattgccaaaataaagcttccgaaaaagaggggcacatttatcgaatttagaaacgggatgcttaacgtgtctccgatcgggcggtcgtgctctcaagaggagcgaatcgaattctacgagctggataaaaaagagaatatcaggcagaaattcgtggccgatctgcgcaaggaattcgccggaaagggcctgacgtttagcattgggggtcaaatcagctttgatgtgtttccagacgggtgggacaagcgctactgtttacggcacgtcgaaaacgacgggtataaaactatctacttttttggtgacaagaccatgccaggggggaacgaccatgaaatatttacagatccaaggaccatgggatactctgtgacggcaccagaggacacccgtagaatctgtgaattgcttttcagctag

SEQ ID NO: 273648 - DNA, 366 bp, Artificial Sequence
  derived and/or modified sequence
atgctgaatgtgagccccatcggccgcagctgcagccaggaggagagaattgagttctatgagctggacaagaaggagaacatccggcagaagtttgtggccgacctgaggaaggagtttgctgggaagggcctgaccttcagcattggaggccagatcagctttgatgtgtttcctgatggctgggacaagcgctactgcctgcggcacgtggagaatgatggctacaagaccatctacttcttcggggacaagaccatgcctggaggaaatgaccacgagatcttcacagaccccaggaccatgggctacagcgtgacagcccctgaggacacccggcgcatctgtgagctgctcttctcctag

SEQ ID NO: 273649 - DNA, 492 bp, Artificial Sequence
  derived and/or modified sequence
atgatgaacatccagagccacctgggggaggccctgatccaggacctgatcaactactgcctgagctacatcgccaagatcaagctgcccaagaagaggggcaccttcatcgagttcagaaatggcatgctgaatgtgagccccatcggccgcagctgcagccaggaggagagaattgagttctatgagctggacaagaaggagaacatccggcagaagtttgtggccgacctgaggaaggagtttgctgggaagggcctgaccttcagcattggaggccagatcagctttgatgtgtttcctgatggctgggacaagcgctactgcctgcggcacgtggagaatgatggctacaagaccatctacttcttcggggacaagaccatgcctggaggaaatgaccacgagatcttcacagaccccaggaccatgggctacagcgtgacagcccctgaggacacccggcgcatctgtgagctgctcttctcctag

SEQ ID NO: 273650 - DNA, 366 bp, Artificial Sequence
  derived and/or modified sequence
atgctgaacgtgagccccatcggccggagctgcagccaggaggagaggatcgagttctacgagctcgacaagaaggagaatatcaggcagaaatttgtggcggatctacggaaggaattcgccggcaagggactcacattcagcatcgggggacagatctcttttgatgtgtttcccgatggatgggataagcgctattgtctgaggcacgtcgaaaacgacgggtataagactatctatttttttggcgataaaactatgccaggcgggaacgaccatgagatcttcacagaccccagaactatgggatatagcgtgacagcaccagaagataccagaaggatatgcgaattgttgttctcatag

SEQ ID NO: 273651 - DNA, 492 bp, Artificial Sequence
  derived and/or modified sequence
atgatgaacatccagagccacctgggcgaggccctgatccaggacttgatcaattattgtctgtcttatatcgccaagatcaagttaccaaaaaaaagggggaccttcatcgagttccgaaatggcatgctgaacgtatcacctattggacggagctgctcgcaggaggagagaatcgaattctacgagttagacaagaaggagaacatccggcagaagtttgtcgccgacttacggaaggagtttgcagggaaggggttgaccttcagcattggtggacagatttcctttgacgtgttccccgacggctgggataagcggtattgccttcgccatgttgaaaatgatgggtacaaaactatctatttctttggtgacaagacgatgcccgggggtaatgatcatgagatcttcactgatcctcgcacaatgggatattccgttaccgcaccagaagacacaaggaggatttgcgaacttttattctcatag

SEQ ID NO: 273652 - DNA, 793 bp, Artificial Sequence
  derived and/or modified sequence
gctagaaactggggacatggcagcgcctggcccagcgctctgcctcttcgacgtggatgggaccctcaccgccccgcggcagaaaattaccaaagaaatggatgacttcctacaaaaattgaggcagaagatcaaaatcggagtggtaggcggatcggactttgagaaagtgcaggagcaactgggaaatgatggggtactttcattgaattccgaaatgggatgttaaacgtgtcccctattggaagaagctgcagccaagaagaacgcattgagttctacgaactcgataaaaaagaaaatataagacaaaagtttgtagcagatctacggaaagagtttgctggaaaaggcctcacgttttccataggaggccagatcagctttgatgtctttcctgatggatgggacaagagatactgtctgcgacatgtggaaaatgacggttataagaccatttatttctttggagacaaaactatgccaggtggcaatgaccatgagatcttcacagaccccagaaccatgggctactccgtgacagcgcctgaggacacgcgcaggatctgtgaactgctgttctcctaacgtgggagcgggaggggcggggtcccggctgacaagccagcatagggcattcggtggccagagccgagggtcctcccacacgtgctcacccacccgcagcctaggcaggctctgcatgctatgccaggcatgtgcagtctggacttccacctccagtgccagaaacttccagaaggaaggagaaaactcttgtcaagaatggccc

SEQ ID NO: 273653 - DNA, 366 bp, Artificial Sequence
  derived and/or modified sequence
atgctgaatgtgtctccaatcggcaggtcctgcagccaggaggagcgtatcgagttctatgaactggacaaaaaagagaacatcagacagaaatttgtggccgaccttcgcaaagagttcgctggaaaaggattgacgttttccatcggcggtcagatctcgtttgacgtgtttccagacgggtgggataaacgatactgcctgcggcatgttgagaacgatggttacaagacaatttatttttttggagataagaccatgccagggggaaatgaccatgaaatctttaccgatccacggacaatggggtactcagtgaccgccccagaagatacccgcagaatttgcgagctactgttctcttag

SEQ ID NO: 273654 - DNA, 492 bp, Artificial Sequence
  derived and/or modified sequence
atgatgaacattcagtcacatttgggtgaagcactcatccaggatttgatcaactattgtctgagctatatcgccaagatcaaactgcctaagaagcggggtacctttatcgagtttcgcaatgggatgctcaatgtgagccctatcggtcggagttgctcgcaggaagaaaggattgagttctacgagctggataagaaggaaaacattagacagaagttcgttgctgaccttcgcaaggagtttgccggtaagggtctaactttttccatcgggggacagatcagctttgatgtctttcctgatgggtgggataagcgctactgcctgagacatgttgagaatgatgggtacaaaaccatctacttcttcggcgacaaaaccatgccaggaggcaatgatcacgagatcttcacagacccacgaactatgggctattctgtgaccgctccagaggacacccgcagaatctgcgagctgctgttttcttag

SEQ ID NO: 273655 - DNA, 366 bp, Artificial Sequence
  derived and/or modified sequence
atgctgaacgtgagccccatcggcagaagctgcagccaggaggagagaatcgagttctacgagctggacaagaaggagaacatcagacagaagttcgtggccgacctgagaaaggagttcgccggcaagggcctgaccttcagcatcggcggccagatcagcttcgacgtgttccccgacggctgggacaagagatactgcctgagacacgtggagaacgacggctacaagaccatctacttcttcggcgacaagaccatgcccggcggcaacgaccacgagatcttcaccgaccccagaaccatgggctacagcgtgaccgcccccgaggacaccagaagaatctgcgagctgctgttcagctag

SEQ ID NO: 273656 - DNA, 492 bp, Artificial Sequence
  derived and/or modified sequence
atgatgaacatccagagccacctgggcgaggccctgatccaggacctgatcaactactgcctgagctacatcgccaagatcaagctgcccaagaagagaggcaccttcatcgagttcagaaacggcatgctgaacgtgagccccatcggcagaagctgcagccaggaggagagaatcgagttctacgagctggacaagaaggagaacatcagacagaagttcgtggccgacctgagaaaggagttcgccggcaagggcctgaccttcagcatcggcggccagatcagcttcgacgtgttccccgacggctgggacaagagatactgcctgagacacgtggagaacgacggctacaagaccatctacttcttcggcgacaagaccatgcccggcggcaacgaccacgagatcttcaccgaccccagaaccatgggctacagcgtgaccgcccccgaggacaccagaagaatctgcgagctgctgttcagctag

SEQ ID NO: 273657 - protein, 466 aa, Artificial Sequence
  derived and/or modified sequence
METGQRTHASGTYSFLDRTQHSDIKADCNTCVEIEDRKVSRQQMNCEREQLRGNQEAAAAPDTMAQPYASAQFAPPQNGIPAEYTAPHPHPAPEYTGQTTVPEHTLNLYPPAQTHSEQSPADTSAQTVSGTATQTDDAAPTDGQPQTQPSENTENKSQPKRLHVSNIPFRFRDPDLRQMFGQFGKILDVEIIFNERGSKGFGFVTFENSADADRAREKLHGTVVEGRKIEVNNATARVMTNKKTVNPYTNGWKLNPVVGAVYSPEFYAGTVLLCQANQEGSSMYSAPSSLVYTSAMPGFPYPAATAAAAYRGAHLRGRGRTVYNTFRAAAPPPPIPAYGGVVYQDGFYGADIYGGYAAYRYAQPTPATAAAYSDRNQFVFVAADEISCNTSAVTDEFMLPTPTTTHLLQPPPTALVPCPKVPAPAQTSEELSCTLPGLCCQAAENLTASPPLLQFMFKVIVAQERK

SEQ ID NO: 273658 - DNA, 3524 bp, Artificial Sequence
  derived and/or modified sequence
aagaaggaaggagtgagccgagccgagcaccccacatctggaggggacagccagccgtgggccccgccccggcgtccggagcaggagaactccgagcttcttgcccaggcagagagagcaggagcggaccgcgcgcccgggattgagagtccttgcgctccagacccccacccagtggccgccagggtccccgcctgtccggaccctcgccgcgcccaggcaggcgcgccagggcggggctgacctgcccgcgaagttgcggacagtgcgtgagaaaccagcacccccttccgccgcctccagcttatggaaactggtcaaagaactcatgcaagtggaacttacagcttccttgatcggactcagcattcagatatcaaagcagactgcaatacctgcgtggaaatagaagacagaaaggtttcaagacaacagatgaattgtgaaagagagcagctaaggggtaatcaggaagcagccgctgcccctgacacaatggctcagccttacgcttcggcccagtttgctcccccgcagaacggtatccccgcggaatacacggcccctcatccccaccccgcgccagagtacacaggccagaccacggttcccgagcacacattaaacctgtaccctcccgcccagacgcactccgagcagagcccggcggacacgagcgctcagaccgtctctggcaccgccacacagacagatgacgcagcaccgacggatggccagccccagacacaaccttctgaaaacacggaaaacaagtctcagcccaagcggctgcatgtctccaatatccccttcaggttccgggatccggacctcagacaaatgtttggtcaatttggtaaaatcttagatgttgaaattatttttaatgagcgaggctcaaagggatttggtttcgtaactttcgaaaatagtgccgatgcggacagggcgagggagaaattacacggcaccgtggtagagggccgtaaaatcgaggtaaataatgccacagcacgtgtaatgacaaataaaaagaccgtcaacccttatacaaatggctggaaattgaatccagttgtgggtgcagtctacagtcccgaattctatgcaggcacggtcctgttgtgccaggccaaccaggagggatcttccatgtacagtgcccccagttcacttgtatatacttctgcaatgccaggcttcccgtatccagcagccaccgccgcggccgcctaccgaggggcgcacctgcgaggccgcggtcgcaccgtgtacaacaccttcagggccgcggcgcccccgcccccgatcccggcctacggcggtgttgtttaccaggatggattttatggtgcagacatttatggtggttatgctgcataccgctacgcccagcctacccctgccactgccgctgcctacagtgacagaaatcagttcgtcttcgttgcagcagatgaaatttcttgtaacacctctgcagttacggacgagtttatgctgccgacccctaccaccacgcacttgctccagcccccacctacggcgttggtgccatgccccaaggttccagccccagcacagacttcagaggagctaagctgcacacttccaggcctctgctgtcaggcagctgagaatctgactgcctctcctcccctattacaattcatgtttaaagtcatagtcgcccaggaaagaaaatagagaggggcacactttgtgtgtgtacctagtacataagaaagtagaaggaatcagctgggtttgggggttgccttttgttttggggcaggtctgggtttttgttttgggagggggtggggggagggtaaaaaatgggaggtaagggtggggtgaacttgcctgtacttgttcaaacttctatgcactgaaactcttgagtacagtaagacgtgcccatcacgtgagagcatatgcaatcattacaaagctttggcatgcagttttctgcttggatcaagaatatcagtccttaccctaaaaatgaatccccataggcattcatttgaattgccaatacttttagaaaaaggaaatcgttaagtgccaccttgtagccattaaaaccatggccggacagttcactgaagctcagtcatagaaattcagccatgatttggaagcattgttttgcacaagcttaattacatcaagcaattcatctgtacaactccacaactcccttctcaagatcagattccatacagcttacagagccaagttaagtaagaagtaggttgagattttcatcccaattctgcattcaacaactctgcttcaacacctagtccacatgaggaatgtgttggagagttgaattacattcaacaactggtccaaattcaacctcaagtgcagattattctgttataaaaaaatgagacagtgaaaatccttccattgtccagcttataatagagtccttttagctaagaggactggctgacagaatttggttttgcagggaatttctttaggaggagctattggggaaggtcaggaatggccctatctttagttctccaagaatgacctgggatgggtagggggtgcctccatttcggttggttttgagtgtctatttttcacattagtctttttgatgatccacatgttgcaaaaggaaaatgtaaaaaacacacccctcaaattgctttgtttcagaatgcttttgcacctttgactgatgccaagactaggagccatgctgatgatgtgggtctcgttctttcttcattgcaggctagtatataccgagggggatacaaccgttttgctccatactaaatgacaaaaccataaaaaccttccaatgtggggagaaaggaagctttccgaggcctgagtattgcaatacatgcagtagtacatcattttagcaactctaaaaaaaaaaaaaatacaaataaaaaggaaaaaaaattacattttttatcttatacctcagatattttgttctgtgtattttaatattgtgggtctttaatttctgaaggttccgtagtttggttgctggctgtaggagtttttgtggttgatctagacagatgctagataatgaataaaaactggtttagggccatatccagagtgctatattatgtaaatgaattatatatgctgaatattaagctactggggttatcagctatttgggaagagtgtaagtgactacagtagtcatttttttctgcacctgcattattttattttgcgaaaggggaggttgggaggggcttaggggattggaactggggtttggctgaaagaaaaaaaaaaaaatgtaactgatgaatctaaacgacccactgcaccaacaatcatttatcaatggttctaagttactcattgccagttcaagccaaaggtcatgttgttaagggggtgcttctagtagcacttgtgcatctgagttgaatgaagctgtgcaaacccaccctttaaaccattccacccggcagtattcagcttcttaaccagtcgctatttaggaaaaaaaa

SEQ ID NO: 273659 - DNA, 1401 bp, Artificial Sequence
  derived and/or modified sequence
atggagacagggcaaaggacgcacgccagcggaacctatagttttctcgatcgcacgcagcattcagatataaaagctgattgcaatacctgtgtggagatcgaggataggaaagtgtcccggcagcagatgaattgcgagcgtgaacagctgagaggcaaccaagaggctgcagccgctccagatactatggcccagccgtatgctagcgcccagttcgcccccccacagaatgggatcccagccgagtacactgcgcctcatccgcatcccgcaccagagtacaccgggcagacaacagtgccagaacacactttgaacctctacccaccagcccagacacatagcgagcagtccccagccgacacatccgcccagacggtgtctggcacggcaacacagacagacgacgctgccccaactgatggacagcctcagacccaacctagtgagaacaccgaaaacaagtcccagcctaagaggctgcacgtgtctaatatcccatttcgttttagagaccccgacctaagacagatgtttggacagtttggaaaaatcctcgatgtagagattattttcaacgagcggggcagcaagggatttggattcgtcacattcgaaaactccgcagatgccgacagagcccgcgagaaactacatggcacagtggtggaagggcggaagattgaggtcaataacgctacggcacgggtgatgactaacaagaagacggtgaatccctacacaaatggctggaaacttaaccctgtagtgggggcagtatactcacccgaattctacgccgggactgtgctgctgtgccaggctaatcaggaaggatcaagcatgtattcggcgcccagcagcctggtgtacacttcggctatgcccggttttccctaccctgctgccaccgccgccgcagcttaccggggagctcatctccgggggcggggtcgcactgtgtacaatactttccgcgcagctgctcccccacctcccattcccgcctatggcggagtggtctaccaggacggcttctatggggcagacatttatggaggctacgcagcctatcgctacgcacaaccaacccctgctacagctgcagcatattccgataggaatcagtttgtgttcgtggctgccgacgaaatctcctgcaacaccagcgctgtgactgacgaatttatgctgcccacccctacgactactcacctactgcaaccaccaccaactgccctggtcccatgcccgaaagtgccagcacctgctcaaacgagtgaagaactgagctgcaccctgcctggactttgctgtcaggcagccgaaaacctgactgcttccccacccctgctgcagttcatgtttaaagtgattgtggctcaagaaaggaaatag

SEQ ID NO: 273660 - DNA, 1401 bp, Artificial Sequence
  derived and/or modified sequence
atggagaccggccagaggacccacgccagcggcacctacagcttcctggacaggacccagcacagcgacatcaaggctgactgcaacacctgtgtggagattgaggacaggaaggtgtcccggcagcagatgaactgtgagcgggagcagctgcggggcaaccaggaggccgctgctgccccagacaccatggcccagccctatgccagcgcccagtttgccccaccccagaatggcatcccagctgagtacacagccccccacccccacccagcccctgagtacacaggccagaccaccgtgcctgagcacaccctgaacctgtaccccccagcccagacccacagcgagcagagccctgctgacaccagcgcccagacagtgtctggaacagccacccagacagatgatgctgcccccacagatggccagccccagacccagcccagtgaaaatacagagaacaagagccagcccaagaggctgcacgtgagcaacatccccttccgcttccgggaccctgacctgcggcagatgtttggccagtttgggaagatcctggatgtggagatcatcttcaatgaaagaggcagcaaaggatttggatttgtgacctttgaaaattctgcagatgctgaccgggcccgggagaagctgcacggcaccgtggtggagggcaggaagattgaggtgaacaatgccacagcccgggtgatgaccaacaagaagacagtgaacccctacaccaacggctggaagctgaaccctgtggtgggcgctgtgtacagccctgagttctacgccggcaccgtgctgctgtgccaggccaaccaggagggcagctccatgtacagcgcccccagcagcctggtgtacaccagcgccatgcctggcttcccctacccagctgccacagctgctgctgcctacagaggagcccacctgcggggccggggccgcacagtgtacaacaccttccgggctgctgcccctcctccacccatcccagcctacggcggcgtggtgtaccaggacggcttctacggggctgacatctatggaggctatgctgcctaccgctatgcccagcccaccccagccacagctgctgcctacagcgacaggaaccagtttgtgtttgtggccgcagatgagatcagctgcaacaccagcgctgtgacagatgagttcatgctgcccacccccaccaccacccacctgctgcagcccccacccacagccctggtgccctgccccaaggtgcctgccccagcccagaccagcgaggagctgagctgcaccctgcccggcctgtgctgccaggccgctgagaacctgacagccagcccccccctgctgcagttcatgttcaaggtgattgtggcccaggagaggaagtag

SEQ ID NO: 273661 - DNA, 1401 bp, Artificial Sequence
  derived and/or modified sequence
atggagaccggccagcggacccacgccagcggcacctacagcttcctggatcgcacacagcattccgacattaaggccgactgcaacacatgcgtggagatcgaagatcgtaaagtaagcaggcagcagatgaattgcgaaagagagcagctccgtggaaatcaagaggccgccgcagcgcctgatactatggcccagccctatgcatcggcccagttcgcccctccacagaacggaatccctgctgagtataccgccccacacccacatcctgcccccgagtacaccggccaaactacagtgcccgagcatacactgaacttgtaccctcccgcacaaacacacagtgagcagagccctgcagacaccagcgcacagacagtctccggcactgcaacacagacagacgacgctgcgcctactgacggccagccccagacccagccctcagaaaatacggagaataaatcacagccaaagaggttgcacgtttcaaacatcccttttagatttagggacccagacctccggcagatgttcgggcagtttggcaaaatactggatgtcgaaatcatcttcaatgagaggggctcaaagggatttggatttgttacatttgagaactccgcggacgccgacagggctagagaaaagttgcacggaacagtcgtggaggggaggaaaattgaggtgaacaacgctaccgccagggtcatgaccaataaaaagacagtgaacccttatacaaatggatggaaacttaacccagtcgtgggggccgtgtacagcccggagttttatgcaggaacagtcctcctgtgtcaggcaaatcaggaggggtccagcatgtattctgccccgagcagcctggtttacacatctgctatgcctggatttccttaccctgcagccacagctgcagccgcttaccgcggagcccacctgcgcggccgtggccggacagtgtacaacacgttccgcgcagcagcgccccccccgcctatccctgcatatggcggcgtagtttaccaggatggattttacggcgcggatatctatggagggtacgctgcgtacaggtacgcccagcctacccccgctacagcagccgcttactctgaccgaaatcagtttgtgttcgtcgctgctgacgagatttcctgcaacaccagcgcagttactgatgagtttatgctgcccacgcctacaacaacacatttgcttcaacctccaccaaccgcattagtgccatgtccaaaagtgcctgccccggcacaaacaagcgaagagttgagctgcacactgccaggcctttgctgtcaagcggcggaaaatctgactgcctctccaccattgctccagtttatgtttaaggttatagtcgcccaagaacggaagtag

SEQ ID NO: 273662 - DNA, 1401 bp, Artificial Sequence
  derived and/or modified sequence
atggaaactggacagaggacccacgcttccggaacgtattcatttctggatagaactcagcactccgacatcaaagcagattgcaacacatgcgtggagattgaggacaggaaagtgagccggcagcaaatgaattgcgaacgcgagcagctgagaggcaaccaggaagcggctgccgctcccgataccatggcccagccatacgcaagtgcgcagtttgcccctccacaaaatggcattcctgcagagtatacagcccctcatccccatccggctccggagtatactggtcagacaacagtcccggaacacacactgaacctttaccctcccgcacagactcattccgagcagtctcctgcagatacgagcgcgcagactgtgtccggcacagctacccaaactgatgatgctgctcctaccgacggacagccccagacacagccatcggagaacaccgaaaataagagccagcccaagcgcctccatgtgtccaacatcccctttcgattcagggacccagacttgcgccagatgttcggtcaatttgggaaaattttagatgtcgagattatctttaacgaacgaggatctaaggggtttgggttcgttactttcgagaacagcgccgatgcagatcgagcccgagagaaactgcacggcaccgtggtggagggacggaagattgaggttaataatgccaccgccagagtgatgaccaataaaaaaacagtaaatccttataccaatgggtggaaattaaatcctgtggtgggggctgtctactctcccgagttctatgccggtactgtgctgctgtgccaggccaaccaagaagggagttccatgtacagtgccccttcgagtctggtgtacacttctgccatgccaggcttcccctaccctgctgcgacagctgccgcagcataccggggtgctcacctcaggggaagaggacgcaccgtgtacaacactttccgggctgccgctccaccacccccaattccagcgtacggaggggttgtttaccaggatggattctacggggcagacatttacgggggatacgcggcttaccgatatgcacagcctactccagctaccgccgcagcatactcagatagaaaccagtttgtctttgtagctgctgatgaaatctcatgtaacacttcagcagtcactgacgagttcatgcttcccacaccgacaactacacacctgctgcaaccacccccaacggcgctagtgccttgccctaaggttcctgctcctgcacagacttccgaggaactgtcctgtactttgccgggactgtgctgccaggcagcagagaacctgactgcaagtcccccactgctgcagttcatgtttaaggtgatcgttgcccaagagaggaaatag

SEQ ID NO: 273663 - DNA, 1401 bp, Artificial Sequence
  derived and/or modified sequence
atggagaccggccagagaacccacgccagcggcacctacagcttcctggacagaacccagcacagcgacatcaaggccgactgcaacacctgcgtggagatcgaggacagaaaggtgagcagacagcagatgaactgcgagagagagcagctgagaggcaaccaggaggccgccgccgcccccgacaccatggcccagccctacgccagcgcccagttcgcccccccccagaacggcatccccgccgagtacaccgccccccacccccaccccgcccccgagtacaccggccagaccaccgtgcccgagcacaccctgaacctgtacccccccgcccagacccacagcgagcagagccccgccgacaccagcgcccagaccgtgagcggcaccgccacccagaccgacgacgccgcccccaccgacggccagccccagacccagcccagcgagaacaccgagaacaagagccagcccaagagactgcacgtgagcaacatccccttcagattcagagaccccgacctgagacagatgttcggccagttcggcaagatcctggacgtggagatcatcttcaacgagagaggcagcaagggcttcggcttcgtgaccttcgagaacagcgccgacgccgacagagccagagagaagctgcacggcaccgtggtggagggcagaaagatcgaggtgaacaacgccaccgccagagtgatgaccaacaagaagaccgtgaacccctacaccaacggctggaagctgaaccccgtggtgggcgccgtgtacagccccgagttctacgccggcaccgtgctgctgtgccaggccaaccaggagggcagcagcatgtacagcgcccccagcagcctggtgtacaccagcgccatgcccggcttcccctaccccgccgccaccgccgccgccgcctacagaggcgcccacctgagaggcagaggcagaaccgtgtacaacaccttcagagccgccgccccccccccccccatccccgcctacggcggcgtggtgtaccaggacggcttctacggcgccgacatctacggcggctacgccgcctacagatacgcccagcccacccccgccaccgccgccgcctacagcgacagaaaccagttcgtgttcgtggccgccgacgagatcagctgcaacaccagcgccgtgaccgacgagttcatgctgcccacccccaccaccacccacctgctgcagcccccccccaccgccctggtgccctgccccaaggtgcccgcccccgcccagaccagcgaggagctgagctgcaccctgcccggcctgtgctgccaggccgccgagaacctgaccgccagcccccccctgctgcagttcatgttcaaggtgatcgtggcccaggagagaaagtag

SEQ ID NO: 273664 - protein, 395 aa, Artificial Sequence
  derived and/or modified sequence
MLASQGVLLHPYGVPMIVPAAPYLPGLIQGNQEAAAAPDTMAQPYASAQFAPPQNGIPAEYTAPHPHPAPEYTGQTTVPEHTLNLYPPAQTHSEQSPADTSAQTVSGTATQTDDAAPTDGQPQTQPSENTENKSQPKRLHVSNIPFRFRDPDLRQMFGQFGKILDVEIIFNERGSKGFGFVTFENSADADRAREKLHGTVVEGRKIEVNNATARVMTNKKTVNPYTNGWKLNPVVGAVYSPEFYAGTVLLCQANQEGSSMYSAPSSLVYTSAMPGFPYPAATAAAAYRGAHLRGRGRTVYNTFRAAAPPPPIPAYGGVVYQEPVYGNKLLQGGYAAYRYAQPTPATAAAYSDRNQFVFVAADEISCNTSAVTDEFMLPTPTTTHLLQPPPTALVP

SEQ ID NO: 273665 - protein, 391 aa, Artificial Sequence
  derived and/or modified sequence
MLASQGVLLHPYGVPMIVPAAPYLPGLIQGNQEAAAAPDTMAQPYASAQFAPPQNGIPAEYTAPHPHPAPEYTGQTTVPEHTLNLYPPAQTHSEQSPADTSAQTVSGTATQTDDAAPTDGQPQTQPSENTENKSQPKRLHVSNIPFRFRDPDLRQMFGQFGKILDVEIIFNERGSKGFGFVTFENSADADRAREKLHGTVVEGRKIEVNNATARVMTNKKTVNPYTNGWKLNPVVGAVYSPEFYAVPGFPYPAATAAAAYRGAHLRGRGRTVYNTFRAAAPPPPIPAYGGVVYQEPVYGNKLLQGGYAAYRYAQPTPATAAAYSDSYGRVYAADPYHHALAPAPTYGVGAMNAFAPLTDAKTRSHADDVGLVLSSLQASIYRGGYNRFAPY

SEQ ID NO: 273666 - DNA, 4021 bp, Artificial Sequence
  derived and/or modified sequence
accttccattttggtagcttcaactttgcagctgctgtgtctcttcgtcgtctgggaagaaaactttcacattaagagttgctgatgcggattttctttctttcctctcccggcgttgatgagtgcttggctcctgacagaagggatttggctcccagctttgtagttcggaagaagttgggtctatagatttccccctaactctccattgatgtgttgagcttcagagggaataataactctacgtaaagcatgctggcgtctcaaggagttctcctgcatccttatggcgtgcctatgattgtaccggcagctccttaccttcctggactgattcagggtaatcaggaagcagccgctgcccctgacacaatggctcagccttacgcttcggcccagtttgctcccccgcagaacggtatccccgcggaatacacggcccctcatccccaccccgcgccagagtacacaggccagaccacggttcccgagcacacattaaacctgtaccctcccgcccagacgcactccgagcagagcccggcggacacgagcgctcagaccgtctctggcaccgccacacagacagatgacgcagcaccgacggatggccagccccagacacaaccttctgaaaacacggaaaacaagtctcagcccaagcggctgcatgtctccaatatccccttcaggttccgggatccggacctcagacaaatgtttggtcaatttggtaaaatcttagatgttgaaattatttttaatgagcgaggctcaaagggatttggtttcgtaactttcgaaaatagtgccgatgcggacagggcgagggagaaattacacggcaccgtggtagagggccgtaaaatcgaggtaaataatgccacagcacgtgtaatgacaaataaaaagaccgtcaacccttatacaaatggctggaaattgaatccagttgtgggtgcagtctacagtcccgaattctatgcagtgccaggcttcccgtatccagcagccaccgccgcggccgcctaccgaggggcgcacctgcgaggccgcggtcgcaccgtgtacaacaccttcagggccgcggcgcccccgcccccgatcccggcctacggcggagtagtgtatcaagagcctgtgtatggcaataaattgctgcagggtggttatgctgcataccgctacgcccagcctacccctgccactgccgctgcctacagtgacagttacggacgagtttatgctgccgacccctaccaccacgcacttgctccagcccccacctacggcgttggtgccatgaatgcttttgcacctttgactgatgccaagactaggagccatgctgatgatgtgggtctcgttctttcttcattgcaggctagtatataccgagggggatacaaccgttttgctccatactaaatgacaaaaccataaaaaccttccaatgtggggagaaaggaagctttccgaggcctgagtattgcaatacatgcagtagtacatcattttagcaactctaaaaaaaaaaaaaatacaaataaaaaggaaaaaaaattacattttttatcttatacctcagatattttgttctgtgtattttaatattgtgggtctttaatttctgaaggttccgtagtttggttgctggctgtaggagtttttgtggttgatctagacagatgctagataatgaataaaaactggtttagggccatatccagagtgctatattatgtaaatgaattatatatgctgaatattaagctactggggttatcagctatttgggaagagtgtaagtgactacagtagtcatttttttctgcacctgcattattttattttgcgaaaggggaggttgggaggggcttaggggattggaactggggtttggctgaaagaaaaaaaaaaaaatgtaactgatgaatctaaacgacccactgcaccaacaatcatttatcaatggttctaagttactcattgccagttcaagccaaaggtcatgttgttaagggggtgcttctagtagcacttgtgcatctgagttgaatgaagctgtgcaaacccaccctttaaaccattccacccggcagtattcagcttcttaaccagtcgctatttaggaaaaaaaacccactagttaggccatcaacaagcattctttttatatttcttccagtataataaattattgatatcactgctgacttttatattatgggagggaaaaaataacattaataaaaaggtgataaaaaagcactgtttctatttttttctttttttccaaaaaaagaaagtaataaaaacttaaattctttgtaccagttaaaaaaaatgtataaaatttacatctgtgcagtggagttgttaagttctagaaacagtctatgaagctttagttttagcctagtagaacaactgttagagacagacgtataatttttatggaattacatgataatcatattcggatttatagaagcattttacaagtattgcaatcattgagtagagataatcatggtattttcatcagcttggtactttttgaaacgtgactgcgttgtgtgaacaatctgcaatttttcagtccgtgagatcctgcccttccacctctttcccatacccccaaggattatctcaaaatgatctctttagttctgtctccaaggcccaggacacttgtcagaaggatgcaaaaaaagaaaaaagtacatccaccctcttaatcccaaaagaacaaagtctccccacctttctcggatgcagggccagagtgacacagccgaaaaattgcagtttgtctgtacttctgtttgaactttccacgttgtcctgtttacaagttaacttaagttggggtatccgtcacgggtcttcctgttttgtatttaaataaaaacaacagcagcaggctgtccctgagtagttttgctgccataggttaagtcctcatgtgtacagtgcaggccctgtggcccgcacttcagtaagttatcaactctcaccgctgtgaacctgccaatccgctgtaacaactctgctttaaaacaaaaccaaacaaaactttaaaaaaaaatgtgtgatccagctttctcttgccatcctatgtgcatgccgtaagatcagttggatattaaaccatcaataaagtttcacaagatttgaaaacaaagtttctgtagcttcgatacctaagacagacgatagtgatcttgaaaagagaaaagggggaggggggagctacttatcagccaaaagcatataaagtgttcttttcaccagacttctttgggtgggtgaggggaggggcaagagggtgttttatagcatcactaagacattctcattcccccacctggaaaacagtgttatggcaatgggtgcctggttgatgttcttaaaggaaacgaattattaaaacactatgacatcctccagagggaagaaagagtaggagcagggggctatggagaataaatttctcccaattgccgcctcagatttcaaaatccagaatttgtattgtgtttcgaatcacaaacatagaattcttactgtgttggttaaagtaaaattcatttgcagttttgattttcatcaatgagctgtactttcccccatgactgtatgtagttttaataaaatcatttagagtgagtgagtgccaaccgatgttgcagaatcttttgtctaggcactccaagatgccaataagtcattttaaaatgtatgtcagagatgtaaacaaacattttggattttttttaaacagtatttatttggaatgttttcatttatctaaataactattgctattatgaattatggaaaattaatattatgtgtggcatatagtgacttcttaacacacacatcacgcaatctgcaaacccagaaaatgtgtatatctgtctttagaaattagtgtttatatcacttacagtggtttgtgaataaagaaaactggtttgtaatatcaaaaaaataaaagcttagtctgaaaagg

SEQ ID NO: 273667 - DNA, 1176 bp, Artificial Sequence
  derived and/or modified sequence
atgctggccagccagggcgttctgctgcacccctatggcgtgcccatgatcgttcctgccgccccatatcttcccggcctgattcagggtaaccaggaggctgctgctgcaccagatacaatggctcaaccctacgcctcggcccaattcgccccgccacaaaatgggattccagccgagtacaccgccccccatccgcacccggcccctgagtacacaggccagacgaccgtaccagaacacactctgaacctgtatcctccagctcagacccacagtgagcagtcacctgctgacacatccgcacagaccgtgtctggcacggcaactcagaccgatgacgccgctcctaccgatggccagccccaaacccagcccagcgaaaacacggaaaacaagtctcagccaaagcgcctccatgtgtccaacatccccttcagatttcgggatccagaccttcgtcagatgtttggccagtttggcaaaatactggacgtcgaaattattttcaatgaaagaggaagcaaaggtttcggatttgtcaccttcgagaatagcgccgatgccgatcgagccagagagaaactgcacggcactgtcgtcgagggccggaagattgaagtgaacaacgccaccgctcgggtgatgaccaataagaagaccgtgaacccttacaccaatggatggaagcttaaccccgtcgtcggcgcagtttacagtccagagttttatgcagtcccaggttttccctatcctgcggcaacagcagctgccgcataccggggcgcgcatctccgaggacgaggacgcacagtgtataatacctttagggccgctgcccccccacctccgatccctgcttacggaggagtcgtgtaccaagagccagtgtacggcaacaagttgctgcaggggggctatgccgcctaccggtacgctcagcccacccccgccactgccgcagcgtatagtgacagttacgggcgagtatacgcagccgacccataccaccatgcgctggcacccgctccgacatatggggttggcgccatgaacgcctttgcacctttgaccgatgccaagactcgctctcacgcagatgatgtcggccttgtgctgtcatcgctccaagcatccatttaccgaggcggctacaatcgctttgctccctattag

SEQ ID NO: 273668 - DNA, 1176 bp, Artificial Sequence
  derived and/or modified sequence
atgctggccagccagggcgtgctgctgcacccctacggcgtgcccatgattgtgcctgctgccccctacctgcccggcctcatccagggcaaccaggaggccgccgccgccccagacaccatggcccagccctatgccagcgcccagtttgccccaccccagaatggcatcccagctgagtacacagccccccacccccacccagcccctgagtacacaggccagaccaccgtgcctgagcacaccctgaacctgtaccccccagcccagacccacagcgagcagagccctgctgacaccagcgcccagacagtgtctggaacagccacccagacagatgatgctgcccccacagatggccagccccagacccagcccagcgagaacacagagaacaagagccagcccaagaggctgcacgtgagcaacatccccttccgcttccgggaccctgacctgcggcagatgtttggccagtttgggaagatcctggatgtggagatcatcttcaatgaaagaggcagcaagggcttcggctttgtgacctttgagaacagcgcagatgctgaccgggcccgggagaagctgcatggaacagtggtggagggcaggaagattgaggtgaacaatgccacagcccgggtgatgaccaacaagaagacagtgaacccctacaccaacggctggaagctgaaccctgtggtgggcgctgtgtacagccctgagttctatgctgtgcccggcttcccctacccagctgccacagctgctgctgcctacagaggagcccacctgcggggccggggccgcacagtgtacaacaccttccgggctgctgcccctcctccacccatcccagcctacggcggcgtggtgtaccaggagcctgtgtatggcaacaagctgctgcagggcggctacgccgcctaccgctatgcccagcccaccccagccacagctgctgcctacagcgacagctatggccgggtgtatgctgctgacccctaccaccacgccctggccccagcccccacctacggcgtgggcgccatgaatgcctttgcccccctgacagatgccaagaccaggagccatgctgatgatgtgggcctggtgctgagcagcctgcaggccagcatctacagaggaggctacaacagatttgccccctactag

SEQ ID NO: 273669 - DNA, 1176 bp, Artificial Sequence
  derived and/or modified sequence
atgctggccagccagggcgtgctgctgcacccctacggcgtgcccatgattgtgccggctgctccatacctgccagggctcatccaaggtaaccaggaggcagcagctgcccccgataccatggctcagccatatgccagtgctcagttcgcaccgccccagaacggaatcccggcagagtatactgctccgcaccctcatccagctccagagtataccggccagaccaccgtccccgaacacactctgaacctgtacccccctgcccagacacattcggagcagtcccctgccgacacgtcagcgcaaactgtcagcggaaccgccacccagacagacgatgcagcaccaaccgatggacagcctcaaacacagcccagcgagaacacagaaaataagagtcagcctaagcgcctgcatgtgtccaacatacccttccgctttagggaccctgacttgagacagatgttcggtcaatttggtaagattcttgatgtagagatcatttttaacgaacggggctcaaagggattcggattcgtaacgttcgaaaacagcgccgacgctgacagggctcgtgagaaattgcacggtactgtggtcgaaggaagaaagatcgaggttaacaatgccaccgcacgggtgatgactaataagaagaccgttaacccatacaccaacggatggaagctgaaccctgttgtgggtgccgtatactccccagaattctacgcagttcccggcttcccttacccagccgcaactgccgcagcggcctatagaggagctcacctgcgtggccgtggtaggactgtgtacaacaccttccgtgctgctgccccaccacctcccattccagcttatggaggagttgtctatcaggagcccgtgtacggaaacaaattgctccaagggggttacgccgcttacaggtacgctcagcccactcctgcaacagcagccgcatattccgactcttacggccgggtgtatgccgccgacccataccaccatgcacttgcaccagcccctacatatggcgtgggagcgatgaacgccttcgcacctttaaccgatgccaagacccggagtcacgccgacgatgtggggctggtgttaagctcactccaggccagcatctaccgaggaggatacaatagattcgccccgtattag

SEQ ID NO: 273670 - DNA, 1176 bp, Artificial Sequence
  derived and/or modified sequence
atgctggcttcccagggtgtattgctgcacccttatggagtcccgatgatagttcccgcagctccttatctgcccggactcatccaggggaaccaggaggctgccgctgcccctgacactatggcccaaccatatgccagcgctcaattcgcaccaccacagaacggcattcccgctgaatacacagcacctcatcctcaccccgcaccagagtacacaggccagacgacagtgccagagcataccctgaacttatacccccctgcacaaacacactcagagcaatcgccagctgatacatcagcccagacagtatcgggcacggcaacccagacggatgacgccgcacctacagatggccagcctcagacccagccaagtgagaacactgagaataaaagtcaaccgaaaagactgcacgtttctaatatcccattccgatttcgcgacccagacctgcgacaaatgttcggccagttcgggaaaatcctggatgtggagatcattttcaacgagcgcggtagcaagggcttcgggttcgtcacctttgagaatagcgcagatgctgacagggcacgagaaaagctacatggcacagttgtcgaaggccgaaagatcgaggtaaataatgcaacggccagagtgatgacaaacaaaaaaactgttaacccttacacaaatggctggaagctaaaccctgtcgtaggtgccgtctactctccagaattctatgccgttcccggtttcccttacccagcagccacagcagcagcagcctacaggggagcccacttacgcggaaggggaagaacggtgtacaatacctttcgggctgctgcgccaccaccccctatcccagcctacgggggagttgtgtaccaggagccagtgtatggtaataaacttttgcaaggcggatacgctgcttaccgctatgcccagcctacaccagccactgcggcagcatactctgatagctatggtcgggtctacgccgctgacccataccatcacgcgctagcaccagccccaacttacggcgttggcgcaatgaacgccttcgcccctctcacagacgctaaaacgcggagccacgccgacgacgtcggcctggtgttatcatcgctacaggcatcgatctaccggggaggatacaatcggttcgctccttactag

SEQ ID NO: 273671 - DNA, 1176 bp, Artificial Sequence
  derived and/or modified sequence
atgctggccagccagggcgtgctgctgcacccctacggcgtgcccatgatcgtgcccgccgccccctacctgcccggcctgatccagggcaaccaggaggccgccgccgcccccgacaccatggcccagccctacgccagcgcccagttcgcccccccccagaacggcatccccgccgagtacaccgccccccacccccaccccgcccccgagtacaccggccagaccaccgtgcccgagcacaccctgaacctgtacccccccgcccagacccacagcgagcagagccccgccgacaccagcgcccagaccgtgagcggcaccgccacccagaccgacgacgccgcccccaccgacggccagccccagacccagcccagcgagaacaccgagaacaagagccagcccaagagactgcacgtgagcaacatccccttcagattcagagaccccgacctgagacagatgttcggccagttcggcaagatcctggacgtggagatcatcttcaacgagagaggcagcaagggcttcggcttcgtgaccttcgagaacagcgccgacgccgacagagccagagagaagctgcacggcaccgtggtggagggcagaaagatcgaggtgaacaacgccaccgccagagtgatgaccaacaagaagaccgtgaacccctacaccaacggctggaagctgaaccccgtggtgggcgccgtgtacagccccgagttctacgccgtgcccggcttcccctaccccgccgccaccgccgccgccgcctacagaggcgcccacctgagaggcagaggcagaaccgtgtacaacaccttcagagccgccgccccccccccccccatccccgcctacggcggcgtggtgtaccaggagcccgtgtacggcaacaagctgctgcagggcggctacgccgcctacagatacgcccagcccacccccgccaccgccgccgcctacagcgacagctacggcagagtgtacgccgccgacccctaccaccacgccctggcccccgcccccacctacggcgtgggcgccatgaacgccttcgcccccctgaccgacgccaagaccagaagccacgccgacgacgtgggcctggtgctgagcagcctgcaggccagcatctacagaggcggctacaacagattcgccccctactag

SEQ ID NO: 273672 - DNA, 1746 bp, Artificial Sequence
  derived and/or modified sequence
tccggcccggaggctgagggagtttgtggagtcgcgagtgctggtgtccgcaacaggtgtgccctggggctatgaagagaccaagacgctcctggctattcttagtagttctcaattttatggaaaactccagacctgtcagcagaacagccagatctacagggccatggcggaaggactctgggagcagggttttctgcggaccccagaacagtgtcgcaccaagttcaaaagcctacagttgagttaccgcaaagtgaggagaggccgtgtgcctgagccttgtatcttttatgaggaaatgaatgctctttcaggctcctgggcctctgcacctcctatggcaagcgatgctgttcctggccaagaaggaagtgatattgaggctggagagctgaatcaccagaatggggaacccacggaggtagaagatggcactgtggatggtgcagacagggatgaaaaggacttcaggaatcctggccaggaagtcaggaaactagacctgccagtgctgttcccaaacagacttggttttgagttcaagaacgagattaaaaaagaaaatctaaaatgggatgattcagaggaagtagaaataaacaaggctttacagagaaagtccagaggagtttattggcactctgagctacaaaaaggcttggagagtgagccaacatcaagaaggcaatgtagaaattctccaggggagagtgaggagaaaaccccatcccaggagaagatgagtcaccagagtttttgtgccagggacaaagcctgtacacatatcctctgtgggaaaaactgctctcagagtgtgcactctccccacaagccagcgctcaaactggaaaaagtatctcaatgtcctgaatgtgggaaaacctttagccgaagttcttatcttgttcggcatcaaagaatccacacaggcgagaagcctcacaagtgcagtgagtgcgggaagggctttagtgagcgctccaacctcactgcccacctacgaactcacacaggggagaggccctatcagtgtgggcaatgtgggaaaagcttcaaccagagttccagcctcattgtccaccagaggacccataccggggaaaagccttaccagtgcattgtctgtggaaagagattcaacaacagttcccagttcagtgctcaccggcgcatccacactggggagagcccatacaagtgtgcagtgtgtgggaaaatcttcaacaatagctcccacttcagtgcccaccgaaaaacccacactggtgaaaagccttacaggtgttctcactgtgagagaggcttcactaagaactctgccctcacccgtcatcagacagtacacatgaaagcagtactctcatcacaggaaggaagagatgcgttatgagtgtgtcggtaaactgtcagattaagttcctcaggtcagcatgtatgagctttcttctgctgtggagagatctagccagtccctgactttgcaacagacctactgactactggatcttaagacccatgtctaggaccaggagtcagcataaggacgctgacctctcctggctgtgcctgtgactccagagtcctatcttactgtgacttaaagtttgatggagagaaagctgtaggatccataaattctaccaggaaaccagggtcttcctgttcctagcactgagaatgggcacccagtggtccaagaacactttctgggctaacatagtcctcacacagggctgagaaaga

SEQ ID NO: 273673 - protein, 182 aa, Artificial Sequence
  derived and/or modified sequence
MDHLESFIAECDRRTELAKKRLAETQEEISAEVSAKAEKVHELNEEIGKLLAKAEQLGAEGNVDESQKILMEVEKVRAKKKEAEEEYRNSMPASSFQQQKLRVCEVCSAYLGLHDNDRRLADHFGGKLHLGFIQIREKLDQLRKTVAEKQEKRNQDRLRRREEREREERLSRRSGSRTRDRR

SEQ ID NO: 273674 - protein, 84 aa, Artificial Sequence
  derived and/or modified sequence
MDHLESFIAECDRRTELAKKRLAETQEEISAEVSAKAEKVHELNEEIGKLLAKAEQLGAEGNVDESQKILMEVEKVRAKKKEAE

SEQ ID NO: 273675 - DNA, 549 bp, Artificial Sequence
  derived and/or modified sequence
atggaccacttggagagctttattgcggaatgcgatcgaagaaccgaacttgccaaaaagagattggccgagacacaggaggagatcagcgccgaggtgagcgccaaagccgaaaaggtgcatgaactcaatgaggaaatcggaaagctgctggcaaaggccgagcagctgggtgccgaggggaatgtggacgaatcacagaaaattctgatggaggtggagaaagtgagggctaagaagaaggaggccgaggaggagtataggaattccatgcctgcctccagcttccagcagcagaagctgcgagtgtgcgaggtatgttcggcatatttaggactccacgacaatgacagacgattagccgaccatttcggtgggaaattgcatcttgggtttattcagattcgcgagaagctagaccagctgcggaaaaccgtcgctgagaagcaggaaaaacggaaccaagaccgtctgcgcaggcgtgaagaacgcgaaagggaggagcgactgtctaggaggtcaggaagccgcacccgtgaccgcagatag

SEQ ID NO: 273676 - DNA, 255 bp, Artificial Sequence
  derived and/or modified sequence
atggaccacctggagtctttcattgcagaatgcgatcggagaaccgagctcgcaaaaaaaagactcgcagagacccaagaggaaattagcgcggaggtttctgctaaagcagaaaaggttcatgagctgaatgaagagatcggtaaactgctcgctaaggcagagcaattaggtgccgaaggtaatgtagatgaaagccagaagatacttatggaggtggaaaaggtgcgcgctaagaaaaaagaggcagagtag

SEQ ID NO: 273677 - DNA, 549 bp, Artificial Sequence
  derived and/or modified sequence
atggaccacctggagagcttcatcgccgagtgtgacagaagaacagagctggccaagaagaggctggccgagacccaggaggagatctctgctgaggtgtctgccaaggccgagaaggtgcatgagctgaatgaggagatcggcaagctgctggccaaggccgagcagctgggcgctgagggcaatgtggatgagagccagaagatcctgatggaggtggagaaggtgcgggccaagaagaaggaggccgaggaggagtacagaaacagcatgcctgccagcagcttccagcagcagaagctgcgggtgtgtgaggtgtgcagcgcctacctgggcctgcatgacaatgaccggcggctggccgaccactttggaggcaagctgcacctgggcttcatccagatccgggagaagctggaccagctgaggaagacagtggccgagaagcaggagaagaggaaccaggaccggctgcggcggcgggaggagcgggagcgggaggagcggctgagccgccgcagcggcagcaggacccgggacagaagatag

SEQ ID NO: 273678 - DNA, 255 bp, Artificial Sequence
  derived and/or modified sequence
atggaccacctggagagcttcatcgccgagtgtgacagaagaacagagctggccaagaagaggctggccgagacccaggaggagatctctgctgaggtgtctgccaaggccgagaaggtgcatgagctgaatgaggagatcggcaagctgctggccaaggccgagcagctgggcgctgagggcaatgtggatgagagccagaagatcctgatggaggtggagaaggtgcgggccaagaagaaggaggccgagtag

SEQ ID NO: 273679 - DNA, 423 bp, Artificial Sequence
  derived and/or modified sequence
tcgcaggaggtcacgctcccgggatcggcgtcggaggcggtcaagatctacctcccgagagcgacggaaattgtcccggtcccggtcccgagatagacatcggcgccaccgcagccgttcccggagccacagccggggacatcgtcgggcttcccgggaccgaagtgcgaaatacaagtaactactctgactccttcggttctccagagagcgggcatccagagaggagtcctgggagagcgggcggagcgagcgagggcccccggactggaggcttgagagctccaacgggaagatggcttcacggaggtcagaagagaaggaggccggcgagatctgaacccgtctcccgggtgctgtaaatagtctgataaacgttcacacagtctaaaattaccctttatatttgctgaatacaactca

SEQ ID NO: 273680 - DNA, 549 bp, Artificial Sequence
  derived and/or modified sequence
atggaccacctggagagcttcatcgccgagtgcgaccggcggaccgagctagctaaaaagcgtctggccgagacacaagaagagatttcagcagaggtctctgccaaggcagaaaaggtgcatgagctcaacgaggagatcggcaagttattggccaaggcagagcagctgggcgcagaaggtaacgtagatgagtcccagaaaatccttatggaggtggaaaaggttagggccaagaaaaaggaggcggaggaagaataccgcaattccatgccagctagcagttttcaacagcagaaactgcgagtgtgtgaggtgtgttcagcatacctcggtctgcacgataatgacagaaggcttgcagaccatttcggaggcaagctgcatctcggattcatccagatccgcgagaagctcgatcaactacgtaagaccgttgcggaaaagcaggagaaacggaaccaggatcggctcaggaggagggaagaacgcgagcgagaagaacgactgtcccgccgctccggctctcggactcgcgaccggcggtag

SEQ ID NO: 273681 - DNA, 255 bp, Artificial Sequence
  derived and/or modified sequence
atggaccacctggagagcttcatcgccgagtgcgaccggcggaccgaactcgctaaaaaacgtctggcggaaacgcaagaagaaatatcagctgaagtttctgctaaggctgaaaaggtacacgagctcaacgaggagatcgggaaactcctggccaaggccgagcagctcggtgctgaaggcaacgttgatgagtctcagaaaatactgatggaagtggagaaggtgagagcaaaaaaaaaggaggcagaatag

SEQ ID NO: 273682 - DNA, 549 bp, Artificial Sequence
  derived and/or modified sequence
atggatcacctggagagcttcatcgccgaatgcgacagacgcacagaattagctaagaaaagattagcggaaacccaggaggaaattagcgctgaagtgtcagctaaagccgagaaggtgcatgagttgaatgaggaaatcggcaaattgcttgctaaggctgaacaactcggagccgagggcaacgtggacgaatcgcagaagattctgatggaagtggagaaggtgcgggcaaaaaagaaggaagctgaagaagagtaccgcaactcaatgcccgctagcagcttccagcagcagaagctgcgcgtttgtgaggtgtgcagcgcttatttgggtctacatgacaatgaccgtaggttggccgatcactttgggggaaagcttcatctcggctttattcaaatcagagagaagctggaccaactccggaagaccgtggctgagaagcaggagaagagaaaccaggatagacttcgtaggagggaggagagggagagggaggagcgtctgtctaggcgcagtggcagccgtacaagggacagacgatag

SEQ ID NO: 273683 - DNA, 255 bp, Artificial Sequence
  derived and/or modified sequence
atggaccatctagaatcattcattgcggaatgcgatcggcgtaccgagttggctaagaagcgcttggccgaaacccaggaagagatctctgcggaagtgtccgctaaggcagagaaagtgcacgaactcaatgaggagattggaaagttacttgctaaagctgagcagctcggcgctgaaggcaacgttgacgaaagccagaaaatactgatggaggttgagaaagtgcgggcaaagaaaaaagaagctgagtag

SEQ ID NO: 273684 - DNA, 549 bp, Artificial Sequence
  derived and/or modified sequence
atggaccacctggagagcttcatcgccgagtgcgacagaagaaccgagctggccaagaagagactggccgagacccaggaggagatcagcgccgaggtgagcgccaaggccgagaaggtgcacgagctgaacgaggagatcggcaagctgctggccaaggccgagcagctgggcgccgagggcaacgtggacgagagccagaagatcctgatggaggtggagaaggtgagagccaagaagaaggaggccgaggaggagtacagaaacagcatgcccgccagcagcttccagcagcagaagctgagagtgtgcgaggtgtgcagcgcctacctgggcctgcacgacaacgacagaagactggccgaccacttcggcggcaagctgcacctgggcttcatccagatcagagagaagctggaccagctgagaaagaccgtggccgagaagcaggagaagagaaaccaggacagactgagaagaagagaggagagagagagagaggagagactgagcagaagaagcggcagcagaaccagagacagaagatag

SEQ ID NO: 273685 - DNA, 255 bp, Artificial Sequence
  derived and/or modified sequence
atggaccacctggagagcttcatcgccgagtgcgacagaagaaccgagctggccaagaagagactggccgagacccaggaggagatcagcgccgaggtgagcgccaaggccgagaaggtgcacgagctgaacgaggagatcggcaagctgctggccaaggccgagcagctgggcgccgagggcaacgtggacgagagccagaagatcctgatggaggtggagaaggtgagagccaagaagaaggaggccgagtag

SEQ ID NO: 273686 - protein, 1088 aa, Artificial Sequence
  derived and/or modified sequence
MIDSSKKQQQGFPEILTAGDFEPLKEKECLEGSNQKSLKEVLQLRLQQRRTREQLVDQGIMPPLKSPAAFHEQIKSLERARTENFLKHKIRSRPDRSELVRMHILEETFAEPSLQATQMKLKRARLADDLNEKIAQRPGPMELVEKNILPVDSSVKEAIIGVGKEDYPHTQGDFSFDEDSSDALSPDQPASQESQGSAASPSEPKVSESPSPVTTNTPAQFASVSPTVPEFLKTPPTADQPPPRPAAPVLPTNTVSSAKPGPALVKQSHPKNPNDKHRSKKCKDPKPRVKKLKYHQYIPPDQKGEKNEPQMDSNYARLLQQQQLFLQLQILSQQKQHYNYQTILPAPFKPLNDKNSNSGNSALNNATPNTPRQNTSTPVRKPGPLPSSLDDLKVSELKTELKLRGLPVSGTKPDLIERLKPYQEVNSSGLAAGGIVAVSSSAIVTSNPEVTVALPVTTLHNTVTSSVSTLKAELPPTGTSNATRVENVHSPLPISPSPSEQSSLSTDDTNMADTFTEIMTMMSPSQFLSSSPLRMTNNEDSLSPTSSTLSNLELDAAEKDRKLQEKEKQIEELKRKLEQEQKLVEVLKMQLEVEKRGQQQRPLEAQPSAPGHSVKSDQKHGSLGSSIKDEASLPDCSSSRQPIPVASHAVGQPVSTGGQTLVAKKAVVIKQEVPVGQAEQQSVVSQFYVSSQGQPPPAVVAQPQALLTTQTAQLLLPVSIQGSSVTSVQLPVGSLKLQTSPQAGMQTQPQIATAAQIPTAALASGLAPTVPQTQDTFPQHVLSQPQQVRKVFTNSASSNTVLPYQRHPAPAVQQPFINKASNSVLQSRNAPLPSLQNGPNTPNKPSSPPPPQQFVVQHSLFGSPVAKTKDPPRYEEAIKQTRSTQAPLPEISNAHSQQMDDLFDILIKSGEISLPIKEEPSPISKMRPVTASITTMPVNTVVSRPPPQVQMAPPVSLEPMGSLSASLENQLEAFLDGTLPSANEIPPLQSSSEDREPFSLIEDLQNDLLSHSGMLDHSHSPMETSETQFAAGTPCLSLDLSDSNLDNMEWLDITMPNSSSGLTPLSTTAPSMFSADFLDPQDLPLPWD

SEQ ID NO: 273687 - protein, 460 aa, Artificial Sequence
  derived and/or modified sequence
MIDSSKKQQQGFPEILTAGDFEPLKEKECLEGSNQKSLKEVLQLRLQQRRTREQLVDQGIMPPLKSPAAFHEQIKSLERARTENFLKHKIRSRPDRSELVRMHILEETFAEPSLQATQMKLKRARLADDLNEKIAQRPGPMELVEKNILPVDSSVKEAIIGVGKEDYPHTQGDFSFDEDSSDALSPDQPASQESQGSAASPSEPKVSESPSPVTTNTPAQFASVSPTVPEFLKTPPTADQPPPRPAAPVLPTNTVSSAKPGPALVKQSHPKNPNDKHRSKKCKDPKPRVKKLKYHQYIPPDQKGEKNEPQMDSNYARLLQQQQLFLQLQILSQQKQHYNYQTILPAPFKYGGAHAILNAGFSVFMRNYKLPKVECCHLFVLSNDFHFFVIRAYHTVSEVHMVRVACIPFQFLSSKIGSEFLQVRNAFSQLFIQICLLLEHQNSTRCSEKSVSSIIPGINS

SEQ ID NO: 273688 - DNA, 3267 bp, Artificial Sequence
  derived and/or modified sequence
atgatcgatagctccaagaaacagcagcagggcttcccagaaatcctgacggccggggatttcgaacccctaaaggagaaagaatgcctggaaggctcaaatcagaagtctctgaaggaggtgttgcagctccgcctgcaacagagacgtaccagggagcagcttgtagatcaaggcattatgcccccactgaaatctccggcggcctttcatgagcagatcaagtctctggaacgtgcacggaccgagaacttcctgaagcataagattcgatctcgccccgatcggagcgaactagtccgtatgcatattctcgaggaaaccttcgcagagcccagcttgcaagcaacccagatgaaactgaaacgggcccggctggccgatgacctcaacgagaaaattgcacaacgtccaggaccgatggagttagtggagaagaacattttgcccgtcgatagctcagtgaaggaggccatcatcggagtcggaaaagaagattatccccacactcagggagatttctcgtttgatgaggactcttcagatgccctatcacccgaccaaccggccagtcaggaatctcagggttcagcagccagcccatctgagcccaaggtaagtgaaagtcccagccctgtgaccactaacactccagctcaattcgcatcagtgtccccaaccgtgcccgaatttctgaagacgcctccgacagcagatcagccaccaccacgtcccgccgcccccgtgctgccaactaacactgtaagctcagctaagccggggccggctttagttaagcaaagccatcctaaaaacccaaatgacaaacatcggtctaagaagtgcaaagacccaaaaccccgggtgaagaaattgaagtatcaccagtacattccaccggatcaaaaaggcgagaagaacgagccccagatggattctaattatgcaagactgctgcaacagcaacaacttttcctgcagctgcagatcctttctcagcagaagcagcattacaactaccagaccatcctccccgcaccattcaaacccctgaacgacaagaattctaactctggaaactcagccctgaacaacgctaccccaaacactcctcgccagaacacaagtaccccagtgaggaaacctgggccgcttccaagttctttggacgatctgaaagtttctgaactcaagaccgagctaaagctgcgggggctgcctgtatcaggaaccaaacctgatctaatcgagaggttgaaaccatatcaggaagtgaattcaagcgggctggccgcaggggggattgtcgcagtgtcttcctccgccatagttacatccaatccagaggtaaccgtggcactgccagtcaccaccttgcataataccgttacttcgtctgtgtccacactgaaagctgagttgcccccaacaggcacctcgaatgctactcgagtagagaatgtgcattccccactgcctatatcccctagtccgagtgagcaatcatcgctgtccaccgacgataccaacatggcggacactttcacagaaatcatgacgatgatgagcccaagccagtttctctcatcaagtccgttacggatgactaataacgaggatagtctaagcccgacatccagcacactgagcaatctggagttagatgctgccgaaaaggatagaaaactccaggagaaagagaagcagatcgaggaattgaagcggaagcttgaacaggagcagaagctggtagaagtgttgaaaatgcagctggaagtggagaagcgcggccagcagcaaagaccactggaagcccagccctctgcccctgggcactccgtaaagtccgatcagaagcatggctctctgggcagttccatcaaagatgaggcctccttgccagactgctcatcatcccggcagcccatacccgtcgcctctcatgccgtcggccagcccgttagtactgggggccaaacactggttgccaaaaaagctgttgtcatcaaacaggaagtccctgtgggacaagcagaacaacaatctgtggtctctcagttttatgtttccagtcagggtcagcccccacccgctgtggttgcccagccccaggcactgctcaccacccagactgcgcagctgctcctgcctgttagtatacagggcagcagcgtgactagtgtccagctcccggtcggatctctcaaactgcagactagcccacaggccgggatgcagacacagccccagatcgcgacagctgcccaaatccctacagctgccttagcttcaggactagcaccaaccgtccctcagacacaggacactttcccgcagcatgtgttgtcgcagccgcagcaggtcaggaaggtgttcacgaactcggcctcaagtaacaccgtactgccttatcagaggcatccggcgcccgccgttcagcagccatttatcaacaaagcctccaattctgtgctgcaatcccgtaatgcccctcttccatctttgcagaacggccccaacacccccaacaagccaagctccccaccacctcctcaacagttcgtagtgcagcatagccttttcggctctccggttgcaaaaacaaaagaccctcccagatatgaggaagcaatcaagcaaacgaggtccacccaggccccgttgcccgaaatctcaaatgcccattctcagcagatggatgatctgtttgacatccttattaagagtggggagatttccctgcctatcaaggaggagccttctcctatcagcaagatgcgaccagtcaccgcgagcatcactaccatgccagtgaacactgttgtctcccggccacctccacaggtgcagatggctcctcctgtttctttggaaccaatgggctctctttcagcttcactggagaaccaactcgaggcttttctcgacggaaccctgccaagcgccaacgagattcctccactgcagtcgtcgtccgaggatcgcgagccgttctctctgatagaggacttgcagaatgacctgttgtcgcattctggaatgctggatcactctcattctccgatggaaacttccgagacccagttcgcagctggtacaccttgcctttcgctggacttatctgactccaatctagacaacatggaatggttagatattacaatgccgaattcttcatcaggtttaaccccgctgtctaccactgctcctagcatgttttctgctgatttcctggacccccaagacctcccactgccctgggactag

SEQ ID NO: 273689 - DNA, 1383 bp, Artificial Sequence
  derived and/or modified sequence
atgatcgattcctcaaagaagcagcagcagggcttccccgaaattctgaccgccggagattttgaacccctcaaggagaaggagtgtctagaaggctctaatcaaaagtccctgaaggaggttctccaactgagactgcagcagagacggacaagagagcagctggtcgatcagggcataatgccccccctgaaatctccagccgcgttccatgagcagatcaaatcgttagaaagagcaaggaccgagaactttctgaagcacaaaatcaggtcgcggccagatcggagcgagcttgtgcgtatgcacatcttggaagaaacttttgcagaaccatcactgcaggctacccagatgaagctgaagagggcccgcttggccgacgacctcaatgaaaagatcgctcagcgccccggtccaatggaactggttgagaaaaacattctacctgtggactctagcgttaaagaggcgataattggagtcggtaaagaggattatccacacacgcagggggacttttcatttgacgaggactcaagtgacgccctctcccctgatcagcccgctagccaggagtcccagggatccgcggcaagccctagcgaaccaaaggtctccgaaagccccagcccagttacaaccaatacgccggctcaattcgcaagtgtctcacctactgtgccagagttccttaagacaccccccacggccgaccagcccccgcctaggccggcagctccggtattgcctaccaacaccgtttccagcgccaagccaggaccagccctagtgaagcagtctcatcctaaaaacccaaacgacaaacacaggtccaagaaatgcaaggaccccaagccacgcgtgaagaaactcaaatatcatcagtatatcccgcctgaccagaagggggaaaaaaacgaaccacaaatggactctaactacgctagactcctccagcagcagcaactctttctccaactgcaaatcctctcacagcagaagcagcattataactatcagacaattcttccagcgccatttaagtatgggggagcgcacgccatcctaaatgcaggctttagtgtttttatgaggaactacaagctgccaaaggtggaatgctgccaccttttcgtgctgtcgaatgactttcatttctttgtgatacgcgcctaccatactgtttcagaggtacatatggtccgtgtggcctgcataccctttcagtttctcagcagcaagatcggatccgagtttcttcaggtgaggaacgctttctcccagctgttcattcagatttgtctgctcctagaacaccagaactcaacacgatgcagcgagaaatcagtgtcttccatcatccctgggattaactcatag

SEQ ID NO: 273690 - DNA, 3465 bp, Artificial Sequence
  derived and/or modified sequence
atgatcgatagctccaagaagcagcaacagggcttcccagagattttaactgctggggattttgaaccattaaaagaaaaggaatgccttgaggggagcaaccagaaaagtctcaaggaagtgctccagctgaggctgcaacaaaggaggacgagagaacaactagtggaccagggcatcatgccacctttgaagagcccagcggcattccatgaacagataaaaagcttggaacgagccagaactgaaaactttttgaaacacaagattcggagtcgaccagatcgttctgaacttgtcaggatgcacattttagaagaaacatttgcagagccatccctgcaggctactcagatgaagttgaaaagagctcgactagcagatgatctgaatgaaaagattgctcaaagacctggtcctatggagctggtagagaaaaacatccttcctgtggactccagtgttaaagaagcaattataggcgttgggaaggaggactatccccacactcagggcgatttctcatttgatgaagacagcagtgacgctttgtctccggaccagcctgcgagtcaggagtcacaggggtcagccgcgtccccaagtgagccaaaagttagtgaatcgccatctcctgtgactacaaacactccagcgcagtttgcttcagtgtccccaacagttcctgaattcttgaaaactcctccaactgcagatcagcctcccccacggcctgcagctcctgtcctccccacaaacactgtgtcctcagcaaagcctggcccagcactggtgaagcaaagccatcccaagaatccaaatgacaaacaccgtagcaaaaagtgcaaagatcccaaaccacgggtaaagaagttaaagtaccaccaatacattccaccagatcagaagggtgagaagaatgagccgcagatggactctaactacgcccgcctgctccagcagcagcagctgttcctgcaactgcagatcctgagtcagcagaagcagcactacaactaccagaccatcctgcctgcaccattcaagccactcaatgacaaaaatagtaacagtgggaattcagctttgaacaatgccacacctaacacaccaagacagaatacatctactcctgtgagaaagccaggacctctgccttctagcctggatgacttaaaggtatcagaactgaagacagaactgaagttaaggggtctgccagtgtcaggcaccaaaccggacctcattgagcgcctaaaaccctaccaggaagtgaacagcagcggccttgctgctgggggcatcgtggcagtgtcatcatcagccattgtcaccagtaacccagaagtcactgtggccttgccggttacaacactacacaacactgtgactagctcagtctctactctcaaggcagaattgccacctacaggaaccagcaacgcaacccgtgtggaaaatgttcattcccctctgcccatttcaccatctccctccgaacagtccagtctcagtactgatgacacaaacatggcagacactttcaccgagattatgaccatgatgtcgccttcacagttcttgagttcatctcctttgagaatgacaaataatgaagacagtctgagtcccaccagcagcactctgtcaaacctggaactggatgcagccgaaaaggatcgcaagcttcaggagaaagagaagcaaatcgaagagctgaagaggaaactggaacaagagcagaagctcgtggaagtgctgaaaatgcaacttgaggttgaaaaacgagggcagcagcagcggcccctggaagcccagcccagtgccccaggtcattctgtcaagtcagatcagaagcacggcagccttggctcctccatcaaagatgaggcctcactccctgactgctccagctccaggcagcccatcccagtagccagccacgctgtaggccagcccgtctctacaggtggccagacccttgttgccaaaaaggctgtagttatcaagcaagaggtccctgtgggccaggcagagcagcagagtgtcgtctcgcagttttatgtgagttcccagggacagccaccgcctgctgttgttgctcagccccaggctttactgaccacgcagactgctcagctgctgctcccagtgtccatccagggctcgagtgtcacctcagtgcaactccctgtaggcagcctcaaactccagacttcaccacaagcaggaatgcagactcagcctcagatagcaactgctgcacaaataccaactgctgccttggcctcaggcttggccccaactgtacctcagacacaagacacgttcccgcagcatgtgctcagtcagcctcaacaagtcagaaaggttttcacaaactcagcatcatcaaatacagttcttccatatcagagacatcctgccccagctgtccagcagccctttatcaataaggcctccaacagtgttcttcaatccagaaatgctccgcttccatccctgcaaaatggacctaacacacccaacaagcctagttcacccccgccaccccagcaatttgtcgtccagcactctctatttgggagtccagtcgccaagacaaaagatcccccccgctatgaggaggccatcaagcagacacgcagcacacaggcccctctgccagagatttccaacgctcacagtcagcagatggatgacctctttgatatcctcattaagagtggagagatctccctccccataaaagaagaaccttctcctatttccaaaatgagaccagtgacagccagcatcaccacaatgccagtgaatacagtggtgtcccggccaccaccccaagtccaaatggcaccacctgtatctttagaacctatgggcagtttatctgccagcttagagaaccaactagaagctttcttggatggaactttaccctcagccaatgaaattcctccactacaaagcagcagtgaagacagagagcccttctctctgatcgaggacctccagaatgatctgctgagtcactcaggtatgctggaccattcacactcacccatggagacttccgagacccagtttgctgcaggtactccctgtctgtctctcgacctgtcagactcaaacttggacaacatggagtggttggacattaccatgcccaactcctcttcaggactcactcctctcagcaccaccgcgccgagcatgttctctgctgactttctagacccacaggacctaccgctgccatgggactaacgtcacagatttcttttctgagagttgatgaggtttaagaacatgaagattctaaaaggtcagtttttagagatagatctatagttgcattgttgcaatcaaaatatgttgtcacagaaagaataggtggaaggtcatagcctggaacccaagtttgaaaacatttcattgtgttcagtagtgaatttctacagttta

SEQ ID NO: 273691 - DNA, 2180 bp, Artificial Sequence
  derived and/or modified sequence
gtatttgcaggtcaagctgggaactaaagggtaatggctgccttcagctgcttaaagacataattggccagtgattggggtattgtggggagcaaccagggacccagggaccagagtgttctgcgcaccgcacttcgctcttctgcaaattaagcttttctcctgcttgatgctgcctgtcttcagaagcctctcaccatgatcgatagctccaagaagcagcaacagggcttcccagagattttaactgctggggattttgaaccattaaaagaaaaggaatgccttgaggggagcaaccagaaaagtctcaaggaagtgctccagctgaggctgcaacaaaggaggacgagagaacaactagtggaccagggcatcatgccacctttgaagagcccagcggcattccatgaacagataaaaagcttggaacgagccagaactgaaaactttttgaaacacaagattcggagtcgaccagatcgttctgaacttgtcaggatgcacattttagaagaaacatttgcagagccatccctgcaggctactcagatgaagttgaaaagagctcgactagcagatgatctgaatgaaaagattgctcaaagacctggtcctatggagctggtagagaaaaacatccttcctgtggactccagtgttaaagaagcaattataggcgttgggaaggaggactatccccacactcagggcgatttctcatttgatgaagacagcagtgacgctttgtctccggaccagcctgcgagtcaggagtcacaggggtcagccgcgtccccaagtgagccaaaagttagtgaatcgccatctcctgtgactacaaacactccagcgcagtttgcttcagtgtccccaacagttcctgaattcttgaaaactcctccaactgcagatcagcctcccccacggcctgcagctcctgtcctccccacaaacactgtgtcctcagcaaagcctggcccagcactggtgaagcaaagccatcccaagaatccaaatgacaaacaccgtagcaaaaagtgcaaagatcccaaaccacgggtaaagaagttaaagtaccaccaatacattccaccagatcagaagggtgagaagaatgagccgcagatggactctaactacgcccgcctgctccagcagcagcagctgttcctgcaactgcagatcctgagtcagcagaagcagcactacaactaccagaccatcctgcctgcaccattcaagtacggcggggcccatgctatcctcaacgcggggttttctgtgtttatgaggaactataagttaccaaaagttgaatgttgtcatttatttgtgctcagtaatgattttcatttctttgttatcagagcttatcacacagtgtctgaagtccacatggtgagagtggcctgcattccattccagtttctgtcctccaaaataggttctgaatttttacaagttagaaatgccttttcacaattattcatccagatttgcctattattagaacaccaaaatagtactagatgctctgagaaaagcgtaagtagtataatacctggcataaacagctaaaagaagagaaggatgggcatgaaagctggagtggtcaaaggaaagcctggtggaaaagacaggatctttgtatatagaaggctcgagaagggcctttccaggcacaggggaatgctgtgagcactagtacagaggaaggaatagagtaagtagtgcctcttcattggaaggtgagaaaaattgcctaaacaaagaatctgattaatttttaagtaaaaagtggaagacaaaaatcgagtacagccaatgtctaaggggacttgaagctgggcagaagaccttactcaacacagcagatagacaacggagtgcttcagagcaggctgctgacgcagtgaggccaaaatataagaaaaaacagctggatgctggtgttgaagggacgtctggagacaatgaagagctctggcagcagagtgagtgtttcagaagacagttaaaggccttggtgacgaacaactgcggagaaggaaggtgttttcaaagtttgaacccaactgtgggggacggaagggagtgaattctgacaatttctgaaactgaattcacagcaagacatcaatggctaattttaattacgtaataaagaaaatttctgg

SEQ ID NO: 273692 - DNA, 3267 bp, Artificial Sequence
  derived and/or modified sequence
atgattgacagcagcaagaagcagcagcagggcttccctgagatcctgacagctggggactttgagcccctgaaggagaaggagtgcctggagggcagcaaccagaagagcctgaaggaggtgctgcagctgcggctgcagcagaggaggacccgggagcagctggtggaccagggcatcatgccacccctgaagagccctgctgccttccacgagcagatcaagagcctggagcgggccaggacagagaacttcctgaagcacaagatccgcagcaggccagacagaagtgagctggtgaggatgcacatcctggaggagacctttgctgagcccagcctgcaggccacccagatgaagctgaagagggcccggctggctgatgacctgaatgagaagatcgcccagaggcctggccccatggagctggtggagaagaacatcctgcctgtggacagctctgtgaaggaggccatcatcggcgtgggcaaggaggactacccccacacccagggcgacttctcctttgatgaggacagcagtgatgccctgagcccagaccagcctgccagccaggagagccagggcagcgctgccagccccagcgagcccaaggtgtctgagagccccagccctgtgaccaccaacaccccagcccagtttgcctctgtgagccccaccgtgcctgagttcctgaagaccccacccacagctgaccagcccccacccaggcctgctgcccctgtgctgcccaccaacacagtgtcctctgccaagccaggccctgccctggtgaagcagagccaccccaagaaccccaatgacaagcacaggagcaagaagtgcaaggaccccaagccccgggtgaagaagctgaagtaccaccagtacatccccccagaccagaagggggagaagaatgagccccagatggacagcaactatgcccggctgctgcagcagcagcagctgttcctgcagctgcagatcctgagccagcagaagcagcactacaactaccagaccatcctgcctgcccccttcaagcccctgaatgacaagaacagcaacagcggcaacagcgccctgaacaatgccacccccaacaccccccggcagaacaccagcacccctgtgaggaagccaggccccctgcccagcagcctggatgacctgaaggtgtctgagctgaagacagagctgaagctgcggggcctgcctgtgtctggcaccaagccagacctgattgaaaggctgaagccctaccaggaggtgaacagcagcggcctggccgccggcggcatcgtggccgtgagcagcagcgccatcgtgaccagcaaccctgaggtgacagtggccctgcctgtgaccaccctgcacaacacagtgaccagctctgtgtccaccctgaaggccgagctgcccccaacaggcaccagcaatgccaccagggtggagaatgtgcacagccccctgcccatcagccccagccccagcgagcagagcagcctgagcacagatgacaccaacatggctgacaccttcacagagatcatgaccatgatgagccccagccagttcctgagcagcagccccctgaggatgaccaacaatgaagacagcctgagccccaccagcagcaccctgagcaacctggagctggatgctgctgagaaggacaggaagctgcaggagaaggagaagcagatcgaggagctgaagaggaagctggagcaggagcagaagctggtggaggtgctgaagatgcagctggaggtggagaagaggggccagcagcagaggcccctggaggcccagcccagcgcccctggccacagcgtgaagagtgaccagaagcacggcagcctgggcagcagcatcaaggatgaggccagcctgcctgactgcagcagcagccggcagcccatccctgtggccagccatgctgtgggccagcctgtgtccactggaggccagaccctggtggccaagaaggctgtggtgatcaagcaggaggtgcctgtgggccaggccgagcagcagagcgtggtgtcccagttctacgtgagcagccagggccagcccccacctgctgtggtggcccagccccaggccctgctgaccacccagacagcccagctgctgctgcctgtgtccatccagggcagctctgtgacctctgtgcagctgcctgtgggcagcctgaagctgcagaccagcccccaggccggcatgcagacccagccccagatcgccacagctgcccagatccccacagctgccctggccagcggcctggcccccaccgtgccccagacccaggacaccttcccccagcacgtgctgagccagccccagcaggtgaggaaggtgttcaccaacagcgccagcagcaacacagtgctgccctaccagaggcacccagccccagctgtgcagcagcccttcatcaacaaggccagcaacagcgtgctgcagagcagaaatgcccccctgcccagcctgcagaatggccccaacacccccaacaagcccagcagccccccaccaccccagcagtttgtggtgcagcacagcctgtttggcagccctgtggccaagaccaaggaccccccaagatatgaggaggccatcaagcagaccaggagcacccaggcccccctgcctgagatcagcaatgcccacagccagcagatggatgacctgtttgacatcctgatcaagtctggagagatcagcctgcccatcaaggaggagcccagccccatcagcaagatgaggcctgtgacagccagcatcaccaccatgcctgtgaacacagtggtgtcccggcccccaccccaggtgcagatggcccctcctgtgtccctggagcccatgggcagcctgagcgccagcctggagaaccagctggaggccttcctggatggcaccctgcccagcgccaatgagatcccccccctgcagagcagcagtgaagatcgggagcccttcagcctgattgaggacctgcagaatgacctgctgagccacagcggcatgctggaccacagccacagccccatggagaccagcgagacccagtttgctgctggcaccccctgcctgagcctggacctgagtgacagcaacctggacaacatggagtggctggacatcaccatgcccaacagcagcagcggcctgacccccctgagcaccacagcccccagcatgttttctgctgacttcctggacccccaggacctgcccctgccctgggactag

SEQ ID NO: 273693 - DNA, 1383 bp, Artificial Sequence
  derived and/or modified sequence
atgattgacagcagcaagaagcagcagcagggcttccctgagatcctgacagctggggactttgagcccctgaaggagaaggagtgcctggagggcagcaaccagaagagcctgaaggaggtgctgcagctgcggctgcagcagaggaggacccgggagcagctggtggaccagggcatcatgccacccctgaagagccctgctgccttccacgagcagatcaagagcctggagcgggccaggacagagaacttcctgaagcacaagatccgcagcaggccagacagaagtgagctggtgaggatgcacatcctggaggagacctttgctgagcccagcctgcaggccacccagatgaagctgaagagggcccggctggctgatgacctgaatgagaagatcgcccagaggcctggccccatggagctggtggagaagaacatcctgcctgtggacagctctgtgaaggaggccatcatcggcgtgggcaaggaggactacccccacacccagggcgacttctcctttgatgaggacagcagtgatgccctgagcccagaccagcctgccagccaggagagccagggcagcgctgccagccccagcgagcccaaggtgtctgagagccccagccctgtgaccaccaacaccccagcccagtttgcctctgtgagccccaccgtgcctgagttcctgaagaccccacccacagctgaccagcccccacccaggcctgctgcccctgtgctgcccaccaacacagtgtcctctgccaagccaggccctgccctggtgaagcagagccaccccaagaaccccaatgacaagcacaggagcaagaagtgcaaggaccccaagccccgggtgaagaagctgaagtaccaccagtacatccccccagaccagaagggggagaagaatgagccccagatggacagcaactatgcccggctgctgcagcagcagcagctgttcctgcagctgcagatcctgagccagcagaagcagcactacaactaccagaccatcctgcctgcccccttcaagtatggaggagcccacgccatcctgaatgccggcttcagcgtcttcatgaggaactacaagctgcccaaggtggagtgctgccacctgtttgtgctgagcaatgacttccacttcttcgtcatccgggcctaccacacagtgtctgaggtgcacatggtgcgggtggcctgcatccccttccagttcctgagcagcaagattggcagcgagttcctgcaggtgagaaatgccttcagccagctgttcatccagatctgcctgctgctggagcaccagaacagcacccgctgcagcgagaagtctgtgagcagcatcatccctggcatcaacagctag

SEQ ID NO: 273694 - DNA, 3267 bp, Artificial Sequence
  derived and/or modified sequence
atgatcgacagcagcaagaagcagcagcagggcttccccgagatcctgactgcgggagacttcgagccgctcaaagagaaggaatgcctggagggcagcaaccagaaatcgctgaaggaggtgcttcagctgcgcctacagcaaaggcggactagagaacagctggtagatcagggaatcatgccaccactgaagagcccagccgcgtttcacgaacagattaaaagcttagagcgggctcggactgaaaactttctgaagcacaaaattcgctctcgcccagatcgcagcgagctcgtgagaatgcacattctcgaagaaacctttgccgaaccctctctgcaagcaacacagatgaagttgaaacgggcccggttagccgacgatctcaacgaaaaaattgcgcagagacctgggccgatggaactggttgaaaagaacatcctacccgttgattcaagcgtcaaggaagcgattataggcgtaggaaaggaggactatccccacacacaaggggacttttcctttgacgaagactcctcagatgccctaagcccagaccagccagcttcacaagagagccaggggagcgccgcaagcccctccgagccgaaagtttctgaatcaccctcacccgtgactaccaacactcccgctcaattcgccagcgtgtcccctacggtgcccgaattcctgaaaactccacccacagctgatcagcctccccctaggcccgcagcacctgttcttccaactaatacagttagtagtgctaagccaggaccagctttggtgaagcagtcacatcctaaaaaccctaatgacaagcatcgctccaaaaaatgtaaggacccgaaacctagggtgaagaaactcaaataccaccagtacatccctcctgaccagaagggggagaagaatgaaccccagatggactccaactacgcccgcctgctacagcaacagcagcttttcctccagttgcaaattctatcacaacaaaagcaacactataactaccagacaatcctgccggccccctttaaacccttaaatgataaaaacagtaattccggtaacagtgctctgaataatgcaacaccgaacacacctcgacagaacacctctacgcctgtcaggaaacctggacctctcccaagctcactggatgacctcaaggtgtctgaactcaagactgagttaaaacttcgcgggctgcctgtgagcggaacaaagcccgacttaatagaacgtctgaagccgtaccaggaggtgaactcaagcggcctagccgctggaggcatcgtggccgtgagcagcagtgctatcgtgacttccaatccagaggtaactgtcgcccttcccgtcaccacactccacaacaccgtgacctccagtgttagcacactaaaggccgagctgcctcctaccggcacctctaatgccaccagggtcgagaacgtgcactcgcccttacctataagcccgtcccctagcgagcagtcttccctctcaaccgatgatactaacatggctgacacttttaccgaaattatgacaatgatgtcaccatctcagttcctgagttcatccccgctgcgaatgaccaacaatgaggactccctgagccccacatcttctacactgtcaaatttagaattagacgccgccgagaaagatagaaaacttcaggaaaaggaaaagcagatagaagagttaaaaaggaagctggaacaggaacaaaagctggttgaagtgcttaagatgcaacttgaagtcgagaagcgggggcaacagcagcggcccctggaagcccaaccttccgcgcctgggcactccgttaagtctgatcagaagcatggtagtctggggtctagtatcaaagacgaggctagcctgcccgactgctcatcctcccgccaaccaattcctgtggcatctcatgccgtgggtcaacccgtttccactggtggccaaacgcttgtcgcaaagaaggcggtggtgattaaacaggaagtccctgtagggcaggctgagcagcagagtgttgtgtctcagttctatgtgagctcgcagggccaacctcctcctgccgtggttgcacagccgcaagcactgttgaccacacagacagctcagttactgctgcccgtgagtatccagggatctagtgtgaccagcgttcagctgcccgtgggtagtctcaaactacagacatcacctcaggcaggaatgcagacccaaccacagatcgccactgccgctcagatcccaacagcagcccttgccagtggtctggcgcccacagttcctcagacccaagataccttcccacagcatgtgctgtcccagccacagcaagtccggaaagtgttcacgaacagtgcatcgagcaatacagtgctgccttatcaacgacacccagcccctgcagtgcagcagcccttcattaacaaggcttcgaattcagttctacagtcacgcaatgccccacttcctagtcttcagaatggtccaaatactcccaataaaccaagttcgcctccacctccccagcagttcgtggtgcagcatagcctgttcggcagccccgttgccaagacgaaggatccgccgaggtacgaagaagctatcaaacagactagatcgacacaagcacctctgcccgagattagtaacgcacacagccagcagatggacgacctgttcgatattctgatcaaaagtggagagatcagcctgcccatcaaggaggagccaagtcccatatccaaaatgcggcctgtcaccgcttctatcacaacaatgcctgtgaatacggtggtgagtcgccctcctccccaagtgcaaatggccccgcctgtgagcctcgaaccgatgggaagtctctctgctagcctcgaaaatcagttagaggcgttcctcgatggcaccctccctagcgcgaacgaaatccccccactccagtcatcgtcagaagatcgagagcccttcagcctaatcgaggacctgcagaatgatttgttgtcacacagcggcatgttggaccattcccatagccccatggaaacgtccgagacacagttcgcagcaggcacaccctgcctgtctctggacctgtccgattctaatctggataatatggagtggctggatataacaatgccgaactccagctccggactcaccccgctgtccacaaccgcccctagtatgttttccgctgacttcctggatccacaagatcttcccctcccttgggattag

SEQ ID NO: 273695 - DNA, 1383 bp, Artificial Sequence
  derived and/or modified sequence
atgatcgacagcagcaagaagcagcagcagggcttccccgagatcttaacagccggagacttcgagccactgaaggagaaagagtgtctggagggctctaaccagaaatctcttaaagaagtgctccagttgagattgcagcagcggcggacccgagagcagctggttgaccagggtatcatgccgcccctcaaatccccagccgccttccatgaacagattaagtccttggagagagccagaaccgaaaacttccttaagcataaaatccgctcccgccctgatagatcagaactagttcggatgcacattttagaggagacttttgctgagccaagtctacaggccacccaaatgaagctgaaaagggctcggctggccgacgatcttaatgagaaaatcgcacagcgtcccggtccaatggagctcgtggagaaaaatattttacccgtcgactcttcagtgaaagaagctatcattggagtcggcaaggaagactatccgcacacccaaggggacttcagcttcgacgaagactcaagtgacgcactgagtcccgatcagcccgcttcacaggaatctcagggctccgccgcctcgccctccgaacccaaggtttcagaaagtcctagtccagtgacaacaaacacacccgcccagtttgcatctgtgagccctacagtacccgagtttttaaaaaccccacccaccgctgaccagccaccaccaaggcccgcagcacccgttctcccaacaaacaccgtttcctctgcaaagcccgggccagctcttgtgaagcagagccacccgaaaaacccaaacgataagcatcggtccaagaaatgcaaagatcccaagccaagagtcaagaagctgaagtaccaccagtatattccacccgatcagaagggtgagaagaacgagccccagatggatagcaattatgctcggctgctgcagcagcagcagctctttctgcagcttcagattctgtcccaacagaagcagcactacaattaccagacaatcttacctgcgccctttaagtacggcggagctcacgccatcctgaatgctggcttcagcgtctttatgaggaactacaagttacctaaggtggagtgctgtcatcttttcgtgctttccaatgactttcacttctttgtaatccgagcctaccacacagtaagtgaagtgcacatggtgcgcgtcgcctgcattccgtttcagttcttgtcttcaaagattggttctgagttcttgcaggtcagaaacgcattcagtcaactattcattcagatatgcctcctgttagaacaccagaattccacacgatgttcggagaaatccgtatccagtatcattcccggaataaattcatag

SEQ ID NO: 273696 - DNA, 3267 bp, Artificial Sequence
  derived and/or modified sequence
atgattgactctagcaagaagcagcagcaggggtttcccgaaattctgaccgccggagattttgagcctttgaaggaaaaggagtgtcttgagggctccaaccaaaaatcgttgaaggaggtcctccagctacgccttcaacagcggcgtacaagagagcagctcgtagaccagggaattatgccacctcttaagagcccggcagcttttcatgaacaaataaaaagtttggagagagcgcgtactgagaacttcctcaagcataaaattcggagccgcccagaccggtctgaactcgtgcgcatgcatatcttggaggagaccttcgccgaacctagtttacaagccacacagatgaaactcaagagagctagactggccgatgatctgaacgagaaaatcgcgcagcggcctgggccaatggagttagtcgagaaaaacattctccctgtagacagcagcgtcaaggaggctatcatcggagtcggaaaggaagactacccccacacgcagggtgactttagttttgacgaagatagcagcgacgcgcttagccccgatcagccagcttcccaggaaagtcaaggttccgcagccagtccaagcgagcctaaagtgagcgaaagcccatcccccgttactactaacactccagctcaattcgcgtcagtctcacctacggttccagaatttttaaaaactcctcccactgccgaccagcctccaccacgcccagccgctcccgttctcccaaccaatacagtttcaagcgcaaaacccggacctgccctggtgaaacagagccaccccaaaaatcctaacgacaaacaccgatcgaaaaaatgtaaggacccaaaacctcgggtgaaaaagttgaaatatcatcagtatatccctcctgatcagaagggcgagaagaatgagccacagatggacagtaactatgccaggctcttgcagcagcagcagctctttctacagctgcagatcctgagccagcaaaagcaacattacaattatcagactatcctcccggctccttttaaaccgctgaatgataaaaactctaacagtggtaattcagctctaaacaatgccaccccaaatacgcctagacaaaatacctctacgcccgtgcgaaaaccaggcccactgccttccagtcttgacgaccttaaggtctcggagctaaagacagagctcaagcttagaggtctcccggtgtctgggactaaaccggacctgatcgagcggctgaagccctaccaggaggtgaacagctccggtctggccgctggaggaattgtggccgttagctcttccgctatcgtgacgtccaacccagaagtcactgttgcgctgcccgtcaccactctgcacaataccgttacatccagtgtgtccactttgaaggccgaactgccacccactggcaccagtaacgcaaccagagtcgagaatgtccacagcccattacccatctctccgtccccaagcgaacagtccagtctttccaccgacgacaccaacatggccgacacttttacagagattatgacgatgatgtctccttcccaattcctttccagctcccccctcaggatgactaataatgaagatagcctgtctcccacgagttccaccttgagcaatcttgaactagacgccgctgaaaaagacaggaaactacaggagaaggaaaaacagatagaggagcttaagcgtaaactggagcaggagcagaaacttgtggaggtgctcaagatgcagctggaggtggaaaagagaggtcagcagcagcgaccactggaggctcagcccagcgctccaggacacagtgtcaaaagcgatcagaagcacggaagcctgggctcctcaatcaaagatgaggcctctctgcctgactgtagctcaagtcggcagccaattcccgtggcaagccacgctgtcggacagccagtgtccacaggtggccaaactctggtggctaaaaaggccgtggttatcaagcaggaagttccagtaggtcaggccgaacagcaaagtgtggttagtcagttctacgtgtccagtcagggccagccacctccagcagtggtggcccagccacaggcattgttgactacccagacagcccagctcctgctcccggtgagcattcaggggtcctctgtgacgtctgtgcagctgccagtcgggtccctgaagctgcagacctcgccccaggccggaatgcaaacacaaccacagatcgcgaccgccgcacaaattccgacagctgccctagccagcggcctggcgccaactgtgccgcagacccaggataccttcccgcagcacgttctgagccaaccacagcaggttagaaaagtgtttacaaacagtgcctccagtaacaccgtcctgccctatcagaggcatccggctcctgccgttcagcagccctttatcaataaagcgagcaattctgtgttacagtctcggaacgcgcctctgccatctcttcagaacggaccaaacacccctaacaagcctagtagccctcccccaccacagcagttcgtggtgcagcattcactctttgggtcccctgtcgctaagactaaggatcccccaagatacgaagaggcaataaagcaaaccaggtccacacaggcaccacttcccgaaatctctaacgcccattcccagcagatggatgacctgtttgacatcctcattaaaagtggcgagatctccctgcccattaaggaagagccctcacctatctctaagatgcggccagtaacagcctcgataaccactatgccagtgaacactgtggtcagtaggcctcccccacaggttcaaatggccccacccgtgagcttagagccaatgggctctctttctgcttctctcgagaaccagttggaagcattcctggacggaactttacccagcgcgaacgaaataccgcctctgcaatcatcctcagaagaccgcgagcctttctccctgatcgaggacctacaaaacgacctactcagccactctggcatgctcgatcattctcattcacccatggaaacttctgagacacagttcgctgcgggaactccttgtctctcccttgatctttctgattccaacttggacaatatggaatggctggacatcactatgccaaactcaagctcagggctcacacctctgtcgaccacggctccatccatgttctccgccgattttctggatccccaggacctcccgttgccgtgggattag

SEQ ID NO: 273697 - DNA, 1383 bp, Artificial Sequence
  derived and/or modified sequence
atgatagactccagcaagaagcagcagcaagggtttcccgaaattctgaccgccggagatttcgagcctctgaaggagaaagagtgcctcgagggatcaaatcagaagagcctcaaggaggtcctccagttgagactgcaacaacggaggacgcgggagcagctggtcgatcagggtattatgccccctttgaagtcacccgctgcattccatgaacagatcaaatcccttgagcgggcaaggactgagaattttctaaaacacaaaatccgctcgaggccagatcgctctgagctcgttcggatgcacatcttggaagagaccttcgccgagcccagtctccaggccacacagatgaagctgaaacgtgccaggctggccgatgatctgaacgagaagattgcgcagcggcctggtcccatggagcttgtggaaaagaatattctgccggtggattcttcagtcaaggaggctattatcggagtggggaaggaagactatccccacactcagggtgatttctcctttgatgaggattcctctgacgcactttcaccagatcagccagcctctcaggagagtcagggatccgccgcatcaccaagtgaacctaaggtgagtgaatctcccagccctgttaccacaaatacgcccgctcagttcgcctccgtcagcccaacagtgcctgagtttcttaagacacctcccaccgctgaccaacccccacctaggccagcagcgccagtgttgcccactaacacagtaagctccgctaagcctggaccggctctcgtgaaacagagccaccctaaaaaccctaatgacaagcaccggagcaagaaatgcaaggatcctaaaccacgagtcaagaagctcaagtaccaccaatacatcccaccagatcagaagggagaaaagaatgagccgcagatggactctaattatgctagattgcttcagcagcagcagcttttccttcagctccagatccttagtcagcagaaacagcactataactaccagacgatcctaccagctccattcaaatacggaggggcacatgccatattaaacgctggattcagtgtgtttatgcggaattacaagctcccaaaagttgaatgctgtcacttattcgtgctcagtaacgatttccacttctttgtaatcagagcgtaccatacggtgtccgaagtccatatggtacgagtggcatgcattccctttcagtttctaagctctaaaatagggtccgagttcctccaagttagaaacgctttttcgcagctttttatccagatttgtttactgctagaacatcagaacagcacccggtgctcagagaagagcgtgtcttctatcatccccggaatcaattcttag

SEQ ID NO: 273698 - DNA, 3267 bp, Artificial Sequence
  derived and/or modified sequence
atgatcgacagcagcaagaagcagcagcagggcttccccgagatcctgaccgccggcgacttcgagcccctgaaggagaaggagtgcctggagggcagcaaccagaagagcctgaaggaggtgctgcagctgagactgcagcagagaagaaccagagagcagctggtggaccagggcatcatgccccccctgaagagccccgccgccttccacgagcagatcaagagcctggagagagccagaaccgagaacttcctgaagcacaagatcagaagcagacccgacagaagcgagctggtgagaatgcacatcctggaggagaccttcgccgagcccagcctgcaggccacccagatgaagctgaagagagccagactggccgacgacctgaacgagaagatcgcccagagacccggccccatggagctggtggagaagaacatcctgcccgtggacagcagcgtgaaggaggccatcatcggcgtgggcaaggaggactacccccacacccagggcgacttcagcttcgacgaggacagcagcgacgccctgagccccgaccagcccgccagccaggagagccagggcagcgccgccagccccagcgagcccaaggtgagcgagagccccagccccgtgaccaccaacacccccgcccagttcgccagcgtgagccccaccgtgcccgagttcctgaagaccccccccaccgccgaccagcccccccccagacccgccgcccccgtgctgcccaccaacaccgtgagcagcgccaagcccggccccgccctggtgaagcagagccaccccaagaaccccaacgacaagcacagaagcaagaagtgcaaggaccccaagcccagagtgaagaagctgaagtaccaccagtacatcccccccgaccagaagggcgagaagaacgagccccagatggacagcaactacgccagactgctgcagcagcagcagctgttcctgcagctgcagatcctgagccagcagaagcagcactacaactaccagaccatcctgcccgcccccttcaagcccctgaacgacaagaacagcaacagcggcaacagcgccctgaacaacgccacccccaacacccccagacagaacaccagcacccccgtgagaaagcccggccccctgcccagcagcctggacgacctgaaggtgagcgagctgaagaccgagctgaagctgagaggcctgcccgtgagcggcaccaagcccgacctgatcgagagactgaagccctaccaggaggtgaacagcagcggcctggccgccggcggcatcgtggccgtgagcagcagcgccatcgtgaccagcaaccccgaggtgaccgtggccctgcccgtgaccaccctgcacaacaccgtgaccagcagcgtgagcaccctgaaggccgagctgccccccaccggcaccagcaacgccaccagagtggagaacgtgcacagccccctgcccatcagccccagccccagcgagcagagcagcctgagcaccgacgacaccaacatggccgacaccttcaccgagatcatgaccatgatgagccccagccagttcctgagcagcagccccctgagaatgaccaacaacgaggacagcctgagccccaccagcagcaccctgagcaacctggagctggacgccgccgagaaggacagaaagctgcaggagaaggagaagcagatcgaggagctgaagagaaagctggagcaggagcagaagctggtggaggtgctgaagatgcagctggaggtggagaagagaggccagcagcagagacccctggaggcccagcccagcgcccccggccacagcgtgaagagcgaccagaagcacggcagcctgggcagcagcatcaaggacgaggccagcctgcccgactgcagcagcagcagacagcccatccccgtggccagccacgccgtgggccagcccgtgagcaccggcggccagaccctggtggccaagaaggccgtggtgatcaagcaggaggtgcccgtgggccaggccgagcagcagagcgtggtgagccagttctacgtgagcagccagggccagcccccccccgccgtggtggcccagccccaggccctgctgaccacccagaccgcccagctgctgctgcccgtgagcatccagggcagcagcgtgaccagcgtgcagctgcccgtgggcagcctgaagctgcagaccagcccccaggccggcatgcagacccagccccagatcgccaccgccgcccagatccccaccgccgccctggccagcggcctggcccccaccgtgccccagacccaggacaccttcccccagcacgtgctgagccagccccagcaggtgagaaaggtgttcaccaacagcgccagcagcaacaccgtgctgccctaccagagacaccccgcccccgccgtgcagcagcccttcatcaacaaggccagcaacagcgtgctgcagagcagaaacgcccccctgcccagcctgcagaacggccccaacacccccaacaagcccagcagccccccccccccccagcagttcgtggtgcagcacagcctgttcggcagccccgtggccaagaccaaggacccccccagatacgaggaggccatcaagcagaccagaagcacccaggcccccctgcccgagatcagcaacgcccacagccagcagatggacgacctgttcgacatcctgatcaagagcggcgagatcagcctgcccatcaaggaggagcccagccccatcagcaagatgagacccgtgaccgccagcatcaccaccatgcccgtgaacaccgtggtgagcagaccccccccccaggtgcagatggccccccccgtgagcctggagcccatgggcagcctgagcgccagcctggagaaccagctggaggccttcctggacggcaccctgcccagcgccaacgagatcccccccctgcagagcagcagcgaggacagagagcccttcagcctgatcgaggacctgcagaacgacctgctgagccacagcggcatgctggaccacagccacagccccatggagaccagcgagacccagttcgccgccggcaccccctgcctgagcctggacctgagcgacagcaacctggacaacatggagtggctggacatcaccatgcccaacagcagcagcggcctgacccccctgagcaccaccgcccccagcatgttcagcgccgacttcctggacccccaggacctgcccctgccctgggactag

SEQ ID NO: 273699 - DNA, 1383 bp, Artificial Sequence
  derived and/or modified sequence
atgatcgacagcagcaagaagcagcagcagggcttccccgagatcctgaccgccggcgacttcgagcccctgaaggagaaggagtgcctggagggcagcaaccagaagagcctgaaggaggtgctgcagctgagactgcagcagagaagaaccagagagcagctggtggaccagggcatcatgccccccctgaagagccccgccgccttccacgagcagatcaagagcctggagagagccagaaccgagaacttcctgaagcacaagatcagaagcagacccgacagaagcgagctggtgagaatgcacatcctggaggagaccttcgccgagcccagcctgcaggccacccagatgaagctgaagagagccagactggccgacgacctgaacgagaagatcgcccagagacccggccccatggagctggtggagaagaacatcctgcccgtggacagcagcgtgaaggaggccatcatcggcgtgggcaaggaggactacccccacacccagggcgacttcagcttcgacgaggacagcagcgacgccctgagccccgaccagcccgccagccaggagagccagggcagcgccgccagccccagcgagcccaaggtgagcgagagccccagccccgtgaccaccaacacccccgcccagttcgccagcgtgagccccaccgtgcccgagttcctgaagaccccccccaccgccgaccagcccccccccagacccgccgcccccgtgctgcccaccaacaccgtgagcagcgccaagcccggccccgccctggtgaagcagagccaccccaagaaccccaacgacaagcacagaagcaagaagtgcaaggaccccaagcccagagtgaagaagctgaagtaccaccagtacatcccccccgaccagaagggcgagaagaacgagccccagatggacagcaactacgccagactgctgcagcagcagcagctgttcctgcagctgcagatcctgagccagcagaagcagcactacaactaccagaccatcctgcccgcccccttcaagtacggcggcgcccacgccatcctgaacgccggcttcagcgtgttcatgagaaactacaagctgcccaaggtggagtgctgccacctgttcgtgctgagcaacgacttccacttcttcgtgatcagagcctaccacaccgtgagcgaggtgcacatggtgagagtggcctgcatccccttccagttcctgagcagcaagatcggcagcgagttcctgcaggtgagaaacgccttcagccagctgttcatccagatctgcctgctgctggagcaccagaacagcaccagatgcagcgagaagagcgtgagcagcatcatccccggcatcaacagctag

SEQ ID NO: 273700 - DNA, 5379 bp, Artificial Sequence
  derived and/or modified sequence
atgtcctgtgtacactacaagtttagctccaagctcaattacgacacagtgaccttcgatggcttgcatatcagcctttgtgatctgaagaaacaaatcatgggccgggagaagctgaaggccgctgattgtgatctacaaatcacaaatgcgcagactaaagaggaatacaccgacgacaatgcactgatacccaagaattcaagcgtgatcgtgaggcggattcccattggcggggtcaaaagtacgtctaagacatacgtgatttcaagaactgagccagctatggcaaccactaaagcaatcgacgatagctcagcctcgatctcactggcacagcttactaagacagctaacctagccgaggcaaatgcctccgaggaggataagattaaggccatgatgtctcaatccggccacgagtatgaccctattaattacatgaagaagccactggggccgcctccccctagctacacatgctttcgttgtggcaagcctggtcactatattaagaattgtcccacgaatggggacaaaaatttcgaaagcggacctcgtatcaagaagagcactgggatacccaggtcatttatgatggaggtgaaggatcccaacatgaagggtgctatgctcacaaacacaggaaagtacgctattcctactatcgatgcagaagcctacgctattggcaaaaaggagaagcctccttttctgcccgaggagccaagcagctctagtgaagaagacgaccccatacctgatgaactgctatgtctaatctgcaaggatataatgactgacgccgtcgtcatcccctgctgtggaaacagctattgtgatgagtgcatccgcacagccctgctagagtccgacgagcacacatgcccaacctgccatcagaatgacgtgagtcccgacgccttaattgccaacaaatttttgcgccaggcagtgaataacttcaagaatgaaactggttacacgaaaaggttacggaagcagttgccccctcctccgccccctatccctccgccgcgcccacttatccagcgaaacctgcagccactgatgcgcagtccaatctcacgccaacaggatcccttgatgatcccggtgactagcagtagtacgcacccagccccatctataagttccctcacttccaaccaatcttcactggcgcccccagtttcaggtaatccttcatctgcacctgcgcctgtgcccgacatcaccgctacagtcagtatctccgtgcactcagagaagtctgatggccccttcagagactcagacaacaaaattctaccggcagctgcactggcctcagaacattctaaaggaacgtcctctattgccatcaccgctctgatggaggagaagggataccaagtgccagtactgggtactccatcccttttgggtcagagcctattgcatggccagctaattccaacgacagggcctgtacgaataaatactgctagacctggaggaggcaggccagggtgggaacattccaataaactgggctatttggtctctcctcctcagcagatacgccgcggtgaacggagctgctacaggagcattaatagaggccggcaccattcagaacggtcacagaggactcagggcccttctcttcccgccacacccgtcttcgttccagtcccccccccaccgctgtatcccccgcctcctcatactttaccacttccacctggcgtgccaccaccacagttctccccccaatttccaccaggccaaccacccccagctgggtactccgtgcctcccccagggtttccacccgctcctgctaacttaagcactccgtgggtgtcatccggagtgcagaccgcccactctaatacaattccaaccacacaggcccctcccctctccagagaagagttctacagagaacaacgcagactgaaagaagaagaaaagaagaagtccaagctggacgagtttactaatgatttcgctaaggagctcatggaatacaagaagatacaaaaggaacggaggcgctccttcagtagatccaagagcccctacagcggcagtagctactcccgcagctcatacacttactccaaatctaggagtgggtccacccgttcacggagttatagccggtcattcagtcgctcgcattctagatcctacagccggtctcctccttatccacgaaggggcagaggcaagagcagaaactacaggagtcgctctcgctcccacggttaccaccgttctcgctctagatccccaccttaccggcgttaccattcccgttcccggtctccccaagcctttcggggacaaagccccaataaaaggaacgtgcctcagggggagactgaacgggaatatttcaatcgatacagggaggtgcctcctccttacgacatgaaagcttattacggacgaagtgtcgattttcgggacccttttgagaaggagaggtatcgggaatgggaacgcaagtaccgggagtggtatgagaagtattataagggttatgccgctggagcccagccccgcccttcagccaaccgagaaaacttttcccccgaaagatttctgccactaaacattcgtaacagcccatttacccgtgggaggcgcgaggattacgtcggagggcagtcccatagatccagaaatatcgggagcaactatccagaaaaactttctgccagagatggacacaaccagaaagataacacgaagtccaaagaaaaagaaagcgagaatgcccccggagatggcaagggtaataagcacaagaagcaccgcaaacggcgtaagggcgaggagtctgagggatttctcaaccccgagctgctggagacctccagaaagtcacgggagcctactggtgtggaggaaaacaagactgactccttgtttgtcctaccatctcgggatgacgcaacccccgttcgcgatgagccaatggatgctgaatctattacctttaagagcgtctctgagaaagacaagcgagaaagggacaagccaaaggccaagggtgacaagaccaagcgtaaaaacgatgggtccgctgtctccaagaaagagaacatcgtgaagcccgccaagggaccccaagagaaggtggatggcgaacgcgaacgtagccccaggtccgagccaccaatcaaaaaagccaaggaggaaactccgaagaccgataacactaaatcaagctcttcttctcagaaggacgaaaagatcactgggacaccgcgtaaggcacactcaaagtccgccaaagagcatcaggagaccaaacccgtgaaagaggagaaagtgaaaaaagactactctaaggacgtgaagtctgaaaagctgacaacaaaggaggagaaagccaagaaaccaaacgagaagaacaagccgttggacaataaaggcgagaagagaaaacgcaaaacggaagagaagggagtggacaaagacttcgaaagcagtagcatgaagatcagtaagctggaggtgacagagatcgtaaagccctccccaaaacgcaagatggagccagatacagaaaaaatggacagaacccctgaaaaagacaagatctcattgtctgcacccgctaaaaaaatcaagcttaatagagagactggaaaaaaaattggcagcacggagaatatcagcaatacaaaagagccatcagaaaaactggaaagcacgagtagcaaggtgaagcaggagaaggtgaaaggtaaggttcgccgcaaagtaacagggactgagggcagtagttctaccttagtcgactacactagtacctcgtcaacgggggggtccccagtaaggaagtcagaagaaaagaccgataccaagcgaactgtgatcaagacaatggaggaatacaataacgacaatacagcacctgctgaagatgtgattattatgatccaggtgcctcaaagcaaatgggacaaggatgatttcgagagtgaagaggaggacgtcaagtctactcaaccgatctccagcgtcggtaagcccgccagcgtgatcaaaaacgtaagcacaaagccttcgaacatagttaagtacccagaaaaggaatcagagcccagcgagaagattcagaaattcaccaaggacgtgagccacgaaatcatccagcacgaggtgaaaagttccaagaattccgcctcttcggagaaaggtaaaaccaaagatagagactacagcgtcctggagaaggagaacccggaaaagagaaaaaacagcacacaacctgaaaaagagagtaatctcgaccggcttaacgaacaaggaaactttaagtctctgagtcagagctccaaagaagccagaaccagtgataagcatgacagtacacgggcctcctctaacaaagacttcactccaaacagggacaagaaaaccgattatgataccagagagtactcgtcatccaaaaggcgcgacgaaaagaatgagttgacccggcgcaaagattccccttcaagaaacaaggactcagctagtggccagaagaacaagccacgggaggaacgcgacctgcccaaaaaaggtaccggcgactctaagaagtctaactcatcaccatcaagggaccgaaagcctcacgaccataaagccacatacgacaccaagcggccaaacgaggaaaccaagtccgtggataaaaatccctgcaaggatagggagaagcacgtcctcgaagcacgtaacaacaaggagagtagcggcaacaagctcctctacattctgaatccccctgaaacgcaggttgagaaagagcaaatcactggccagattgacaagagcactgtcaaacctaaaccccagcttagtcacagctcccgtttgtcctcggacttgactcgagagacagacgaggcagcctttgaaccagattacaatgaatcagatagcgagagcaatgtcagtgtgaaggaggaggagtcctctgggaatatttctaaagaccttaaagataagattgtggagaaagctaaggaaagtctcgataccgccgcagtggttcaagtgggaatttcaagaaatcagtcacattcttctccctcagtgtcccctagccgctctcacagcccatcaggcagccagactaggtcacactcgtcttctgcatccagcgccgaatcacaggactcaaagaagaagaaaaagaagaaggagaaaaagaaacataagaagcataaaaagcacaaaaagcacaagaagcacgcagggactgaggttgaactggaaaagtctcagaaacataaacataaaaaaaagaagtctaagaagaataaggataaagaaaaggagaaggagaaagatgaccagaaagtgaaaagtgtcacggtgtag

SEQ ID NO: 273701 - DNA, 5277 bp, Artificial Sequence
  derived and/or modified sequence
atgagctgcgtccattacaagttcagctccaaacttaattacgataccgttactttcgatggtctgcatatatccctttgcgatctcaagaagcagatcatgggaagagagaagctcaaggcagccgattgcgatctgcagatcaccaatgcccagactaaagaagagtacacagatgacaatgctcttatccccaagaatagctctgtgatcgtgaggcgcattccaataggcggggtcaaatctacgtccaaaacttatgttatttcccgcacagaacctgcaatggctaccactaaggccattgacgattcatccgcctcaatctccctggcccagctgactaaaacggccaatttggccgaggccaacgccagtgaggaagacaagatcaaggccatgatgtcccagagtggacacgaatacgatccaatcaactacatgaaaaagcccctggggcctcccccgccttcctatacatgctttcgctgcgggaaacccggtcactacatcaaaaattgcccaactaatggcgataagaactttgaatcaggcccaaggatcaaaaagtctaccggcatacccagatccttcatgatggaggtgaaggatcccaacatgaaaggtgcgatgcttactaacaccggcaagtacgccattcccacaatcgatgccgaggcttacgcaatagggaagaaagaaaaacctcctttccttcccgaagagccgtcctcaagctccgaggaagacgatcccataccagatgagctgctttgtttaatttgtaaggatataatgaccgacgctgtagtgataccctgttgcggcaattcctactgcgacgaatgcatccgcactgctttactggaatctgacgaacacacgtgtccaacgtgccaccagaatgatgtgagccctgacgcgctcatcgctaacaaatttctgagacaggcagttaacaattttaaaaatgagacaggatataccaaaaggctccggaagcagctgcctccaccacctcccccgatcccgccccctagacccctgatccagagaaatctgcagcccctgatgcggagtccaataagtcggcagcaggacccacttatgattcctgtaacctcttcttctacccatcccgctccatcaataagcagccttactagcaatcagtcgtcattggcaccccctgtctccggtaatccaagctccgctccggcaccagttcctgacataacagccaccgtatcaatcagcgtgcatagcgagaaaagcgacggccccttccgagactctgataacaaaatcctgcccgccgccgccctggccagcgagcattctaagggcacatccagtatagccataaccgcactcatggaagaaaaagggtaccaggtcccggttctgggtaccccgtcactcttgggccagtcattactacacggacagctgatccctactaccgggccagtccgcattaataccgcccgtccaggagggggtcgaccagggtgggagcattccaataaactagggtacctggtgtctcccccacagcagataagaaggggagagcggagctgctaccggagcattaaccgtggccgtcaccactcagagagaagccagcggacccagggcccatctctgcctgctacccccgttttcgtgccagttcctccgccacctctgtaccctcctcctcctcatacccttccccttccacctggggtacctcctccacagttcagtccacagttcccccccggccaaccaccacctgccggctactccgttcccccccctgggtttccccctgccccagcaaacctaagcactccatgggtgtcatctggcgttcagaccgcccactctaatacaatacccaccacacaggctccaccactatctagggaggaattttatcgtgagcaacgtaggctcaaggaggaaagcaagtccccatactcgggaagtagctactcacggtctagttacacttacagcaagtctagatcaggaagcacaagatcacggtcctattcacggtcattctccaggagtcatagccgaagctactcccggtcacctccttacccccggagggggcgcgggaagtctcggaattatagatccagaagcaggtctcacgggtatcacagaagtagaagtcgatcccctccatacagaaggtatcacagccgtagccggagcccacaagccttccgcggccaaagccccaacaagcgcaatgtgccacagggcgaaaccgagcgagagtatttcaatagataccgcgaagtgcctcccccttatgacatgaaggcttattatggtcgaagcgtcgactttagggacccattcgaaaaggagcggtacagagagtgggagaggaaatacagagagtggtatgagaaatactataaaggctatgcagccggggctcagccaaggccatcagccaatagggaaaacttctccccggagagattcttgccactgaacatcaggaactccccttttacaaggggacgtagagaagactacgtgggaggccagtctcatcgctctcggaacattggatcgaactatccagaaaagcttagtgccagagacggccacaaccaaaaagacaacactaagagcaaggaaaaggagtccgagaatgcccccggggacggtaaagggaacaagcataagaagcatcgaaagaggaggaagggggaggagtccgaaggatttctgaatcctgagctgctggaaacttctcgcaagtcacgggagccaaccggagtggaagaaaataagacagatagtcttttcgtgttgccaagtagagacgacgctacgccggtgcgcgacgaaccaatggatgccgaatctataacattcaaaagcgtatccgagaaggataagcgagaacgcgacaagcccaaggccaaaggagataaaactaagcgcaagaatgacgggagtgccgtcagtaaaaaggaaaacattgtcaaacccgctaaagggccacaagagaaggtggacggcgagcgggaaaggtcccccagaagcgaaccaccaattaagaaagccaaggaagagacaccaaagactgataacaccaaaagtagcagtagcagtcaaaaggacgaaaagatcacgggtacccctcgcaaagctcattctaagtctgctaaggagcaccaggagactaaaccggttaaggaggaaaaagttaaaaaagactactctaaagacgtcaagtccgagaaactgaccacgaaggaggagaaggcaaaaaaaccaaacgagaagaacaagcccctcgataacaagggcgagaagcgcaagcgcaaaactgaggaaaaaggcgtagataaagactttgagagctcaagcatgaaaatctccaagcttgaagtgactgaaatcgtgaaaccgtccccaaaaaggaagatggagccagatactgagaaaatggatagaacccctgagaaagataagatcagcctgagcgccccggcgaaaaaaattaagctgaatcgcgagacaggcaagaagatcgggagtactgaaaacatatctaacacaaaagagccttcggaaaaactagagtcaaccagctccaaagtaaaacaagaaaaagtgaaaggtaaggtgaggcgcaaagttaccggcaccgaaggttccagtagcaccttggtggactacacctctacaagctctacaggaggaagccccgtgcggaagtctgaggaaaaaacagacaccaagcgcacagtgattaagaccatggaagaatacaataatgacaatacggcccccgccgaggacgtaatcattatgatccaggtgccacagagtaagtgggacaaggacgatttcgagtccgaggaagaggatgtgaaaagcacacaaccaataagctcagtgggtaaaccagcgagcgtcattaagaacgtcagcactaagccttccaacatcgtcaaataccccgagaaggaaagcgagcccagcgagaagatacagaagtttactaaggatgtatcacacgagatcatacaacacgaggtaaagtcttcaaaaaacagcgcttcctcagagaagggcaagacgaaggacagggactactcagtgctcgagaaagaaaatcccgagaaaaggaagaattccacgcagcccgagaaggagtcaaacctggaccgattaaacgaacagggtaactttaagagcctctcccagagttctaaagaagctagaacatccgataagcatgatagtacccgggctagctccaacaaggactttacgcctaatcgagataaaaagactgattacgacactcgagaatactcttctagcaaacgccgcgatgaaaagaatgagctgacacgacgaaaggactcgcccagtaggaacaaggatagtgcctctgggcagaaaaacaaaccaagagaggagagagatctccctaagaaaggcacaggcgattctaagaaatctaactcctcgccgtcacgggaccggaagccccacgatcataaggctacatacgataccaaacgcccaaatgaggagaccaagtccgtagacaaaaacccatgtaaagatagggagaaacacgtgctggaggccagaaataacaaggagtcctcaggcaataagctgctttacatcctgaatccccctgaaacccaggttgaaaaggagcaaatcaccggtcagatcgacaaatccacagtgaaacccaagccccagctttctcattctagcagacttagtagtgacctcactagagaaaccgatgaggcggcatttgagcctgactacaatgagtctgacagcgaaagcaacgtctcagtgaaagaggaagaatcttcgggtaacatttctaaagacctcaaggataaaatcgtcgaaaaggccaaagaatccctggacaccgccgccgtggtgcaggtgggtatctccagaaatcaatcgcatagttccccatcagtgagcccctcaaggtcacattccccaagcgggtcacaaacaagaagtcacagctccagcgcgtcgagcgccgagtcacaggacagtaagaagaaaaagaaaaagaaggagaaaaagaaacacaaaaaacataaaaagcataaaaagcataagaaacacgccgggaccgaggtcgagcttgagaaatcacagaaacataagcataagaagaaaaaatctaagaagaacaaggacaaggagaaggagaaggaaaaggatgaccagaaagtaaaatccgttaccgtgtag

SEQ ID NO: 273702 - DNA, 5379 bp, Artificial Sequence
  derived and/or modified sequence
atgagctgtgtgcactacaagttcagcagcaagctgaactatgacacagtgacctttgatggcctgcacatcagcctgtgtgacctgaagaagcagatcatgggccgggagaagctgaaggctgctgactgtgacctgcagatcaccaatgcccagaccaaggaggagtacacagatgacaatgccctgatccccaagaacagctctgtgattgtgcggcgcatccccatcggcggcgtgaagagcaccagcaagacctacgtgatcagcaggacagagcccgccatggccaccaccaaggccattgatgacagcagcgccagcatcagcctggcccagctgaccaagacagccaacctggccgaggccaatgccagcgaggaggacaagatcaaggccatgatgagccagagcggccacgagtatgaccccatcaactacatgaagaagcccctgggccccccaccacccagctacacctgcttccgctgtgggaagccaggccactacatcaagaactgccccaccaatggagacaagaactttgagagcggcccccgcatcaagaagagcacaggcatccccaggagcttcatgatggaggtgaaggaccccaacatgaagggggccatgctgaccaacacaggcaagtatgccatccccaccattgatgctgaggcctatgccatcggcaagaaggagaagccacccttcctgcctgaggagcccagcagcagcagtgaagaagatgaccccatcccagatgagctgctgtgcctgatctgcaaggacatcatgacagatgctgtggtgatcccctgctgcggcaacagctactgtgatgagtgcatcagaacagccctgctggagagtgatgagcacacctgccccacctgccaccagaatgatgtgtccccagatgccctgattgccaacaagttcctgcggcaggccgtgaacaacttcaagaatgagaccggctacaccaagaggctgaggaagcagctgcccccacctcctccacccatccccccaccccggcccctcatccagaggaacctgcagcccctgatgaggagccccatcagccggcagcaggaccccctgatgatccctgtgaccagcagcagcacccacccagcccccagcatcagcagcctgaccagcaaccagagcagcctggcccctcctgtgtctggcaaccccagcagcgccccagcccctgtgcctgacatcacagccaccgtgtccatctctgtgcacagcgagaagagtgatggccccttccgggacagcgacaacaagatcctgcctgctgctgccctggccagcgagcacagcaagggcaccagcagcatcgccatcacagccctgatggaggagaagggctaccaggtgcctgtgctgggcacccccagcctgctgggccagagcctgctgcacggccagctgatccccaccaccggccctgtgcgcatcaacacagcccggcctgggggcggccggcccggctgggagcacagcaacaagctgggctacctggtgtccccaccccagcagatccggcggggggagaggagctgctaccgcagcatcaacagaggccgccaccacagcgagaggagccagaggacccagggccccagcctgcctgccacccctgtgtttgtgcctgtgcccccaccacccctgtacccacctccaccccacaccctgcccctgcccccaggagtgcccccaccccagttcagcccccagttccccccaggccagcccccacctgctggctacagcgtgcccccacctggcttccccccagccccagccaacctgagcaccccctgggtgagcagcggcgtgcagacagcccacagcaacaccatccccaccacccaggccccacccctgagccgggaggagttctaccgggagcagaggcggctgaaggaggaggagaagaagaagagcaagctggatgagttcaccaatgactttgccaaggagctgatggagtacaagaagatccagaaggagcggcggcgctccttcagccgcagcaagagcccctacagcggcagcagctacagccgcagcagctacacctacagcaagagccgcagcggcagcaccaggagccgcagctacagccgctccttcagccgcagccacagccgcagctacagccgcagccccccctacccccggcggggccggggcaagagcaggaactaccgcagccgcagccgcagccacggctaccacaggagccgcagccgcagccccccctaccgccgctaccacagccgcagccgcagcccccaggccttccggggccagagccccaacaagagaaatgtgccccagggcgagacagagcgggagtacttcaaccgctaccgggaggtgcccccaccctatgacatgaaggcctactacggccgctctgtggacttccgggacccctttgagaaggagcgctaccgggagtgggagaggaagtaccgggagtggtatgagaagtactacaagggctacgccgccggggcccagccccggcccagcgccaaccgggagaacttcagccctgagcgcttcctgcccctgaacatccggaacagccccttcacccggggcagaagagaagattatgtgggcggccagagccacaggagcaggaacatcggcagcaactacccagagaagctgagcgccagagatggccacaaccagaaggacaacaccaagagcaaggagaaggagagtgaaaatgcccctggagatggaaaaggaaacaagcacaagaagcacaggaagagaagaaaaggagaggagagcgagggcttcctgaaccctgagctgctggagaccagcaggaagagccgggagcccaccggggtggaggagaacaagacagacagcctgtttgtgctgcccagcagagatgatgccacccctgtgagagatgagcccatggatgctgagagcatcaccttcaagtctgtgtctgagaaggacaagcgggagcgggacaagcccaaggccaagggggacaagaccaagaggaagaatgatggcagcgctgtgtccaagaaggagaacatcgtgaagccagccaagggcccccaggagaaggtggatggagagcgggagaggagccccaggtctgagccccccatcaagaaggccaaggaggagacccccaagacagacaacaccaagagcagcagcagcagccagaaggatgagaagatcaccggcacccccaggaaggcccacagcaagagcgccaaggagcaccaggagaccaagcctgtgaaggaggagaaggtgaagaaggactacagcaaggatgtgaagtctgagaagctgaccaccaaggaggagaaggccaagaagcccaatgagaagaacaagcccctggacaacaagggggagaagaggaagaggaagacagaggagaagggcgtggacaaggactttgagagcagctccatgaagatcagcaagctggaggtgacagaaattgtgaagcccagccccaagaggaagatggagccagacacagagaagatggacaggaccccagagaaggacaagatcagcctgagcgccccagccaagaagatcaagctgaaccgggagaccgggaagaagattggcagcacagagaacatcagcaacaccaaggagcccagcgagaagctggagagcaccagcagcaaggtgaagcaggagaaggtgaagggcaaggtgcggaggaaggtgactggaacagagggcagcagcagcaccctggtggactacaccagcaccagcagcactggaggcagccctgtgaggaagtctgaggagaagacagacaccaagaggacagtcatcaagaccatggaggagtacaacaatgacaacacagccccagcagaagatgtgatcatcatgatccaggtgccccagagcaagtgggacaaggatgactttgagagcgaggaggaggatgtgaagagcacccagcccatcagctctgtgggcaagccagccagcgtcatcaagaatgtgtccaccaagcccagcaacatcgtgaagtacccagagaaggagagcgagcccagcgagaagatccagaagttcaccaaggatgtgtcccatgagatcatccagcacgaggtgaagagcagcaagaacagcgccagcagcgagaagggcaagaccaaggaccgggactacagcgtgctggagaaggagaaccctgagaagaggaagaacagcacccagcctgagaaggagagcaacctggaccggctgaatgagcagggcaacttcaagagcctgagccagagcagcaaggaggcccggaccagtgacaagcatgacagcacccgggccagcagcaacaaggacttcacccccaacagagacaagaagacagattatgacacccgggagtacagcagcagcaagagaagagatgagaagaatgagctgaccaggaggaaggacagccccagcaggaacaaggacagcgccagcggccagaagaacaagccccgggaggagcgggacctgcccaagaagggcaccggggacagcaagaagagcaacagcagccccagccgggacaggaagccccatgaccacaaggccacctatgacaccaagaggcccaatgaggagaccaagtctgtggacaagaacccctgcaaggaccgggagaagcacgtgctggaggccaggaacaacaaggagagcagcggcaacaagctgctgtacatcctgaaccccccagagacccaggtggagaaggagcagatcaccggccagattgacaagagcacagtgaagcccaagccccagctgagccacagcagccggctgagcagtgacctgacccgggagacagatgaagctgcctttgagccagactacaatgaaagtgacagcgagagcaatgtgtctgtgaaggaggaggagagcagcggcaacatcagcaaggacctgaaggacaagatcgtggagaaggccaaggagagcctggacacagctgctgtggtgcaggtgggcatcagcaggaaccagagccacagcagccccagcgtgagccccagccgcagccacagccccagcggcagccagaccaggagccacagcagcagcgccagcagcgctgagagccaggacagcaagaagaagaagaagaagaaggagaagaagaagcacaagaagcacaagaagcacaagaagcacaagaagcatgctggaacagaggtggagctggagaagagccagaagcacaagcacaagaagaagaagagcaagaagaacaaggacaaggagaaggagaaggagaaggatgaccagaaggtgaagtctgtgacagtgtag

SEQ ID NO: 273703 - DNA, 5277 bp, Artificial Sequence
  derived and/or modified sequence
atgagctgtgtgcactacaagttcagcagcaagctgaactatgacacagtgacctttgatggcctgcacatcagcctgtgtgacctgaagaagcagatcatgggccgggagaagctgaaggctgctgactgtgacctgcagatcaccaatgcccagaccaaggaggagtacacagatgacaatgccctgatccccaagaacagctctgtgattgtgcggcgcatccccatcggcggcgtgaagagcaccagcaagacctacgtgatcagcaggacagagcccgccatggccaccaccaaggccattgatgacagcagcgccagcatcagcctggcccagctgaccaagacagccaacctggccgaggccaatgccagcgaggaggacaagatcaaggccatgatgagccagagcggccacgagtatgaccccatcaactacatgaagaagcccctgggccccccaccacccagctacacctgcttccgctgtgggaagccaggccactacatcaagaactgccccaccaatggagacaagaactttgagagcggcccccgcatcaagaagagcacaggcatccccaggagcttcatgatggaggtgaaggaccccaacatgaagggggccatgctgaccaacacaggcaagtatgccatccccaccattgatgctgaggcctatgccatcggcaagaaggagaagccacccttcctgcctgaggagcccagcagcagcagtgaagaagatgaccccatcccagatgagctgctgtgcctgatctgcaaggacatcatgacagatgctgtggtgatcccctgctgcggcaacagctactgtgatgagtgcatcagaacagccctgctggagagtgatgagcacacctgccccacctgccaccagaatgatgtgtccccagatgccctgattgccaacaagttcctgcggcaggccgtgaacaacttcaagaatgagaccggctacaccaagaggctgaggaagcagctgcccccacctcctccacccatccccccaccccggcccctcatccagaggaacctgcagcccctgatgaggagccccatcagccggcagcaggaccccctgatgatccctgtgaccagcagcagcacccacccagcccccagcatcagcagcctgaccagcaaccagagcagcctggcccctcctgtgtctggcaaccccagcagcgccccagcccctgtgcctgacatcacagccaccgtgtccatctctgtgcacagcgagaagagtgatggccccttccgggacagcgacaacaagatcctgcctgctgctgccctggccagcgagcacagcaagggcaccagcagcatcgccatcacagccctgatggaggagaagggctaccaggtgcctgtgctgggcacccccagcctgctgggccagagcctgctgcacggccagctgatccccaccaccggccctgtgcgcatcaacacagcccggcctgggggcggccggcccggctgggagcacagcaacaagctgggctacctggtgtccccaccccagcagatccggcggggggagaggagctgctaccgcagcatcaacagaggccgccaccacagcgagaggagccagaggacccagggccccagcctgcctgccacccctgtgtttgtgcctgtgcccccaccacccctgtacccacctccaccccacaccctgcccctgcccccaggagtgcccccaccccagttcagcccccagttccccccaggccagcccccacctgctggctacagcgtgcccccacctggcttccccccagccccagccaacctgagcaccccctgggtgagcagcggcgtgcagacagcccacagcaacaccatccccaccacccaggccccacccctgagccgggaggagttctaccgggagcagaggcggctgaaggaggagagcaagagcccctacagcggcagcagctacagccgcagcagctacacctacagcaagagccgcagcggcagcaccaggagccgcagctacagccgctccttcagccgcagccacagccgcagctacagccgcagccccccctacccccggcggggccggggcaagagcaggaactaccgcagccgcagccgcagccacggctaccacaggagccgcagccgcagccccccctaccgccgctaccacagccgcagccgcagcccccaggccttccggggccagagccccaacaagagaaatgtgccccagggcgagacagagcgggagtacttcaaccgctaccgggaggtgcccccaccctatgacatgaaggcctactacggccgctctgtggacttccgggacccctttgagaaggagcgctaccgggagtgggagaggaagtaccgggagtggtatgagaagtactacaagggctacgccgccggggcccagccccggcccagcgccaaccgggagaacttcagccctgagcgcttcctgcccctgaacatccggaacagccccttcacccggggcagaagagaagattatgtgggcggccagagccacaggagcaggaacatcggcagcaactacccagagaagctgagcgccagagatggccacaaccagaaggacaacaccaagagcaaggagaaggagagtgaaaatgcccctggagatggaaaaggaaacaagcacaagaagcacaggaagagaagaaaaggagaggagagcgagggcttcctgaaccctgagctgctggagaccagcaggaagagccgggagcccaccggggtggaggagaacaagacagacagcctgtttgtgctgcccagcagagatgatgccacccctgtgagagatgagcccatggatgctgagagcatcaccttcaagtctgtgtctgagaaggacaagcgggagcgggacaagcccaaggccaagggggacaagaccaagaggaagaatgatggcagcgctgtgtccaagaaggagaacatcgtgaagccagccaagggcccccaggagaaggtggatggagagcgggagaggagccccaggtctgagccccccatcaagaaggccaaggaggagacccccaagacagacaacaccaagagcagcagcagcagccagaaggatgagaagatcaccggcacccccaggaaggcccacagcaagagcgccaaggagcaccaggagaccaagcctgtgaaggaggagaaggtgaagaaggactacagcaaggatgtgaagtctgagaagctgaccaccaaggaggagaaggccaagaagcccaatgagaagaacaagcccctggacaacaagggggagaagaggaagaggaagacagaggagaagggcgtggacaaggactttgagagcagctccatgaagatcagcaagctggaggtgacagaaattgtgaagcccagccccaagaggaagatggagccagacacagagaagatggacaggaccccagagaaggacaagatcagcctgagcgccccagccaagaagatcaagctgaaccgggagaccgggaagaagattggcagcacagagaacatcagcaacaccaaggagcccagcgagaagctggagagcaccagcagcaaggtgaagcaggagaaggtgaagggcaaggtgcggaggaaggtgactggaacagagggcagcagcagcaccctggtggactacaccagcaccagcagcactggaggcagccctgtgaggaagtctgaggagaagacagacaccaagaggacagtcatcaagaccatggaggagtacaacaatgacaacacagccccagcagaagatgtgatcatcatgatccaggtgccccagagcaagtgggacaaggatgactttgagagcgaggaggaggatgtgaagagcacccagcccatcagctctgtgggcaagccagccagcgtcatcaagaatgtgtccaccaagcccagcaacatcgtgaagtacccagagaaggagagcgagcccagcgagaagatccagaagttcaccaaggatgtgtcccatgagatcatccagcacgaggtgaagagcagcaagaacagcgccagcagcgagaagggcaagaccaaggaccgggactacagcgtgctggagaaggagaaccctgagaagaggaagaacagcacccagcctgagaaggagagcaacctggaccggctgaatgagcagggcaacttcaagagcctgagccagagcagcaaggaggcccggaccagtgacaagcatgacagcacccgggccagcagcaacaaggacttcacccccaacagagacaagaagacagattatgacacccgggagtacagcagcagcaagagaagagatgagaagaatgagctgaccaggaggaaggacagccccagcaggaacaaggacagcgccagcggccagaagaacaagccccgggaggagcgggacctgcccaagaagggcaccggggacagcaagaagagcaacagcagccccagccgggacaggaagccccatgaccacaaggccacctatgacaccaagaggcccaatgaggagaccaagtctgtggacaagaacccctgcaaggaccgggagaagcacgtgctggaggccaggaacaacaaggagagcagcggcaacaagctgctgtacatcctgaaccccccagagacccaggtggagaaggagcagatcaccggccagattgacaagagcacagtgaagcccaagccccagctgagccacagcagccggctgagcagtgacctgacccgggagacagatgaagctgcctttgagccagactacaatgaaagtgacagcgagagcaatgtgtctgtgaaggaggaggagagcagcggcaacatcagcaaggacctgaaggacaagatcgtggagaaggccaaggagagcctggacacagctgctgtggtgcaggtgggcatcagcaggaaccagagccacagcagccccagcgtgagccccagccgcagccacagccccagcggcagccagaccaggagccacagcagcagcgccagcagcgctgagagccaggacagcaagaagaagaagaagaagaaggagaagaagaagcacaagaagcacaagaagcacaagaagcacaagaagcatgctggaacagaggtggagctggagaagagccagaagcacaagcacaagaagaagaagagcaagaagaacaaggacaaggagaaggagaaggagaaggatgaccagaaggtgaagtctgtgacagtgtag

SEQ ID NO: 273704 - DNA, 5379 bp, Artificial Sequence
  derived and/or modified sequence
atgagctgcgtgcactacaagttcagcagcaagctgaactacgacactgtgacctttgacgggctacatatctctttatgtgacctgaaaaaacagatcatggggcgcgagaagttaaaggctgcagactgtgacctccaaatcacaaacgcccagaccaaagaagaatatactgatgacaatgctctgattcctaagaactccagcgttattgtgcgacgcatcccaattgggggagttaaaagtacctccaaaacttacgtgattagccggaccgagccagccatggcgactactaaggccatcgacgactctagcgcttctatctccctcgcccagttgacgaagacagcgaacctcgccgaggcgaacgcctccgaagaggataagataaaggcaatgatgtcacagagcggccatgaatatgacccaatcaactacatgaaaaagccacttggtcctccccccccttcatatacgtgtttcagatgtggcaagcctggacactacatcaagaactgtcccactaatggcgacaagaatttcgaatctggtccccggatcaaaaagtcaacgggcatcccacggagttttatgatggaggtgaaggaccccaacatgaagggcgctatgttgactaatacgggaaagtacgctattcctacaatagatgctgaagcctacgcgattggcaagaaagaaaagccaccatttctccccgaggagccgagtagtagttcagaggaggacgaccccattccagacgaactgttatgtctcatctgcaaggatataatgaccgacgcagtggtgattccttgttgcggtaacagctactgcgacgaatgcatcagaacggccctgcttgagagcgacgaacacacttgccccacctgccaccaaaacgatgtctctcccgatgcgctaatcgcaaacaaattcctccgtcaggcagttaataacttcaagaacgagacaggatataccaagcggctccgtaaacagctgccgccacctcctcctccaatccctccgcctcgtcccttgatccaaagaaacctccaacctctgatgaggtccccgatttctcgccagcaggatcctcttatgatacctgtcacttcttcttcgactcaccccgcaccgtccatttcttcccttacttcaaatcagagcagcctggcccccccagtctccgggaacccatcttccgcccctgcccctgtgcccgacatcacggcaaccgtcagtatcagcgtacactcagagaaaagcgacgggccgtttcgagattccgacaataagatcctgcccgctgccgcgctggcatctgaacacagcaagggcacatctagtatcgccattactgccctgatggaagaaaagggatatcaggttcccgtccttggcacaccgagcctcctggggcagagtctgctgcacggccagttaatacccacaactgggcccgtgagaattaatactgcgcggcccggaggaggacgacccggatgggaacattcaaacaaactgggatatcttgtgtccccacctcagcagatcaggaggggggagcggagttgttataggagcattaatcgcgggcgccaccactccgagcgatcgcagcgtactcaaggcccctccctccctgctacccctgtctttgtacctgtcccaccgccacccctgtatcctcctccaccccatacccttccactcccgccaggtgtccctccccctcaattctctcctcagtttccaccaggacagccgccgccagccggatacagcgttccaccaccaggctttcctccggcaccggccaacctgtccacaccatgggtctcctccggcgttcaaacagcccacagtaatactattcctaccacgcaggctcctcccctcagccgcgaggaattttatcgggaacagcgccggttaaaggaagaggaaaagaaaaaatcaaagctggacgagttcacaaacgacttcgccaaggaactcatggaatacaagaaaatccagaaggagcggcgtcggtccttctcccgcagtaaatccccatactctggatctagttatagtcgctcatcttacacttattcaaaaagccggagcgggagtacacgcagtcgttcctattcccgctcattttcaagaagccattcaaggagttacagccggtctcctccctaccctaggcgtggcaggggcaagagtagaaactatcgctcacgcagcaggtcccatggataccaccgaagccgtagccggagcccaccgtaccggagataccattcaaggtcacgctctccccaggcgtttcgcggacaatctcccaacaaaagaaatgtccctcagggagagacagaaagagagtacttcaacaggtacagggaggtcccgccaccgtatgacatgaaggcatattatgggcgatccgtggacttcagggatccgttcgagaaggaaaggtatagggaatgggagagaaagtacagagagtggtacgaaaagtactataagggctacgcagccggcgctcagccacgaccgtcggctaaccgggagaatttctcaccagagagatttttgcctctcaacatcaggaactcaccttttacgcgcggacgccgcgaagattacgtgggcggccaatcccaccgctcacgcaatatcgggagtaattatccagagaaactgagcgcaagggacggccataatcaaaaggataatactaaatcaaaggagaaggaaagcgagaacgctccgggggacggcaaaggcaataaacacaagaagcacagaaaacgcagaaagggcgaggaatcagagggctttctgaaccccgagctgctcgagacttcacgcaagagtcgcgagccaactggcgtcgaggaaaacaaaactgattcattatttgtgctgcccagtcgcgatgacgctacaccagtacgcgacgagccgatggatgccgagtccattactttcaagtcagtttctgagaaggacaaacgggaacgtgacaaaccaaaggccaaaggagacaagaccaagaggaaaaacgacggatctgcagtgagcaaaaaagagaacattgtaaaacctgccaaggggcctcaggagaaggtggatggggagcgggagcgcagtccgcggtctgaacccccgattaagaaggcgaaagaggagacacctaagaccgacaacacaaaatcgagttcaagctcacagaaggatgagaaaatcacaggcaccccgcgaaaggcccattcaaagtctgcaaaggagcatcaggaaactaaacccgtcaaggaagagaaggtcaaaaaggattacagcaaggacgtgaagagcgagaagcttacaaccaaagaggaaaaggcaaaaaagcctaacgaaaaaaacaagcccctcgataataagggagagaaacggaaacggaagacagaggaaaagggagtcgacaaggatttcgaaagcagttctatgaagatcagcaaacttgaggtgactgagatcgtgaagccttcacccaagcgcaaaatggagccagatactgaaaagatggatcgaacccctgaaaaagataaaatcagcttgagcgctccggcgaagaagattaagcttaacagagaaactggcaaaaagattggatccacagagaatatttccaatacaaaagagcctagcgaaaagctcgaaagcaccagctcaaaagtgaaacaggaaaaagtgaaaggaaaagtgcgcagaaaggttacaggaacagaggggagcagtagtactctggtggattatacatccacctcttctaccggcggcagccctgtgagaaagagtgaagagaagacagatactaagcggaccgtgatcaagactatggaggaatataacaacgataataccgctccggctgaagacgtgatcatcatgattcaggtgccacaatcaaagtgggataaggatgatttcgaatctgaagaggaggacgtgaagagtactcagcctatctcctctgtaggcaagcccgcgtccgtgatcaaaaatgtcagcaccaagccgtctaatatcgtgaagtaccccgagaaagaatctgaaccatccgagaagatccagaaattcactaaggacgtgagtcacgaaattattcaacacgaggtgaaatcctccaaaaacagtgcctcatctgagaaagggaagacaaaagatcgagattactccgttctcgagaaagagaaccctgaaaagagaaagaattcaacccagccagaaaaggaatcgaaccttgaccgcttgaatgagcagggaaattttaagtctctgtcacagtcttcgaaagaggctcggacgtcagacaagcacgacagcacgcgagcgagttctaataaggatttcacccctaatcgggataaaaagaccgattatgacacccgggaatactcctcaagcaagagacgagatgaaaagaacgaacttactaggaggaaggatagtccatccagaaataaggactccgccagtggtcagaagaataagccaagggaggagagggatctgcccaaaaagggaactggggattccaaaaagtccaattcaagtccatccagagaccggaaaccacatgatcataaagccacatatgatacaaagagacccaacgaggagaccaaatctgtggacaaaaacccgtgcaaagatcgcgaaaagcacgtgttggaagcaagaaataacaaggagagcagcgggaataagttactgtatatactcaatcctcccgaaacccaggtcgagaaggaacagattaccggacaaattgataaatctacagttaaaccaaaaccgcagctgagtcactcatccagactctcaagcgatctgacgcgagagactgacgaagctgccttcgagcccgattataacgaaagtgacagcgaatcaaatgtgtctgtgaaggaggaggagagctctggaaatatttcaaaggacttgaaagacaagatcgtcgaaaaagcaaaggagtcattagacactgccgcagtggttcaggtgggcatcagcagaaatcagagccatagttcaccatccgtatccccaagcaggtcccattctccttctggttcccagacaagatctcattcctcatcagcttccagcgccgaatcacaagattccaaaaagaaaaaaaagaaaaaggaaaaaaaaaagcataagaagcataagaaacataagaagcataaaaagcatgccgggacagaagtcgaattggaaaagtcgcaaaaacataagcacaagaagaagaaaagcaagaagaacaaagataaagagaaggagaaagaaaaagacgatcaaaaggtgaagagcgtgacagtttag

SEQ ID NO: 273705 - DNA, 5277 bp, Artificial Sequence
  derived and/or modified sequence
atgagctgcgtgcactacaagttcagcagcaagctgaactacgacactgtgacttttgatgggctgcatatctccctgtgcgatcttaaaaagcagatcatgggtcgagaaaagctcaaagccgcggactgtgatctgcagattacaaacgcgcagaccaaggaagagtataccgatgataatgctcttatacccaaaaattcgagcgtgattgtccgcaggattcctatcggtggcgttaagtcaacaagcaagacctacgtgatttctagaacagagccagcaatggccaccaccaaagcaatcgacgactcttccgcgagcatttcgctagctcagctcactaagaccgctaacctggcagaagccaacgcctctgaagaagataagataaaggccatgatgtctcagagcggacacgagtacgatcctattaactatatgaaaaaacccttgggtcctccacctccgtcctatacctgtttccggtgtgggaagcctggacattacatcaagaattgtcctaccaacggcgataaaaattttgagagtggaccacgcataaaaaagtccacaggaatcccccggagcttcatgatggaggtgaaggatccaaatatgaagggagccatgctgactaataccgggaagtatgctatacccactattgatgccgaagcctatgcaattggaaaaaaagagaagccacctttcctgccagaggagcccagctccagtagcgaggaagacgacccaataccagacgagctcttgtgtttgatatgcaaggacatcatgactgacgctgtggtcatcccttgctgtggaaacagctattgcgacgagtgtatccgcacagccctgctggaaagtgacgagcacacctgtccaacatgtcaccagaatgatgtatcccccgatgcccttattgcaaataagtttctccgccaggctgtgaacaattttaagaatgaaactggctacactaagagattacgtaagcaactccccccccccccgcctccaattcccccacctagaccacttattcagcggaatctgcaacctctcatgcggtcgccaatcagccgccaacaggatcctctcatgatcccagtaacaagttcatcaactcacccagctcctagcatcagtagtctcaccagcaatcagtcttcgcttgcacccccagtttctggtaatccctcctccgctcccgcgcctgtacctgacatcacggcaaccgtttcgatctctgtgcacagcgagaaatctgatgggccctttagggactctgacaacaagatcctcccggccgctgcactggcaagcgagcatagcaaaggcacaagctcaatcgcaattacagccctgatggaagaaaaggggtaccaggtgcccgtgctcggtaccccgagcctcctcggccagagcttactacacggtcagctgatccctacaactggcccagtcaggataaacacagctagacctggtggcggtaggcccggatgggaacatagcaataaactcggatatctcgtgtcgcctccccagcagattcggcggggagagcggagttgctaccgcagcattaacaggggcaggcatcacagcgagcgttctcagaggacacagggaccgtccctgcctgccaccccagtttttgtacctgtaccaccgccgccactctatccgcctcctccccacacactccctttacccccaggagttcctcccccacagtttagcccacaatttcctccggggcagccaccaccggctgggtacagcgtgcctcctcccggctttccccctgcgcccgctaacctgtccactccctgggtgtcaagcggtgtgcagactgcgcactcgaacaccattcccactacacaagccccacctctttccagagaagagttttatagggaacaacgccggcttaaggaggagagcaagagtccgtattccgggtcaagctacagccggtccagctatacgtactccaagagccgctctgggtcaaccagatcacggtcctattccaggagcttctctagatcgcattccagatcttatagtcggtcacccccctacccaagaagggggcggggtaaaagccgcaactaccggagtcgctcacgctcgcatggctaccatcggtctagaagccgtagccccccctaccggagatatcattccaggtcccggagtccacaggctttccgtggccaatctcccaacaagaggaatgttcctcagggcgaaactgagcgtgagtatttcaatcgctatagagaagtgcccccaccttacgatatgaaagcatattatggcaggtcggtggactttcgtgacccatttgagaaggaaagataccgggagtgggagcgaaaatacagagagtggtacgagaagtactacaagggatatgcagcaggcgcgcagcctcgcccttccgcgaaccgtgaaaactttagccctgaacgcttcctaccacttaatatacggaatagtccttttactaggggaaggcgcgaggattatgtgggcgggcagtcacatcgctctcggaacattgggtctaattaccccgaaaaactgtccgcacgtgacggccacaatcagaaagataatactaaatcaaaggagaaggaaagtgagaacgcaccgggcgatggaaagggcaataagcacaagaagcaccgaaaacggcgcaagggcgaagagtcagaggggttccttaatccagagttactggagaccagcaggaagtcaagagaacccactggagtggaagagaacaagaccgactctctgttcgttctccctagccgggatgatgcgacccccgtacgcgacgagcctatggacgccgagagcataacgtttaagtcggttagtgagaaagacaagagggaacgagataaacctaaggccaagggggacaagacgaaaaggaagaacgacggcagtgcagtgtctaagaaagaaaacatcgtcaagcccgcaaaagggccacaggagaaggttgatggggagagagagcgcagtccacgatccgagccacccatcaaaaaagccaaagaagaaacgcccaagacagacaatacaaagtcatcttcttcgtcacagaaggacgagaagataaccgggacacctcgcaaggcacattctaaatccgccaaggagcaccaggagacgaagccagtcaaggaggaaaaggtgaaaaaggattactcaaaggacgtgaaaagcgaaaagctaacaacgaaagaggagaaggccaaaaaacctaacgaaaaaaacaagcccctggataataaaggcgaaaaaagaaagagaaaaaccgaagagaagggggttgacaaggattttgaatctagtagtatgaaaattagcaagctggaggttaccgaaattgtgaagccatcgccaaagcgtaagatggagccggatacagagaaaatggaccgaacacccgaaaaagacaaaatcagtttgtctgctcctgcgaaaaaaattaaacttaatcgtgagactggtaaaaaaattgggtccactgaaaatattagcaatacgaaggaaccttctgagaagctggaatctacatcaagtaaagtgaagcaggaaaaggtgaagggtaaggtgcgaagaaaggtcactgggactgaggggtcgagcagtacgctggtggactacacatctactagtagcaccggcggcagtccagtcagaaaaagcgaggagaagacggacaccaaacggactgttataaagaccatggaggagtacaataacgacaatactgcaccagccgaggatgttattattatgatccaagtgcctcagtctaagtgggacaaagacgattttgagagcgaagaagaggatgtaaaaagtacgcagcctatctcatcagtgggaaaaccagcatcggtgattaaaaatgtttctacaaagccatcaaatatcgtgaagtaccctgagaaagagtcagaaccctctgagaagatccagaagttcaccaaggatgtcagccacgagataattcaacatgaagtcaaatcttctaagaattcggcatcaagcgagaagggcaaaacgaaagacagggattattcagtgcttgaaaaggaaaatcctgagaagagaaagaattccacccagcctgaaaaggagtctaacctggatagattaaacgagcaaggaaactttaagtccctctcccaaagctcaaaagaggcccgaacttcagataagcatgattcaacacgggcttctagcaataaggactttacaccgaatcgggataagaagactgactacgatactagggagtatagctcttctaagcgtcgggacgaaaagaatgagctcacgcgtaggaaagacagcccttctcggaacaaagattctgcttcaggccagaagaacaaaccgcgcgaggaaagagatttaccaaaaaaaggtacgggagattcaaagaagagcaacagctcacccagccgggataggaagccccacgaccacaaggccacctacgacacaaagaggccaaacgaagagaccaaaagcgtggacaagaacccctgcaaagatcgagaaaagcacgtgctcgaagcccggaacaataaggagtcgtccggaaataaacttctgtacatcttgaatcctcccgagactcaggtggaaaaagaacaaataaccggccaaattgacaaaagtaccgtcaagccaaagccacagctaagccattccagcagactgagctccgacctaacacgtgagacagatgaagccgccttcgagcccgattataacgagtccgactctgaatcaaacgtgtccgtgaaagaagaggaatccagtggaaatatctcaaaggacctcaaagacaaaatcgtagaaaaggctaaagaatcattggatactgctgccgtggttcaggtagggatcagcaggaatcagagtcacagcagtccctctgtctctccatcacggtcccacagccctagtggttctcagacccggtcccactctagtagtgctagtagcgccgagtcccaggatagcaagaagaaaaagaagaaaaaggagaaaaagaagcacaagaagcacaaaaaacacaaaaagcataaaaagcatgccggtacagaggtggagcttgagaagtcacagaagcacaagcacaagaaaaagaaatccaagaagaacaaggacaaggagaaggaaaaagaaaaggacgatcaaaaggtgaaatcagtgacggtgtag

SEQ ID NO: 273706 - DNA, 5378 bp, Artificial Sequence
  derived and/or modified sequence
atgagttgcgttcattacaagtttagctctaagcttaactatgacactgttaccttcgacggccttcacatttcattgtgcgatctcaagaaacagatcatgggcagggagaagctgaaggcagcagactgtgatttacagataaccaacgcgcaaacaaaggaagaatatacagatgacaatgcactgattccaaagaattcttcagtcattgtcagaaggattcctatcggaggcgtgaagtcaacctctaaaacatacgtcatctcaagaactgagccagccatggcaactactaaggctatcgacgattcaagcgcaagtattagcctggctcagctgacaaagactgccaacctcgctgaagcaaatgccagcgaggaggacaaaatcaaagcaatgatgagccaatctggccatgagtacgaccctattaattacatgaaaaaaccactgggaccaccgcctcctagttatacgtgctttcggtgtggcaaaccaggccattacatcaagaattgccctaccaacggcgacaaaaatttcgagagcggaccgaggatcaagaagagtaccggcatcccaagatcctttatgatggaagtgaaagaccctaatatgaagggcgcaatgcttaccaatacaggcaaatacgccattcccactattgacgctgaggcttatgctatcgggaagaaggagaagcctccatttctgcctgaggagccatcttcgtcctcggaagaggacgatcctattccggatgaactactgtgcctgatatgcaaggacattatgaccgacgctgtcgtaattccatgctgcggcaactcttattgcgatgagtgcatccgcaccgctctcctggagagcgacgaacatacctgccctacctgtcatcagaatgatgtgtctcccgatgccctgattgcaaataagtttttacgtcaggccgtcaacaacttcaagaatgagaccggctataccaagcgcctgcggaaacagctcccaccaccaccaccaccaatccctccccctaggcccctgatccagcgaaatcttcagcctttaatgcgttctcctatctccagacagcaagaccccctaatgatcccggtgacctcctcttctacccatccagccccatcaatctcttctctgacgtccaaccagtctagcctcgctccccctgtcagcggaaacccatcttcagctcccgctcctgtgccagatatcaccgcaacggtctctatctccgtgcatagtgaaaagtccgacggcccttttcgcgactctgacaataagattttacccgctgctgcgctggcttccgagcactcgaaagggacatcaagtatcgcgattacggcattgatggaggagaagggctatcaggtgccagtgctggggactccctccttgttggggcagtcactactacacggccagctcataccaacaactgggcctgtcagaattaatacggcaagacccggtggagggaggcctggctgggaacatagtaacaaactgggatatttggtatccccaccgcagcagattcgccgtggagagcgatcttgttaccgtagtatcaatagaggtcgccaccatagcgaacggagccaacgaacacaagggccttctttgcccgctaccccagtgtttgtgcctgtgccccctccaccactgtacccaccgcctcctcacacgctgccactccccccaggcgtgccacccccacagttcagtccacagtttcctcctggtcaaccccctccggcaggatatagcgtgccaccccctggcttcccacccgcaccagctaacctcagtacgccatgggtgtcttccggagtgcagactgcacactccaacaccataccgaccactcaggcccctccgctgtctagagaggaattctatcgggaacagagacgtctcaaggaagaggagaagaaaaagagtaagcttgacgaatttactaacgacttcgcaaaggagttgatggagtacaaaaaaatacagaaggagcggaggagatccttctcgagatccaagagcccctatagcgggtcatcatattctcggagctcatacacatacagcaagtcacgttccggttcaacacggtcccggtcgtacagtcggtccttcagcaggagccattcacggagttattcccgctcccccccttaccctcggagaggtcgaggtaaaagtagaaactatagatcgcgatcccgctcacacggctatcacagatcacgttctcggtccccaccgtatagaagatatcattctcgctcgagatccccccaggcgttccgagggcagtcacctaacaaaaggaatgtaccccagggtgagaccgaaagagagtatttcaaccgctaccgagaggttcctccaccttacgatatgaaagcttattacgggagatctgtggatttccgggacccttttgaaaaggagcgctacagagagtgggagcgcaaatatagggaatggtacgaaaaatactacaaaggctacgctgctggagctcagcccagacccagcgccaatagagagaattttagtcccgagcggtttttacccctgaacattcgcaattccccattcactcgcggacggagagaagactacgtcggcggacagtcgcaccgctcacgcaacatagggtctaattaccccgagaagctgtcggctagagatggtcacaaccagaaggataatactaaaagtaaggagaaagagtctgaaaacgctcctggagacggcaagggaaataagcacaagaagcatcggaaacgacgaaaaggggaagagtctgagggcttcctgaatccagagctccttgaaaccagcagaaaaagcagagagccaacaggcgtggaggaaaataagaccgatagtctgttcgttcttccatctcgggacgatgctactccagtgagagatgagcctatggatgcagagtcaataaccttcaagtccgtctcagaaaaagataagcgcgagcgagacaaacctaaggccaagggggataagacaaagcgcaaaaatgatggcagtgccgtgagcaagaaggagaatatagtgaagcctgccaaaggaccccaagaaaaagtggacggcgaacgagaacgtagtccacgcagtgaaccgcctattaaaaaagccaaagaagagacgcctaaaaccgacaatactaagagctccagtagtagccaaaaagatgaaaaaattactggaacacctcgaaaggcccattccaaaagcgctaaggaacatcaagagaccaaacctgtaaaggaggaaaaggtgaagaaggactacagcaaggacgttaagagcgagaagttaacaaccaaggaagagaaagccaagaaacctaacgagaaaaataaacccttggacaacaagggggagaaaaggaaaagaaagaccgaagagaagggcgttgataaggacttcgagagctcttcaatgaaaatatcaaaattggaagttaccgaaatagtgaagccaagtcccaagcgcaagatggagcccgatactgaaaagatggacagaacccctgaaaaggacaaaatttctttatctgcacccgctaagaaaatcaaactgaatagggagacgggtaaaaaaattggtagtactgaaaacatcagcaatacgaaagagccatcagaaaagctggagtccacctcaagcaaggtgaaacaggagaaggtaaaggggaaagtgcggaggaaagtgaccggaacggagggctcttcctctactctggtagactatacttccacctcctcaacaggaggatcaccggtccgaaaaagcgaggagaagacagataccaagcgcacggtgatcaaaactatggaggaatacaataatgacaacacggcccctgccgaggatgttataattatgattcaggtgccccagagcaaatgggacaaggatgactttgagtcagaggaagaggacgtgaagtcaactcaacccatttcctcagtgggcaaacctgcctctgtcatcaagaacgtgtctacgaaaccttccaacattgtgaaatacccagagaaggagtctgagcccagcgaaaagattcagaagttcacgaaggacgtgagccacgagatcattcagcacgaagtaaagtccagtaagaacagtgcgagctcagagaaaggaaagactaaagaccgtgattacagtgtgttggaaaaagagaaccccgagaaaaggaagaattccacacagccagagaaggaatccaacctggatagattgaatgagcagggcaacttcaagagcctgtcacagtcttctaaagaggcacgcacttccgacaaacacgacagcacacgggcatctagtaacaaggacttcacccccaacagagataagaagaccgattacgatacccgtgaatattcctcaagcaagcgccgtgacgaaaagaatgagctgacacgccgtaaagattcaccctcacggaacaaagactcagctagtggacaaaagaataaacctagggaggagagggaccttcccaaaaagggtactggtgattcgaaaaaaagcaattcatctcctagcagagacagaaagcctcatgatcataaagctacatacgacaccaagcgccctaacgaagaaaccaagagtgtggacaaaaacccttgtaaggaccgggagaagcacgttctcgaggcacggaacaataaggaaagctctggcaacaaactgctgtacatcctaaacccccctgagacccaggtggagaaggagcagattaccggccagatagataaatccacagtgaagcctaagccccaattaagtcattcctctcgcctgagctctgatcttacccgggaaactgacgaggcagcatttgagcctgactacaacgagtcagattctgagagcaacgtgagcgtgaaggaggaagagtctagcggaaacatcagcaaagacctgaaggacaaaatcgtggagaaagccaaggagagcttagacactgctgccgtcgtgcaagtcggcatcagcaggaatcaatcccattcgtcccccagcgtctctccttctcgctctcacagtccaagtggctcccagacccgaagccattctagtagcgcttcttccgccgaatctcaggacagcaaaaagaaaaagaaaaagaaggaaaagaaaaagcataaaaaacacaagaagcataagaaacacaagaaacacgcaggcacagaagtggaactagagaagtcccagaaacataagcacaaaaagaagaaatccaaaaaaaacaaggataaagagaaggaaaaggaaaaagacgaccaaaaagtaaaaagtgtcacggtgta

SEQ ID NO: 273707 - DNA, 5276 bp, Artificial Sequence
  derived and/or modified sequence
atgtcatgcgtgcattataagttctcaagcaaactaaactacgacaccgtgacgttcgatggcctgcacatcagtctctgcgatctaaagaagcagatcatgggccgagaaaagcttaaagcagctgactgtgatctccagattactaacgcccagaccaaagaggagtacaccgatgacaatgcccttatacccaagaacagttccgttatagtgagaagaatccctataggtggggtgaaaagcacttcgaaaacctatgttatatcccggacagagcctgcaatggccacgacaaaggccatcgatgactcctctgcaagcatcagcctggcccagttaacaaagacagccaacttggcagaagcgaacgcttctgaagaggataaaatcaaagccatgatgtctcaaagtggccacgagtatgatcctataaattacatgaaaaaacctctcggcccacctccaccctcctatacctgtttcagatgcggaaagcctggtcactacatcaagaactgtcctacaaacggcgacaaaaacttcgaatccggaccgcgaatcaagaagtctactgggatcccacgtagtttcatgatggaagtgaaagacccaaacatgaaaggcgctatgctcacaaacactggcaagtacgcaattccgacgattgatgctgaggcatacgccatcgggaagaaggaaaaaccgccattcctgcctgaagaaccatcctcctcaagcgaggaggatgatccaattccagatgagctgctgtgcctaatctgtaaggacatcatgactgacgccgtggttatcccttgttgcggaaatagctactgtgacgaatgcatcagaacagccttactggagtccgacgaacacacctgccccacttgccaccagaacgatgtctcacccgatgccttgatcgctaacaagttcctccgtcaggctgtgaataatttcaagaacgagactggctacaccaagcgactccgcaagcaactgccgcctcctccccctccgatcccaccccctcggccattgattcagcggaacttacagcctttaatgagatcccccatttcccgccagcaggaccccctgatgattccagtcacaagctcctccacgcatcccgctccctctattagctctttgacatccaatcagagcagcctggcgccacccgtgagcggaaaccctagtagtgccccagcccctgttcccgatataaccgctaccgtcagcatcagcgttcactccgaaaaaagtgacgggccttttagggacagcgacaataaaatcctgccagccgcagcacttgcctcagagcacagcaaggggacctcctcaatcgctattacagctttaatggaagagaagggctatcaggtgcctgtgttgggcacacccagcctcctgggccagtctttactgcacgggcagttgatcccgactaccgggccagtgcggatcaataccgctcggcctgggggtggccgtcccggatgggagcattccaataaactcggatatctggtctctccacctcagcagattagaagaggcgaaagaagctgttacagaagtattaatcggggtaggcatcactctgagcgcagtcaacgcacacaggggccatctttgccagccacccccgtcttcgtcccggtcccgccaccccctctgtacccccctccaccccacacactgccactgccacctggtgttccaccacctcaattctctccccagttcccacctggacaaccgcctccggctggctacagtgtaccgccaccaggattcccacctgctcctgccaacctatctacaccttgggtgagttccggcgtccagactgctcactccaataccatccctacaactcaagcccctccactctcacgggaagagttttaccgggagcagagaagactgaaggaagagagtaaaagcccatactccggaagcagctattcacgtagttcctacacctattctaagtcaagaagtggctcaaccagaagccgatcatacagcaggagtttcagccgctcgcacagtaggagctattcgcggtcccccccttacccgagaagaggcaggggcaagagcagaaattataggagtcgcagtcgtagtcacggctaccaccgatctcggagcaggagccccccatatcggaggtaccactcaagatctaggtccccccaagccttcaggggtcagtcaccaaacaaacggaacgttccccagggcgaaacagaaagagagtactttaatagataccgagaggtgccacccccatatgacatgaaagcttactacggacgtagcgtcgatttcagggaccctttcgagaaggagcggtatagagagtgggagagaaagtaccgggagtggtatgagaagtattataaggggtacgcagccggtgctcagccacgaccttctgctaacagggagaatttcagccctgaaaggttcctgcctctgaacattcgcaactctccttttacgcggggacggagagaggattatgtcggtgggcagagccataggtctagaaatatcggatcaaattacccggagaagctgagtgccagggacggtcataaccagaaggacaacactaagtctaaggagaaggagagcgagaatgctccaggagacggaaagggcaacaaacacaagaaacacagaaaaaggaggaagggcgaggagtcagagggttttctgaaccccgagctgctggaaacctctaggaaaagcagggaaccaaccggtgtcgaggaaaacaagacagactctctttttgtcctgccatccagagatgacgccactcccgtgagggatgagcctatggatgccgagagtattacttttaagagcgtgtctgaaaaagataaacgggagcgggataaaccaaaggctaagggcgataaaactaaacgaaaaaatgacgggagcgcagtgagtaaaaaggaaaacatagtgaaacccgctaaaggtccccaggagaaggtggatggggagcgcgagagatcccctcgtagcgaacctccaataaagaaagctaaagaggaaacccctaaaaccgataatacgaagagtagctccagttctcagaaggatgagaaaattaccggcactccccgaaaagcacactctaagtccgcaaaggaacaccaggaaacgaaaccagtgaaagaggaaaaggtgaagaaggactatagcaaggatgtcaaatctgagaagttgacaactaaggaagagaaggccaagaaaccaaacgagaagaataaacctctggataacaagggtgagaaacgcaaaaggaagaccgaagagaagggggtggataaagacttcgagagctcctctatgaaaatctccaaactggaggtcaccgaaattgtaaagccaagcccaaaaaggaaaatggaaccagatactgagaaaatggacagaactcccgagaaagacaagatatcactgtccgctcctgcgaaaaaaattaaactgaaccgggaaaccggtaaaaagatcggctcgaccgaaaacattagtaatactaaagaaccatccgaaaagttagagtcgacctcctctaaagtgaaacaggagaaggtaaaaggaaaagtgaggaggaaggtgacaggtacagaaggcagttctagcaccctcgtggattatacgagcacttcatcaactgggggtagcccggtgaggaagtcggaagaaaagaccgatacaaagcggactgtgatcaaaaccatggaggaatataataacgataatacagcccctgctgaggacgtcatcatcatgatccaagttccgcaaagtaaatgggacaaggatgactttgaatccgaggaggaggacgttaagtctacacagccaatctcctcagttggaaagcctgccagcgttataaaaaacgtgagcactaagccgtccaacattgtcaaatacccagagaaggaatctgagcctagcgagaaaattcagaaattcacgaaagacgtatctcatgaaattatccagcacgaagtgaagtccagcaaaaattcggcatcctccgaaaaaggcaagacgaaagatcgcgattacagtgtattggaaaaagagaatcccgagaagcgcaagaattccacccaaccagaaaaagagagcaatcttgaccgcctaaacgaacagggcaatttcaagtcactgtcccaatcatcaaaggaagccaggacaagcgacaaacacgacagcacgcgagccagttccaataaggatttcactcccaatcgcgataagaagacagactatgatactcgtgaatactcatctagtaagcggagggacgaaaagaacgaacttacccgccgaaaggactcacctagccgaaataaggactccgccagtggacagaagaataagccccgagaagagcgagacttgcccaagaaaggaacaggtgattccaagaaatcaaatagttcaccatctcgtgataggaagccccacgaccacaaagctacgtatgatacaaaacgtcctaacgaggagacaaagagtgtggacaagaacccttgtaaagacagggagaagcatgtgttggaggctcggaacaacaaagaatccagcggaaacaagctcttatacatactgaatccccctgaaactcaggtggaaaaggaacagatcacaggtcagattgacaaaagtactgtcaaacccaagcctcagctgtcacattcgagtcggctgagctccgatctgacaagagagacagatgaggccgctttcgagcccgactataatgagtccgattccgagagtaatgtgagtgtgaaagaggaggaatcgagcggaaatatatcgaaggatcttaaagacaagattgttgaaaaggccaaggaaagcctcgataccgccgctgtcgtgcaagtcggcatatcccggaatcagtcccactcatccccatcggtgtcgccatcgagatcccacagccctagtgggtcgcagactcggtcacacagcagctctgccagctccgccgaaagccaggacagtaaaaaaaagaagaaaaaaaaagagaagaaaaagcacaaaaagcacaaaaaacataaaaagcataaaaagcatgccggtactgaggttgaattagagaaatcccagaagcataagcataagaagaagaagtccaaaaagaacaaggacaaggagaaggagaaagaaaaggacgatcagaaggtcaaatccgtgaccgtcta

SEQ ID NO: 273708 - DNA, 6229 bp, Artificial Sequence
  derived and/or modified sequence
gagagagagacccgccgggaggtgcggccgcgctatggacccctgaccccgtggggtcgctcggactcttaacgtgtggactgaccgctactgactgcaccgccaatccccccgtctctgccggccccttagcatgagcgagggggacccagccgggtgacattgtgcccgttggcggattctcgatttcccctcttccccgtcctcgtcctcctcctcccccatgaagtgattctgagtatcggggggtctctggattattgttctgacgaacccctgcttgtggttggggggtatttaatctgaggccttagggtccttcggtgtctttgagtgttttgtgtgtacatattttgctcttaaagtttataaatatacgtatattgagagtgtccacgtctcctcgctgaaccttaggaatcccttggcaccatgtcctgtgtgcattataaattttcctctaaactcaactatgataccgtcacctttgatgggctccacatctccctctgcgacttaaagaagcagattatggggagagagaagctgaaagctgccgactgcgacctgcagatcaccaatgcgcagacgaaagaagaatatactgatgataatgctctgattcctaagaattcttctgtaattgttagaagaattcctattggaggtgttaaatctacaagcaagacatatgttataagtcgaactgaaccagcgatggcaactacaaaagcaattgatgactcttccgcgtctatttctctggcccagcttacaaagactgccaatctggctgaagccaatgcttctgaagaagataaaattaaagcaatgatgtcgcaatctggccatgaatacgacccaatcaattacatgaagaaacctctaggtccaccacctccatcttacacgtgtttccgttgtggtaaacctggacattatattaagaattgcccaacaaatggggataaaaactttgaatctggtcctaggattaaaaagagcactggaattcccagaagtttcatgatggaagtgaaagatcctaatatgaaaggtgcaatgcttaccaacactggaaaatatgcaataccaactatagatgcagaagcatatgcaattgggaagaaagagaaacctcccttcttaccagaggagccatcttcttcctcagaagaagatgatcctatcccagatgaattgttgtgtctcatctgcaaggatattatgactgatgctgttgtgattccctgctgtggaaacagttactgtgatgaatgtataagaacagcactcctggaatcagatgagcacacatgtccgacgtgtcatcaaaatgatgtttctcctgatgctttaattgccaataaatttttacgacaggctgtaaataacttcaaaaatgaaactggctatacaaaaagactacgaaaacagttacctcctccaccacccccaataccacctccgagaccactgattcagaggaacctacaacctctgatgagatctccgatatcaagacaacaagatcctcttatgattccagtgacatcttcatcaactcacccagctccgtctatatcttcattaacttctaatcagtcttccttggcccctcctgtgtctggaaatccgtcttctgctccagctcctgtacctgatataactgcaacagtatccatatcagttcattcagaaaaatcagatggaccttttcgggattctgataataaaatattgccagctgcagctcttgcatcagagcactcaaagggaacctcctcaattgcaattaccgctcttatggaagagaagggttaccaggtgcctgttcttggaaccccatctttgcttggacagtcattattgcatggacagttgatccccacaactggtccagtaagaataaatactgctcgtccaggtggtggtcgaccaggctgggaacattccaacaaacttggctatctggtttctccaccacaacaaattagaagaggggagaggagctgctacagaagtataaaccgtgggcgacaccacagcgaaagatcacagaggactcaaggcccgtcactaccagcaactccagtctttgtacctgttccaccacctcctttgtatccgcctcctccccatacacttcctctccctccgggtgttcctcctccacagttttctcctcagtttcctcctggccagccaccacccgctgggtatagtgtccctcctccagggtttcctccagctcctgccaatttatcaacaccttgggtatcatcaggagtgcagacagctcattcaaataccatcccaacaacacaagcaccacctttgtccagggaagaattctatagagagcagcgacgactaaaagaagaggaaaagaaaaagtccaagctagatgagtttacaaatgattttgctaaggaattgatggaatacaaaaagattcaaaaggagcgtaggcgctcattttccaggtctaaatctccctatagtggttcttcgtattcaagaagttcatatacttattctaaatcaagatctggttcaacacgttcacgctcttattctcgatcattcagccgctcacattctcgttcctattcacggtcacctccataccccagaagaggcagaggcaagagccgcaattaccgttcacggtctagatctcatggatatcatcgatctaggtcaaggtcacccccttacagacgctatcattcacgatcaagatctcctcaagcgtttaggggacagtctcctaataaacgtaatgtacctcaaggggaaacagaacgtgaatattttaatagatacagagaagttccaccaccatatgacatgaaagcatattatgggagaagtgttgactttagagacccatttgaaaaagaacgctaccgagaatgggagagaaaatatagagagtggtatgaaaaatattataaaggttatgctgctggagcacagcctagaccctcagcaaatagagagaacttttctccagagagatttttgccacttaacatcaggaattctcccttcacaagaggccgcagagaagactatgttggtgggcaaagtcatagaagtcgaaacataggtagcaactatccagaaaagctttcagcaagagatggtcacaatcagaaggataatacaaagtcaaaagagaaggagagtgaaaacgctccaggagatggtaaaggaaataagcataagaaacacagaaaaagaagaaaaggggaggaaagtgagggttttctgaacccagagttattagagacttctaggaaatcaagagaacctacaggtgttgaagaaaataaaacagactcattgtttgttctcccaagtagagatgatgccacacctgttagagatgaaccaatggatgcagaatcaatcacttttaaatcagtgtctgaaaaagacaagagagaaagggataaaccaaaagcaaagggtgataaaaccaaacggaagaatgatggatctgctgtgtccaaaaaagaaaatattgtaaaacctgctaaaggaccccaagaaaaagtagatggagaacgtgagagatctcctcgatctgaacctccaattaaaaaagccaaagaggagactccgaagactgacaatactaaatcatcatcttcctctcagaaggatgaaaaaatcactggaacccccagaaaagctcactctaaatcagcaaaagaacaccaagaaacaaaaccagtcaaagaggaaaaagtgaagaaggactattccaaagatgtcaaatcagaaaagctaacaactaaggaagaaaaggccaagaagcctaatgagaaaaacaaaccacttgataataagggagaaaaaagaaaaagaaaaactgaagaaaaaggcgtagataaagattttgagtcttcttcaatgaaaatctcgaaactagaagtgactgaaatagtgaaaccatcaccaaagcgcaaaatggaacctgatactgaaaaaatggataggacccctgaaaaggacaaaatttctttaagtgcgccagccaaaaaaatcaaactcaacagagaaactgggaagaaaattggaagtacagaaaatatatcaaacacaaaagaaccctctgaaaaattggagtcaacatctagcaaagttaaacaagaaaaagtcaaaggaaaggtcagacgaaaagtgactggaactgaaggatccagctcaactctggtggattacaccagtacgagctcaactggaggcagtcctgtgcggaaatctgaagaaaaaacagatacaaagcgaactgtgattaaaacgatggaagaatataataatgacaataccgcgccagctgaagatgttatcattatgattcaggttcctcaatccaaatgggataaagatgactttgaatctgaagaagaagatgttaaatccacacagcctatatcaagtgtaggaaaacctgctagtgttataaaaaatgttagtacaaagccatcaaatatagtcaagtatcctgagaaagaaagtgagccatccgagaaaattcagaaattcaccaaggacgtgagccatgaaatcatacaacatgaggttaaaagttcaaaaaactctgcatctagtgaaaaagggaaaaccaaagatcgagattattcagtgttggaaaaggagaaccctgaaaagaggaagaacagcactcagccagagaaagagagtaatttggaccgtctgaatgaacaaggaaattttaaaagtctgtctcaatcttccaaagaggctagaacgtcagataaacatgattccactcgtgcttcctcaaataaagacttcactcccaatagagacaaaaaaactgactatgacaccagagagtattcaagttccaaacgtagagatgaaaagaatgaattaacaagacgaaaagactctccttctcggaataaagattctgcatctggacagaaaaataaaccaagggaagagagagatttgcctaaaaaaggaacaggagattccaaaaaaagtaattctagtccctcaagagacagaaaacctcatgatcacaaagccacttatgatactaaacggccaaatgaagagacaaaatctgtagataaaaatccttgtaaggatcgtgagaagcatgtattagaagcaaggaacaataaagagtcaagtggcaataaactactttatatacttaacccaccagagacacaggttgaaaaagagcaaattactgggcaaattgacaagagtactgtcaagcctaaaccccagttaagtcattcctctagactttcctctgacttaactagagaaactgatgaagctgcttttgaaccagactataatgaaagtgacagtgaaagtaatgtttctgtaaaagaagaggaatcttcaggaaacatttctaaggacctgaaagataaaatagtggagaaagcaaaagagagcctggacacagcagcagttgtccaggtgggcataagcaggaatcagagccacagcagccccagcgtcagccccagcagaagccacagtccttctggaagccagacccgaagccacagtagcagtgccagctcagcagaaagtcaggacagcaagaagaagaagaaaaagaaggaaaagaaaaaacacaagaaacataaaaagcataagaagcataagaaacatgcaggcactgaagtggaattggaaaaaagccaaaaacacaaacacaagaaaaagaagtcaaagaagaacaaagataaagagaaggagaaggagaaagatgaccaaaaagtgaaatctgtcactgtgtaaaaagacagattttttaaattgacttaattactaagtcatctgtattaaattttgttataatgtaaagagattcaagccttgtaaataatgacatggaagaccctgtgctgcacttaaaatattgctgcttgattatttgatttttacatcagagctttataacacgaacttttgtacagaattgtgagttgtgaccatgtaacatgagaggttttgctagggcctattatttttaaccaccattaattagttggggtggagtttactgtaatgtgaaattttcacatttgaattttttaattgcctggcaaaagctgatataagttctaaaatatcagcagaatgatttgctgaattcattacaaccctgttatgtcactttttgattacaataaaagttttcagtaaacttttcaaa

SEQ ID NO: 273709 - DNA, 5739 bp, Artificial Sequence
  derived and/or modified sequence
agtgtccacgtctcctcgctgaaccttaggaatcccttggcaccatgtcctgtgtgcattataaattttcctctaaactcaactatgataccgtcacctttgatgggctccacatctccctctgcgacttaaagaagcagattatggggagagagaagctgaaagctgccgactgcgacctgcagatcaccaatgcgcagacgaaagaagaatatactgatgataatgctctgattcctaagaattcttctgtaattgttagaagaattcctattggaggtgttaaatctacaagcaagacatatgttataagtcgaactgaaccagcgatggcaactacaaaagcaattgatgactcttccgcgtctatttctctggcccagcttacaaagactgccaatctggctgaagccaatgcttctgaagaagataaaattaaagcaatgatgtcgcaatctggccatgaatacgacccaatcaattacatgaagaaacctctaggtccaccacctccatcttacacgtgtttccgttgtggtaaacctggacattatattaagaattgcccaacaaatggggataaaaactttgaatctggtcctaggattaaaaagagcactggaattcccagaagtttcatgatggaagtgaaagatcctaatatgaaaggtgcaatgcttaccaacactggaaaatatgcaataccaactatagatgcagaagcatatgcaattgggaagaaagagaaacctcccttcttaccagaggagccatcttcttcctcagaagaagatgatcctatcccagatgaattgttgtgtctcatctgcaaggatattatgactgatgctgttgtgattccctgctgtggaaacagttactgtgatgaatgtataagaacagcactcctggaatcagatgagcacacatgtccgacgtgtcatcaaaatgatgtttctcctgatgctttaattgccaataaatttttacgacaggctgtaaataacttcaaaaatgaaactggctatacaaaaagactacgaaaacagttacctcctccaccacccccaataccacctccgagaccactgattcagaggaacctacaacctctgatgagatctccgatatcaagacaacaagatcctcttatgattccagtgacatcttcatcaactcacccagctccgtctatatcttcattaacttctaatcagtcttccttggcccctcctgtgtctggaaatccgtcttctgctccagctcctgtacctgatataactgcaacagtatccatatcagttcattcagaaaaatcagatggaccttttcgggattctgataataaaatattgccagctgcagctcttgcatcagagcactcaaagggaacctcctcaattgcaattaccgctcttatggaagagaagggttaccaggtgcctgttcttggaaccccatctttgcttggacagtcattattgcatggacagttgatccccacaactggtccagtaagaataaatactgctcgtccaggtggtggtcgaccaggctgggaacattccaacaaacttggctatctggtttctccaccacaacaaattagaagaggggagaggagctgctacagaagtataaaccgtgggcgacaccacagcgaaagatcacagaggactcaaggcccgtcactaccagcaactccagtctttgtacctgttccaccacctcctttgtatccgcctcctccccatacacttcctctccctccgggtgttcctcctccacagttttctcctcagtttcctcctggccagccaccacccgctgggtatagtgtccctcctccagggtttcctccagctcctgccaatttatcaacaccttgggtatcatcaggagtgcagacagctcattcaaataccatcccaacaacacaagcaccacctttgtccagggaagaattctatagagagcagcgacgactaaaagaagagtctaaatctccctatagtggttcttcgtattcaagaagttcatatacttattctaaatcaagatctggttcaacacgttcacgctcttattctcgatcattcagccgctcacattctcgttcctattcacggtcacctccataccccagaagaggcagaggcaagagccgcaattaccgttcacggtctagatctcatggatatcatcgatctaggtcaaggtcacccccttacagacgctatcattcacgatcaagatctcctcaagcgtttaggggacagtctcctaataaacgtaatgtacctcaaggggaaacagaacgtgaatattttaatagatacagagaagttccaccaccatatgacatgaaagcatattatgggagaagtgttgactttagagacccatttgaaaaagaacgctaccgagaatgggagagaaaatatagagagtggtatgaaaaatattataaaggttatgctgctggagcacagcctagaccctcagcaaatagagagaacttttctccagagagatttttgccacttaacatcaggaattctcccttcacaagaggccgcagagaagactatgttggtgggcaaagtcatagaagtcgaaacataggtagcaactatccagaaaagctttcagcaagagatggtcacaatcagaaggataatacaaagtcaaaagagaaggagagtgaaaacgctccaggagatggtaaaggaaataagcataagaaacacagaaaaagaagaaaaggggaggaaagtgagggttttctgaacccagagttattagagacttctaggaaatcaagagaacctacaggtgttgaagaaaataaaacagactcattgtttgttctcccaagtagagatgatgccacacctgttagagatgaaccaatggatgcagaatcaatcacttttaaatcagtgtctgaaaaagacaagagagaaagggataaaccaaaagcaaagggtgataaaaccaaacggaagaatgatggatctgctgtgtccaaaaaagaaaatattgtaaaacctgctaaaggaccccaagaaaaagtagatggagaacgtgagagatctcctcgatctgaacctccaattaaaaaagccaaagaggagactccgaagactgacaatactaaatcatcatcttcctctcagaaggatgaaaaaatcactggaacccccagaaaagctcactctaaatcagcaaaagaacaccaagaaacaaaaccagtcaaagaggaaaaagtgaagaaggactattccaaagatgtcaaatcagaaaagctaacaactaaggaagaaaaggccaagaagcctaatgagaaaaacaaaccacttgataataagggagaaaaaagaaaaagaaaaactgaagaaaaaggcgtagataaagattttgagtcttcttcaatgaaaatctcgaaactagaagtgactgaaatagtgaaaccatcaccaaagcgcaaaatggaacctgatactgaaaaaatggataggacccctgaaaaggacaaaatttctttaagtgcgccagccaaaaaaatcaaactcaacagagaaactgggaagaaaattggaagtacagaaaatatatcaaacacaaaagaaccctctgaaaaattggagtcaacatctagcaaagttaaacaagaaaaagtcaaaggaaaggtcagacgaaaagtgactggaactgaaggatccagctcaactctggtggattacaccagtacgagctcaactggaggcagtcctgtgcggaaatctgaagaaaaaacagatacaaagcgaactgtgattaaaacgatggaagaatataataatgacaataccgcgccagctgaagatgttatcattatgattcaggttcctcaatccaaatgggataaagatgactttgaatctgaagaagaagatgttaaatccacacagcctatatcaagtgtaggaaaacctgctagtgttataaaaaatgttagtacaaagccatcaaatatagtcaagtatcctgagaaagaaagtgagccatccgagaaaattcagaaattcaccaaggacgtgagccatgaaatcatacaacatgaggttaaaagttcaaaaaactctgcatctagtgaaaaagggaaaaccaaagatcgagattattcagtgttggaaaaggagaaccctgaaaagaggaagaacagcactcagccagagaaagagagtaatttggaccgtctgaatgaacaaggaaattttaaaagtctgtctcaatcttccaaagaggctagaacgtcagataaacatgattccactcgtgcttcctcaaataaagacttcactcccaatagagacaaaaaaactgactatgacaccagagagtattcaagttccaaacgtagagatgaaaagaatgaattaacaagacgaaaagactctccttctcggaataaagattctgcatctggacagaaaaataaaccaagggaagagagagatttgcctaaaaaaggaacaggagattccaaaaaaagtaattctagtccctcaagagacagaaaacctcatgatcacaaagccacttatgatactaaacggccaaatgaagagacaaaatctgtagataaaaatccttgtaaggatcgtgagaagcatgtattagaagcaaggaacaataaagagtcaagtggcaataaactactttatatacttaacccaccagagacacaggttgaaaaagagcaaattactgggcaaattgacaagagtactgtcaagcctaaaccccagttaagtcattcctctagactttcctctgacttaactagagaaactgatgaagctgcttttgaaccagactataatgaaagtgacagtgaaagtaatgtttctgtaaaagaagaggaatcttcaggaaacatttctaaggacctgaaagataaaatagtggagaaagcaaaagagagcctggacacagcagcagttgtccaggtgggcataagcaggaatcagagccacagcagccccagcgtcagccccagcagaagccacagtccttctggaagccagacccgaagccacagtagcagtgccagctcagcagaaagtcaggacagcaagaagaagaagaaaaagaaggaaaagaaaaaacacaagaaacataaaaagcataagaagcataagaaacatgcaggcactgaagtggaattggaaaaaagccaaaaacacaaacacaagaaaaagaagtcaaagaagaacaaagataaagagaaggagaaggagaaagatgaccaaaaagtgaaatctgtcactgtgtaaaaagacagattttttaaattgacttaattactaagtcatctgtattaaattttgttataatgtaaagagattcaagccttgtaaataatgacatggaagaccctgtgctgcacttaaaatattgctgcttgattatttgatttttacatcagagctttataacacgaacttttgtacagaattgtgagttgtgaccatgtaacatgagaggttttgctagggcctattatttttaaccaccattaattagttggggtggagtttactgtaatgtgaaattttcacatttgaattttttaattgcctggcaaaagctgatataagttctaaaatatcagcagaatgatttgctgaattcattacaaccctgttatgtcactttttgattacaataaaagttttcagtaaacttttcaaa

SEQ ID NO: 273710 - DNA, 5379 bp, Artificial Sequence
  derived and/or modified sequence
atgagctgcgtgcactacaagttcagcagcaagctgaactacgacaccgtgaccttcgacggcctgcacatcagcctgtgcgacctgaagaagcagatcatgggcagagagaagctgaaggccgccgactgcgacctgcagatcaccaacgcccagaccaaggaggagtacaccgacgacaacgccctgatccccaagaacagcagcgtgatcgtgagaagaatccccatcggcggcgtgaagagcaccagcaagacctacgtgatcagcagaaccgagcccgccatggccaccaccaaggccatcgacgacagcagcgccagcatcagcctggcccagctgaccaagaccgccaacctggccgaggccaacgccagcgaggaggacaagatcaaggccatgatgagccagagcggccacgagtacgaccccatcaactacatgaagaagcccctgggcccccccccccccagctacacctgcttcagatgcggcaagcccggccactacatcaagaactgccccaccaacggcgacaagaacttcgagagcggccccagaatcaagaagagcaccggcatccccagaagcttcatgatggaggtgaaggaccccaacatgaagggcgccatgctgaccaacaccggcaagtacgccatccccaccatcgacgccgaggcctacgccatcggcaagaaggagaagccccccttcctgcccgaggagcccagcagcagcagcgaggaggacgaccccatccccgacgagctgctgtgcctgatctgcaaggacatcatgaccgacgccgtggtgatcccctgctgcggcaacagctactgcgacgagtgcatcagaaccgccctgctggagagcgacgagcacacctgccccacctgccaccagaacgacgtgagccccgacgccctgatcgccaacaagttcctgagacaggccgtgaacaacttcaagaacgagaccggctacaccaagagactgagaaagcagctgccccccccccccccccccatccccccccccagacccctgatccagagaaacctgcagcccctgatgagaagccccatcagcagacagcaggaccccctgatgatccccgtgaccagcagcagcacccaccccgcccccagcatcagcagcctgaccagcaaccagagcagcctggccccccccgtgagcggcaaccccagcagcgcccccgcccccgtgcccgacatcaccgccaccgtgagcatcagcgtgcacagcgagaagagcgacggccccttcagagacagcgacaacaagatcctgcccgccgccgccctggccagcgagcacagcaagggcaccagcagcatcgccatcaccgccctgatggaggagaagggctaccaggtgcccgtgctgggcacccccagcctgctgggccagagcctgctgcacggccagctgatccccaccaccggccccgtgagaatcaacaccgccagacccggcggcggcagacccggctgggagcacagcaacaagctgggctacctggtgagccccccccagcagatcagaagaggcgagagaagctgctacagaagcatcaacagaggcagacaccacagcgagagaagccagagaacccagggccccagcctgcccgccacccccgtgttcgtgcccgtgccccccccccccctgtaccccccccccccccacaccctgcccctgccccccggcgtgccccccccccagttcagcccccagttcccccccggccagcccccccccgccggctacagcgtgcccccccccggcttcccccccgcccccgccaacctgagcaccccctgggtgagcagcggcgtgcagaccgcccacagcaacaccatccccaccacccaggccccccccctgagcagagaggagttctacagagagcagagaagactgaaggaggaggagaagaagaagagcaagctggacgagttcaccaacgacttcgccaaggagctgatggagtacaagaagatccagaaggagagaagaagaagcttcagcagaagcaagagcccctacagcggcagcagctacagcagaagcagctacacctacagcaagagcagaagcggcagcaccagaagcagaagctacagcagaagcttcagcagaagccacagcagaagctacagcagaagccccccctaccccagaagaggcagaggcaagagcagaaactacagaagcagaagcagaagccacggctaccacagaagcagaagcagaagccccccctacagaagataccacagcagaagcagaagcccccaggccttcagaggccagagccccaacaagagaaacgtgccccagggcgagaccgagagagagtacttcaacagatacagagaggtgccccccccctacgacatgaaggcctactacggcagaagcgtggacttcagagaccccttcgagaaggagagatacagagagtgggagagaaagtacagagagtggtacgagaagtactacaagggctacgccgccggcgcccagcccagacccagcgccaacagagagaacttcagccccgagagattcctgcccctgaacatcagaaacagccccttcaccagaggcagaagagaggactacgtgggcggccagagccacagaagcagaaacatcggcagcaactaccccgagaagctgagcgccagagacggccacaaccagaaggacaacaccaagagcaaggagaaggagagcgagaacgcccccggcgacggcaagggcaacaagcacaagaagcacagaaagagaagaaagggcgaggagagcgagggcttcctgaaccccgagctgctggagaccagcagaaagagcagagagcccaccggcgtggaggagaacaagaccgacagcctgttcgtgctgcccagcagagacgacgccacccccgtgagagacgagcccatggacgccgagagcatcaccttcaagagcgtgagcgagaaggacaagagagagagagacaagcccaaggccaagggcgacaagaccaagagaaagaacgacggcagcgccgtgagcaagaaggagaacatcgtgaagcccgccaagggcccccaggagaaggtggacggcgagagagagagaagccccagaagcgagccccccatcaagaaggccaaggaggagacccccaagaccgacaacaccaagagcagcagcagcagccagaaggacgagaagatcaccggcacccccagaaaggcccacagcaagagcgccaaggagcaccaggagaccaagcccgtgaaggaggagaaggtgaagaaggactacagcaaggacgtgaagagcgagaagctgaccaccaaggaggagaaggccaagaagcccaacgagaagaacaagcccctggacaacaagggcgagaagagaaagagaaagaccgaggagaagggcgtggacaaggacttcgagagcagcagcatgaagatcagcaagctggaggtgaccgagatcgtgaagcccagccccaagagaaagatggagcccgacaccgagaagatggacagaacccccgagaaggacaagatcagcctgagcgcccccgccaagaagatcaagctgaacagagagaccggcaagaagatcggcagcaccgagaacatcagcaacaccaaggagcccagcgagaagctggagagcaccagcagcaaggtgaagcaggagaaggtgaagggcaaggtgagaagaaaggtgaccggcaccgagggcagcagcagcaccctggtggactacaccagcaccagcagcaccggcggcagccccgtgagaaagagcgaggagaagaccgacaccaagagaaccgtgatcaagaccatggaggagtacaacaacgacaacaccgcccccgccgaggacgtgatcatcatgatccaggtgccccagagcaagtgggacaaggacgacttcgagagcgaggaggaggacgtgaagagcacccagcccatcagcagcgtgggcaagcccgccagcgtgatcaagaacgtgagcaccaagcccagcaacatcgtgaagtaccccgagaaggagagcgagcccagcgagaagatccagaagttcaccaaggacgtgagccacgagatcatccagcacgaggtgaagagcagcaagaacagcgccagcagcgagaagggcaagaccaaggacagagactacagcgtgctggagaaggagaaccccgagaagagaaagaacagcacccagcccgagaaggagagcaacctggacagactgaacgagcagggcaacttcaagagcctgagccagagcagcaaggaggccagaaccagcgacaagcacgacagcaccagagccagcagcaacaaggacttcacccccaacagagacaagaagaccgactacgacaccagagagtacagcagcagcaagagaagagacgagaagaacgagctgaccagaagaaaggacagccccagcagaaacaaggacagcgccagcggccagaagaacaagcccagagaggagagagacctgcccaagaagggcaccggcgacagcaagaagagcaacagcagccccagcagagacagaaagccccacgaccacaaggccacctacgacaccaagagacccaacgaggagaccaagagcgtggacaagaacccctgcaaggacagagagaagcacgtgctggaggccagaaacaacaaggagagcagcggcaacaagctgctgtacatcctgaacccccccgagacccaggtggagaaggagcagatcaccggccagatcgacaagagcaccgtgaagcccaagccccagctgagccacagcagcagactgagcagcgacctgaccagagagaccgacgaggccgccttcgagcccgactacaacgagagcgacagcgagagcaacgtgagcgtgaaggaggaggagagcagcggcaacatcagcaaggacctgaaggacaagatcgtggagaaggccaaggagagcctggacaccgccgccgtggtgcaggtgggcatcagcagaaaccagagccacagcagccccagcgtgagccccagcagaagccacagccccagcggcagccagaccagaagccacagcagcagcgccagcagcgccgagagccaggacagcaagaagaagaagaagaagaaggagaagaagaagcacaagaagcacaagaagcacaagaagcacaagaagcacgccggcaccgaggtggagctggagaagagccagaagcacaagcacaagaagaagaagagcaagaagaacaaggacaaggagaaggagaaggagaaggacgaccagaaggtgaagagcgtgaccgtgtag

SEQ ID NO: 273711 - DNA, 5277 bp, Artificial Sequence
  derived and/or modified sequence
atgagctgcgtgcactacaagttcagcagcaagctgaactacgacaccgtgaccttcgacggcctgcacatcagcctgtgcgacctgaagaagcagatcatgggcagagagaagctgaaggccgccgactgcgacctgcagatcaccaacgcccagaccaaggaggagtacaccgacgacaacgccctgatccccaagaacagcagcgtgatcgtgagaagaatccccatcggcggcgtgaagagcaccagcaagacctacgtgatcagcagaaccgagcccgccatggccaccaccaaggccatcgacgacagcagcgccagcatcagcctggcccagctgaccaagaccgccaacctggccgaggccaacgccagcgaggaggacaagatcaaggccatgatgagccagagcggccacgagtacgaccccatcaactacatgaagaagcccctgggcccccccccccccagctacacctgcttcagatgcggcaagcccggccactacatcaagaactgccccaccaacggcgacaagaacttcgagagcggccccagaatcaagaagagcaccggcatccccagaagcttcatgatggaggtgaaggaccccaacatgaagggcgccatgctgaccaacaccggcaagtacgccatccccaccatcgacgccgaggcctacgccatcggcaagaaggagaagccccccttcctgcccgaggagcccagcagcagcagcgaggaggacgaccccatccccgacgagctgctgtgcctgatctgcaaggacatcatgaccgacgccgtggtgatcccctgctgcggcaacagctactgcgacgagtgcatcagaaccgccctgctggagagcgacgagcacacctgccccacctgccaccagaacgacgtgagccccgacgccctgatcgccaacaagttcctgagacaggccgtgaacaacttcaagaacgagaccggctacaccaagagactgagaaagcagctgccccccccccccccccccatccccccccccagacccctgatccagagaaacctgcagcccctgatgagaagccccatcagcagacagcaggaccccctgatgatccccgtgaccagcagcagcacccaccccgcccccagcatcagcagcctgaccagcaaccagagcagcctggccccccccgtgagcggcaaccccagcagcgcccccgcccccgtgcccgacatcaccgccaccgtgagcatcagcgtgcacagcgagaagagcgacggccccttcagagacagcgacaacaagatcctgcccgccgccgccctggccagcgagcacagcaagggcaccagcagcatcgccatcaccgccctgatggaggagaagggctaccaggtgcccgtgctgggcacccccagcctgctgggccagagcctgctgcacggccagctgatccccaccaccggccccgtgagaatcaacaccgccagacccggcggcggcagacccggctgggagcacagcaacaagctgggctacctggtgagccccccccagcagatcagaagaggcgagagaagctgctacagaagcatcaacagaggcagacaccacagcgagagaagccagagaacccagggccccagcctgcccgccacccccgtgttcgtgcccgtgccccccccccccctgtaccccccccccccccacaccctgcccctgccccccggcgtgccccccccccagttcagcccccagttcccccccggccagcccccccccgccggctacagcgtgcccccccccggcttcccccccgcccccgccaacctgagcaccccctgggtgagcagcggcgtgcagaccgcccacagcaacaccatccccaccacccaggccccccccctgagcagagaggagttctacagagagcagagaagactgaaggaggagagcaagagcccctacagcggcagcagctacagcagaagcagctacacctacagcaagagcagaagcggcagcaccagaagcagaagctacagcagaagcttcagcagaagccacagcagaagctacagcagaagccccccctaccccagaagaggcagaggcaagagcagaaactacagaagcagaagcagaagccacggctaccacagaagcagaagcagaagccccccctacagaagataccacagcagaagcagaagcccccaggccttcagaggccagagccccaacaagagaaacgtgccccagggcgagaccgagagagagtacttcaacagatacagagaggtgccccccccctacgacatgaaggcctactacggcagaagcgtggacttcagagaccccttcgagaaggagagatacagagagtgggagagaaagtacagagagtggtacgagaagtactacaagggctacgccgccggcgcccagcccagacccagcgccaacagagagaacttcagccccgagagattcctgcccctgaacatcagaaacagccccttcaccagaggcagaagagaggactacgtgggcggccagagccacagaagcagaaacatcggcagcaactaccccgagaagctgagcgccagagacggccacaaccagaaggacaacaccaagagcaaggagaaggagagcgagaacgcccccggcgacggcaagggcaacaagcacaagaagcacagaaagagaagaaagggcgaggagagcgagggcttcctgaaccccgagctgctggagaccagcagaaagagcagagagcccaccggcgtggaggagaacaagaccgacagcctgttcgtgctgcccagcagagacgacgccacccccgtgagagacgagcccatggacgccgagagcatcaccttcaagagcgtgagcgagaaggacaagagagagagagacaagcccaaggccaagggcgacaagaccaagagaaagaacgacggcagcgccgtgagcaagaaggagaacatcgtgaagcccgccaagggcccccaggagaaggtggacggcgagagagagagaagccccagaagcgagccccccatcaagaaggccaaggaggagacccccaagaccgacaacaccaagagcagcagcagcagccagaaggacgagaagatcaccggcacccccagaaaggcccacagcaagagcgccaaggagcaccaggagaccaagcccgtgaaggaggagaaggtgaagaaggactacagcaaggacgtgaagagcgagaagctgaccaccaaggaggagaaggccaagaagcccaacgagaagaacaagcccctggacaacaagggcgagaagagaaagagaaagaccgaggagaagggcgtggacaaggacttcgagagcagcagcatgaagatcagcaagctggaggtgaccgagatcgtgaagcccagccccaagagaaagatggagcccgacaccgagaagatggacagaacccccgagaaggacaagatcagcctgagcgcccccgccaagaagatcaagctgaacagagagaccggcaagaagatcggcagcaccgagaacatcagcaacaccaaggagcccagcgagaagctggagagcaccagcagcaaggtgaagcaggagaaggtgaagggcaaggtgagaagaaaggtgaccggcaccgagggcagcagcagcaccctggtggactacaccagcaccagcagcaccggcggcagccccgtgagaaagagcgaggagaagaccgacaccaagagaaccgtgatcaagaccatggaggagtacaacaacgacaacaccgcccccgccgaggacgtgatcatcatgatccaggtgccccagagcaagtgggacaaggacgacttcgagagcgaggaggaggacgtgaagagcacccagcccatcagcagcgtgggcaagcccgccagcgtgatcaagaacgtgagcaccaagcccagcaacatcgtgaagtaccccgagaaggagagcgagcccagcgagaagatccagaagttcaccaaggacgtgagccacgagatcatccagcacgaggtgaagagcagcaagaacagcgccagcagcgagaagggcaagaccaaggacagagactacagcgtgctggagaaggagaaccccgagaagagaaagaacagcacccagcccgagaaggagagcaacctggacagactgaacgagcagggcaacttcaagagcctgagccagagcagcaaggaggccagaaccagcgacaagcacgacagcaccagagccagcagcaacaaggacttcacccccaacagagacaagaagaccgactacgacaccagagagtacagcagcagcaagagaagagacgagaagaacgagctgaccagaagaaaggacagccccagcagaaacaaggacagcgccagcggccagaagaacaagcccagagaggagagagacctgcccaagaagggcaccggcgacagcaagaagagcaacagcagccccagcagagacagaaagccccacgaccacaaggccacctacgacaccaagagacccaacgaggagaccaagagcgtggacaagaacccctgcaaggacagagagaagcacgtgctggaggccagaaacaacaaggagagcagcggcaacaagctgctgtacatcctgaacccccccgagacccaggtggagaaggagcagatcaccggccagatcgacaagagcaccgtgaagcccaagccccagctgagccacagcagcagactgagcagcgacctgaccagagagaccgacgaggccgccttcgagcccgactacaacgagagcgacagcgagagcaacgtgagcgtgaaggaggaggagagcagcggcaacatcagcaaggacctgaaggacaagatcgtggagaaggccaaggagagcctggacaccgccgccgtggtgcaggtgggcatcagcagaaaccagagccacagcagccccagcgtgagccccagcagaagccacagccccagcggcagccagaccagaagccacagcagcagcgccagcagcgccgagagccaggacagcaagaagaagaagaagaagaaggagaagaagaagcacaagaagcacaagaagcacaagaagcacaagaagcacgccggcaccgaggtggagctggagaagagccagaagcacaagcacaagaagaagaagagcaagaagaacaaggacaaggagaaggagaaggagaaggacgaccagaaggtgaagagcgtgaccgtgtag

SEQ ID NO: 273712 - protein, 1003 aa, Artificial Sequence
  derived and/or modified sequence
MEDYEQELCGVEDDFHNQFAAELEVLAELEGASTPSPSGVPLFTAGRPPRTFEEALARGDAASSPAPAASVGSSQGGARKRQVDADLQPAGSLPHGRLAALPQGLRSGREAEEASGSLHVSPPAPRIKRPRLQVVKRLNFRSEEMEEPPPPDSSPTDITPPPSPEDLAELWGHGVSEAAADVGLTRASPAARNPVLRRPPILEDYVHVTSTEGVRAYLVLRADPMAPGVQGSLLHVPWRGGGQLDLLGVSLASLKKQVDGERRERLLQEAQKLSDTLHSLRSGEEEAAQPLGAPEEEPTDGQDASSHCLWVDEFAPRHYTELLSDDFTNRCLLKWLKLWDLVVFGHERPSRKPRPSVEPARVSKEATAPGKWKSHEQVLEEMLEAGLDPSQRPKQKVALLCGPPGLGKTTLAHVIARHAGYSVVEMNASDDRSPEVFRTRIEAATQMESVLGAGGKPNCLVIDEIDGAPVAAINVLLSILNRKGPQEVGPQGPAVPSGGGRRRRAEGGLLMRPIICICNDQFAPSLRQLKQQAFLLHFPPTLPSRLVQRLQEVSLRQGMRADPGVLAALCEKTDNDIRACINTLQFLYSRGQRELSVRDVQATRVGLKDQRRGLFSVWQEVFQLPRAQRRRVGQDPALPADTLLLGDGDAGSLTSASQRFYRVLHAAASAGEHEKVVQGLFDNFLRLRLRDSSLGAVCVALDWLAFDDLLAGAAHHSQSFQLLRYPPFLPVAFHVLFASSHTPRITFPSSQQEAQNRMSQMRNLIQTLVSGIAPATRSRATPQALLLDALCLLLDILAPKLRPVSTQLYSTREKQQLASLVGTMLAYSLTYRQERTPDGQYIYRLEPNVEELCRFPELPARKPLTYQTKQLIAREIEVEKMRRAEASARVENSPQVDGSPPGLEGLLGGIGEKGVHRPAPRNHEQRLEHIMRRAAREEQPEKDFFGRVVVRSTAVPSAGDTAPEQDSVERRMGTAVGRSEVWFRFNEGVSNAVRRSLYIRDLL

SEQ ID NO: 273713 - DNA, 3012 bp, Artificial Sequence
  derived and/or modified sequence
atggaggactacgaacaggaattgtgcggagtggaggacgattttcacaaccaattcgcagccgaactggaagttcttgctgagctcgaaggagcgtcgactccaagtccaagtggcgtgccactctttacagctggacgacccccccgaacattcgaggaggcgctcgcaaggggcgacgctgctagtagtcccgctccagccgcttctgtcggatcgagtcagggcggcgctagaaagaggcaggtggatgccgacctccagccagccggttctctaccacacgggcgcttagccgcgctcccacagggcctaagaagcggcagagaagctgaggaggcctccggatcactacacgtcagtcctcctgcgcctaggataaagcgcccccgcctccaggtggtgaagagactgaactttcggagcgaagaaatggaggagccgcccccccccgacagttctcccaccgacattaccccaccccccagccctgaggacctcgccgaattgtggggccacggcgtatcagaggctgcggcggatgtgggtctgacccgtgctagtccggctgctaggaatcctgtgctgaggcgaccacctatcctggaggattacgtgcacgtgactagcaccgagggcgtacgcgcctacctcgttctgagagccgacccaatggcaccaggggtccagggaagtctgttacacgtcccctggcgagggggcgggcaattagatttactgggcgtgtcactggcctcgctgaagaaacaggtcgacggcgagaggcgcgagcgactgttacaagaagcacagaagttgtcagatactcttcacagccttcgaagcggagaggaggaggccgctcagccattgggagcccctgaagaggaaccaaccgacggacaagatgcctctagccactgcctgtgggtcgacgaattcgctcctcggcattatacagagttactatccgatgattttaccaatcgatgccttctgaagtggctgaagctgtgggatttagtcgtctttgggcacgaacgaccttcccggaagccacgcccctctgtagagcccgcacgcgtatctaaggaagccaccgcccccggcaagtggaagtcacacgagcaggtcctggaagaaatgctcgaggccggtcttgaccccagccagaggccaaaacagaaggttgcgctgctctgcggtccaccggggctgggcaagacgaccttagcccacgtgattgcccgtcacgccggctatagcgtggtggagatgaacgcctccgatgaccgctcccctgaggtgttccgcacacgcatcgaagccgccacccagatggagtctgtgctgggcgcagggggaaagccgaactgtctggtgattgacgaaatagacggcgcacccgtggcagcaattaacgtactcctgtccattctgaatcgtaagggccctcaggaagtcggaccccaaggacctgctgtccctagtggcggtgggcggaggaggagggccgagggcggattactaatgcgtcccattatttgcatttgcaacgaccagtttgccccctcactgaggcaactgaaacagcaagcctttcttttgcatttcccccccacgctaccctcgcgcctggtgcagcgccttcaggaagtgtcactgaggcagggcatgcgcgcagaccctggagttctggctgctttgtgcgagaaaacagacaatgacatcagagcgtgtataaatacactccagttcttgtatagtcggggccaacgcgaactctccgtgcgagatgtccaggccactcgcgttgggctcaaggaccagcgcagggggctgttcagcgtgtggcaggaggtatttcagctgcctcgggcccagcgccggagggtcggccaggaccccgctttgcctgccgacaccctgctgctgggggacggagatgccgggtctctgacatcagcttctcagcgcttctatagggtactccatgccgccgctagcgctggcgagcacgagaaagtagttcaagggctgttcgataacttccttagattacggttacgggacagtagcctgggggcagtgtgtgttgccctggactggcttgcatttgatgacttgttggcaggggctgcacaccattctcagtcatttcagctgttgagatatccgccttttctgccagtggcctttcatgtgctgttcgcttcttcacacactcctcggataactttcccttcctcacagcaggaagcccaaaaccgaatgtctcaaatgagaaacttaatacaaaccctagtctcaggcatcgcccctgccactcggagccgtgccactccacaagctctgttgctggatgcactgtgcctgctgcttgatatcctcgcccccaaactgcgcccagtctctacccagctgtatagcaccagggaaaagcagcagcttgcgtcccttgtcggaaccatgttggcctacagtctcacttaccgccaggagcggactcctgacgggcaatacatttatcggctggagcccaacgtggaggagctctgcagatttcctgaactgcctgcacgtaagccgctcacataccaaactaagcagctgatcgctcgggaaatagaggtcgaaaagatgagacgtgccgaggccagtgcaagagtggaaaactccccgcaggtggacggatcccctcccggactggaaggacttctgggtggcataggagaaaagggggtgcatcgccctgcgccacgcaaccacgagcagcgcttggaacatatcatgcgcagggctgcaagggaggagcagcccgaaaaagattttttcgggcgagtcgtggtccgctccacagctgtacctagcgccggcgacacagcccccgaacaggactccgtggagcgccgcatgggcactgctgtcggcaggtccgaggtttggtttagatttaatgagggcgtcagtaacgcagttagacgtagtttgtacatccgggacctgctctag

SEQ ID NO: 273714 - DNA, 3012 bp, Artificial Sequence
  derived and/or modified sequence
atggaggactatgagcaggagctgtgtggggtggaggatgacttccacaaccagtttgctgctgagctggaggtgctggccgagctggagggcgccagcacccccagccccagcggcgtgcccctcttcaccgctggccggccccccaggacctttgaggaggccctggcccggggagatgctgccagcagccctgccccagctgcctctgtgggcagcagccagggcggggccaggaagaggcaggtggatgctgacctgcagcctgctggcagcctgccccacggccgcctggccgccctgccccagggcctgcggagcggccgggaggccgaggaggccagcggcagcctgcacgtgagccccccagccccccgcatcaagaggccccggctgcaggtggtgaagaggctgaacttccgctctgaggagatggaggagcccccacctccagacagcagccccacagacatcaccccaccacccagccctgaggacctggccgagctgtggggccatggagtgtctgaggccgctgctgatgtgggcctgacccgggccagccctgctgccaggaaccctgtgctgcggcggccccccatcctggaggactatgtgcacgtgaccagcacagaaggagtgcgggcctacctggtgctgcgggctgaccccatggcccctggggtgcagggcagcctgctgcacgtgccctggaggggcggcggccagctggacctgctgggcgtgtccctggccagcctgaagaagcaggtggatggagagcggcgggagcggctgctgcaggaggcccagaagctgagtgacaccctgcacagcctgcggagcggggaggaggaggccgcccagcccctgggcgcccctgaggaggagcccacagatggccaggatgccagcagccactgcctgtgggtggatgaatttgcccccaggcactacacagagctgctgagtgatgacttcaccaaccgctgcctgctgaagtggctgaagctgtgggacctggtggtgtttggccacgagcggcccagcaggaagccccggcccagcgtggagcccgcccgggtgtccaaggaggccacagcccctgggaagtggaagagccatgagcaggtgctggaggagatgctggaggccggcctggaccccagccagaggcccaagcagaaggtggccctgctgtgtggccccccaggcctgggcaagaccaccctggcccacgtgattgcccggcatgctggctacagcgtggtggagatgaatgccagtgatgacaggagccctgaggtgttccgcaccagaattgaagctgccacccagatggagagcgtgctgggcgccggcggcaagcccaactgcctggtgattgatgaaattgatggagcccctgtggccgccatcaacgtgctgctgagcatcctgaacaggaagggcccccaggaggtgggcccccagggccctgctgtgcccagcggcggcggcagaagaagaagagctgagggcggcctgctgatgaggcccatcatctgcatctgcaatgaccagtttgcccccagcctgcggcagctgaagcagcaggccttcctgctgcacttcccccccaccctgcccagccggctggtgcagaggctgcaggaggtgtccctgcggcagggcatgagagctgaccccggggtgctggccgccctgtgtgagaagacagacaatgacatccgggcctgcatcaacaccctgcagttcctgtacagccggggccagcgggagctgtctgtgagagatgtgcaggccaccagggtgggcctgaaggaccagaggcggggcctcttctctgtgtggcaggaggtgttccagctgccccgggcccagaggcggcgggtgggccaggaccctgccctgcctgctgacaccctgctgctgggagatggagatgctggcagcctgaccagcgccagccagcgcttctacagagtgctgcacgccgccgccagcgctggggagcacgagaaggtggtgcagggcctgtttgacaacttcctgcggctgcggctgcgggacagcagcctgggcgctgtgtgtgtggccctggactggctggcctttgatgacctgctggccggggccgcccaccacagccagagcttccagctgctgcgctacccacccttcctgcctgtggccttccacgtgctgtttgccagcagccacaccccccgcatcaccttccccagcagccagcaggaggcccagaacaggatgagccagatgaggaacctgatccagaccctggtgtctggcatcgccccagccaccaggagccgggccaccccccaggccctgctgctggatgccctgtgcctgctgctggacatcctggcccccaagctgcggcctgtgtccacccagctgtacagcacccgggagaagcagcagctggccagcctggtgggcaccatgctggcctacagcctgacctaccggcaggagaggaccccagatggccagtacatctaccgcctggagcccaacgtggaggagctgtgccgcttccctgagctgcctgccaggaagcccctgacctaccagaccaagcagctgattgcccgggagattgaggtggagaagatgagaagagctgaggccagcgcccgggtggagaacagcccccaggtggatggcagccccccaggcctggagggcctgctgggcggcatcggggagaagggcgtgcacaggcctgcccccagaaatcatgagcagaggctggagcacatcatgaggcgggccgcccgggaggagcagcctgagaaggacttcttcggccgggtggtggtgcgcagcacagctgtgcccagcgctggggacacagcccctgagcaggacagcgtggagaggaggatgggcacagctgtgggccgctctgaggtgtggttccgcttcaatgaaggagtgtccaatgctgtgcggcgcagcctgtacatccgggacctgctgtag

SEQ ID NO: 273715 - DNA, 3012 bp, Artificial Sequence
  derived and/or modified sequence
atggaggactacgagcaggagctgtgcggcgtggaggacgacttccataatcaattcgctgccgaattagaggtgttagcagagttggaaggtgccagtacaccttccccatccggcgttccgctctttacagcagggcgacccccccggacctttgaggaggccctggcgagaggggatgcagcatcctcgcccgcgccagccgcctctgttggaagcagccagggaggtgcacggaagcgtcaggtcgacgcggacctgcagcccgccggatccctcccccacggaagactggcggccttgccgcagggattgcggtctggcagagaggccgaggaagcctcgggctccctgcacgtatccccccccgcccctcgcattaaaagaccacggctgcaggtcgtcaagcggctgaattttcggtccgaagaaatggaagagccacctccgcctgattccagccctacagatattactcctcccccctcccccgaggatctggcagaactctggggccacggagttagcgaggctgcagccgacgttggtcttacccgcgccagccccgccgctcgcaaccctgtcctcaggaggcctccaatcttggaagattatgtccacgtgacctcaaccgagggggtccgagcctacctcgtgctgagagcggacccgatggccccgggtgtccagggttcacttctgcacgtgccatggagaggaggcggacaactcgacctcctcggcgtctctctggcatccctgaaaaaacaggtggatggagagcggcgggagaggttactgcaggaagcccagaaactgtcagacacgctgcacagcctacggagtggagaagaggaggctgctcagcctctgggcgctcccgaggaggaaccgaccgatggtcaggatgcttcttcccactgcctgtgggtagacgagttcgctcctagacactacactgagctgctttcagacgattttaccaaccgttgtctgctgaagtggctgaaattatgggatcttgttgtcttcgggcacgaaaggccttcccggaaaccgagaccatccgttgagcctgcgcgggtgagcaaggaggccacagcccctgggaagtggaagtctcatgagcaggttctggaggaaatgctagaggcaggtctcgatccttcccagcgaccgaagcagaaagtggcgctcctgtgcgggcctcccgggttaggcaagactaccctggctcacgttattgcacgtcatgctggatactctgtggtggagatgaatgccagcgatgatcggtccccggaggtgttccggactcgcatcgaagccgcgacgcagatggaaagtgtgctgggagctgggggcaagcccaactgtctggtgatcgatgagatcgatggagcgccagtcgccgccatcaatgtactgctctccatacttaaccgaaaaggcccccaggaagtggggcctcagggtcctgccgttccctccggtggtggccggaggagacgcgcagaggggggactacttatgaggccaattatatgcatctgtaacgaccaattcgcaccgtccctcaggcagttgaagcaacaggccttcttgttacactttccacccactctaccatctagactggtccagcggctgcaagaagtctcacttagacagggcatgcgggcagatcccggcgtgctcgccgctctgtgtgagaagactgacaatgatatccgtgcatgcatcaacacactgcagtttctgtactccaggggccagcgcgaactatctgtacgagacgtgcaggctactcgcgtcggccttaaggaccagcgccggggtctcttttccgtgtggcaggaagtattccaacttccaagagctcagagaaggcgggtgggccaagaccccgcgttaccagccgacacacttctgcttggggatggagatgcgggctcattaaccagtgcttcacagcgcttttaccgtgtcctgcatgccgccgccagcgccggcgagcacgagaaggtggtccaagggttgtttgacaattttctgcgtttgcgcctgcgagacagctccctgggcgctgtgtgcgtggctctagactggctggcgttcgatgaccttctcgctggggcagcgcaccactcgcagagtttccagctattgcgttatcccccttttctgcctgtggcctttcatgtgctctttgcaagctcccacaccccgaggataacctttccaagctcgcagcaggaggcacaaaacagaatgagccagatgcgaaacctgattcagacacttgtctcaggtattgcgcctgccaccagaagtagagctaccccacaagccctgctcctggacgccctgtgcctcctcttggacattctggcacctaaattgagacccgtgtccacccaactatattctactcgtgagaagcagcagttggcctcgctggtaggcaccatgctggcctattccctcacatacagacaagagcgaacccccgacgggcagtacatttacaggctggaacccaacgtggaggagctgtgcagatttccagaactcccagccaggaaacctctgacctaccaaacgaaacagctgattgccagagagattgaggtggagaagatgaggcgcgctgaggctagtgctagggtcgagaactctccacaggtggacggctcccctcctggcctggagggactgcttggagggattggagagaaaggcgtgcataggcccgctcctaggaatcacgaacagcgcctggagcatattatgcggcgtgccgcaagagaagaacagccagagaaagacttcttcggcagagtcgtcgtgcggagcacagccgtcccatccgcaggtgacacagccccagagcaggatagcgtggaaaggcgcatgggtacagctgtgggccgctctgaagtgtggttccgtttcaacgagggcgtctcaaacgcagtgaggcgttctttgtatattcgggatctgctgtag

SEQ ID NO: 273716 - DNA, 3012 bp, Artificial Sequence
  derived and/or modified sequence
atggaggattatgagcaggagctgtgtggggttgaagatgacttccataaccaattcgcagcagagctcgaggtgctcgcagaactggaaggggcttctactccatccccaagtggtgtaccactcttcaccgctgggcgtccacctcgaacgtttgaggaagcgctggcgaggggtgacgcagccagttctcctgcccctgctgccagcgtcggaagctcccagggaggcgcacgaaagagacaggtcgacgccgacctgcagccagcgggtagtcttcctcatgggagactggctgcccttccacaggggctgagatctggacgggaagctgaggaagcatctgggtcgcttcacgtgtcccctcctgcacccagaataaagcgcccaagactccaagtagtgaagaggttgaatttccgctccgaagagatggaagagccaccccctcccgacagctctcctacggatattacacctcctccttcacccgaggacctggcagaactgtggggccacggcgttagcgaggcagcagccgatgtgggcctaacccgagcgagtcctgcagccagaaaccccgtgttgcgcagacccccaattctcgaggattacgtacatgtaaccagcactgagggtgtccgagcttaccttgttctgagagctgaccctatggcccctggggtgcagggatctctcctccatgttccttggaggggcggaggtcagctagaccttttgggagtctcccttgcttcccttaagaaacaagttgacggcgagaggcgtgagagactacttcaggaagcacagaagctctccgatactctccatagcctaaggtcaggcgaagaagaagctgcgcagcctctcggtgcccctgaggaggaaccaactgacgggcaggacgcctccagtcactgtctgtgggtggatgaattcgccccaagacactatactgaattgctttctgatgactttactaataggtgcctgctcaagtggcttaaactgtgggaccttgtagtgtttgggcacgaacgtccgtctcggaaaccgaggccttccgtggagccagcacgggtatccaaagaagctactgccccaggcaagtggaaatcccacgaacaagtgctcgaagaaatgctcgaggcgggtctggatcctagccagagacccaagcagaaggttgccttgctctgcggccctccgggtctcggcaagacaaccctcgcacatgtcattgctcgccacgccggatactccgtggtcgaaatgaacgcctcggacgacaggtctcccgaggtgtttcgaactagaattgaggccgctacccagatggaatcagtcctgggcgcaggaggcaaacctaactgtctggtgattgatgagatcgacggtgcccctgtagccgctatcaatgtcctgttaagtattctcaatcgcaaaggtcctcaggaggtgggccctcagggccctgccgtgccatctggaggtgggagaagacgcagggccgaaggaggattgttgatgagacccatcatttgtatttgcaatgatcaattcgccccatcactgcggcaattgaaacagcaggcattccttttacactttccaccgacgttaccaagcagactggtccaacgcttacaggaggttagtctgcgccaggggatgagggccgatcccggagttcttgcagcactctgtgaaaagacagataacgatattagagcttgtataaacaccctccagtttctatattcgagggggcaacgagagctttcagttcgagacgtccaagccacacgcgtgggccttaaggaccagaggagaggactgttctcagtgtggcaggaggtgttccagctgccacgggcacagagaaggagggtgggccaggaccctgccctgcccgcagacactctgttactgggggatggcgacgccggaagcttgaccagcgcttcccagcgtttttatcgagtactccacgctgctgccagcgccggagagcatgagaaagtagtgcagggcctgtttgataattttctccgcttaaggcttagagattcgtccttgggcgcagtatgcgttgccctggactggctggccttcgatgatctgttggccggagctgctcaccacagccagagttttcagttactgcgctacccgccatttcttcccgtcgcctttcacgttctattcgcttctagccacacccctcggattacttttccgagctctcagcaggaggctcagaacagaatgtctcagatgagaaatctcatacagacattggtctcaggaatcgctccagctaccagatcgagagcaaccccccaggccctcctactcgatgcactctgcctgctcctagatatactggcacccaaattgcgacctgtgtcaacacagctgtactcaactcgtgaaaagcagcagctggcatccctggtgggcaccatgctagcatacagtcttacatatcgacaagaacggactccagatggccagtatatctaccgactcgagccgaacgtggaagagctttgccggttccccgaactccccgctcgaaagcctcttacataccagactaaacagctgatagctcgagagatagaagtagagaagatgagaagagcggaggccagcgcacgggtggagaattccccccaggtcgatggtagcccccctgggttggaaggtcttctgggaggaattggtgagaagggagtacaccgcccagcacctcgaaaccacgagcagaggctggagcacattatgaggcgtgctgcgcgtgaagagcagcccgaaaaggacttctttggacgggtggttgtcagatcgactgctgtgccaagtgcgggagataccgccccagagcaagactccgtggagcggaggatgggcacggcagtcgggagaagcgaagtgtggtttcgtttcaatgaaggagtatctaacgccgtccggagatcgctgtatattagggatctcctgtag

SEQ ID NO: 273717 - DNA, 3150 bp, Artificial Sequence
  derived and/or modified sequence
gcgggaggttcggagcgggagctcgggctcgcggacggtatggaggactacgagcaggagctgtgcggcgtcgaggatgatttccacaaccagttcgcggccgagctggaggtgctggcagagctggaaggggcgtcgactccgtcgccctccggggtccccctgttcaccgcgggccgacccccgcggacgttcgaggaggcccttgccagaggggacgcggcctccagtcccgccccagccgcatctgtgggcagcagccagggcggcgccaggaagaggcaggtggacgccgacctgcagccggccgggtccctgccccacggtaggttggcggcattgccccagggcctccggagtgggcgcgaggctgaggaggcctctggttccctgcatgtgtctcccccagcccccaggatcaaacggcctaggctgcaggtggtcaagaggctgaacttcagatcggaggagatggaggagccgccccctcccgactcctcgccgacggacatcaccccgccgccgagccctgaggacctcgcagagctttggggccacggagtctcagaagctgctgccgacgtgggtctcacacgggcctcaccagctgcccgcaatcccgtcctgaggcggccccccatcttggaggactacgtccacgtgacatccacggagggcgtccgggcttatctggtgctgcgtgctgaccccatggccccgggggtgcagggctctctcctccacgtcccatggcgaggcggtggccagctggacctgctgggtgtgtccttagcctccctgaagaagcaggtcgacggcgagcggcgggagcggctgcttcaggaggcccagaagctttcagacaccctgcacagtctcaggtcgggggaggaggaggcagcccagcccttgggggcccctgaggaggagccgactgacggtcaagacgcctccagtcactgcctctgggtggatgagtttgcaccccgccactacacggagctgctcagtgatgacttcaccaaccgctgcctgctcaagtggctgaagttgtgggacctggtggtgtttggccacgagaggccttcccggaagcccaggcccagtgttgagccggcccgggtcagcaaggaggccacagccccaggcaagtggaagagccacgaacaggtgctggaggagatgctggaggctgggctggacccgagccagcgaccgaagcagaaggtggcactgctctgtgggcccccggggctggggaagaccaccctggcacacgtgattgcgcgtcacgcggggtactctgtggtggagatgaacgccagtgacgaccgtagcccggaggtcttccgcacacgcatcgaggcggccacccagatggagtcggtgctgggtgctggcgggaagcccaactgcctggtcatcgatgagatcgacggggcccccgtggccgccatcaacgtcctcctgagcatcctgaaccgcaaggggccacaggaggtggggccacagggcccggctgtgccttcgggaggcggccgacggcgccgggcagagggggggctcctcatgaggcccattatctgcatttgcaatgaccagttcgcaccgtccctgcggcagctgaagcagcaggccttcctgctccacttcccgccgactctgccctcgaggctggtgcagcggctccaggaggtctccctgcggcagggcatgagggccgacccaggggtgctggccgccctctgtgagaaaactgacaatgacatccgggcctgcatcaacaccctgcagttcctgtacagccggggccagcgggagctgagcgtgcgggacgtgcaggccacacgcgtgggcctcaaggaccagcgcagagggctcttctcggtgtggcaggaggtcttccagctgcctcgagcccagaggcgccgtgtgggccaggaccccgccctgcctgctgacacactcctgctgggtgacggggacgcgggctccctcacctccgcctcacagcgattctaccgtgtcctgcatgccgctgcctctgcgggcgagcacgagaaggtggtccagggcttgtttgacaacttcctgcgtctgcggctgcgagactccagcctgggtgctgtgtgtgtggccctcgactggctggccttcgatgacctgctggcgggggctgctcatcacagccagagcttccagctgctgcgctacccacccttcctgcccgtggccttccatgtgctgtttgcttccagccacacacccaggatcaccttccccagcagccagcaggaggcccagaaccggatgagccagatgaggaacctgatccagacgctggtgtccggcatcgcgccagccacgcgcagccgggccacgccccaggccctgctcctcgatgccctctgcctgctcctggacattcttgcacccaagctccgccccgtgagcacacagctgtacagcacccgtgaaaagcaacagctggccagcctggtgggcacgatgctcgcttacagcctgacctaccgccaggagcgcacgcccgatggccagtacatctacaggctggagccgaacgtggaggaactctgccgcttccctgagctgcctgcccgcaagcccctcacctaccagacgaagcagctcatcgcccgcgagatcgaggtggagaagatgcggcgggcggaggcttctgcccgggtagagaacagcccccaggtggatgggagccccccagggctcgagggtctgctggggggcattggggagaaaggggtgcaccgacctgccccacgcaaccatgagcagcggctggagcacatcatgaggcgagcggcccgggaggaacagcctgagaaggacttctttggacgtgtggtcgtcaggagcacagcagtcccgagtgcaggggacacggccccggagcaggactcagtggagcggcgcatgggcacagcggtgggcaggagcgaggtctggttccgcttcaacgagggtgtctccaacgccgtgcggcgcagcctgtacatcagggacttgctctagttctctgagccgcggacatgccctcgcattgcttcccgcagagtgcagagacaggaagctggagatgtctttataaagtcacacctttacagactgtaa

SEQ ID NO: 273718 - DNA, 3012 bp, Artificial Sequence
  derived and/or modified sequence
atggaggactacgagcaggagctgtgcggcgtggaggacgacttccacaaccagttcgccgccgagctggaggtgctggccgagctggagggcgccagcacccccagccccagcggcgtgcccctgttcaccgccggcagaccccccagaaccttcgaggaggccctggccagaggcgacgccgccagcagccccgcccccgccgccagcgtgggcagcagccagggcggcgccagaaagagacaggtggacgccgacctgcagcccgccggcagcctgccccacggcagactggccgccctgccccagggcctgagaagcggcagagaggccgaggaggccagcggcagcctgcacgtgagcccccccgcccccagaatcaagagacccagactgcaggtggtgaagagactgaacttcagaagcgaggagatggaggagccccccccccccgacagcagccccaccgacatcacccccccccccagccccgaggacctggccgagctgtggggccacggcgtgagcgaggccgccgccgacgtgggcctgaccagagccagccccgccgccagaaaccccgtgctgagaagaccccccatcctggaggactacgtgcacgtgaccagcaccgagggcgtgagagcctacctggtgctgagagccgaccccatggcccccggcgtgcagggcagcctgctgcacgtgccctggagaggcggcggccagctggacctgctgggcgtgagcctggccagcctgaagaagcaggtggacggcgagagaagagagagactgctgcaggaggcccagaagctgagcgacaccctgcacagcctgagaagcggcgaggaggaggccgcccagcccctgggcgcccccgaggaggagcccaccgacggccaggacgccagcagccactgcctgtgggtggacgagttcgcccccagacactacaccgagctgctgagcgacgacttcaccaacagatgcctgctgaagtggctgaagctgtgggacctggtggtgttcggccacgagagacccagcagaaagcccagacccagcgtggagcccgccagagtgagcaaggaggccaccgcccccggcaagtggaagagccacgagcaggtgctggaggagatgctggaggccggcctggaccccagccagagacccaagcagaaggtggccctgctgtgcggcccccccggcctgggcaagaccaccctggcccacgtgatcgccagacacgccggctacagcgtggtggagatgaacgccagcgacgacagaagccccgaggtgttcagaaccagaatcgaggccgccacccagatggagagcgtgctgggcgccggcggcaagcccaactgcctggtgatcgacgagatcgacggcgcccccgtggccgccatcaacgtgctgctgagcatcctgaacagaaagggcccccaggaggtgggcccccagggccccgccgtgcccagcggcggcggcagaagaagaagagccgagggcggcctgctgatgagacccatcatctgcatctgcaacgaccagttcgcccccagcctgagacagctgaagcagcaggccttcctgctgcacttcccccccaccctgcccagcagactggtgcagagactgcaggaggtgagcctgagacagggcatgagagccgaccccggcgtgctggccgccctgtgcgagaagaccgacaacgacatcagagcctgcatcaacaccctgcagttcctgtacagcagaggccagagagagctgagcgtgagagacgtgcaggccaccagagtgggcctgaaggaccagagaagaggcctgttcagcgtgtggcaggaggtgttccagctgcccagagcccagagaagaagagtgggccaggaccccgccctgcccgccgacaccctgctgctgggcgacggcgacgccggcagcctgaccagcgccagccagagattctacagagtgctgcacgccgccgccagcgccggcgagcacgagaaggtggtgcagggcctgttcgacaacttcctgagactgagactgagagacagcagcctgggcgccgtgtgcgtggccctggactggctggccttcgacgacctgctggccggcgccgcccaccacagccagagcttccagctgctgagatacccccccttcctgcccgtggccttccacgtgctgttcgccagcagccacacccccagaatcaccttccccagcagccagcaggaggcccagaacagaatgagccagatgagaaacctgatccagaccctggtgagcggcatcgcccccgccaccagaagcagagccaccccccaggccctgctgctggacgccctgtgcctgctgctggacatcctggcccccaagctgagacccgtgagcacccagctgtacagcaccagagagaagcagcagctggccagcctggtgggcaccatgctggcctacagcctgacctacagacaggagagaacccccgacggccagtacatctacagactggagcccaacgtggaggagctgtgcagattccccgagctgcccgccagaaagcccctgacctaccagaccaagcagctgatcgccagagagatcgaggtggagaagatgagaagagccgaggccagcgccagagtggagaacagcccccaggtggacggcagcccccccggcctggagggcctgctgggcggcatcggcgagaagggcgtgcacagacccgcccccagaaaccacgagcagagactggagcacatcatgagaagagccgccagagaggagcagcccgagaaggacttcttcggcagagtggtggtgagaagcaccgccgtgcccagcgccggcgacaccgcccccgagcaggacagcgtggagagaagaatgggcaccgccgtgggcagaagcgaggtgtggttcagattcaacgagggcgtgagcaacgccgtgagaagaagcctgtacatcagagacctgctgtag

SEQ ID NO: 273719 - protein, 217 aa, Artificial Sequence
  derived and/or modified sequence
MEHAPWSPGASSRARAGHTMNTSPGTVGSDPVILATAGYDHTVRFWQAHSGICTRTVQHQDSQVNALEVTPDRSMIAAAGYQHIRMYDLNSNNPNPIISYDGVNKNIASVGFHEDGRWMYTGGEDCTARIWDLRSRNLQCQRIFQVNAPINCVCLHPNQAELIVGDQSGAIHIWDLKTDHNEQLIPEPEVSITSAHIDPDASYMAAVNSTAPRHLLG

SEQ ID NO: 273720 - DNA, 654 bp, Artificial Sequence
  derived and/or modified sequence
atggagcatgcaccctggagtcctggtgctagtagtagggctcgcgcagggcacacaatgaatacaagccccgggaccgtgggatccgaccctgtgattctcgcaacggcagggtacgaccatacggtacgattctggcaggcccattccgggatctgtacaagaaccgtgcaacaccaggatagtcaggtgaatgctcttgaggtgactcctgacaggtctatgatcgcggctgccggataccaacacattagaatgtacgatctgaattctaataacccaaatcccatcatctcttatgacggggtgaacaagaacatagctagtgtcgggttccatgaagatggccgttggatgtatactgggggtgaagactgtactgctcgcatttgggatctgcgcagtcggaatctgcagtgtcagcgaatattccaggtcaacgcccctattaactgcgtttgtcttcaccccaatcaggccgaactgattgtaggggatcagtccggagccatacatatctgggatctaaagacagatcataacgagcagctcattccggagccagaagtaagcattacctccgctcacatcgaccccgatgccagctatatggccgctgtaaatagcacggccccccgccacctcctggggtag

SEQ ID NO: 273721 - DNA, 654 bp, Artificial Sequence
  derived and/or modified sequence
atggagcacgccccctggagccctggggccagcagccgggcccgggccggccacaccatgaacaccagccctggcaccgtgggcagtgaccctgtgatcctggccacagctggctatgaccacacagtgcgcttctggcaggcccacagcggcatctgcaccaggacagtgcagcaccaggacagccaggtgaatgccctggaggtgaccccagaccgctccatgattgctgctgctggctaccagcacatccgcatgtatgacctgaacagcaacaaccccaaccccatcatctcctatgatggagtgaacaagaacatcgcctctgtgggcttccatgaagatggccgctggatgtacacaggaggagaggactgcacagcccgcatctgggacctgcggagcaggaacctgcagtgccagaggatcttccaggtgaatgcccccatcaactgtgtgtgcctgcaccccaaccaggccgagctgattgtgggggaccagagcggggccatccacatctgggacctgaagacagaccacaatgagcagctgatccctgagcctgaggtgtccatcaccagcgcccacattgatcctgatgccagctacatggctgctgtgaacagcacagcccccaggcacctgctgggctag

SEQ ID NO: 273722 - DNA, 1861 bp, Artificial Sequence
  derived and/or modified sequence
gtagtgggtcagggagggcaccggaacagcgcgacccgacagcccgggaaacggacagccgtgtcagaagggcaggtgccagtgggcaggaggccggagagaaagccgcagcttccttccacctcgcgccgggcccgcggccgcgcacggggaccgctccgagttcctcccggcgggaaccccccgccccagaactttggtctcgtcccacccacccccgcccgcgccatggtctcgccctagggagccatcgataactctacgctcggcctcgatcgactcgctccggctcccctcgccgtcctggacacggcggagtgcggagccgcccgtaagctctagggcccgtgcaggccacaccatgaacacctccccaggcacggtgggcagtgacccggtcatcctggccactgcaggctacgaccacaccgtgcgcttctggcaggcccacagcggcatctgcacccggacggtgcagcaccaggactcccaggtgaatgccttggaggtcacaccggaccgcagcatgattgctgctgcaggttaccagcacatccgcatgtatgatctcaactccaataaccctaaccccatcatcagctacgacggcgtcaacaagaacatcgcgtctgtgggcttccacgaagacggccgctggatgtacacgggcggcgaggactgcacagccaggatctgggacctcaggtcccggaacctgcagtgccagcggatcttccaggtgaacgcacccattaactgcgtgtgcctgcaccccaaccaggcagagctcatcgtgggtgaccagagcggggctatccacatctgggacttgaaaacagaccacaacgagcagctgatccctgagcccgaggtctccatcacgtccgcccacatcgatcccgacgccagctacatggcagctgtcaatagcaccggaaactgctatgtctggaatctgacggggggcattggtgacgaggtgacccagctcatccccaagactaagatccctgcccacacgcgctacgccctgcagtgtcgcttcagccccgactccacgctcctcgccacctgctcggctgatcagacgtgcaagatctggaggacgtccaacttctccctgatgacggagctgagcatcaagagcggcaaccccggggagtcctcccgcggctggatgtggggctgcgccttctcgggggactcccagtacatcgtcactgcttcctcggacaacctggcccggctctggtgtgtggagactggagagatcaagagagagtatggcggccaccagaaggctgttgtctgcctggccttcaatgacagtgtgctgggctagcctgtgacccctcgggactgcctggtgcaggtggtggcagctggagggacccatgcagcacccaggtcagagcagaccctcccctgccggcctgcgccagctggacctgatggccccctgtggcgccttgacctgctgggccaggctgccctgggactctcagcccccagttgcttatccagatgtgacagagctcgacccaagccaggctgcacactcctggactgggctagcctgcactgcctgggaaagtcggccgagggcccaaagctgctgaggggtctgaggctggtgcccacccccaagctagtgtgttctctgcccctccctgcccgcgtttcagggcctcggtccatagagaacaccaccaccatggccaggtggaagggtttattagtccctgccagcagctgtcctccctggtgcaggtggcctggccagcccactggattggggacgggccaggctgggccaggtcgggggctcagtctgggaggtaataaaagcagaccgacacgc

SEQ ID NO: 273723 - DNA, 1870 bp, Artificial Sequence
  derived and/or modified sequence
gacagcccgggaaacggacagccgtgtcagaagggcaggtgccagtgggcaggaggccggagagaaagccgcagcttccttccacctcgcgccgggcccgcggccgcgcacggggaccgctccgagttcctcccggcgggaaccccccgccccagaactttggtctcgtcccacccacccccgcccgcgccatggtctcgccctagggagccatcgataactctacgctcggcctcgatcgactcgctccggctcccctcgccgtcctggacacggcggagtgcggagccgcccgtaagatgctctgacctttgacccctgccgttcagctctagggcccgtgcaggccacaccatgaacacctccccaggcacggtgggcagtgacccggtcatcctggccactgcaggctacgaccacaccgtgcgcttctggcaggcccacagcggcatctgcacccggacggtgcagcaccaggactcccaggtgaatgccttggaggtcacaccggaccgcagcatgattgctgctgcaggttaccagcacatccgcatgtatgatctcaactccaataaccctaaccccatcatcagctacgacggcgtcaacaagaacatcgcgtctgtgggcttccacgaagacggccgctggatgtacacgggcggcgaggactgcacagccaggatctgggacctcaggtcccggaacctgcagtgccagcggatcttccaggtgaacgcacccattaactgcgtgtgcctgcaccccaaccaggcagagctcatcgtgggtgaccagagcggggctatccacatctgggacttgaaaacagaccacaacgagcagctgatccctgagcccgaggtctccatcacgtccgcccacatcgatcccgacgccagctacatggcagctgtcaatagcaccggaaactgctatgtctggaatctgacggggggcattggtgacgaggtgacccagctcatccccaagactaagatccctgcccacacgcgctacgccctgcagtgtcgcttcagccccgactccacgctcctcgccacctgctcggctgatcagacgtgcaagatctggaggacgtccaacttctccctgatgacggagctgagcatcaagagcggcaaccccggggagtcctcccgcggctggatgtggggctgcgccttctcgggggactcccagtacatcgtcactgcttcctcggacaacctggcccggctctggtgtgtggagactggagagatcaagagagagtatggcggccaccagaaggctgttgtctgcctggccttcaatgacagtgtgctgggctagcctgtgacccctcgggactgcctggtgcaggtggtggcagctggagggacccatgcagcacccaggtcagagcagaccctcccctgccggcctgcgccagctggacctgatggccccctgtggcgccttgacctgctgggccaggctgccctgggactctcagcccccagttgcttatccagatgtgacagagctcgacccaagccaggctgcacactcctggactgggctagcctgcactgcctgggaaagtcggccgagggcccaaagctgctgaggggtctgaggctggtgcccacccccaagctagtgtgttctctgcccctccctgcccgcgtttcagggcctcggtccatagagaacaccaccaccatggccaggtggaagggtttattagtccctgccagcagctgtcctccctggtgcaggtggcctggccagcccactggattggggacgggccaggctgggccaggtcgggggctcagtctgggaggtaataaaagcagaccgacacgcagatgttgctcgggaa

SEQ ID NO: 273724 - DNA, 1720 bp, Artificial Sequence
  derived and/or modified sequence
gtgcggagccgcccgtaagatgctctgacctttgacccctgccgttcagctctagggcccgtgcaggccacaccatgaacacctccccaggcacggtgggcagtgacccggtcatcctggccactgcaggctacgaccacaccgtgcgcttctggcaggcccacagcggcatctgcacccggacggtgcagcaccaggactcccaggtgaatgccttggaggtcacaccggaccgcagcatgattgctgctgcaggttaccagcacatccgcatgtatgatctcaactccaataaccctaaccccatcatcagctacgacggcgtcaacaagaacatcgcgtctgtgggcttccacgaagacggccgctggatgtacacgggcggcgaggactgcacagccaggatctgggacctcaggtcccggaacctgcagtgccagcggatcttccaggtgaacgcacccattaactgcgtgtgcctgcaccccaaccaggcagagctcatcgtgggtgaccagagcggggctatccacatctgggacttgaaaacagaccacaacgagcagctgatccctgagcccgaggtctccatcacgtccgcccacatcgatcccgacgccagctacatggcagctgtcaatagcaccggaaactgctatgtctggaatctgacggggggcattggtgacgaggtgacccagctcatccccaagactaagatccctgcccacacgcgctacgccctgcagtgtcgcttcagccccgactccacgctcctcgccacctgctcggctgatcagacgtgcaagatctggaggacgtccaacttctccctgatgacggagctgagcatcaagagcggcaaccccggggagtcctcccgcggctggatgtggggctgcgccttctcgggggactcccagtacatcgtcactggtgagccccgccctggcctcccccatccctggcccccggcgctggcctccagagccagcccacctcggctgcagcttcccctctgctggggccgcctgcttggcctgcacctgcgctcttagccctgcacaatctccccctccagcttcctcggacaacctggcccggctctggtgtgtggagactggagagatcaagagagagtatggcggccaccagaaggctgttgtctgcctggccttcaatgacagtgtgctgggctagcctgtgacccctcgggactgcctggtgcaggtggtggcagctggagggacccatgcagcacccaggtcagagcagaccctcccctgccggcctgcgccagctggacctgatggccccctgtggcgccttgacctgctgggccaggctgccctgggactctcagcccccagttgcttatccagatgtgacagagctcgacccaagccaggctgcacactcctggactgggctagcctgcactgcctgggaaagtcggccgagggcccaaagctgctgaggggtctgaggctggtgcccacccccaagctagtgtgttctctgcccctccctgcccgcgtttcagggcctcggtccatagagaacaccaccaccatggccaggtggaagggtttattagtccctgccagcagctgtcctccctggtgcaggtggcctggccagcccactggattggggacgggccaggctgggccaggtcgggggctcagtctgggaggtaataaaagcagaccgacacgca

SEQ ID NO: 273725 - DNA, 1432 bp, Artificial Sequence
  derived and/or modified sequence
atggagcacgcgccctggagccccggagccagctctagggcccgtgcaggccacaccatgaacacctccccaggcacggtgggcagtgacccggtcatcctggccactgcaggctacgaccacaccgtgcgcttctggcaggcccacagcggcatctgcacccggacggtgcagcaccaggactcccaggtgaatgccttggaggtcacaccggaccgcagcatgattgctgctgcaggttaccagcacatccgcatgtatgatctcaactccaataaccctaaccccatcatcagctacgacggcgtcaacaagaacatcgcgtctgtgggcttccacgaagacggccgctggatgtacacgggcggcgaggactgcacagccaggatctgggacctcaggtcccggaacctgcagtgccagcggatcttccaggtgaacgcacccattaactgcgtgtgcctgcaccccaaccaggcagagctcatcgtgggtgaccagagcggggctatccacatctgggacttgaaaacagaccacaacgagcagctgatccctgagcccgaggtctccatcacgtccgcccacatcgatcccgacgccagctacatggcagctgtcaatagcaccgctcctcgccacctgctcggctgatcagacgtgcaagatctggaggacgtccaacttctccctgatgacggagctgagcatcaagagcggcaaccccggggagtcctcccgcggctggatgtggggctgcgccttctcgggggactcccagtacatcgtcactgcttcctcggacaacctggcccggctctggtgtgtggagactggagagatcaagagagagtatggcggccaccagaaggctgttgtctgcctggccttcaatgacagtgtgctgggctagcctgtgacccctcgggactgcctggtgcaggtggtggcagctggagggacccatgcagcacccaggtcagagcagaccctcccctgccggcctgcgccagctggacctgatggccccctgtggcgccttgacctgctgggccaggctgccctgggactctcagcccccagttgcttatccagatgtgacagagctcgacccaagccaggctgcacactcctggactgggctagcctgcactgcctgggaaagtcggccgagggcccaaagctgctgaggggtctgaggctggtgcccacccccaagctagtgtgttctctgcccctccctgcccgcgtttcagggcctcggtccatagagaacaccaccaccatggccaggtggaagggtttattagtccctgccagcagctgtcctccctggtgcaggtggcctggccagcccactggattggggacgggccaggctgggccaggtcgggggctcagtctgggaggtaataaaagcagaccgacacgc

SEQ ID NO: 273726 - DNA, 1832 bp, Artificial Sequence
  derived and/or modified sequence
gtgtcagaagggcaggtgccagtgggcaggaggccggagagaaagccgcagcttccttccacctcgcgccgggcccgcggccgcgcacggggaccgctccgagttcctcccggcgggaaccccccgccccagaactttggtctcgtcccacccacccccgcccgcgccatggtctcgccctagggagccatcgataactctacgctcggcctcgatcgactcgctccggctcccctcgccgtcctggacacggcggagtgcggagccgcccgtaagatgctctgacctttgacccctgccgttcagctctagggcccgtgcaggccacaccatgaacacctccccaggcacggtgggcagtgacccggtcatcctggccactgcaggctacgaccacaccgtgcgcttctggcaggcccacagcggcatctgcacccggacggtgcagcaccaggactcccaggtgaatgccttggaggtcacaccggaccgcagcatgattgctgctgcaggttaccagcacatccgcatgtatgatctcaactccaataaccctaaccccatcatcagctacgacggcgtcaacaagaacatcgcgtctgtgggcttccacgaagacggccgctggatgtacacgggcggcgaggactgcacagccaggatctgggacctcaggtcccggaacctgcagtgccagcggatcttccaggtgaacgcacccattaactgcgtgtgcctgcaccccaaccaggcagagctcatcgtgggtgaccagagcggggctatccacatctgggacttgaaaacagaccacaacgagcagctgatccctgagcccgaggtctccatcacgtccgcccacatcgatcccgacgccagctacatggcagctgtcaatagcaccggaaactgctatgtctggaatctgacggggggcattggtgacgaggtgacccagctcatccccaagactaagatccctgcccacacgcgctacgccctgcagtgtcgcttcagccccgactccacgctcctcgccacctgctcggctgatcagacgtgcaagatctggaggacgtccaacttctccctgatgacggagctgagcatcaagagcggcaaccccggggagtcctcccgcggctggatgtggggctgcgccttctcgggggactcccagtacatcgtcactgcttcctcggacaacctggcccggctctggtgtgtggagactggagagatcaagagagagtatggcggccaccagaaggctgttgtctgcctggccttcaatgacagtgtgctgggctagcctgtgacccctcgggactgcctggtgcaggtggtggcagctggagggacccatgcagcacccaggtcagagcagaccctcccctgccggcctgcgccagctggacctgatggccccctgtggcgccttgacctgctgggccaggctgccctgggactctcagcccccagttgcttatccagatgtgacagagctcgacccaagccaggctgcacactcctggactgggctagcctgcactgcctgggaaagtcggccgagggcccaaagctgctgaggggtctgaggctggtgcccacccccaagctagtgtgttctctgcccctccctgcccgcgtttcagggcctcggtccatagagaacaccaccaccatggccaggtggaagggtttattagtccctgccagcagctgtcctccctggtgcaggtggcctggccagcccactggattggggacgggccaggctgggccaggtcgggggctcagtctgggaggtaataaaagcagaccgacacgca

SEQ ID NO: 273727 - DNA, 1691 bp, Artificial Sequence
  derived and/or modified sequence
cgcagcccgcccctgcggcagagtggcgcccgcgcgtgactcccccctgccggctgcggaggtgggggggggacggcgcccccgccgtgtgcgtggggcggggatggagcacgcgccctggagccccggagccagatgctctgacctttgacccctgccgttcagctctagggcccgtgcaggccacaccatgaacacctccccaggcacggtgggcagtgacccggtcatcctggccactgcaggctacgaccacaccgtgcgcttctggcaggcccacagcggcatctgcacccggacggtgcagcaccaggactcccaggtgaatgccttggaggtcacaccggaccgcagcatgattgctgctgcaggttaccagcacatccgcatgtatgatctcaactccaataaccctaaccccatcatcagctacgacggcgtcaacaagaacatcgcgtctgtgggcttccacgaagacggccgctggatgtacacgggcggcgaggactgcacagccaggatctgggacctcaggtcccggaacctgcagtgccagcggatcttccaggtgaacgcacccattaactgcgtgtgcctgcaccccaaccaggcagagctcatcgtgggtgaccagagcggggctatccacatctgggacttgaaaacagaccacaacgagcagctgatccctgagcccgaggtctccatcacgtccgcccacatcgatcccgacgccagctacatggcagctgtcaatagcaccggaaactgctatgtctggaatctgacggggggcattggtgacgaggtgacccagctcatccccaagactaagatccctgcccacacgcgctacgccctgcagtgtcgcttcagccccgactccacgctcctcgccacctgctcggctgatcagacgtgcaagatctggaggacgtccaacttctccctgatgacggagctgagcatcaagagcggcaaccccggggagtcctcccgcggctggatgtggggctgcgccttctcgggggactcccagtacatcgtcactgcttcctcggacaacctggcccggctctggtgtgtggagactggagagatcaagagagagtatggcggccaccagaaggctgttgtctgcctggccttcaatgacagtgtgctgggctagcctgtgacccctcgggactgcctggtgcaggtggtggcagctggagggacccatgcagcacccaggtcagagcagaccctcccctgccggcctgcgccagctggacctgatggccccctgtggcgccttgacctgctgggccaggctgccctgggactctcagcccccagttgcttatccagatgtgacagagctcgacccaagccaggctgcacactcctggactgggctagcctgcactgcctgggaaagtcggccgagggcccaaagctgctgaggggtctgaggctggtgcccacccccaagctagtgtgttctctgcccctccctgcccgcgtttcagggcctcggtccatagagaacaccaccaccatggccaggtggaagggtttattagtccctgccagcagctgtcctccctggtgcaggtggcctggccagcccactggattggggacgggccaggctgggccaggtcgggggctcagtctgggaggtaataaaagcagaccgacacgca

SEQ ID NO: 273728 - DNA, 654 bp, Artificial Sequence
  derived and/or modified sequence
atggagcacgccccctggagccccggcgccagcagccgggcccgggccgggcacaccatgaatacctccccaggcacagtggggagcgacccagtgatcttggccactgccgggtatgatcacacagtgcgtttttggcaggcccactctgggatttgcaccagaaccgttcaacatcaggattcccaagtcaacgccctggaggtgactccagatcgttccatgattgccgcagccggttaccaacacatcagaatgtatgaccttaatagcaacaatccaaatcctatcatatcctacgacggcgtgaacaagaatatcgctagtgtgggcttccatgaagatggcagatggatgtacacagggggagaagattgcacggcaaggatctgggacctgcggagtcgcaacctgcagtgtcagcggatctttcaggtgaatgctccgattaactgtgtctgcttgcatcctaaccaggcggagctcattgtgggcgatcagtcaggagccatccatatctgggacctcaaaacagaccacaacgaacagctgatccccgagcccgaagtcagtattaccagcgcccatattgacccggacgccagctacatggccgctgtgaattccaccgcccccaggcacctcctgggttag

SEQ ID NO: 273729 - DNA, 654 bp, Artificial Sequence
  derived and/or modified sequence
atggaacacgcgccttggtcccctggggcaagttctagggctcgagctggccatactatgaatactagtccagggactgtaggcagcgatcctgtgatcttggctactgctggctatgaccacaccgtcaggttttggcaggcacactccgggatctgcacccgcaccgtacagcatcaagattcccaagttaacgccctggaagtgactcccgacaggtccatgatcgcggctgcgggttaccagcacattagaatgtatgaccttaatagcaacaacccgaaccccatcatctcttacgacggggtgaataagaacatcgcaagcgtgggcttccatgaggatggaaggtggatgtacactggaggtgaagattgcacagcgaggatttgggacctacgcagtcggaacctgcagtgccagaggatttttcaggtgaacgcgcctattaattgtgtctgcctgcaccctaaccaagccgaactgattgtaggcgaccagagtggagccattcacatatgggacctaaagactgaccataacgaacagctgattccggagccagaagtgtccattacgtccgctcatatcgaccctgacgcctcttatatggctgccgtgaactcaaccgccccacgacatctgctggggtag

SEQ ID NO: 273730 - DNA, 654 bp, Artificial Sequence
  derived and/or modified sequence
atggagcacgccccctggagccccggcgccagcagcagagccagagccggccacaccatgaacaccagccccggcaccgtgggcagcgaccccgtgatcctggccaccgccggctacgaccacaccgtgagattctggcaggcccacagcggcatctgcaccagaaccgtgcagcaccaggacagccaggtgaacgccctggaggtgacccccgacagaagcatgatcgccgccgccggctaccagcacatcagaatgtacgacctgaacagcaacaaccccaaccccatcatcagctacgacggcgtgaacaagaacatcgccagcgtgggcttccacgaggacggcagatggatgtacaccggcggcgaggactgcaccgccagaatctgggacctgagaagcagaaacctgcagtgccagagaatcttccaggtgaacgcccccatcaactgcgtgtgcctgcaccccaaccaggccgagctgatcgtgggcgaccagagcggcgccatccacatctgggacctgaagaccgaccacaacgagcagctgatccccgagcccgaggtgagcatcaccagcgcccacatcgaccccgacgccagctacatggccgccgtgaacagcaccgcccccagacacctgctgggctag

SEQ ID NO: 273731 - DNA, 699 bp, Artificial Sequence
  derived and/or modified sequence
tagaggccatgctgtattgggaccaagggaagatgcgagatcacgtcccgagagtattgcgattttatgcggggatactttcatgaagaggccacactttgtagccaggtacactgtatggatgacgtatgcggtctgctgcccttcttgaatccagagatgaccgtgctcagggatctcgaaaagctggccggttggcaccgaatcgctataatttatctgctctctggtgttaccggcaatttggcctctgctattttccttccatatcgcgccgaggtaggcccagccggctcccaatttggcatccttgcctgcctgtttgtggagttgttccagtcatggcagatcctagctaggccctggagagcctttttcaagctgctcgcggtcgttctattcctattcacattcggactcctcccatggattgataattttgcacatatctcagggtttatatccgggctgttcctgtcattcgcgtttctgccctacattagcttcggaaagtttgacttatacagaaagcgctgtcagatcatcatatttcaggttgtattcctggggctcttggcaggcctggtggtgctgttttacgtgtaccccgtgagatgcgagtggtgtgagttccttacgtgcataccattcactgacaagttttgcgagaagtacgaactggatgcacagttgcattag

SEQ ID NO: 273732 - DNA, 699 bp, Artificial Sequence
  derived and/or modified sequence
tgaagaccctgctgcatcggcaccaagggccgctgtgagatcaccagccgggagtactgtgacttcatgaggggctacttccacgaggaggccaccctgtgcagccaggtgcactgcatggatgatgtgtgtggcctgctgcccttcctgaaccctgagatgacagtgctgcgggacctggagaagctggccggctggcacagaattgccatcatctacctgctgagcggcgtgactggaaacctggccagcgccatcttcctgccctacagagctgaggtgggccctgctggcagccagtttggcatcctggcctgcctgtttgtggagctgttccagagctggcagatcctggcccggccctggagggccttcttcaagctgctggccgtggtgctcttcctgttcaccttcggcctgctgccctggattgacaactttgcccacatcagcggcttcatcagcggcctcttcctgagctttgccttcctgccctacatcagctttgggaagtttgacctgtacaggaagcgctgccagatcatcatcttccaggtggtgttcctgggcctgctggccggcctggtggtgctcttctacgtgtaccctgtgcgctgtgagtggtgtgagttcctgacctgcatccccttcacagacaagttctgtgagaagtatgagctggatgcccagctgcactag

SEQ ID NO: 273733 - DNA, 699 bp, Artificial Sequence
  derived and/or modified sequence
tgacggccctgctgcatcggcaccaagggccggtgcgagatcacctcacgcgaatactgtgacttcatgcgcgggtatttccacgaagaggcaaccctctgttcccaggtgcactgtatggatgatgtctgcgggttgctgccttttctgaaccctgagatgaccgtgttacgcgatctggaaaagctggccggctggcacagaattgccatcatctatcttctgagtggggtgactggtaatttggcttccgcgatattcttgccctaccgtgccgaagtaggccccgctgggtcgcaattcggcatactggcctgcctgtttgtggagctgtttcagtcatggcagatcctggcacggccatggagagcattctttaagctgctggcagtggtgctgtttcttttcacattcggactgttgccgtggatcgacaattttgcccacatatctgggtttatcagcggtctgtttctctcatttgcgttcctgccctatatttcctttggcaaatttgacctctatagaaaacgctgtcagatcatcatctttcaggtagtcttcctgggactgctggctggtctcgtcgttctgttttatgtgtatccagtgaggtgtgagtggtgcgaatttctcacttgtattccctttaccgataaattctgtgaaaagtacgaactggacgctcagctgcattag

SEQ ID NO: 273734 - DNA, 699 bp, Artificial Sequence
  derived and/or modified sequence
tgacgcccatgttgcatcgggacgaagggtagatgcgaaattactagtagagaatactgtgatttcatgagaggctactttcacgaggaggccactctctgcagtcaggtgcactgtatggacgacgtatgcggcctgctgcctttcctaaatccagaaatgacggtcctcagggatttggagaagcttgccggttggcataggattgcaatcatatacttgctgtctggtgtcaccggcaacctcgcctccgcaatctttcttccctaccgcgcagaggtgggacctgctggatcccagttcggtatcctcgcctgcttgtttgtggagctttttcagagctggcagatccttgcaaggccatggcgtgctttctttaaactgctggccgtggtgctgttcctgttcacttttggattattaccatggatcgacaacttcgctcacatcagcgggttcatatcaggcttgttccttagtttcgcctttttaccctacatctcgtttggtaaatttgacctgtaccggaagcggtgccaaatcatcatatttcaggttgtctttctcggcttactggccggactggtggtcctcttctatgtgtacccagtgcgatgtgagtggtgtgaatttctgacttgtattccctttactgataaattttgcgaaaaatacgaactggatgcccaactccattag

SEQ ID NO: 273735 - DNA, 901 bp, Artificial Sequence
  derived and/or modified sequence
gacggccctgctgcattggcaccaagggcaggtgtgagatcacctcccgggagtactgtgacttcatgaggggctacttccatgaggaggccacgctctgctctcaggtgcactgcatggatgatgtgtgtgggctcctgccttttctcaaccccgagatgactgtcctgcgggacctggagaagctggcaggctggcaccgcatagccatcatctacctgctgagtggtgtcaccggcaacctggccagtgccatcttcctgccataccgagcagaggtgggtcctgctggctcccagttcggcatcctggcctgcctcttcgtggagctcttccagagctggcagatcctggcgcggccctggcgtgccttcttcaagctgctggctgtggtgctcttcctcttcacctttgggctgctgccgtggattgacaactttgcccacatctcagggttcatcagtggcctcttcctctccttcgccttcttgccctacatcagctttggcaagttcgacctgtaccggaaacgctgccagatcatcatctttcaggtggtcttcctgggcctcctggctggcctggtggtcctcttctacgtctatcctgtccgctgtgagtggtgtgagttcctcacctgcatccccttcactgacaagttctgtgagaagtacgaactggacgctcagctccactgagctggctgcgggctccagcggccgtgtgctccagcaggccagagccagacacgacctccctgagcctcacaggcttacaggagtcacctgctccatgtggggactggcctgtttcctgaacacagacctctttcttgtgccttgttcacttctgttgaacccctcgtactgccgggcatttattatactacttcctgtcataa

SEQ ID NO: 273736 - DNA, 699 bp, Artificial Sequence
  derived and/or modified sequence
tgaagaccctgctgcatcggcaccaagggcagatgcgagatcaccagcagagagtactgcgacttcatgagaggctacttccacgaggaggccaccctgtgcagccaggtgcactgcatggacgacgtgtgcggcctgctgcccttcctgaaccccgagatgaccgtgctgagagacctggagaagctggccggctggcacagaatcgccatcatctacctgctgagcggcgtgaccggcaacctggccagcgccatcttcctgccctacagagccgaggtgggccccgccggcagccagttcggcatcctggcctgcctgttcgtggagctgttccagagctggcagatcctggccagaccctggagagccttcttcaagctgctggccgtggtgctgttcctgttcaccttcggcctgctgccctggatcgacaacttcgcccacatcagcggcttcatcagcggcctgttcctgagcttcgccttcctgccctacatcagcttcggcaagttcgacctgtacagaaagagatgccagatcatcatcttccaggtggtgttcctgggcctgctggccggcctggtggtgctgttctacgtgtaccccgtgagatgcgagtggtgcgagttcctgacctgcatccccttcaccgacaagttctgcgagaagtacgagctggacgcccagctgcactag

SEQ ID NO: 273737 - protein, 1764 aa, Artificial Sequence
  derived and/or modified sequence
MAKPTSKDSGLKEKFKILLGLGTPRPNPRSAEGKQTEFIITAEILRELSMECGLNNRIRMIGQICEVAKTKKFEEHAVEALWKAVADLLQPERPLEARHAVLALLKAIVQGQGERLGVLRALFFKVIKDYPSNEDLHERLEVFKALTDNGRHITYLEEELADFVLQWMDVGLSSEFLLVLVNLVKFNSCYLDEYIARMVQMICLLCVRTASSVDIEVSLQVLDAVVCYNCLPAESLPLFIVTLCRTINVKELCEPCWKLMRNLLGTHLGHSAIYNMCHLMEDRAYMEDAPLLRGAVFFVGMALWGAHRLYSLRNSPTSVLPSFYQAMACPNEVVSYEIVLSITRLIKKYRKELQVVAWDILLNIIERLLQQLQTLDSPELRTIVHDLLTTVEELCDQNEFHGSQERYFELVERCADQRPESSLLNLISYRAQSIHPAKDGWIQNLQALMERFFRSESRGAVRIKVLDVLSFVLLINRQFYEEELINSVVISQLSHIPEDKDHQVRKLATQLLVDLAEGCHTHHFNSLLDIIEKVMARSLSPPPELEERDVAAYSASLEDVKTAVLGLLVILQTKLYTLPASHATRVYEMLVSHIQLHYKHSYTLPIASSIRLQAFDFLLLLRADSLHRLGLPNKDGVVRFSPYCVCDYMEPERGSEKKTSGPLSPPTGPPGPAPAGPAVRLGSVPYSLLFRVLLQCLKQESDWKVLKLVLGRLPESLRYKVLIFTSPCSVDQLCSALCSMLSGPKTLERLRGAPEGFSRTDLHLAVVPVLTALISYHNYLDKTKQREMVYCLEQGLIHRCASQCVVALSICSVEMPDIIIKALPVLVVKLTHISATASMAVPLLEFLSTLARLPHLYRNFAAEQYASVFAISLPYTNPSKFNQYIVCLAHHVIAMWFIRCRLPFRKDFVPFITKGLRSNVLLSFDDTPEKDSFRARSTSLNERPKSRIQTSLTSASLGSADENSVAQADDSLKNLHLELTETCLDMMARYVFSNFTAVPKRSPVGEFLLAGGRTKTWLVGNKLVTVTTSVGTGTRSLLGLDSGELQSGPESSSSPGVHVRQTKEAPAKLESQAGQQVSRGARDRVRSMSGGHGLRVGALDVPASQFLGSATSPGPRTAPAAKPEKASAGTRVPVQEKTNLAAYVPLLTQGWAEILVRRPTGNTSWLMSLENPLSPFSSDINNMPLQELSNALMAAERFKEHRDTALYKSLSVPAASTAKPPPLPRSNTVASFSSLYQSSCQGQLHRSVSWADSAVVMEEGSPGEVPVLVEPPGLEDVEAALGMDRRTDAYSRSSSVSSQEEKSLHAEELVGRGIPIERVVSSEGGRPSVDLSFQPSQPLSKSSSSPELQTLQDILGDPGDKADVGRLSPEVKARSQSGTLDGESAAWSASGEDSRGQPEGPLPSSSPRSPSGLRPRGYTISDSAPSRRGKRVERDALKSRATASNAEKVPGINPSFVFLQLYHSPFFGDESNKPILLPNESQSFERSVQLLDQIPSYDTHKIAVLYVGEGQSNSELAILSNEHGSYRYTEFLTGLGRLIELKDCQPDKVYLGGLDVCGEDGQFTYCWHDDIMQAVFHIATLMPTKDVDKHRCDKKRHLGNDFVSIVYNDSGEDFKLGTIKGQFNFVHVIVTPLDYECNLVSLQCRKDMEGLVDTSVAKIVSDRNLPFVARQMALHANMASQVHHSRSNPTDIYPSKWIARLRHIKRLRQRICEEAAYSNPSLPLVHPPSHSKAPAQTPAEPTPGYEVGQRKRLISSVEDFTEFV

SEQ ID NO: 273738 - DNA, 5295 bp, Artificial Sequence
  derived and/or modified sequence
atggccaagcccaccagcaaggacagcggcctgaaggagaagttcaagatcctgctgggcctgggcacccccagacccaaccccagaagcgccgagggcaagcagaccgagttcatcatcaccgccgagatcctgagagagctgagcatggagtgcggcctgaacaacagaatcagaatgatcggccagatctgcgaggtggccaagaccaagaagttcgaggagcacgccgtggaggccctgtggaaggccgtggccgacctgctgcagcccgagagacccctggaggccagacacgccgtgctggccctgctgaaggccatcgtgcagggccagggcgagagactgggcgtgctgagagccctgttcttcaaggtgatcaaggactaccccagcaacgaggacctgcacgagagactggaggtgttcaaggccctgaccgacaacggcagacacatcacctacctggaggaggagctggccgacttcgtgctgcagtggatggacgtgggcctgagcagcgagttcctgctggtgctggtgaacctggtgaagttcaacagctgctacctggacgagtacatcgccagaatggtgcagatgatctgcctgctgtgcgtgagaaccgccagcagcgtggacatcgaggtgagcctgcaggtgctggacgccgtggtgtgctacaactgcctgcccgccgagagcctgcccctgttcatcgtgaccctgtgcagaaccatcaacgtgaaggagctgtgcgagccctgctggaagctgatgagaaacctgctgggcacccacctgggccacagcgccatctacaacatgtgccacctgatggaggacagagcctacatggaggacgcccccctgctgagaggcgccgtgttcttcgtgggcatggccctgtggggcgcccacagactgtacagcctgagaaacagccccaccagcgtgctgcccagcttctaccaggccatggcctgccccaacgaggtggtgagctacgagatcgtgctgagcatcaccagactgatcaagaagtacagaaaggagctgcaggtggtggcctgggacatcctgctgaacatcatcgagagactgctgcagcagctgcagaccctggacagccccgagctgagaaccatcgtgcacgacctgctgaccaccgtggaggagctgtgcgaccagaacgagttccacggcagccaggagagatacttcgagctggtggagagatgcgccgaccagagacccgagagcagcctgctgaacctgatcagctacagagcccagagcatccaccccgccaaggacggctggatccagaacctgcaggccctgatggagagattcttcagaagcgagagcagaggcgccgtgagaatcaaggtgctggacgtgctgagcttcgtgctgctgatcaacagacagttctacgaggaggagctgatcaacagcgtggtgatcagccagctgagccacatccccgaggacaaggaccaccaggtgagaaagctggccacccagctgctggtggacctggccgagggctgccacacccaccacttcaacagcctgctggacatcatcgagaaggtgatggccagaagcctgagccccccccccgagctggaggagagagacgtggccgcctacagcgccagcctggaggacgtgaagaccgccgtgctgggcctgctggtgatcctgcagaccaagctgtacaccctgcccgccagccacgccaccagagtgtacgagatgctggtgagccacatccagctgcactacaagcacagctacaccctgcccatcgccagcagcatcagactgcaggccttcgacttcctgctgctgctgagagccgacagcctgcacagactgggcctgcccaacaaggacggcgtggtgagattcagcccctactgcgtgtgcgactacatggagcccgagagaggcagcgagaagaagaccagcggccccctgagcccccccaccggcccccccggccccgcccccgccggccccgccgtgagactgggcagcgtgccctacagcctgctgttcagagtgctgctgcagtgcctgaagcaggagagcgactggaaggtgctgaagctggtgctgggcagactgcccgagagcctgagatacaaggtgctgatcttcaccagcccctgcagcgtggaccagctgtgcagcgccctgtgcagcatgctgagcggccccaagaccctggagagactgagaggcgcccccgagggcttcagcagaaccgacctgcacctggccgtggtgcccgtgctgaccgccctgatcagctaccacaactacctggacaagaccaagcagagagagatggtgtactgcctggagcagggcctgatccacagatgcgccagccagtgcgtggtggccctgagcatctgcagcgtggagatgcccgacatcatcatcaaggccctgcccgtgctggtggtgaagctgacccacatcagcgccaccgccagcatggccgtgcccctgctggagttcctgagcaccctggccagactgccccacctgtacagaaacttcgccgccgagcagtacgccagcgtgttcgccatcagcctgccctacaccaaccccagcaagttcaaccagtacatcgtgtgcctggcccaccacgtgatcgccatgtggttcatcagatgcagactgcccttcagaaaggacttcgtgcccttcatcaccaagggcctgagaagcaacgtgctgctgagcttcgacgacacccccgagaaggacagcttcagagccagaagcaccagcctgaacgagagacccaagagcagaatccagaccagcctgaccagcgccagcctgggcagcgccgacgagaacagcgtggcccaggccgacgacagcctgaagaacctgcacctggagctgaccgagacctgcctggacatgatggccagatacgtgttcagcaacttcaccgccgtgcccaagagaagccccgtgggcgagttcctgctggccggcggcagaaccaagacctggctggtgggcaacaagctggtgaccgtgaccaccagcgtgggcaccggcaccagaagcctgctgggcctggacagcggcgagctgcagagcggccccgagagcagcagcagccccggcgtgcacgtgagacagaccaaggaggcccccgccaagctggagagccaggccggccagcaggtgagcagaggcgccagagacagagtgagaagcatgagcggcggccacggcctgagagtgggcgccctggacgtgcccgccagccagttcctgggcagcgccaccagccccggccccagaaccgcccccgccgccaagcccgagaaggccagcgccggcaccagagtgcccgtgcaggagaagaccaacctggccgcctacgtgcccctgctgacccagggctgggccgagatcctggtgagaagacccaccggcaacaccagctggctgatgagcctggagaaccccctgagccccttcagcagcgacatcaacaacatgcccctgcaggagctgagcaacgccctgatggccgccgagagattcaaggagcacagagacaccgccctgtacaagagcctgagcgtgcccgccgccagcaccgccaagcccccccccctgcccagaagcaacaccgtggccagcttcagcagcctgtaccagagcagctgccagggccagctgcacagaagcgtgagctgggccgacagcgccgtggtgatggaggagggcagccccggcgaggtgcccgtgctggtggagccccccggcctggaggacgtggaggccgccctgggcatggacagaagaaccgacgcctacagcagaagcagcagcgtgagcagccaggaggagaagagcctgcacgccgaggagctggtgggcagaggcatccccatcgagagagtggtgagcagcgagggcggcagacccagcgtggacctgagcttccagcccagccagcccctgagcaagagcagcagcagccccgagctgcagaccctgcaggacatcctgggcgaccccggcgacaaggccgacgtgggcagactgagccccgaggtgaaggccagaagccagagcggcaccctggacggcgagagcgccgcctggagcgccagcggcgaggacagcagaggccagcccgagggccccctgcccagcagcagccccagaagccccagcggcctgagacccagaggctacaccatcagcgacagcgcccccagcagaagaggcaagagagtggagagagacgccctgaagagcagagccaccgccagcaacgccgagaaggtgcccggcatcaaccccagcttcgtgttcctgcagctgtaccacagccccttcttcggcgacgagagcaacaagcccatcctgctgcccaacgagagccagagcttcgagagaagcgtgcagctgctggaccagatccccagctacgacacccacaagatcgccgtgctgtacgtgggcgagggccagagcaacagcgagctggccatcctgagcaacgagcacggcagctacagatacaccgagttcctgaccggcctgggcagactgatcgagctgaaggactgccagcccgacaaggtgtacctgggcggcctggacgtgtgcggcgaggacggccagttcacctactgctggcacgacgacatcatgcaggccgtgttccacatcgccaccctgatgcccaccaaggacgtggacaagcacagatgcgacaagaagagacacctgggcaacgacttcgtgagcatcgtgtacaacgacagcggcgaggacttcaagctgggcaccatcaagggccagttcaacttcgtgcacgtgatcgtgacccccctggactacgagtgcaacctggtgagcctgcagtgcagaaaggacatggagggcctggtggacaccagcgtggccaagatcgtgagcgacagaaacctgcccttcgtggccagacagatggccctgcacgccaacatggccagccaggtgcaccacagcagaagcaaccccaccgacatctaccccagcaagtggatcgccagactgagacacatcaagagactgagacagagaatctgcgaggaggccgcctacagcaaccccagcctgcccctggtgcacccccccagccacagcaaggcccccgcccagacccccgccgagcccacccccggctacgaggtgggccagagaaagagactgatcagcagcgtggaggacttcaccgagttcgtgtag
